United States Patent Application Publication US 2011/0182862 A1 - sequence listing, part 2

SEQ ID NO: 1486 - DNA, 5241 bp, Muscodor strobelii
  misc_feature: SGI EST ID NO. CUFF.5488.1
  misc_feature: Variant of the nucleotide sequence at SEQ ID NO 1484
ctcagttaagcttaacctctcctaggattatgatgcttttgtaaaggttcagtagcgaggtatgaaggaaataaaatggaggctatatccttctcttgcctgcctctcttctcctacgtgtagttctacctacccttaaaccactctgtgttgtcgttctttaatcggccagtcaggcctatacattcgttattacatcactcgtttcttataaacatcatgcgtttcaatcttatccttggcgctgcggcgcttgtttctgcatcaccagcaccgcaggcccttgattttggggctgtctatgatgcacctgctcctcttctccaaggtcctcctgtcggtgcatcgtcacagacaggagtgtacgacaagtcggcagtgttagcttctattgctgctgaggccgagtctctggacaagcgccattatcctgttaatcattacacaacaaccaagaagggtggatatcccgtccagcaaacctcgaagacgtcgaccacttcacatacgtctagcactacgaaagggtatccggtccagcaaacctcgaccactacacatgcatccagcactacaaaaggataccccgttcaatcgacctcaaccacttcatatgcaactagccccacacaagggtatcctcaaggcaatggaggttacccacaaggtaacgggtatcctcacggtaatgaaggctacccccatggaaacggaggctatcctcatggaaatgaaggctatccccatggtaatgaaggttatcctcacggcaatggaggctatcctcacggcaatggaggctatcctcacggcaatggaggctatcctcatggtaatggtggacattaccacacgaagacccatcagggaggttatccaactgagggccagggatacccggggcaacagacctcgacgacctcaactacttcacatgcgactagcaccacaaaagggtatccagtccagcaaacctcgaagacctcgactacttcctctacaactagcagtacaaaagggtatcccgtgcaacagacctcgaagacgtcaaccactacacatgcaacgagcaccacgaaaggatatccagctacatccacgtacactggcattgtcccagcgacttgcactcctgtcagctggacaaacacgaatgctttcactactgccaccgcctgtcctactccatttgaggtcggaacctattgtggattcatcaaccccgaggatccatgtgctcctcagccagatggttacgggccaaaggtcgttcccgatactcctgaggctttccaagccagtaaggagctcaataaccttgctctgtcggctgctactcccaagggctacactcagacctttaaggatctcaatgctgcggtgaatgccaacacatatctcggccttcacaccctcaagagctacgacgtgtctagctgtgctgctgcttgtgactcgaccgatctctgcaccgccttcaacatctacatcgagcgtgaccccgcctggaaccccgagcaatgctcttgcaaattaccatcctccatcaccaacttcaagtgcactctctggggctcaggcgtagactctgctgcggccacgaaccacggccaaagccgaggtgacttcgaggtcgtgatcacgggatccaacggttactccaaggcgagcaattcctaccccaacactccgcctaactggacccagccccagcaatgcagtggtgtccacgaccatccgaagaacaccatcggaagccacgccttcaagggaccctttgatgtctctatctgcgcagctctcgccgaccaatacaacaagctccggggcggcaagcgcgaatgcaagttcttcaacgccttcatgttgaaggagaacggcatcccgatcggtacatactgcaagctgttcgaccgcaagtacgaacccagtgaggtctcttaccctcacggattctcgtacggcggaaagagctggggctacgagacatcctacagttactgcaagaaataaatcagcagtcctgtcggcgccggagatgagaaggaacgcggaggataatgtttagtatatagtgtaattaatgtaatactgactgtcacctgtggatataatctgaaaataatacttaaggctgcattgctacttgtttaatttggtcgtcaaataggacccgtgatcctacacacgtgacagtaaagacataagataactttattttgacaccacgtgtgtccaatatgcggatggaaggaagtatggtaaaaagggcagaagtgatatctactggcaggagctcccaaacaaggcggtacgcaagaaatttagcctcaccatcgatcattatgctaccaaataaaactgattaaaataaataaatcttcatgcgccaaatttgagttatgtttcttataagatcatactgttgcactcaaaagataggctagcaggaaggaaagagcattgagttagatcaagccaacaccgcagaccgcagcttaacccagccaagagaatcagcatgtacttacagacggtggcgatagtgctagagttcacatgaacagtaacgaaaataagtttgttcttaaacctgatttattggtgctacaagagattcatcaagaccagtgattttgttggatgacatatgcataaccctcagcaaatgcgccggaaacaactgttgctctccaaatgctcatctcctccgtgtgctcaaacctcctcggccattttcttgcgcatagaaacacacggcacccatatacactggatctcgccattagtcaccagagatgtaatgccaaatgaggcagtttgtgaggaagccaacatttcaaccaaccctgttttggaagacagcggttcccacaaagtgcagaaaacagaaacagagaatctacaagtaaaccagacgcctcttccaaccagcccaaaaacgccgtttgtatgcatgcatttgtatcgtggattccgtcatacacagtcgtcatcataagtagcaatccgcgaacgacgaacagttggatacgcaagaaagcactaagagcgatggggaacgggatcgcttctccgaaaagaatgggttagttagcgatgttctacatcgcagagaccttgcggacggatgactgagcaccggacgatgtgctgacgcttccgacacgaccgcttgtcttgcgcacgccggaggattccttgctacgggaagactcgtgagatcgcttgctggaccggaccttggtcagcacgccagatgcactggcagaacgactgggagaactggtgacgctgtctgccagagtcttgggccgtgcgctgccgatgttctcagcatcgttagaggcgtcgttgtcaatgacttgatagatggtagttgttgtagtatgactataggagcgtgtgctctcgcttctagctggagactgggatgtcttgcgatgggagcgcatgcggagcatgacctcttcctcggattccaggtcattggacttgcgatgaactgagattgtctccgttgcgccctcgacgccttcttcctccttgacggtggtgtgctgaatttgactgcgctgataggggtgatgacgatccgcacgacttgtctttctgggttgacctggcgttggtgccggcagatagtcctcttgagatccagcattgcgtcgctcttgatccatctcaccaagaggtgtacgatttgagggagtccggctcggtggtgttgacgtgtgagtgtttcggccaagcgtagctttctgcatagcccggataggcgtgctaggctgtgggtttgccgcaagctcctttctcagcttccgctctattctctcctcgatccaccactctcggaatacaccctggttgatgtgcagccaatgttgttgaggccctacgaccatgcctggccgcatgaaccgcatgaaggcaatgatttcatttgccgtgaaaccgtgtcggtagatcagataggctccaatgagacaacccgttcgccccagaccagccttgcagtgaactgctatgcccttcttcttgactgtgatggtctcatgtgcgagtctgataaacttcttgacagtgctgaggggagggcaggtaccatcttcgaagatcatgtccaggtgttgaatgcccatggcttcgaagaaggatggagaatagagaggagagttgaggcgaaccaccagtccgatgttacgctccgtgaaatgttccaggacatttttgaacgactgaggaagatcgtcatgaaggtgtatatcggcaatagtcctggggagggaggcaaattctggagatgattcggcaatgcgggcaacagggctgtgcataggggaagcaaaggctaggaagtgaggagtgatccagttgaaatcgccatgctcaaccctctcgaacttttcatactcgtccaagtcgaagttatccaacacacaaacaccttcttctttggctttccagacgccgtacacgacatcctggactgtgagaccataatcggcctggctatagccggcgtcacggaaaggcatgaaaggagggtcgatctgagcgatgggggcgagggctaggtgaggcggccatgactggatcagaaccatgtagcatgcaagcatgcaagcagcattggcccggcctgaagtcagctgttagtccctgggctctttgagaaaggtggtttagtgaccgggaacaacatactccggggatccgcgtggctccagaagacaatgggtctggactggttctcctttgcgccgagaatatcgtgaaactgcagagcgaagcggtacaggtggccgatatgcagcggaccaaagtcgtggtggaaggcgttgtagaggagggtctcgtcaacggagaagtagtagggcgcctgtcgtgcagtttttgccggagatgcgttttctaatgcagctcgcgagcgcttgctgggagacgaccgtgacagaggttggggatacgggaagacagtgtcggcggtcgggggatgagagtaggaagcaagatacaatcggtctgcaaaggtcagcagtgtcacggggagattgaagccgggcggcagaagcgggtggaagacgatgctggtggttgaggacttgggagagacagcgtcatcaggcgccttgcctcttgccatctggtccagcacagcaaggggaatcgagggaatgtaggagttaaatatgcgatggtagaagataacagatgtgctgcacaagagcaggcggacgg

SEQ ID NO: 1487 - DNA, 663 bp, Muscodor strobelii
  misc_feature: SGI cDNA ID NO. 560098
  misc_feature: Encodes the peptide sequence at SEQ ID NO 1488
atgcagaaagctacgcttggccgaaacactcacacgtcaacaccaccgagccggactccctcaaatcgtacacctcttggtgagatggatcaagagcgacgcaatgctggatctcaagaggactatctgccggcaccaacgccaggtcaacccagaaagacaagtcgtgcggatcgtcatcacccctatcagcgcagtcaaattcagcacaccaccgtcaaggaggaagaaggcgtcgagggcgcaacggagacaatctcagttcatcgcaagtccaatgacctggaatccgaggaagaggtcatgctccgcatgcgctcccatcgcaagacatcccagtctccagctagaagcgagagcacacgctcctatagtcatactacaacaactaccatctatcaagtcattgacaacgacgcctctaacgatgctgagaacatcggcagcgcacggcccaagactctggcagacagcgtcaccagttctcccagtcgttctgccagtgcatctggcgtgctgaccaaggtccggtccagcaagcgatctcacgagtcttcccgtagcaaggaatcctccggcgtgcgcaagacaagcggtcgtgtcggaagcgtcagcacatcgtccggtgctcagtcatccgtccgcaaggtctctgcgatgtag

SEQ ID NO: 1488 - protein, 220 aa, Muscodor strobelii
  misc_feature: SGI Peptide ID NO. 560098
  misc_feature (1)..(218): NCBI GI: 46107320 Blast Desc: FG00543.1 [Gibberella zeae PH-1]
  misc_feature (1)..(218): NCBI GI: 261357462 Blast Desc: tyrosine-protein phosphatase CDC14 [Verticillium albo-atrum VaMs.102]
  misc_feature (2)..(220): NCBI GI: 156035966 Blast Desc: SS1G_12669 [Sclerotinia sclerotiorum 1980] gi|154698077|gb|EDN97815.1| SS1G_12669 [Sclerotinia sclerotiorum 1980]
  misc_feature (14)..(220): NCBI GI: 154296234 Blast Desc: BC1G_12944 [Botryotinia fuckeliana B05.10] gi|150843508|gb|EDN18701.1| BC1G_12944 [Botryotinia fuckeliana B05.10]
  misc_feature (1)..(219): NCBI GI: 116182494 Blast Desc: CHGG_01875 [Chaetomium globosum CBS 148.51] gi|88186172|gb|EAQ93640.1| CHGG_01875 [Chaetomium globosum CBS 148.51]
  misc_feature (1)..(220): NCBI GI: 145602959 Blast Desc: MGG_04637 [Magnaporthe grisea 70-15] gi|145011305|gb|EDJ95961.1| MGG_04637 [Magnaporthe grisea 70-15]
  misc_feature (1)..(220): NCBI GI: 85111022 Blast Desc: tyrosine-protein phosphatase CDC14 [Neurospora crassa OR74A] gi|28925461|gb|EAA34502.1| tyrosine-protein phosphatase CDC14 [Neurospora crassa OR74A]
  misc_feature (1)..(219): NCBI GI: 171695100 Blast Desc: protein product [Podospora anserina] gi|170947792|emb|CAP59955.1| protein product [Podospora anserina]
  misc_feature (9)..(203): NCBI GI: 121705916 Blast Desc: protein-tyrosine phosphatase, [Aspergillus clavatus NRRL 1] gi|119399367|gb|EAW09795.1| protein-tyrosine phosphatase, [Aspergillus clavatus NRRL 1]
  misc_feature (1)..(203): NCBI GI: 226293085 Blast Desc: tyrosine-protein phosphatase CDC14 [Paracoccidioides brasiliensis Pb18]
MQKATLGRNTHTSTPPSRTPSNRTPLGEMDQERRNAGSQEDYLPAPTPGQPRKTSRADRHHPYQRSQIQHTTVKEEEGVEGATETISVHRKSNDLESEEEVMLRMRSHRKTSQSPARSESTRSYSHTTTTTIYQVIDNDASNDAENIGSARPKTLADSVTSSPSRSASASGVLTKVRSSKRSHESSRSKESSGVRKTSGRVGSVSTSSGAQSSVRKVSAM

SEQ ID NO: 1489 - DNA, 2019 bp, Muscodor strobelii
  misc_feature: SGI cDNA ID NO. 560099
  misc_feature: Encodes the peptide sequence at SEQ ID NO 1490
atgccgtcctccaagacttccggctcggcgcaaatcattgagtacatcccaggcaaggcgcctgatgacgctgtctctcccaagtcctcaaccaccagcatcgtcttccacccgcttctgccgcccggcttcaatctccccgtgacactgctgacctttgcagaccgattgtatcttgcttcctactctcatcccccgaccgccgacactgtcttcccgtatccccaacctctgtcacggtcgtctcccagcaagcgctcgcgagctgcattagaaaacgcatctccggcaaaaactgcacgacaggcgccctactacttctccgttgacgagaccctcctctacaacgccttccaccacgactttggtccgctgcatatcggccacctgtaccgcttcgctctgcagtttcacgatattctcggcgcaaaggagaaccagtccagacccattgtcttctggagccacgcggatccccggagccgggccaatgctgcttgcatgcttgcatgctacatggttctgatccagtcatggccgcctcacctagccctcgcccccatcgctcagatcgaccctcctttcatgcctttccgtgacgccggctatagccaggccgattatggtctcacagtccaggatgtcgtgtacggcgtctggaaagccaaagaagaaggtgtttgtgtgttggataacttcgacttggacgagtatgaaaagttcgagagggttgagcatggcgatttcaactggatcactcctcacttcctagcctttgcttcccctatgcacagccctgttgcccgcattgccgaatcatctccagaatttgcctccctccccaggactattgccgatatacaccttcatgacgatcttcctcagtcgttcaaaaatgtcctggaacatttcacggagcgtaacatcggactggtggttcgcctcaactctcctctctattctccatccttcttcgaagccatgggcattcaacacctggacatgatcttcgaagatggtacctgccctcccctcagcactgtcaagaagtttatcagactcgcacatgagaccatcacagtcaagaagaagggcatagcagttcactgcaaggctggtctggggcgaacgggttgtctcattggagcctatctgatctaccgacacggtttcacggcaaatgaaatcattgccttcatgcggttcatgcggccaggcatggtcgtagggcctcaacaacattggctgcacatcaaccagggtgtattccgagagtggtggatcgaggagagaatagagcggaagctgagaaaggagcttgcggcaaacccacagcctagcacgcctatccgggctatgcagaaagctacgcttggccgaaacactcacacgtcaacaccaccgagccggactccctcaaatcgtacacctcttggtgagatggatcaagagcgacgcaatgctggatctcaagaggactatctgccggcaccaacgccaggtcaacccagaaagacaagtcgtgcggatcgtcatcacccctatcagcgcagtcaaattcagcacaccaccgtcaaggaggaagaaggcgtcgagggcgcaacggagacaatctcagttcatcgcaagtccaatgacctggaatccgaggaagaggtcatgctccgcatgcgctcccatcgcaagacatcccagtctccagctagaagcgagagcacacgctcctatagtcatactacaacaactaccatctatcaagtcattgacaacgacgcctctaacgatgctgagaacatcggcagcgcacggcccaagactctggcagacagcgtcaccagttctcccagtcgttctgccagtgcatctggcgtgctgaccaaggtccggtccagcaagcgatctcacgagtcttcccgtagcaaggaatcctccggcgtgcgcaagacaagcggtcgtgtcggaagcgtcagcacatcgtccggtgctcagtcatccgtccgcaaggtctctgcgatgtag

SEQ ID NO: 1490 - protein, 672 aa, Muscodor strobelii
  misc_feature: SGI Peptide ID NO. 560099
  misc_feature (288)..(420): Pfam Id: PF00782 Pfam Desc: Dual specificity phosphatase, catalytic domain
  misc_feature (319)..(420): Pfam Id: PF00782 Pfam Desc: Dual specificity phosphatase, catalytic domain
  misc_feature (350)..(408): Pfam Id: PF00102 Pfam Desc: Protein-tyrosine phosphatase
  misc_feature (45)..(670): NCBI GI: 261357462 Blast Desc: tyrosine-protein phosphatase CDC14 [Verticillium albo-atrum VaMs.102]
  misc_feature (37)..(671): NCBI GI: 46107320 Blast Desc: FG00543.1 [Gibberella zeae PH-1]
  misc_feature (45)..(654): NCBI GI: 256734517 Blast Desc: [Nectria haematococca mpVI 77-13-4]
  misc_feature (45)..(672): NCBI GI: 145602959 Blast Desc: MGG_04637 [Magnaporthe grisea 70-15] gi|145011305|gb|EDJ95961.1| MGG_04637 [Magnaporthe grisea 70-15]
  misc_feature (45)..(671): NCBI GI: 116182494 Blast Desc: CHGG_01875 [Chaetomium globosum CBS 148.51] gi|88186172|gb|EAQ93640.1| CHGG_01875 [Chaetomium globosum CBS 148.51]
  misc_feature (34)..(671): NCBI GI: 171695100 Blast Desc: protein product [Podospora anserina] gi|170947792|emb|CAP59955.1| protein product [Podospora anserina]
  misc_feature (55)..(672): NCBI GI: 154296234 Blast Desc: BC1G_12944 [Botryotinia fuckeliana B05.10] gi|150843508|gb|EDN18701.1| BC1G_12944 [Botryotinia fuckeliana B05.10]
  misc_feature (60)..(672): NCBI GI: 156035966 Blast Desc: SS1G_12669 [Sclerotinia sclerotiorum 1980] gi|154698077|gb|EDN97815.1| SS1G_12669 [Sclerotinia sclerotiorum 1980]
  misc_feature (45)..(672): NCBI GI: 85111022 Blast Desc: tyrosine-protein phosphatase CDC14 [Neurospora crassa OR74A] gi|28925461|gb|EAA34502.1| tyrosine-protein phosphatase CDC14 [Neurospora crassa OR74A]
  misc_feature (47)..(517): NCBI GI: 154296236 Blast Desc: BC1G_12945 [Botryotinia fuckeliana B05.10] gi|150843509|gb|EDN18702.1| BC1G_12945 [Botryotinia fuckeliana B05.10]
MPSSKTSGSAQIIEYIPGKAPDDAVSPKSSTTSIVFHPLLPPGFNLPVTLLTFADRLYLASYSHPPTADTVFPYPQPLSRSSPSKRSRAALENASPAKTARQAPYYFSVDETLLYNAFHHDFGPLHIGHLYRFALQFHDILGAKENQSRPIVFWSHADPRSRANAACMLACYMVLIQSWPPHLALAPIAQIDPPFMPFRDAGYSQADYGLTVQDVVYGVWKAKEEGVCVLDNFDLDEYEKFERVEHGDFNWITPHFLAFASPMHSPVARIAESSPEFASLPRTIADIHLHDDLPQSFKNVLEHFTERNIGLVVRLNSPLYSPSFFEAMGIQHLDMIFEDGTCPPLSTVKKFIRLAHETITVKKKGIAVHCKAGLGRTGCLIGAYLIYRHGFTANEIIAFMRFMRPGMVVGPQQHWLHINQGVFREWWIEERIERKLRKELAANPQPSTPIRAMQKATLGRNTHTSTPPSRTPSNRTPLGEMDQERRNAGSQEDYLPAPTPGQPRKTSRADRHHPYQRSQIQHTTVKEEEGVEGATETISVHRKSNDLESEEEVMLRMRSHRKTSQSPARSESTRSYSHTTTTTIYQVIDNDASNDAENIGSARPKTLADSVTSSPSRSASASGVLTKVRSSKRSHESSRSKESSGVRKTSGRVGSVSTSSGAQSSVRKVSAM

SEQ ID NO: 1491 - DNA, 327 bp, Muscodor strobelii
  misc_feature: SGI cDNA ID NO. 560100
  misc_feature: Elevated expression when VOC is produced
  misc_feature: Encodes the peptide sequence at SEQ ID NO 1492
atggacgcagatttcccctgtgcaatgtctatacaagtcccttttccaactaagagactggcctcaaccgctttgcgtgctctgcaggtcgataaagagttgtctcccttggtctcgcgaactttctcactcggtgtatcagagcaggcgcctgttgacacgacaccggacacggagacaaatatcttgtgtgtcgagtacagagccacaactaacaggatgctgcgcgtatcagtcaactcattcatggagagcttaaatctcattcttgagatcatggaagagctagacgaggatgttctggccgcgggaactcccgcatcctga

SEQ ID NO: 1492 - protein, 108 aa, Muscodor strobelii
  misc_feature: SGI Peptide ID NO. 560100
  misc_feature (8)..(97): Pfam Id: PF09341 Pfam Desc: Transcription factor Pcc1
  misc_feature (2)..(101): NCBI GI: 261357461 Blast Desc: conserved [Verticillium albo-atrum VaMs.102]
  misc_feature (2)..(103): NCBI GI: 67524775 Blast Desc: AN2845.2 [Aspergillus nidulans FGSC A4] gi|40744240|gb|EAA63416.1| AN2845.2 [Aspergillus nidulans FGSC A4] gi|259486220|tpe|CBF83886.1| TPA: conserved [Aspergillus FGSC
  misc_feature (2)..(103): NCBI GI: 255951210 Blast Desc: Pc22g24840 [Penicillium chrysogenum Wisconsin 54-1255] gi|211593389|emb|CAP99772.1| Pc22g24840 [Penicillium chrysogenum Wisconsin 54-1255]
  misc_feature (3)..(107): NCBI GI: 39945312 Blast Desc: MGG_04638 [Magnaporthe grisea 70-15] gi|145011304|gb|EDJ95960.1| MGG_04638 [Magnaporthe grisea 70-15]
  misc_feature (1)..(106): NCBI GI: 238840537 Blast Desc: conserved [Microsporum canis CBS 113480]
  misc_feature (2)..(101): NCBI GI: 146323450 Blast Desc: conserved [Aspergillus fumigatus Af293] gi|129558284|gb|EBA27459.1| conserved [Aspergillus fumigatus Af293]
  misc_feature (2)..(101): NCBI GI: 159127410 Blast Desc: conserved [Aspergillus fumigatus A1163]
  misc_feature (1)..(101): NCBI GI: 212545482 Blast Desc: conserved [Penicillium marneffei ATCC 18224] gi|210065864|gb|EEA19958.1| conserved [Penicillium marneffei ATCC 18224]
  misc_feature (1)..(103): NCBI GI: 119175622 Blast Desc: CIMG_09625 [Coccidioides immitis RS]
  misc_feature (3)..(101): NCBI GI: 121705920 Blast Desc: conserved [Aspergillus clavatus NRRL 1] gi|119399369|gb|EAW09797.1| conserved [Aspergillus clavatus NRRL 1]
  misc_feature: Useful for introducing or modulating the production of volatile compounds
MDADFPCAMSIQVPFPTKRLASTALRALQVDKELSPLVSRTFSLGVSEQAPVDTTPDTETNILCVEYRATTNRMLRVSVNSFMESLNLILEIMEELDEDVLAAGTPAS

SEQ ID NO: 1493 - DNA, 1081 bp, Muscodor strobelii
  misc_feature: SGI EST ID NO. CUFF.3899.0
  misc_feature: Variant of the nucleotide sequence at SEQ ID NO 1491
gggcgaaagtgacctcaactagcagcctacttctgacacatcccaagagaaattgttccaacagcagatcaaattgaacagtcaatcatctgagatcatttgctattgtcattgtgataaccatggacgcagatttcccctgtgcaatgtctatacaagtcccttttccaactaagagactggcctcaaccgctttgcgtgctctgcaggtcgataaagagttgtctcccttggtctcgcgaactttctcactcggtgtatcagagcaggcgcctgttgacacgacaccggacacggagacaaatatcttgtgtgtcgagtacagagccacaactaacaggatgctgcgcgtatcagtcaactcattcatggagagcttaaatctcattcttgagatcatggaagagctagacgaggatgttctggccgcgggaactcccgcatcctgagttgtgcaattttatgatgcagccgatgttactcgagagcacagcagttccccgcactctggaatgcgaagatgatgtctcagcatctctgggtctactgtttactgcgtgatgtcatatttgacgttttgtcctatgcgccaacagaaagactttgaaggtcgcgccagacaacaatgcgaaacgcgctacggttcgccgcattccaatacctcacagatcaactgggcgacgcttggtagttcacatctatgtcgcttcgacactgggtctcagcatgaaaatggcacagtgataacagactatttgaaactcacaaggacgggcttggttggtgagattgcctcctaagtgagctgtttctcggtttaatcagtcgtgagatgctgcctcgaattcagtttcgtagttgagatccgccggcttaacttaaacgtgactagactttagactcataatacttgataagccatccattaatgcaaggagatacgtctgtgtcagaggatgaaccacgattctcctgagcactaagtctgagcgagacaatgagagaaggacgttggctctggatctcattgatcgttgagttagaagacctaagctatatcaaaatatgttttcactttctg

SEQ ID NO: 1494 - DNA, 1680 bp, Muscodor strobelii
  misc_feature: SGI cDNA ID NO. 560101
  misc_feature: Reduced expression when VOC is produced
  misc_feature: Encodes the peptide sequence at SEQ ID NO 1495
atgtctctgccgcgagttgcatctctagaaacattccttagcctaccttctgaaggcgagcgctctcggagaggatcaatcacatctaccactccttctattagcgctggagcgcgtagattgagctttaaccctctccccgagtcttggaatcccgttatcgccaaagatagcgaccatttcgcgcagaccattggcgcttttgaggtacctcaatggaaacgaattactcaaattctttgtgcggtaatatactgcctatttgcagcaggtgtcgtttttggatatgccgcattgaaacctatcttgaagaaagaaggtgcttaccaagatgcttgtgatggcgaagatacatgtgtagagattcgcctgaatctcatgtttacagtagccgccgtggctactaatgtggccgcgctccccgtcggagccatactagatcactacggaccgcgcgtttgcggcattcttggtgccatgtttcttgcagttggtgccgtgttcatggcgcttgagaagagaatgccattcgatgggctccttccgggttacctgtttctagctctcggagggccgttcacgtatatcgcctccttccaactctcgaatgcatttccacagcactctggcttgatattagctttacttaccggcgcctttgatgcctctagtgccctcttccttctctatcgtatcattttccagaacactaacggtgctttcaaccttgaaaagttcttccttgcctatctagtcgttcctgtagtgatcgtcatcatgcagttcgcgatacttcccaaacagtcatacaagaccgtaggtgagatgatcgttgatattgagggcacaagtcctggcaatcatatcagcccaagcgcaatcgacgaccaagtcgacgaggagactgcgctcttgcaagaagagcagagggagcaacatcaaaccatcgtgaacgggatcgatgagcttctaggagacgaaacagccgataagcaggcgcgtcgcgaacaagtaacgaacaaccgtagtggtgtctggggtgtcatgcacgaatatactgccgcgcagcaaatccgttcaccgtggttcattctgatctgcctgtttactgttgttcagatgactcggatcaactacttcgtggctacaatccgacctcagtatactgcaatcttcgatatcgacaaagctaccgaaatcaattatttcttcgacgtcgccttgccggtgggcggtatcctttccatcccatttattggcattatccttgaccacacaagtaccgttatggttctctccacccttgtcacggtagcgactgccattggtattctcggcatattaccatacgtctgggctgcatacgccaatatctgtctctttgtgctgtatcgtccgttttattatacagccgtcagcgactacagcgcaaaggtgttcgggtttcgtacctttggtaccgtctatggtactatcatctgtttctcaggcctgcttaatctcagccaaagtggcctggattaccttttccacgagacgttccgtggcaacccagtccccgtgaacttgatcttgcttagtctcggtctggtaataggcatctgccttgttctcttcgtgggattcaaagcacggatgttgagaattaagcgggaagctggatataccaattgggaataa

SEQ ID NO: 1495 - protein, 559 aa, Muscodor strobelii
  misc_feature: SGI Peptide ID NO. 560101
  misc_feature (1)..(550): NCBI GI: 171696088 Blast Desc: protein product [Podospora anserina] gi|170948286|emb|CAP60450.1| protein product [Podospora anserina]
  misc_feature (1)..(557): NCBI GI: 256735009 Blast Desc: [Nectria haematococca mpVI 77-13-4]
  misc_feature (1)..(557): NCBI GI: 46108940 Blast Desc: FG01352.1 [Gibberella zeae PH-1]
  misc_feature (1)..(518): NCBI GI: 116181766 Blast Desc: CHGG_01511 [Chaetomium globosum CBS 148.51] gi|88185808|gb|EAQ93276.1| CHGG_01511 [Chaetomium globosum CBS 148.51]
  misc_feature (84)..(550): NCBI GI: 164427711 Blast Desc: NCU10987 [Neurospora crassa OR74A] gi|157071854|gb|EDO65311.1| conserved [Neurospora crassa OR74A]
  misc_feature (1)..(548): NCBI GI: 154301155 Blast Desc: BC1G_10550 [Botryotinia fuckeliana B05.10] gi|150856298|gb|EDN31490.1| BC1G_10550 [Botryotinia fuckeliana B05.10]
  misc_feature (1)..(553): NCBI GI: 156057009 Blast Desc: SS1G_04235 [Sclerotinia sclerotiorum 1980] gi|154702021|gb|EDO01760.1| SS1G_04235 [Sclerotinia sclerotiorum 1980]
  misc_feature (29)..(548): NCBI GI: 189209505 Blast Desc: conserved [Pyrenophora tritici-repentis Pt-1C-BFP] gi|187977178|gb|EDU43804.1| conserved [Pyrenophora tritici-repentis Pt-1C-BFP]
  misc_feature (29)..(552): NCBI GI: 169595386 Blast Desc: SNOG_00431 [Phaeosphaeria nodorum SN15] gi|160701087|gb|EAT91926.2| SNOG_00431 [Phaeosphaeria nodorum SN15]
  misc_feature (22)..(553): NCBI GI: 67904306 Blast Desc: AN9140.2 [Aspergillus nidulans FGSC A4] gi|40742783|gb|EAA61973.1| AN9140.2 [Aspergillus nidulans FGSC A4] gi|259485442|tpe|CBF82467.1| TPA: MFS transporter Fmp42, FGSC
  misc_feature: Useful for introducing or modulating the production of volatile compounds
MSLPRVASLETFLSLPSEGERSRRGSITSTTPSISAGARRLSFNPLPESWNPVIAKDSDHFAQTIGAFEVPQWKRITQILCAVIYCLFAAGVVFGYAALKPILKKEGAYQDACDGEDTCVEIRLNLMFTVAAVATNVAALPVGAILDHYGPRVCGILGAMFLAVGAVFMALEKRMPFDGLLPGYLFLALGGPFTYIASFQLSNAFPQHSGLILALLTGAFDASSALFLLYRIIFQNTNGAFNLEKFFLAYLVVPVVIVIMQFAILPKQSYKTVGEMIVDIEGTSPGNHISPSAIDDQVDEETALLQEEQREQHQTIVNGIDELLGDETADKQARREQVTNNRSGVWGVMHEYTAAQQIRSPWFILICLFTVVQMTRINYFVATIRPQYTAIFDIDKATEINYFFDVALPVGGILSIPFIGIILDHTSTVMVLSTLVTVATAIGILGILPYVWAAYANICLFVLYRPFYYTAVSDYSAKVFGFRTFGTVYGTIICFSGLLNLSQSGLDYLFHETFRGNPVPVNLILLSLGLVIGICLVLFVGFKARMLRIKREAGYTNWE

SEQ ID NO: 1496 - DNA, 1293 bp, Muscodor strobelii
  misc_feature: SGI cDNA ID NO. 560102
  misc_feature: Encodes the peptide sequence at SEQ ID NO 1497
atgaaggcagttacactaaatctcgcccttgcggcgacgcttgcttcgggagccattgcccaacctcaccagcaccatggccaccaggcttatcacgcaaagcgggacgagctgcgcaaacgtgaggttgtcaccacctacgtccctgccacgactacccagtacatgcttggtactcagaaagtcagtcccgaggaggcacaagccggcattgacaagggactgtacgtggtcgttggtgagagcacaccgaccttcacccctccggctcccaagcccaccagctccaaagatgccggagtcttcatcgaggaggctacttcgtcctctacaacgtccactcccaccccgacacctacgacttcgtcgacctcatctgcagagcccactacatcatctgtctcacctgcagagaccaagcctaccagcagcagcagctctggtgctaccgggatcgacgccgagttcccaagtggagaaattgattgcaaggtattcccggaacagtacggcgctcttcgactcgactatcttggctatggtggtttcagtggtttgcagtacactcccaattttggctcgcttctcgactcggttatcagctttattgaaaccggtgttgccaagccaagcggccagactggattctattcgtacgcctgccctgcgggccatgtcaagacgcaatggccaactgctcagggtaatactggtcagtcaattggtgggctttactgcaatccggatggcaaattggaactcagcaaccccaagaagaaaacattgtgcgaacccggcattccaggtatcaccatcgtcaacaagctgagcgaaggaacttcagtgtgccgcactgattacccaggcacggagaacatggttattccccttgacatcagcggttctggtcccttccagcttgccaatgtcgacactgcggactattacgtttggcaaggcaaaagcaccaccctgcaatactacgtgaacaagaagggtgtgaacgccgaggcaggctgccgctggacttgcgataaggatccgaaaggctgcggcaactgggctcccatcaacatcggtactggtcaaaccaatggtcttacttacctttcggttttccctaatgccgcgatctcaacggccacgctggacttcaacattgatgtcactggagacatctccggtgaatgctattaccacgttggagagggcttcgctggctcctcaagtggatgcaccgtgagcattcccgaaggtggctccgctcaaattgtcttcagcgacgcaaactga

SEQ ID NO: 1497 - protein, 430 aa, Muscodor strobelii
  misc_feature: SGI Peptide ID NO. 560102
  misc_feature (112)..(427): Pfam Id: PF03856 Pfam Desc: Beta-glucosidase (SUN family)
  misc_feature (211)..(427): Pfam Id: PF03856 Pfam Desc: Beta-glucosidase (SUN family)
  misc_feature (24)..(426): NCBI GI: 46108938 Blast Desc: FG01351.1 [Gibberella zeae PH-1]
  misc_feature (21)..(426): NCBI GI: 171684381 Blast Desc: protein product [Podospora anserina] gi|170942151|emb|CAP67803.1| protein product [Podospora anserina]
  misc_feature (37)..(397): NCBI GI: 261357322 Blast Desc: septation protein SUN4 [Verticillium albo-atrum VaMs.102]
  misc_feature (23)..(426): NCBI GI: 256735010 Blast Desc: NECHADRAFT_98634 [Nectria haematococca mpVI 77-13-4]
  misc_feature (1)..(426): NCBI GI: 85118432 Blast Desc: NCU02668 [Neurospora crassa OR74A] gi|164427812|ref|XP_001728411.1| conserved , variant [Neurospora crassa OR74A] gi|28927250|gb|EAA36205.1| conserved [Neurospora to
  misc_feature (1)..(427): NCBI GI: 39974697 Blast Desc: MGG_00505 [Magnaporthe grisea 70-15] gi|145018598|gb|EDK02877.1| MGG_00505 [Magnaporthe grisea 70-15]
  misc_feature (23)..(426): NCBI GI: 212275977 Blast Desc: LOC100191800 [Zea mays] gi|194689862|gb|ACF79015.1| [Zea mays]
  misc_feature (1)..(426): NCBI GI: 115399956 Blast Desc: [Aspergillus terreus NIH2624] gi|114191233|gb|EAU32933.1| [Aspergillus terreus NIH2624]
  misc_feature (1)..(426): NCBI GI: 119482922 Blast Desc: SUN domain protein (Uth1), [Neosartorya fischeri NRRL 181] gi|119409644|gb|EAW19592.1| SUN domain protein (Uth1), [Neosartorya fischeri NRRL 181]
  misc_feature (1)..(427): NCBI GI: 154297564 Blast Desc: BC1G_12627 [Botryotinia fuckeliana B05.10] gi|150858450|gb|EDN33642.1| BC1G_12627 [Botryotinia fuckeliana B05.10]
MKAVTLNLALAATLASGAIAQPHQHHGHQAYHAKRDELRKREVVTTYVPATTTQYMLGTQKVSPEEAQAGIDKGLYVVVGESTPTFTPPAPKPTSSKDAGVFIEEATSSSTTSTPTPTPTTSSTSSAEPTTSSVSPAETKPTSSSSSGATGIDAEFPSGEIDCKVFPEQYGALRLDYLGYGGFSGLQYTPNFGSLLDSVISFIETGVAKPSGQTGFYSYACPAGHVKTQWPTAQGNTGQSIGGLYCNPDGKLELSNPKKKTLCEPGIPGITIVNKLSEGTSVCRTDYPGTENMVIPLDISGSGPFQLANVDTADYYVWQGKSTTLQYYVNKKGVNAEAGCRWTCDKDPKGCGNWAPINIGTGQTNGLTYLSVFPNAAISTATLDFNIDVTGDISGECYYHVGEGFAGSSSGCTVSIPEGGSAQIVFSDAN

SEQ ID NO: 1498 - DNA, 2418 bp, Muscodor strobelii
  misc_feature: SGI EST ID NO. CUFF.3944.0
  misc_feature: Variant of the nucleotide sequence at SEQ ID NO 1496
ttgctgtgcagcgcaggaaacaggctggagtgcgaaaagactcccttctttacccctagcatcctcgttcactctagactcccgcttcctctcgtcttcctctcaccgatcgcgccgatttccacccaactgagagcctcacaactctcaaccacattcatttggaatcgcgagtactgtcgttaatcgtaaaacacaaattcgatcgaattgcaacgatccccgtcttacgtccgcacccaacccgtcacggcacttcagtctaccacgtgagggcaatttacacataagatacgggcattaagtgtcttataaatctacgtgaaacaacatattcgatcgatctaaagaaagcggatccattgcgactcaaagatctgaaaactcaagtcgaccgcgagcaaacatgaaggcagttacactaaatctcgcccttgcggcgacgcttgcttcgggagccattgcccaacctcaccagcaccatggccaccaggcttatcacgcaaagcgggacgagctgcgcaaacgtgaggttgtcaccacctacgtccctgccacgactacccagtacatgcttggtactcagaaagtcagtcccgaggaggcacaagccggcattgacaagggactgtacgtggtcgttggtgagagcacaccgaccttcacccctccggctcccaagcccaccagctccaaagatgccggagtcttcatcgaggaggctacttcgtcctctacaacgtccactcccaccccgacacctacgacttcgtcgacctcatctgcagagcccactacatcatctgtctcacctgcagagaccaagcctaccagcagcagcagctctggtgctaccgggatcgacgccgagttcccaagtggagaaattgattgcaaggtattcccggaacagtacggcgctcttcgactcgactatcttggctatggtggtttcagtggtttgcagtacactcccaattttggctcgcttctcgactcggttatcagctttattgaaaccggtgttgccaagccaagcggccagactggattctattcgtacgcctgccctgcgggccatgtcaagacgcaatggccaactgctcagggtaatactggtcagtcaattggtgggctttactgcaatccggatggcaaattggaactcagcaaccccaagaagaaaacattgtgcgaacccggcattccaggtatcaccatcgtcaacaagctgagcgaaggaacttcagtgtgccgcactgattacccaggcacggagaacatggttattccccttgacatcagcggttctggtcccttccagcttgccaatgtcgacactgcggactattacgtttggcaaggcaaaagcaccaccctgcaatactacgtgaacaagaagggtgtgaacgccgaggcaggctgccgctggacttgcgataaggatccgaaaggctgcggcaactgggctcccatcaacatcggtactggtcaaaccaatggtcttacttacctttcggttttccctaatgccgcgatctcaacggccacgctggacttcaacattgatgtcactggagacatctccggtgaatgctattaccacgttggagagggcttcgctggctcctcaagtggatgcaccgtgagcattcccgaaggtggctccgctcaaattgtcttcagcgacgcaaactgatgaaatgtatccgtggtctcttttgtttcttagtcattgctgtcttcttgtcttgctttctaatggataccttctgccatatgtaacctcaatgaggtaatacttacggtccgcttacgatgatggcctggtgaatttaatttttattgtgtatatttgttgctcttctacgcgtgagttgaagtggactatcttccgggacaagaagcgagttcatataacagtgatgcgcattgcctcggcttgctgttgagtcatgaaaagactgtcgtctacccgcccgatcgatacctttcatatcacaactcgacatccgaaggtgtcgaaaataggtctagccctcgcgaataagtactccattcactcgttccggctatctctcaaatctcagccgacacggagttacagatgaatcggtcggttgaatctcgacatagaggatgcaaattgcgaattatgcggcaatggtgagcgaaagctcctatacagcaccagatatcataaacgacctcttggtgttacaggtcaaactttgtcttattttcacccaggttagcaatcaattcccgttgatttgcaaccacgttacacctgtgattgtaaaataactcggcatgctgctcttgtgataaggtgcaatgtgatgataagaaggcgtactcgtgtgccgctatcctcagccttcaaaacagatcattgaatatttcttagccgcagaa

SEQ ID NO: 1499 - DNA, 1968 bp, Muscodor strobelii
  misc_feature: SGI cDNA ID NO. 560103
  misc_feature: Reduced expression when VOC is produced
  misc_feature: Encodes the peptide sequence at SEQ ID NO 1500
atggcgtctgagaaagggcccgtcgcgacagaagccccgcccttctcgtcggccgcatcgcaatcctcaccaccagctccaatcccagctcccttctccacaaccctctctgtcgagaccatagctgcggaggctgcgcgcgcaacacagtcgctgaagcgccagcgcgaggccacgcccacctcgccctcttcagtcttgccaccagccttcggctccgacctctcgcccaccaaagctgcccgcatcgctggcctgccgccacggcattcgcctgcgcccatgaccggcgctgcagccctcgaggacgagcgccgccgaaatgaggaggagtacagacttcaggtatccggcgccagcgagaacccagcctacagggcgcagacggcgctcatgtccgcgagcgctcttggtctgagccgtccgcaggatgctcctcaaccaccgcaaccaccacacacggaacccgaacagctacccgacgcgccacccgtcgcatctgctcccattgccaacatgaccgacaccgacatcgacagcaccgctaagacggacgttccccctgagacggcgaccacgatgtcgggcttggaaagtgttggtgcgcccgccgccgcgcctgttgatactagccccagatctatggacatcgacgcgcccgacggtcagcccacattcggcgcgcagccagaggcccaaatggaggagaggggtgtgacgtcgctatcatacccaggcatccttccaccgagcacaaatatgccggctcctcccactcgtggaatgagcttgcctatgacgcctaatgcgcaggcagcgccccgatcgccgagtttcaagaagcacaagtgtcctcattgcgaaaccgagttcacgcgacaccataacctgaagagtcaccttctcacccacagccaagaaaagccatacgtgtgccagaactgctcgatgcgctttcgccggctgcacgatctcaagcgtcactccaaactccacaccggagagaagccgcacgtttgtcctaagtgcgatagaaaatttgccaggggtgacgctttggcgcggcacagcaaaggacctggtggttgcgtgggccggcgcagtagcatggggagcttcctgggcgaggaggacgcagatggcgtgagccgtttggaaggtgacgattcgacgatgagcggtgtcatgtacgatgggtccatgaatgaagccgacatgaccgaggaggatagacaacgacttagcggcttgcccagtatcaaagcccagcatatcgagggtgtcagtcagggccggctcttcccccctaatcctgaacatggttcgacgagctccaatactccccaagttcccggtggaagtatctcttctctaccacatggtggtggttcttcaacttccatgtattcacagactggcatgacggagagccctaagcctttgagccctggactccaggcccacgatcccgcattgcacagacagcgctccccgagcttgacatcgcagtttcaacagcagcaacagcagcagcacttcgttcgtcagccatctgatcgtcagaccccaccagtaccagggttctctgctgccgaagccgctaagtatgctgcctcggctgtcagtggccaaggtacagcctcacaacccggatccggaagctctcttcaccagcccatcgtcggtagtagtggcactgggcacacacgtaaccctagtgttcccgaacagaatggaggcagtggtgatagcactagcaacaacctatttgcatcagaggcaggtatctggacatatattaccgagctggagtcacgcgtccgctctctgactgatcgcgtgcaacacctggaggcctcagaaaaattgcaagaggatagaatcttgcatttggcaagcgaggtggcaactctgcgagcgcaagctgaaggcagcacggccgaaaaagttaatgagccgcctgcatag

SEQ ID NO: 1500 - protein, 655 aa, Muscodor strobelii
  misc_feature: SGI Peptide ID NO. 560103
  misc_feature (282)..(304): Pfam Id: PF00096 Pfam Desc: Zinc finger, C2H2 type
  misc_feature (310)..(332): Pfam Id: PF00096 Pfam Desc: Zinc finger, C2H2 type
  misc_feature (1)..(641): NCBI GI: 154299075 Blast Desc: BC1G_11850 [Botryotinia fuckeliana B05.10] gi|150857553|gb|EDN32745.1| BC1G_11850 [Botryotinia fuckeliana B05.10]
  misc_feature (1)..(644): NCBI GI: 171684383 Blast Desc: protein product [Podospora anserina] gi|170942152|emb|CAP67804.1| protein product [Podospora anserina]
  misc_feature (76)..(618): NCBI GI: 46108936 Blast Desc: FG01350.1 [Gibberella zeae PH-1]
  misc_feature (1)..(615): NCBI GI: 38567183 Blast Desc: related to zinc finger protein crol gamma [Neurospora crassa]
  misc_feature (1)..(641): NCBI GI: 116207098 Blast Desc: CHGG_02842 [Chaetomium globosum CBS 148.51] gi|88183439|gb|EAQ90907.1| CHGG_02842 [Chaetomium globosum CBS 148.51]
  misc_feature (1)..(597): NCBI GI: 164427814 Blast Desc: NCU02666 [Neurospora crassa OR74A] gi|157071894|gb|EAA36203.2| NCU02666 [Neurospora crassa OR74A]
  misc_feature (8)..(618): NCBI GI: 256734300 Blast Desc: NECHADRAFT_98635 [Nectria haematococca mpVI 77-13-4]
  misc_feature (1)..(424): NCBI GI: 145611300 Blast Desc: MGG_00504 [Magnaporthe grisea 70-15] gi|145018599|gb|EDK02878.1| MGG_00504 [Magnaporthe grisea 70-15]
  misc_feature (1)..(465): NCBI GI: 261355967 Blast Desc: chorion transcription factor Cf2 [Verticillium albo-atrum VaMs.102]
  misc_feature (235)..(483): NCBI GI: 238844855 Blast Desc: C2H2 zinc finger protein [Microsporum canis CBS 113480]
  misc_feature: Useful for introducing or modulating the production of volatile compounds
MASEKGPVATEAPPFSSAASQSSPPAPIPAPFSTTLSVETIAAEAARATQSLKRQREATPTSPSSVLPPAFGSDLSPTKAARIAGLPPRHSPAPMTGAAALEDERRRNEEEYRLQVSGASENPAYRAQTALMSASALGLSRPQDAPQPPQPPHTEPEQLPDAPPVASAPIANMTDTDIDSTAKTDVPPETATTMSGLESVGAPAAAPVDTSPRSMDIDAPDGQPTFGAQPEAQMEERGVTSLSYPGILPPSTNMPAPPTRGMSLPMTPNAQAAPRSPSFKKHKCPHCETEFTRHHNLKSHLLTHSQEKPYVCQNCSMRFRRLHDLKRHSKLHTGEKPHVCPKCDRKFARGDALARHSKGPGGCVGRRSSMGSFLGEEDADGVSRLEGDDSTMSGVMYDGSMNEADMTEEDRQRLSGLPSIKAQHIEGVSQGRLFPPNPEHGSTSSNTPQVPGGSISSLPHGGGSSTSMYSQTGMTESPKPLSPGLQAHDPALHRQRSPSLTSQFQQQQQQQHFVRQPSDRQTPPVPGFSAAEAAKYAASAVSGQGTASQPGSGSSLHQPIVGSSGTGHTRNPSVPEQNGGSGDSTSNNLFASEAGIWTYITELESRVRSLTDRVQHLEASEKLQEDRILHLASEVATLRAQAEGSTAEKVNEPPA

SEQ ID NO: 1501 - DNA, 2866 bp, Muscodor strobelii
  misc_feature: SGI EST ID NO. CUFF.4118.1
  misc_feature: Variant of the nucleotide sequence at SEQ ID NO 1499
gctgctcatccacaatccatcattctctgcggctcagtcatcattcctcatccaccacaaagacaccagccctgttgcttgctggtcctcgtgcatcaacattgtactacctttctctttgattaaactcaccaaaaaactcactggcgagctctagactggctagaagtgctgatcgctctcatctgcacgttttagcacgtagcaggtctgtttctgcagcattggatccgctcccaaacgcgacacgctaccataacaacaccatcaacagccacccgccttcagccacacgtctccagcagccttatcaccatccagctcggcgatgcgtcgctgatgcgcgaatgccccattgacctcgcctgctgctgtagtcactgcggtttttgaagggtttgttgggtgtgctgctggccacttgtttgccacactcatggcgtctgagaaagggcccgtcgcgacagaagccccgcccttctcgtcggccgcatcgcaatcctcaccaccagctccaatcccagctcccttctccacaaccctctctgtcgagaccatagctgcggaggctgcgcgcgcaacacagtcgctgaagcgccagcgcgaggccacgcccacctcgccctcttcagtcttgccaccagccttcggctccgacctctcgcccaccaaagctgcccgcatcgctggcctgccgccacggcattcgcctgcgcccatgaccggcgctgcagccctcgaggacgagcgccgccgaaatgaggaggagtacagacttcaggtatccggcgccagcgagaacccagcctacagggcgcagacggcgctcatgtccgcgagcgctcttggtctgagccgtccgcaggatgctcctcaaccaccgcaaccaccacacacggaacccgaacagctacccgacgcgccacccgtcgcatctgctcccattgccaacatgaccgacaccgacatcgacagcaccgctaagacggacgttccccctgagacggcgaccacgatgtcgggcttggaaagtgttggtgcgcccgccgccgcgcctgttgatactagccccagatctatggacatcgacgcgcccgacggtcagcccacattcggcgcgcagccagaggcccaaatggaggagaggggtgtgacgtcgctatcatacccaggcatccttccaccgagcacaaatatgccggctcctcccactcgtggaatgagcttgcctatgacgcctaatgcgcaggcagcgccccgatcgccgagtttcaagaagcacaagtgtcctcattgcgaaaccgagttcacgcgacaccataacctgaagagtcaccttctcacccacagccaagaaaagccatacgtgtgccagaactgctcgatgcgctttcgccggctgcacgatctcaagcgtcactccaaactccacaccggagagaagccgcacgtttgtcctaagtgcgatagaaaatttgccaggggtgacgctttggcgcggcacagcaaaggacctggtggttgcgtgggccggcgcagtagcatggggagcttcctgggcgaggaggacgcagatggcgtgagccgtttggaaggtgacgattcgacgatgagcggtgtcatgtacgatgggtccatgaatgaagccgacatgaccgaggaggatagacaacgacttagcggcttgcccagtatcaaagcccagcatatcgagggtgtcagtcagggccggctcttcccccctaatcctgaacatggttcgacgagctccaatactccccaagttcccggtggaagtatctcttctctaccacatggtggtggttcttcaacttccatgtattcacagactggcatgacggagagccctaagcctttgagccctggactccaggcccacgatcccgcattgcacagacagcgctccccgagcttgacatcgcagtttcaacagcagcaacagcagcagcacttcgttcgtcagccatctgatcgtcagaccccaccagtaccagggttctctgctgccgaagccgctaagtatgctgcctcggctgtcagtggccaaggtacagcctcacaacccggatccggaagctctcttcaccagcccatcgtcggtagtagtggcactgggcacacacgtaaccctagtgttcccgaacagaatggaggcagtggtgatagcactagcaacaacctatttgcatcagaggcaggtatctggacatatattaccgagctggagtcacgcgtccgctctctgactgatcgcgtgcaacacctggaggcctcagaaaaattgcaagaggatagaatcttgcatttggcaagcgaggtggcaactctgcgagcgcaagctgaaggcagcacggccgaaaaagttaatgagccgcctgcatagatgctacttctccgggcattggtgtcatgaggaagggcaattacggtgttgatttgattcgttacttaccatcctcgggttttcgacacctcacaagcatggttttactactcgctacggcgttgggggcgttggcagagaactgaacacaaaagctatgtttagtgattgggcggcttcctcggcataatcttcacatctttcgttttttgactttatcagatatcccagtgctgttctatttgctggagcaaggggggagcagaacggaacttagcgctcattcctccaaccgtgctgccctctgatctatgtatactatcggcatcggcacagaaagaaaccctcaaagagtcaggcggatcctgactgcgatctgagtcactcagcattattgacacctaatctagaactgagtgacccccaaaatataccgaaagttggtacgatgctacctgtctg

SEQ ID NO: 1502 - DNA, 1254 bp, Muscodor strobelii
  misc_feature: SGI cDNA ID NO. 560104
  misc_feature: Reduced expression when VOC is produced
  misc_feature: Encodes the peptide sequence at SEQ ID NO 1503
atggcctcgtcacatcttcgcaatgcagccagcatcgttttctccgtattattaatcctctctcttctgttatccgcatccgcgtcatcaaccccaaaagcatcaccttcagccgagccagaactcatatgccacaccaacaatccctcagaatgctaccccaaagtattctcagctacagatgaatttcagattgttcacgaggaccaggagctcctaccaggcctccacgtgcaattagatatacagacagggcagaaacaagccaagctgtatacgcccgacgaggaccatccagaacttgccggcctaccagttgagcaggatgtaatagtggtggatcctaatcctgcacaagaagatacccctaagattcctgctggcgcgccggcatacgaacccgtaggcgtcgtcaagcagcccaaggagaagaatacgcagttctccgaagccttttatgctgtcggcgcatttgcctgggaatcaggcgacgaagtagatgctgcgctcacggtccttgatgatctagcgcacgacatgtattatggccttcaaattgccgaagacgctgatgcattacaatcactattctgtctcttagttaacaataatggagatgcggaggcaaaagattggctcccaatcatcacgtctgcgaattattttgcatcgaatattttatcttcagtcttgcagaacaacgcgcctgctctaaaggccattgagaaatcttgggatacggtcatgcagaaatcgtgcaaagcctcgccgaagacgatagaagctgagctctttcatcgacttacgactcggagtgaaattggtgcgcccgaggaggtgaaagaagcagagtcaatccgctatctcctctcgcccatcgcaggacttctcaagagcgacactttcaagacgaagttcctcgagaacgatggtatgaagaggctcctagccattctgttaagagaaggcgaggtctggactcctaggaaagccaaggtcgctcagatagttgcggatactttccttgacgaggactttggagcggttctcggcgtgtggccgaaaggagaacaggatcttagaggttgcgtgactcgtgatggagtaatacctgttggtgatgaatgctggaggtttcagttggaaaggataaataaggaggagaataatcccgaatggtgccaaagactgcttgagctattgaggaagctaccagcttctggaactgtgtcgtcgatacataatgaactctag

SEQ ID NO: 1503 - protein, 417 aa, Muscodor strobelii
  misc_feature: SGI Peptide ID NO. 560104
  misc_feature (9)..(410): NCBI GI: 256734382 Blast Desc: NECHADRAFT_74599 [Nectria haematococca mpVI 77-13-4]
  misc_feature (8)..(410): NCBI GI: 46108574 Blast Desc: FG01169.1 [Gibberella zeae PH-1]
  misc_feature (14)..(417): NCBI GI: 39941988 Blast Desc: MGG_10843 [Magnaporthe grisea 70-15] gi|145021654|gb|EDK05783.1| MGG_10843 [Magnaporthe grisea 70-15] gi|157931188|gb|ABW04814.1| SIL1 [Magnaporthe oryzae]
  misc_feature (32)..(399): NCBI GI: 171684331 Blast Desc: protein product [Podospora anserina] gi|170942126|emb|CAP67778.1| protein product [Podospora anserina]
  misc_feature (1)..(354): NCBI GI: 261357623 Blast Desc: nucleotide exchange factor SIL1 [Verticillium albo-atrum VaMs.102]
  misc_feature (37)..(384): NCBI GI: 85117023 Blast Desc: NCU00968 [Neurospora crassa OR74A] gi|28926965|gb|EAA35925.1| [Neurospora crassa OR74A] gi|38567040|emb|CAE76338.1| related to SLS1 protein precursor
  misc_feature (41)..(354): NCBI GI: 116192269 Blast Desc: CHGG_05852 [Chaetomium globosum CBS 148.51] gi|88181765|gb|EAQ89233.1| CHGG_05852 [Chaetomium globosum CBS 148.51]
  misc_feature (32)..(399): NCBI GI: 154308996 Blast Desc: BC1G_08026 [Botryotinia fuckeliana B05.10] gi|150852652|gb|EDN27844.1| BC1G_08026 [Botryotinia fuckeliana B05.10]
  misc_feature (104)..(408): NCBI GI: 156063182 Blast Desc: SS1G_01707 [Sclerotinia sclerotiorum 1980] gi|154697043|gb|EDN96781.1| SS1G_01707 [Sclerotinia sclerotiorum 1980]
  misc_feature (14)..(246): NCBI GI: 255727735 Blast Desc: conserved [Candida tropicalis MYA-3404] gi|240133109|gb|EER32665.1| conserved [Candida tropicalis MYA-3404]
  misc_feature: Useful for introducing or modulating the production of volatile compounds
MASSHLRNAASIVFSVLLILSLLLSASASSTPKASPSAEPELICHTNNPSECYPKVFSATDEFQIVHEDQELLPGLHVQLDIQTGQKQAKLYTPDEDHPELAGLPVEQDVIVVDPNPAQEDTPKIPAGAPAYEPVGVVKQPKEKNTQFSEAFYAVGAFAWESGDEVDAALTVLDDLAHDMYYGLQIAEDADALQSLFCLLVNNNGDAEAKDWLPIITSANYFASNILSSVLQNNAPALKAIEKSWDTVMQKSCKASPKTIEAELFHRLTTRSEIGAPEEVKEAESIRYLLSPIAGLLKSDTFKTKFLENDGMKRLLAILLREGEVWTPRKAKVAQIVADTFLDEDFGAVLGVWPKGEQDLRGCVTRDGVIPVGDECWRFQLERINKEENNPEWCQRLLELLRKLPASGTVSSIHNEL

SEQ ID NO: 1504 - DNA, 1466 bp, Muscodor strobelii
  misc_feature: SGI EST ID NO. CUFF.3927.0
  misc_feature: Variant of the nucleotide sequence at SEQ ID NO 1502
tgacaacactataatttttaacctttcactctgggtataggctttttagtagctttacgtacatatatcgaagaaagtcgcagtggagtgctaggcaaacctccacatcccaccctgacatacccaggtggctcaggccatcacctatactttactctcaaatcctctgcaagatggcctcgtcacatcttcgcaatgcagccagcatcgttttctccgtattattaatcctctctcttctgttatccgcatccgcgtcatcaaccccaaaagcatcaccttcagccgagccagaactcatatgccacaccaacaatccctcagaatgctaccccaaagtattctcagctacagatgaatttcagattgttcacgaggaccaggagctcctaccaggcctccacgtgcaattagatatacagacagggcagaaacaagccaagctgtatacgcccgacgaggaccatccagaacttgccggcctaccagttgagcaggatgtaatagtggtggatcctaatcctgcacaagaagatacccctaagattcctgctggcgcgccggcatacgaacccgtaggcgtcgtcaagcagcccaaggagaagaatacgcagttctccgaagccttttatgctgtcggcgcatttgcctgggaatcaggcgacgaagtagatgctgcgctcacggtccttgatgatctagcgcacgacatgtattatggccttcaaattgccgaagacgctgatgcattacaatcactattctgtctcttagttaacaataatggagatgcggaggcaaaagattggctcccaatcatcacgtctgcgaattattttgcatcgaatattttatcttcagtcttgcagaacaacgcgcctgctctaaaggccattgagaaatcttgggatacggtcatgcagaaatcgtgcaaagcctcgccgaagacgatagaagctgagctctttcatcgacttacgactcggagtgaaattggtgcgcccgaggaggtgaaagaagcagagtcaatccgctatctcctctcgcccatcgcaggacttctcaagagcgacactttcaagacgaagttcctcgagaacgatggtatgaagaggctcctagccattctgttaagagaaggcgaggtctggactcctaggaaagccaaggtcgctcagatagttgcggatactttccttgacgaggactttggagcggttctcggcgtgtggccgaaaggagaacaggatcttagaggttgcgtgactcgtgatggagtaatacctgttggtgatgaatgctggaggtttcagttggaaaggataaataaggaggagaataatcccgaatggtgccaaagactgcttgagctattgaggaagctaccagcttctggaactgtgtcgtcgatacataatgaactctagatattgtgtttgtcatatagaagtaaacaagatacccaa

SEQ ID NO: 1505 - DNA, 510 bp, Muscodor strobelii
  misc_feature: SGI cDNA ID NO. 560105
  misc_feature: Encodes the peptide sequence at SEQ ID NO 1506
atgcagaaatcgtgcaaagcctcgccgaagacgatagaagctgagctctttcatcgacttacgactcggagtgaaattggtgcgcccgaggaggtgaaagaagcagagtcaatccgctatctcctctcgcccatcgcaggacttctcaagagcgacactttcaagacgaagttcctcgagaacgatggtatgaagaggctcctagccattctgttaagagaaggcgaggtctggactcctaggaaagccaaggtcgctcagatagttgcggatactttccttgacgaggactttggagcggttctcggcgtgtggccgaaaggagaacaggatcttagaggttgcgtgactcgtgatggagtaatacctgttggtgatgaatgctggaggtttcagttggaaaggataaataaggaggagaataatcccgaatggtgccaaagactgcttgagctattgaggaagctaccagcttctggaactgtgtcgtcgatacataatgaactctag

SEQ ID NO: 1506 - protein, 169 aa, Muscodor strobelii
  misc_feature: SGI Peptide ID NO. 560105
  misc_feature (1)..(162): NCBI GI: 46108574 Blast Desc: FG01169.1 [Gibberella zeae PH-1]
  misc_feature (1)..(162): NCBI GI: 256734382 Blast Desc: NECHADRAFT_74599 [Nectria haematococca mpVI 77-13-4]
  misc_feature (37)..(151): NCBI GI: 154308996 Blast Desc: BC1G_08026 [Botryotinia fuckeliana B05.10] gi|150852652|gb|EDN27844.1| BC1G_08026 [Botryotinia fuckeliana B05.10]
  misc_feature (38)..(169): NCBI GI: 39941988 Blast Desc: MGG_10843 [Magnaporthe grisea 70-15] gi|145021654|gb|EDK05783.1| MGG_10843 [Magnaporthe grisea 70-15] gi|157931188|gb|ABW04814.1| SIL1 [Magnaporthe oryzae]
  misc_feature (37)..(151): NCBI GI: 156063182 Blast Desc: SS1G_01707 [Sclerotinia sclerotiorum 1980] gi|154697043|gb|EDN96781.1| SS1G_01707 [Sclerotinia sclerotiorum 1980]
  misc_feature (42)..(151): NCBI GI: 171684331 Blast Desc: protein product [Podospora anserina] gi|170942126|emb|CAP67778.1| protein product [Podospora anserina]
  misc_feature (42)..(136): NCBI GI: 85117023 Blast Desc: NCU00968 [Neurospora crassa OR74A] gi|28926965|gb|EAA35925.1| [Neurospora crassa OR74A] gi|38567040|emb|CAE76338.1| related to SLS1 protein precursor
  misc_feature (42)..(106): NCBI GI: 261357623 Blast Desc: nucleotide exchange factor SIL1 [Verticillium albo-atrum VaMs.102]
MQKSCKASPKTIEAELFHRLTTRSEIGAPEEVKEAESIRYLLSPIAGLLKSDTFKTKFLENDGMKRLLAILLREGEVWTPRKAKVAQIVADTFLDEDFGAVLGVWPKGEQDLRGCVTRDGVIPVGDECWRFQLERINKEENNPEWCQRLLELLRKLPASGTVSSIHNEL

SEQ ID NO: 1507 - DNA, 1466 bp, Muscodor strobelii; identical to SEQ ID NO: 1504
  misc_feature: SGI EST ID NO. CUFF.3927.0
  misc_feature: Variant of the nucleotide sequence at SEQ ID NO 1505

SEQ ID NO: 1508 - DNA, 525 bp, Muscodor strobelii
  misc_feature: SGI cDNA ID NO. 560106
  misc_feature: Encodes the peptide sequence at SEQ ID NO 1509
atgcaggccttccgcacacgagcagccgtcgcggctcgacgcgcccgcccttcgaccgtctccccaggtcgctcttccacccgctcctacgcctcgggccacgaccacgccaaaccccacaacgtcgaggaaaagagcggcctcgcactcctctggatcccactagtccccggcgccatcctcgccacgcaatatctctcagagcccgccaaggacggcgagcccacccgtttagctaaatggatgtccgagaagttcgactacttcaatgactgggaggcacggaataccctacgtacgcaggtcatcgagcaggccgcccacgacaagcacctatttcttaacgccggaaagagccaacacgtcgagcttaagacccccgaacttttccactccggttctccctgggccgtcccagccggccactacataaacctcgatcacgtcactgagcactaccgggcacaggccgctgccgaggaggagcgcaaggccaagaagttggcagagaagaaggaatcatga

SEQ ID NO: 1509 - protein, 174 aa, Muscodor strobelii
  misc_feature: SGI Peptide ID NO. 560106
  misc_feature (1)..(162): NCBI GI: 39941990 Blast Desc: MGG_10844 [Magnaporthe grisea 70-15] gi|59803096|gb|AAX07707.1| NADH-ubiquinone oxidoreductase-like protein [Magnaporthe grisea] gi|145021655|gb|EDK05784.1| grisea
  misc_feature (1)..(156): NCBI GI: 116192271 Blast Desc: [Chaetomium globosum CBS 148.51] gi|88181766|gb|EAQ89234.1| [Chaetomium globosum CBS 148.51]
  misc_feature (1)..(169): NCBI GI: 85117027 Blast Desc: NADH:ubiquinone oxidoreductase 17.8kD subunit [Neurospora crassa OR74A] gi|1171871|sp|P42116.1|NURM_NEUCR RecName: Full=NADH-ubiquinone oxidoreductase 17.8 kDa subunit,
  misc_feature (1)..(163): NCBI GI: 171684333 Blast Desc: protein product [Podospora anserina] gi|170942127|emb|CAP67779.1| protein product [Podospora anserina]
  misc_feature (1)..(164): NCBI GI: 154308994 Blast Desc: NADH-ubiquinone oxidoreductase 17.8 kDa subunit [Botryotinia fuckeliana B05.10] gi|150852651|gb|EDN27843.1| NADH-ubiquinone oxidoreductase 17.8 kDa subunit [Botryotinia
  misc_feature (1)..(168): NCBI GI: 189203775 Blast Desc: conserved [Pyrenophora tritici-repentis Pt-1C-BFP] gi|187985322|gb|EDU50810.1| conserved [Pyrenophora tritici-repentis Pt-1C-BFP]
  misc_feature (1)..(173): NCBI GI: 256735309 Blast Desc: NECHADRAFT_73392 [Nectria haematococca mpVI 77-13-4]
  misc_feature (33)..(164): NCBI GI: 156063180 Blast Desc: SS1G_01706 [Sclerotinia sclerotiorum 1980] gi|154697042|gb|EDN96780.1| SS1G_01706 [Sclerotinia sclerotiorum 1980]
  misc_feature (5)..(173): NCBI GI: 46105778 Blast Desc: FG00393.1 [Gibberella zeae PH-1]
  misc_feature (29)..(172): NCBI GI: 115491005 Blast Desc: conserved [Aspergillus terreus NIH2624] gi|114196990|gb|EAU38690.1| conserved [Aspergillus terreus NIH2624]
  misc_feature (34)..(156): SWISSPROT Homolog: EC 1.6.5.3 NADH dehydrogenase (ubiquinone)
  misc_feature (34)..(156): SWISSPROT Homolog: EC 1.6.99.3 NADH dehydrogenase
MQAFRTRAAVAARRARPSTVSPGRSSTRSYASGHDHAKPHNVEEKSGLALLWIPLVPGAILATQYLSEPAKDGEPTRLAKWMSEKFDYFNDWEARNTLRTQVIEQAAHDKHLFLNAGKSQHVELKTPELFHSGSPWAVPAGHYINLDHVTEHYRAQAAAEEERKAKKLAEKKES

SEQ ID NO: 1510 - DNA, 960 bp, Muscodor strobelii
  misc_feature: SGI EST ID NO. CUFF.3940.0
  misc_feature: Variant of the nucleotide sequence at SEQ ID NO 1508
gctgcaagctgggctctgcatctcgacatcacgcaattgctctggtcggtttgaagctcggtgaagctcgacgacagccatccacacagccaattggcatcgcaacaccaccagtatcgcgatgcaggccttccgcacacgagcagccgtcgcggctcgacgcgcccgcccttcgaccgtctccccaggtcgctcttccacccgctcctacgcctcgggccacgaccacgccaaaccccacaacgtcgaggaaaagagcggcctcgcactcctctggatcccactagtccccggcgccatcctcgccacgcaatatctctcagagcccgccaaggacggcgagcccacccgtttagctaaatggatgtccgagaagttcgactacttcaatgactgggaggcacggaataccctacgtacgcaggtcatcgagcaggccgcccacgacaagcacctatttcttaacgccggaaagagccaacacgtcgagcttaagacccccgaacttttccactccggttctccctgggccgtcccagccggccactacataaacctcgatcacgtcactgagcactaccgggcacaggccgctgccgaggaggagcgcaaggccaagaagttggcagagaagaaggaatcatgagcgacttaagcagcaactgtaccatcactccaaatattataagctggcaatccattgaatatcccgcaatggacacacgtatataggtagacgacgggacacatgtagtttcccggccccacgagggatctatagaacgctgctgcggacagaagcagcgggaatatactgccgtttttcatttgtttcaaaactgtcatcctgacttctatttcatgtggtgactagtagtggctaacttccttatcgtaaaaacgataatccgtgctgttgttttgcgacatttacgacattgtacccaggtacatgcaggc

SEQ ID NO: 1511 - DNA, 2886 bp, Muscodor strobelii
  misc_feature: SGI cDNA ID NO. 560107
  misc_feature: Reduced expression when VOC is produced
  misc_feature: Encodes the peptide sequence at SEQ ID NO 1512
atgagtgtccatcaaccaacgaacaccaacccgtttcatgcatcgtccgatcaaccacacgcaaatgaagatacgactgacgagtgggaggaatggagtaacgacccagcttccccctctcaacccgatggccttttaatcgatctctctgaagaagctgccccaaagtccttcggtaggcagagcagcgtccgcaacccacaacatcgatcggtgcaaatgccccgagtcaaatctagagcgaggcaaaaggcacagaatgcaaaagcaggcatcaaacttgtcacagacatgtcccagtttcgccaggcagcgctggttgcacagcaacgtagtgccgatgccagacagaagggcaagtttgccgatgctgctgctctccatgcacttgaaggaaatcccagcacgccgtctattggtagttttgcatggttgaaacgacagaagggcaacgcccaaaataagaagtcaacgaaatccggtgctggggatctttctcctgaagcccgaccaatcgtcattggcatctctgttccctcagatgatgctggaagtcatcaagtcagccctcaaacggccgtcatagagacgcctatggagctgcaaccctatactcgtaaagtttctgcgaaaaagggtcccaatttaacaccacagcagcagcgctcggtctggtctccagacactgaggccagcgagtctccatataatggaagaagacccacatccagtatatacacccagcacactgactacaatagcccgaacacagcaagtagtgcacctccggttcccgtattacctgccacattcaagttcaagcagactagtgctgtccaggaacaggatgaggatgatagcgggacaccgtgcaccctcttcgaagaagatgggagcccagtggctcatcgcaagtcgcaaaaagtaaaagcaacaactacaagccctgaaagtgcaagcagtaggtcccatggatggtgggatcacgtgatgactcctttcactccccagtcgaacaatccgttcaagactaagccccaggaaaccggctctagctcagcatcgacccatcaagattggtggactggtcgtgatgagaaggcaggggcatcagctggcgtatcgcatctacctgatgcaaaagctccgccacaacaggaggaagcagatgttatatcacatgtcgtagagcctcgcgagcagactcatgctgagaagtcgaggatcttgctggaagagaatcatgcggacgatgctccgcctccttacgaactccaaaaagacaccaaggctacattcgtgcaatcatctgcaggctcgcaacgagttccatctcctgggccaatgacgcccgggctgccgggaacgatgacttctcaagggggaattggacttgccgatatcccactaacgcctacaccccgttcattgcccagtgcagttctccccgatcgtcctgctggttcttacagaaccggtgaccatttcctcaatgcgccgggcagatttaatgaaactgaacggcagcgacgtcgatatgagaaagaggacgtcatggcacggaaagccggcggcttctggcgcggtcgtggcctcatcccagaggagggatgttttggacgcactgggcgtgaaggcaggaagagaaggagaatatgcctcggaatcatgggtggcatactcgccgcaattatcttaattgttgtactggctgtcgtccttactcgccatgccatgtcaacaaacggagccaagagttcgtctgggggtcatacatcacagtatcaagtgccggcatattggctcaacttaaccgagttcccgcctattccaacaggtgttctaacagtttctgggccgaaaaactcagtggccgagtcgggctgcttcacggatgagacgcctgaaactgcatgggcatgtgcactgccaaaagaggcccaggatcccaaggctccttacgaacctaaccagcctgagttcatttttcaaattcagtttgataacagcacgcaagccctatggaaactgtacgacacagccaatgacagcgatcattatgtagccgactcaacttttcagcccaacccgccgccatcttcgctgaaagaggtccgcttcttgggtaacacgaccgatcacatcgctgcagaccggaaggagggcgagccgaccccgttttttattagtctactcaactcaacagacgaggttgttggcgataacatgcttacgcgacgtcaaaactcgatcggtggagctggaggtaacggcactgatagctcgagcgaaacagactctctgccagaccccgatctaaatgctgacggaaccggcgcacccgctcggctcttcccgcttcctgtgcaacaaccaatccgcttatttgaccgtgggctttcgaccgagcactacggcttctactcatatttcgataagaaaatttacatggcgaacgacacacattcggatccagtggacaaaaacggtggagtaccgatcgaggacgctacttcgcttgtaactttcacacaaatccgcttcctcgttcaaatctggacacgactggagaacacaacgcacctgcttggcgatggcaccgtcaacgtcacagcctcgccgttcatacagcctggcaccatgccttaccctgttacgattacagaggatatgcatggcggcataggatcacaaaagacagacttcgcgtacggcgtgcgtaagaaccaggagatcgacaagaacgcagcacgtttcgtgaccgtcgatctcggtttcaacggcacacttgtcaatccgtattcgagcgcagacagctcacttggcggtatcgatggaggcactggcggatgcaagtgtcaatgggtgaattatgaaaacagctga

SEQ ID NO: 1512 - protein, 961 aa, Muscodor strobelii
  misc_feature: SGI Peptide ID NO. 560107
  misc_feature (8)..(958): NCBI GI: 261356261 Blast Desc: conserved [Verticillium albo-atrum VaMs.102]
  misc_feature (56)..(955): NCBI GI: 256733128 Blast Desc: NECHADRAFT_38722 [Nectria haematococca mpVI 77-13-4]
  misc_feature (76)..(941): NCBI GI: 46125019 Blast Desc: FG06887.1 [Gibberella zeae PH-1]
  misc_feature (76)..(932): NCBI GI: 116180336 Blast Desc: CHGG_00796 [Chaetomium globosum CBS 148.51] gi|88185093|gb|EAQ92561.1| CHGG_00796 [Chaetomium globosum CBS 148.51]
  misc_feature (43)..(958): NCBI GI: 171687897 Blast Desc: protein product [Podospora anserina] gi|170943910|emb|CAP69562.1| protein product [Podospora anserina]
  misc_feature (12)..(958): NCBI GI: 85111465 Blast Desc: NCU09307 [Neurospora crassa OR74A] gi|28925702|gb|EAA34713.1| NCU09307 [Neurospora crassa OR74A]
  misc_feature (401)..(958): NCBI GI: 39944954 Blast Desc: MGG_04459 [Magnaporthe grisea 70-15] gi|145021518|gb|EDK05647.1| MGG_04459 [Magnaporthe grisea 70-15]
  misc_feature (438)..(959): NCBI GI: 156062618 Blast Desc: SS1G_01425 [Sclerotinia sclerotiorum 1980] gi|154696761|gb|EDN96499.1| SS1G_01425 [Sclerotinia sclerotiorum 1980]
  misc_feature (445)..(958): NCBI GI: 169775467 Blast Desc: [Aspergillus oryzae RIB40] gi|83770064|dbj|BAE60199.1| protein product [Aspergillus oryzae]
  misc_feature (445)..(958): NCBI GI: 238495883 Blast Desc: conserved [Aspergillus flavus NRRL3357] gi|220694057|gb|EED50401.1| conserved [Aspergillus flavus NRRL3357]
  misc_feature: Useful for introducing or modulating the production of volatile compounds
MSVHQPTNTNPFHASSDQPHANEDTTDEWEEWSNDPASPSQPDGLLIDLSEEAAPKSFGRQSSVRNPQHRSVQMPRVKSRARQKAQNAKAGIKLVTDMSQFRQAALVAQQRSADARQKGKFADAAALHALEGNPSTPSIGSFAWLKRQKGNAQNKKSTKSGAGDLSPEARPIVIGISVPSDDAGSHQVSPQTAVIETPMELQPYTRKVSAKKGPNLTPQQQRSVWSPDTEASESPYNGRRPTSSIYTQHTDYNSPNTASSAPPVPVLPATFKFKQTSAVQEQDEDDSGTPCTLFEEDGSPVAHRKSQKVKATTTSPESASSRSHGWWDHVMTPFTPQSNNPFKTKPQETGSSSASTHQDWWTGRDEKAGASAGVSHLPDAKAPPQQEEADVISHVVEPREQTHAEKSRILLEENHADDAPPPYELQKDTKATFVQSSAGSQRVPSPGPMTPGLPGTMTSQGGIGLADIPLTPTPRSLPSAVLPDRPAGSYRTGDHFLNAPGRFNETERQRRRYEKEDVMARKAGGFWRGRGLIPEEGCFGRTGREGRKRRRICLGIMGGILAAIILIVVLAVVLTRHAMSTNGAKSSSGGHTSQYQVPAYWLNLTEFPPIPTGVLTVSGPKNSVAESGCFTDETPETAWACALPKEAQDPKAPYEPNQPEFIFQIQFDNSTQALWKLYDTANDSDHYVADSTFQPNPPPSSLKEVRFLGNTTDHIAADRKEGEPTPFFISLLNSTDEVVGDNMLTRRQNSIGGAGGNGTDSSSETDSLPDPDLNADGTGAPARLFPLPVQQPIRLFDRGLSTEHYGFYSYFDKKIYMANDTHSDPVDKNGGVPIEDATSLVTFTQIRFLVQIWTRLENTTHLLGDGTVNVTASPFIQPGTMPYPVTITEDMHGGIGSQKTDFAYGVRKNQEIDKNAARFVTVDLGFNGTLVNPYSSADSSLGGIDGGTGGCKCQWVNYENS

SEQ ID NO: 1513 - DNA, 549 bp, Muscodor strobelii
  misc_feature: SGI cDNA ID NO. 560108
  misc_feature: Encodes the peptide sequence at SEQ ID NO 1514
atgctatccgtaccagtgaatttgcctaagtggcttgctgaaaactcacatttactcaagccaccagttaataattattgtgtctataatgaagattttagtgttatgatcgttggcggccccaacgcgcggaccgactaccacatcaaccaaacgcccgaatggttctatcagtataagggcgcaatgattctcaaagttgtggatgaaggcgaattcaaagacgtcatcatccgcgaaggcgatatgtttctgttaccaggtaacacgccgcacaatcctgtacgattcgccgacacagtgggtgttgtactagagcagcgtcgaccagagaacaccattgacaggatgcgctggtactgccaggaggacggatgtggcaccatcgtccatgaagctgcctttcactgcactgatctcggcactcaaatcaaggctgctattgagcagttcatgtcgagtgatgagaatagaacgtgttcgaaatgtggcacggtagctaattccgtaccgaagccgggaacgattatagatcctaatttggagtaa

SEQ ID NO: 1514 - protein, 182 aa, Muscodor strobelii
  misc_feature: SGI Peptide ID NO. 560108
  misc_feature (1)..(152): Pfam Id: PF06052 Pfam Desc: 3-hydroxyanthranilic acid dioxygenase
  misc_feature (1)..(182): NCBI GI: 46125361 Blast Desc: FG07058.1 [Gibberella zeae PH-1]
  misc_feature (1)..(182): NCBI GI: 256733053 Blast Desc: [Nectria haematococca mpVI 77-13-4]
  misc_feature (1)..(182): NCBI GI: 85112002 Blast Desc: 3-hydroxyanthranilate 3,4-dioxygenase [Neurospora crassa OR74A] gi|74629020|sp|Q7SDX3.1|3HAO_NEUCR RecName: Full=3-hydroxyanthranilate 3,4-dioxygenase; AltName: acid of acid
  misc_feature (1)..(180): NCBI GI: 39974609 Blast Desc: conserved [Magnaporthe grisea 70-15] gi|223634735|sp|A4REV8.1|3HAO_MAGGR RecName: Full=3-hydroxyanthranilate 3,4-dioxygenase; AltName: acid of acid
  misc_feature (1)..(182): NCBI GI: 116182426 Blast Desc: conserved [Chaetomium globosum CBS 148.51] gi|121790104|sp|Q2HD63.1|3HAO_CHAGB RecName: Full=3-hydroxyanthranilate 3,4-dioxygenase; AltName: acid of acid
  misc_feature (1)..(182): NCBI GI: 171695402 Blast Desc: protein product [Podospora anserina] gi|223634739|sp|B2AAJ5.1|3HAO_PODAN RecName: Full=3-hydroxyanthranilate 3,4-dioxygenase; AltName: acid of acid
  misc_feature (1)..(181): NCBI GI: 156057439 Blast Desc: 3-hydroxyanthranilate 3,4-dioxygenase [Sclerotinia sclerotiorum 1980] gi|154702236|gb|EDO01975.1| 3-hydroxyanthranilate 3,4-dioxygenase [Sclerotinia sclerotiorum
  misc_feature (2)..(173): NCBI GI: 189203295 Blast Desc: 3-hydroxyanthranilate 3,4-dioxygenase [Pyrenophora tritici-repentis Pt-1C-BFP] gi|187985082|gb|EDU50570.1| 3-hydroxyanthranilate 3,4-dioxygenase [Pyrenophora Pt-1C-BFP]
  misc_feature (1)..(172): NCBI GI: 126131902 Blast Desc: 3-hydroxyanthranilic acid dioxygenase [Pichia stipitis CBS 6054] gi|223634738|sp|A3LP72.1|3HAO_PICST RecName: Full=3-hydroxyanthranilate 3,4-dioxygenase; AltName: acid of acid
  misc_feature (1)..(172): NCBI GI: 254569530 Blast Desc: 3-hydroxyanthranilic acid dioxygenase, required for the de novo biosynthesis of NAD from tryptophan [Pichia pastoris GS115] gi|238031672|emb|CAY69595.1| 3-hydroxyanthranilic acid for
  misc_feature (1)..(182): SWISSPROT Homolog: EC 1.13.11.6 3-hydroxyanthranilate 3,4-dioxygenase
MLSVPVNLPKWLAENSHLLKPPVNNYCVYNEDFSVMIVGGPNARTDYHINQTPEWFYQYKGAMILKVVDEGEFKDVIIREGDMFLLPGNTPHNPVRFADTVGVVLEQRRPENTIDRMRWYCQEDGCGTIVHEAAFHCTDLGTQIKAAIEQFMSSDENRTCSKCGTVANSVPKPGTIIDPNLE

SEQ ID NO: 1515 - DNA, 4418 bp, Muscodor strobelii
  misc_feature: SGI EST ID NO. CUFF.3965.0
  misc_feature: Variant of the nucleotide sequence at SEQ ID NO 1513
gatagttataataattagaagtttcgaaattcttcacttttgcttgaatttgcgttctctcgtcaggtataccgagaagagaaaacgcccgttctattacatcctgctttatcattattgagcctagtctccagggacactcctccatcgaaaactgcaagataaagttctagggagactatgctatccgtaccagtgaatttgcctaagtggcttgctgaaaactcacatttactcaagccaccagttaataattattgtgtctataatgaagattttagtgttatgatcgttggcggccccaacgcgcggaccgactaccacatcaaccaaacgcccgaatggttctatcagtataagggcgcaatgattctcaaagttgtggatgaaggcgaattcaaagacgtcatcatccgcgaaggcgatatgtttctgttaccaggtaacacgccgcacaatcctgtacgattcgccgacacagtgggtgttgtactagagcagcgtcgaccagagaacaccattgacaggatgcgctggtactgccaggaggacggatgtggcaccatcgtccatgaagctgcctttcactgcactgatctcggcactcaaatcaaggctgctattgagcagttcatgtcgagtgatgagaatagaacgtgttcgaaatgtggcacggtagctaattccgtaccgaagccgggaacgattatagatcctaatttggagtaaaataatcgacgcaaaaggatggggctggagaatatgaatatgggcggtttgtccacattgttaaatactacatgtctttacatattcacagcttcaccattaagtcaaatgtacaaatcatattatgtattgtttggtaatgcaatgatacctcagaaatgctacctattagcaaatccttttccgaaaccgaaccatgcaaatgcaatttcccttgaaaatgccaacatcaaaatgcacacagaattcatacaacacgagactggaagacgactctggggagccaattcgccttgagcagcaattccatggtaacaacccaagtccatcgtttctcctaatatcgtctcaatcgttcatgcctcctcattttaatacctttccccagtgtcatatatagcaaaggaaaatgagcaatgatatcttgcccacgtgataatcagctgttttcataattcacccattgacacttgcatccgccagtgcctccatcgataccgccaagtgagctgtctgcgctcgaatacggattgacaagtgtgccgttgaaaccgagatcgacggtcacgaaacgtgctgcgttcttgtcgatctcctggttcttacgcacgccgtacgcgaagtctgtcttttgtgatcctatgccgccatgcatatcctctgtaatcgtaacagggtaaggcatggtgccaggctgtatgaacggcgaggctgtgacgttgacggtgccatcgccaagcaggtgcgttgtgttctccagtcgtgtccagatttgaacgaggaagcggatttgtgtgaaagttacaagcgaagtagcgtcctcgatcggtactccaccgtttttgtccactggatccgaatgtgtgtcgttcgccatgtaaattttcttatcgaaatatgagtagaagccgtagtgctcggtcgaaagcccacggtcaaataagcggattggttgttgcacaggaagcgggaagagccgagcgggtgcgccggttccgtcagcatttagatcggggtctggcagagagtctgtttcgctcgagctatcagtgccgttacctccagctccaccgatcgagttttgacgtcgcgtaagcatgttatcgccaacaacctcgtctgttgagttgagtagactaataaaaaacggggtcggctcgccctccttccggtctgcagcgatgtgatcggtcgtgttacccaagaagcggacctctttcagcgaagatggcggcgggttgggctgaaaagttgagtcggctacataatgatcgctgtcattggctgtgtcgtacagtttccatagggcttgcgtgctgttatcaaactgaatttgaaaaatgaactcaggctggttaggttcgtaaggagccttgggatcctgggcctcttttggcagtgcacatgcccatgcagtttcaggcgtctcatccgtgaagcagcccgactcggccactgagtttttcggcccagaaactgttagaacacctgttggaataggcgggaactcggttaagttgagccaatatgccggcacttgatactgtgatgtatgacccccagacgaactcttggctccgtttgttgacatggcatggcgagtaaggacgacagccagtacaacaattaagataattgcggcgagtatgccacccatgattccgaggcatattctccttctcttcctgccttcacgcccagtgcgtccaaaacatccctcctctgggatgaggccacgaccgcgccagaagccgccggctttccgtgccatgacgtcctctttctcatatcgacgtcgctgccgttcagtttcattaaatctgcccggcgcattgaggaaatggtcaccggttctgtaagaaccagcaggacgatcggggagaactgcactgggcaatgaacggggtgtaggcgttagtgggatatcggcaagtccaattcccccttgagaagtcatcgttcccggcagcccgggcgtcattggcccaggagatggaactcgttgcgagcctgcagatgattgcacgaatgtagccttggtgtctttttggagttcgtaaggaggcggagcatcgtccgcatgattctcttccagcaagatcctcgacttctcagcatgagtctgctcgcgaggctctacgacatgtgatataacatctgcttcctcctgttgtggcggagcttttgcatcaggtagatgcgatacgccagctgatgcccctgccttctcatcacgaccagtccaccaatcttgatgggtcgatgctgagctagagccggtttcctggggcttagtcttgaacggattgttcgactggggagtgaaaggagtcatcacgtgatcccaccatccatgggacctactgcttgcactttcagggcttgtagttgttgcttttactttttgcgacttgcgatgagccactgggctcccatcttcttcgaagagggtgcacggtgtcccgctatcatcctcatcctgttcctggacagcactagtctgcttgaacttgaatgtggcaggtaatacgggaaccggaggtgcactacttgctgtgttcgggctattgtagtcagtgtgctgggtgtatatactggatgtgggtcttcttccattatatggagactcgctggcctcagtgtctggagaccagaccgagcgctgctgctgtggtgttaaattgggaccctttttcgcagaaactttacgagtatagggttgcagctccataggcgtctctatgacggccgtttgagggctgacttgatgacttccagcatcatctgagggaacagagatgccaatgacgattggtcgggcttcaggagaaagatccccagcaccggatttcgttgacttcttattttgggcgttgcccttctgtcgtttcaaccatgcaaaactaccaatagacggcgtgctgggatttccttcaagtgcatggagagcagcagcatcggcaaacttgcccttctgtctggcatcggcactacgttgctgtgcaaccagcgctgcctggcgaaactgggacatgtctgtgacaagtttgatgcctgcttttgcattctgtgccttttgcctcgctctagatttgactcggggcatttgcaccgatcgatgttgtgggttgcggacgctgctctgcctaccgaaggactttggggcagcttcttcagagagatcgattaaaaggccatcgggttgagagggggaagctgggtcgttactccattcctcccactcgtcagtcgtatcttcatttgcgtgtggttgatcggacgatgcatgaaacgggttggtgttcgttggttgatggacactcatgatgtcgaatttattcgggattgatgggagaagcaattaagggaaaggctaaaatcaagatgccagcttggaaattttagcttctacaagtacaaagggctctcagcgtcagatattgaattatctcatgaatcgaagagttgaggaatcaaaacgttttggtgggtttctgtaatgtcaagagagtgctacgccgttcaaggctagtgatgatatgggcgactgcgcacgaggtgccgaacgtgtaagtgcgggaattatgaaaggagtagtgtaattacaaagatgtgagtttagtcacagtacaaaggaaataaatccaagagacaagagccccaaacgtggggaaaaagggaaagaaaaa

SEQ ID NO: 1516 - DNA, 504 bp, Muscodor strobelii
  misc_feature: SGI cDNA ID NO. 560109
  misc_feature: Encodes the peptide sequence at SEQ ID NO 1517
atggaccactcgcacatgaatcatggggatatggaccacggagatggagggcatggagggcatgaaatgcccatgatgtgtaacatgaatatgttgttcacttgggacacaaacaacttgtgcatcatcttccggcaatggcgtgtcacagggacttggtcgctcatctctagcctgcttatcatcgttgccatctgcgccggttacgaagttctccgcgaggcaacgaggaagtacgagttgtggcttacgagtggcgatggttacaaacgagttggcgcaaataccagtggggccccagcctctgagtcgaccatcagccagcgggctcgtattgtcaaggccgtactgtatgcggtacagaacttctacgcttttatgatcatgcttcttttcatgacttacaacggctatgtcataattgccgttactgttggcgctggattgggattctacttcttcggctcacacaccagagccacaaaggaaacagcttgccactga

SEQ ID NO: 1517 - protein, 167 aa, Muscodor strobelii
  misc_feature: SGI Peptide ID NO. 560109
  misc_feature (29)..(166): Pfam Id: PF04145 Pfam Desc: Ctr copper transporter family
  misc_feature (1)..(167): NCBI GI: 164427165 Blast Desc: NCU03281 [Neurospora crassa OR74A] gi|157071633|gb|EAA34971.2| conserved [Neurospora crassa OR74A]
  misc_feature (1)..(167): NCBI GI: 133779225 Blast Desc: CTR2 short splice variant [Colletotrichum gloeosporioides f. sp. aeschynomenes] gi|149345684|gb|ABR23641.1| CTR2 short splice variant [Colletotrichum gloeosporioides f. sp.
  misc_feature (1)..(167): NCBI GI: 145233851 Blast Desc: An02g11700 [Aspergillus niger] gi|134057234|emb|CAK44498.1| protein product [Aspergillus niger]
  misc_feature (1)..(167): NCBI GI: 133779224 Blast Desc: CTR2 long splice variant [Colletotrichum gloeosporioides f. sp. aeschynomenes] gi|149345660|gb|ABR23640.1| CTR2 long splice variant [Colletotrichum gloeosporioides f. sp.
  misc_feature (1)..(167): NCBI GI: 46125363 Blast Desc: FG07059.1 [Gibberella zeae PH-1]
  misc_feature (26)..(167): NCBI GI: 171695400 Blast Desc: protein product [Podospora anserina] gi|170947942|emb|CAP60106.1| protein product [Podospora anserina]
  misc_feature (1)..(167): NCBI GI: 189203297 Blast Desc: ctr copper transporter family protein [Pyrenophora tritici-repentis Pt-1C-BFP] gi|187985083|gb|EDU50571.1| ctr copper transporter family protein [Pyrenophora tritici-repentis
  misc_feature (1)..(167): NCBI GI: 169603403 Blast Desc: SNOG_04711 [Phaeosphaeria nodorum SN15] gi|111067351|gb|EAT88471.1| SNOG_04711 [Phaeosphaeria nodorum SN15]
  misc_feature (1)..(167): NCBI GI: 71000158 Blast Desc: Ctr copper transporter family protein [Aspergillus fumigatus Af293] gi|66852433|gb|EAL92758.1| Ctr copper transporter family protein [Aspergillus fumigatus Af293] Ctr
  misc_feature (1)..(167): NCBI GI: 119492513 Blast Desc: Ctr copper transporter family protein [Neosartorya fischeri NRRL 181] gi|119411782|gb|EAW21725.1| Ctr copper transporter family protein [Neosartorya fischeri NRRL 181]
MDHSHMNHGDMDHGDGGHGGHEMPMMCNMNMLFTWDTNNLCIIFRQWRVTGTWSLISSLLIIVAICAGYEVLREATRKYELWLTSGDGYKRVGANTSGAPASESTISQRARIVKAVLYAVQNFYAFMIMLLFMTYNGYVIIAVTVGAGLGFYFFGSHTRATKETACH

SEQ ID NO: 1518 - DNA, 2064 bp, Muscodor strobelii
  misc_feature: SGI EST ID NO. CUFF.4090.0
  misc_feature: Variant of the nucleotide sequence at SEQ ID NO 1516
tgcctgtctggatgacgaaaggccacaatccattccatccatccctcgtacaaatccccactggctcgccatgagctgacctggcgattgagaacgtttgagctggttttgtaacttccctttctaaaaaaataccgtattaactttgttactagctacttgactttgcgctacggctgcatgagcaggtaggcttgtaacttcccttttcatttctccgaaaagagaaaagcaacacaagtcgtgttctacttcttatactcatcttgaagcaagaatcaccattcccagccagctattgcatcttaagcagagcctgcctttacctaagggagctccggatcgcccaccgcaccacctgtctcttttcactcggacaacacgcgctgatcaatatggaccactcgcacatgaatcatggggatatggaccacggagatggagggcatggagggcatgaaatgcccatgatgtgtaacatgaatatgttgttcacttgggacacaaacaacttgtgcatcatcttccggcaatggcgtgtcacagggacttggtcgctcatctctagcctgcttatcatcgttgccatctgcgccggttacgaagttctccgcgaggcaacgaggaagtacgagttgtggcttacgagtggcgatggttacactcgccgatcgcaagattacggcctgcaacaaacacaagaaaacgttactgagaactcgtcgctcctggaaacagaacgagttggcgcaaataccagtggggccccagcctctgagtcgaccatcagccagcgggctcgtattgtcaaggccgtactgtatgcggtacagaacttctacgcttttatgatcatgcttcttttcatgacttacaacggctatgtcataattgccgttactgttggcgctggattgggattctacttcttcggctcacacaccagagccacaaaggaaacagcttgccactgagtacgaatacagacacaaaggtggaatgtctaacgagggccttcctgctgaacatttgacaaagctttcgctacatggttaacgaattatatgtttgcatggattttgatctttcattgtggactttcatgaaacactaggaggatcgcatctcgagatcgaggatattgccttacactggcacagacgcgctaatctagccaattataaaggagagatcaaatctcgttcccgtagtgatagatgaacttgtaaaggtgactgccagcaaaaccacgggattatgactaccgcatgcctcgatccttcatcatcaggctgctgggattgctgtaatgatacacacacgacgtcccacctctatgtctatttaaccgctatgttgccacagtgctgtatcatagtcactaaatcttggcatctttcacatcctccttaactgcctcaagcccaacttctttcttcttcttttccttcagctgccctccaccctcaagatgcgcaatgagcttttcgtccccaaaatgcgtgttgtgctcaaattccggttcgcgtccgtatgcaatacgagccgcatcaacgagcatacgacctgtcatgccccagaccatgaaccgctcaacttcttcctcttcctgctcgagcgctccgacgagtgccgcctggcttgtcgatctttttttcggcttctggacccgctggttgttgacggggacgtagaagctgtgagagcgccaggggaagtccttccagtctaaccacttgccatcgtaccagtggcctgggggaatggatgggccaccgggttgcgctggttcatctgtgttgctcaggaagttttggaatggcgctgagaatactgcggctacctccttggcgtctagtttgggcatcatggcctcgtctactgtgggctgtgatggctcgcctggccggtcttctgcgtgaaggaatgctatgcagggtcgtactgctaactcggttttagcgagactgcagggcaagttacagagtggctcgatgcggaacggcgctgggattttgctgtcgtccattggtagaccaatctcttcccaggcttcgcggcgag

SEQ ID NO: 1519 - DNA, 579 bp, Muscodor strobelii
  misc_feature: SGI cDNA ID NO. 560110
  misc_feature: Encodes the peptide sequence at SEQ ID NO 1520
atggaccactcgcacatgaatcatggggatatggaccacggagatggagggcatggagggcatgaaatgcccatgatgtgtaacatgaatatgttgttcacttgggacacaaacaacttgtgcatcatcttccggcaatggcgtgtcacagggacttggtcgctcatctctagcctgcttatcatcgttgccatctgcgccggttacgaagttctccgcgaggcaacgaggaagtacgagttgtggcttacgagtggcgatggttacactcgccgatcgcaagattacggcctgcaacaaacacaagaaaacgttactgagaactcgtcgctcctggaaacagaacgagttggcgcaaataccagtggggccccagcctctgagtcgaccatcagccagcgggctcgtattgtcaaggccgtactgtatgcggtacagaacttctacgcttttatgatcatgcttcttttcatgacttacaacggctatgtcataattgccgttactgttggcgctggattgggattctacttcttcggctcacacaccagagccacaaaggaaacagcttgccactga

SEQ ID NO: 1520 - protein, 192 aa, Muscodor strobelii
  misc_feature: SGI Peptide ID NO. 560110
  misc_feature (29)..(191): Pfam Id: PF04145 Pfam Desc: Ctr copper transporter family
  misc_feature (1)..(192): NCBI GI: 169603403 Blast Desc: SNOG_04711 [Phaeosphaeria nodorum SN15] gi|111067351|gb|EAT88471.1| SNOG_04711 [Phaeosphaeria nodorum SN15]
  misc_feature (1)..(192): NCBI GI: 256732607 Blast Desc: [Nectria haematococca mpVI 77-13-4]
  misc_feature (26)..(192): NCBI GI: 171695400 Blast Desc: protein product [Podospora anserina] gi|170947942|emb|CAP60106.1| protein product [Podospora anserina]
  misc_feature (1)..(192): NCBI GI: 164427165 Blast Desc: NCU03281 [Neurospora crassa OR74A] gi|157071633|gb|EAA34971.2| conserved [Neurospora crassa OR74A]
  misc_feature (1)..(192): NCBI GI: 133779224 Blast Desc: CTR2 long splice variant [Colletotrichum gloeosporioides f. sp. aeschynomenes] gi|149345660|gb|ABR23640.1| CTR2 long splice variant [Colletotrichum gloeosporioides f. sp.
  misc_feature (1)..(192): NCBI GI: 71000158 Blast Desc: Ctr copper transporter family protein [Aspergillus fumigatus Af293] gi|66852433|gb|EAL92758.1| Ctr copper transporter family protein [Aspergillus fumigatus Af293] Ctr
  misc_feature (1)..(192): NCBI GI: 133779225 Blast Desc: CTR2 short splice variant [Colletotrichum gloeosporioides f. sp. aeschynomenes] gi|149345684|gb|ABR23641.1| CTR2 short splice variant [Colletotrichum gloeosporioides f. sp.
  misc_feature (1)..(192): NCBI GI: 119492513 Blast Desc: Ctr copper transporter family protein [Neosartorya fischeri NRRL 181] gi|119411782|gb|EAW21725.1| Ctr copper transporter family protein [Neosartorya fischeri NRRL 181]
  misc_feature (1)..(192): NCBI GI: 145233851 Blast Desc: An02g11700 [Aspergillus niger] gi|134057234|emb|CAK44498.1| protein product [Aspergillus niger]
  misc_feature (1)..(192): NCBI GI: 46125363 Blast Desc: FG07059.1 [Gibberella zeae PH-1]
MDHSHMNHGDMDHGDGGHGGHEMPMMCNMNMLFTWDTNNLCIIFRQWRVTGTWSLISSLLIIVAICAGYEVLREATRKYELWLTSGDGYTRRSQDYGLQQTQENVTENSSLLETERVGANTSGAPASESTISQRARIVKAVLYAVQNFYAFMIMLLFMTYNGYVIIAVTVGAGLGFYFFGSHTRATKETACH

SEQ ID NO: 1521 - DNA, 2064 bp, Muscodor strobelii; identical to SEQ ID NO: 1518
  misc_feature: SGI EST ID NO. CUFF.4090.0
  misc_feature: Variant of the nucleotide sequence at SEQ ID NO 1519

SEQ ID NO: 1522 - DNA, 1218 bp, Muscodor strobelii
  misc_feature: SGI cDNA ID NO. 560111
  misc_feature: Reduced expression when VOC is produced
  misc_feature: Encodes the peptide sequence at SEQ ID NO 1523
atgaataccaccgtttcttccggcgacagtgacgccttgaatcttgccaaccccgaaacataccaagaccacggccagcagaccgatatatccgtcaccgccgctccgcagaccgacttagagacggccgaacttctccagaacatcgggcaagatccctccaccactgctgccgaggctgaattatccactaccatccccgccgacctcgccctctctcttgatcaacaactatcatcgtcacacccatatattgcctcagactactgggatgcgtccacaatggcgccgctcaataaagtctccgctgccgccatcgcccgcctaagggcctacaagccgcctgttttcccaacatgggatcgcctaccagtaacccggcgtgcagctgtcttgatcctcctgtttgcagaccggaggggcgatcttcgagttgtcatcacgatgcgggctgcaagcttgaggagcttttcaggtcacgccgcattccccggtggtaaagcagactcgcttagcgagaccccataccaaatagctcgccgcgaagcctgggaagagattggtctaccaatggacgacagcaaaatcccagcgccgttccgcatcgagccactctgtaacttgccctgcagtctcgctaaaaccgagttagcagtacgaccctgcatagcattccttcacgcagaagaccggccaggcgagccatcacagcccacagtagacgaggccatgatgcccaaactagacgccaaggaggtagccgcagtattctcagcgccattccaaaacttcctgagcaacacagatgaaccagcgcaacccggtggcccatccattcccccaggccactggtacgatggcaagtggttagactggaaggacttcccctggcgctctcacagcttctacgtccccgtcaacaaccagcgggtccagaagccgaaaaaaagatcgacaagccaggcggcactcgtcggagcgctcgagcaggaagaggaagaagttgagcggttcatggtctggggcatgacaggtcgtatgctcgttgatgcggctcgtattgcatacggacgcgaaccggaatttgagcacaacacgcattttggggacgaaaagctcattgcgcatcttgagggtggagggcagctgaaggaaaagaagaagaaagaagttgggcttgaggcagttaaggaggatgtgaaagatgccaagatttag

SEQ ID NO: 1523 - protein, 405 aa, Muscodor strobelii
  misc_feature: SGI Peptide ID NO. 560111
  misc_feature (127)..(259): Pfam Id: PF00293 Pfam Desc: NUDIX domain
  misc_feature (127)..(190): Pfam Id: PF00293 Pfam Desc: NUDIX domain
  misc_feature (75)..(390): NCBI GI: 164427167 Blast Desc: NCU03280 [Neurospora crassa OR74A] gi|157071634|gb|EAA34970.2| NCU03280 [Neurospora crassa OR74A]
  misc_feature (86)..(390): NCBI GI: 46125365 Blast Desc: FG07060.1 [Gibberella zeae PH-1]
  misc_feature (33)..(387): NCBI GI: 39974613 Blast Desc: MGG_00547 [Magnaporthe grisea 70-15] gi|145018552|gb|EDK02831.1| MGG_00547 [Magnaporthe grisea 70-15]
  misc_feature (104)..(403): NCBI GI: 171695398 Blast Desc: protein product [Podospora anserina] gi|170947941|emb|CAP60105.1| protein product [Podospora anserina]
  misc_feature (95)..(390): NCBI GI: 225562429 Blast Desc: NUDIX domain-containing protein [Ajellomyces capsulatus G186AR]
  misc_feature (95)..(388): NCBI GI: 119177289 Blast Desc: CIMG_07600 [Coccidioides immitis RS]
  misc_feature (77)..(350): NCBI GI: 156056975 Blast Desc: SS1G_04218 [Sclerotinia sclerotiorum 1980] gi|154702004|gb|EDO01743.1| SS1G_04218 [Sclerotinia sclerotiorum 1980]
  misc_feature (94)..(388): NCBI GI: 240107712 Blast Desc: hydrolase, NUDIX family protein [Coccidioides posadasii C735 delta SOWgp]
  misc_feature (95)..(387): NCBI GI: 239611553 Blast Desc: NUDIX domain-containing protein [Ajellomyces dermatitidis ER-3]
  misc_feature (95)..(387): NCBI GI: 261204994 Blast Desc: NUDIX domain-containing protein [Ajellomyces dermatitidis SLH14081] gi|239592293|gb|EEQ74874.1| NUDIX domain-containing protein [Ajellomyces dermatitidis SLH14081]
  misc_feature: Useful for introducing or modulating the production of volatile compounds
MNTTVSSGDSDALNLANPETYQDHGQQTDISVTAAPQTDLETAELLQNIGQDPSTTAAEAELSTTIPADLALSLDQQLSSSHPYIASDYWDASTMAPLNKVSAAAIARLRAYKPPVFPTWDRLPVTRRAAVLILLFADRRGDLRVVITMRAASLRSFSGHAAFPGGKADSLSETPYQIARREAWEEIGLPMDDSKIPAPFRIEPLCNLPCSLAKTELAVRPCIAFLHAEDRPGEPSQPTVDEAMMPKLDAKEVAAVFSAPFQNFLSNTDEPAQPGGPSIPPGHWYDGKWLDWKDFPWRSHSFYVPVNNQRVQKPKKRSTSQAALVGALEQEEEEVERFMVWGMTGRMLVDAARIAYGREPEFEHNTHFGDEKLIAHLEGGGQLKEKKKKEVGLEAVKEDVKDAKI

SEQ ID NO: 1524 - DNA, 2586 bp, Muscodor strobelii
  misc_feature: SGI EST ID NO. CUFF.4091.2
  misc_feature: Variant of the nucleotide sequence at SEQ ID NO 1522
cgaggcgcgaaccaaccgaaccgcaacctatgcggtgtgtctgcctatgcaatccctattggtatttccttcattcggcaactattttctccaaatccccaagtcgtgataagcaatgaataccaccgtttcttccggcgacagtgacgccttgaatcttgccaaccccgaaacataccaagaccacggccagcagaccgatatatccgtcaccgccgctccgcagaccgacttagagacggccgaacttctccagaacatcgggcaagatccctccaccactgctgccgaggctgaattatccactaccatccccgccgacctcgccctctctcttgatcaacaactatcatcgtcacacccatatattgcctcagactactgggatgcgtccacaatggcgccgctcaataaagtctccgctgccgccatcgcccgcctaagggcctacaagccgcctgttttcccaacatgggatcgcctaccagtaacccggcgtgcagctgtcttgatcctcctgtttgcagaccggaggggcgatcttcgagttgtcatcacgatgcgggctgcaagcttgaggagcttttcaggtcacgccgcattccccggtggtaaagcagactcgcttagcgagaccccataccaaatagctcgccgcgaagcctgggaagagattggtctaccaatggacgacagcaaaatcccagcgccgttccgcatcgagccactctgtaacttgccctgcagtctcgctaaaaccgagttagcagtacgaccctgcatagcattccttcacgcagaagaccggccaggcgagccatcacagcccacagtagacgaggccatgatgcccaaactagacgccaaggaggtagccgcagtattctcagcgccattccaaaacttcctgagcaacacagatgaaccagcgcaacccggtggcccatccattcccccaggccactggtacgatggcaagtggttagactggaaggacttcccctggcgctctcacagcttctacgtccccgtcaacaaccagcgggtccagaagccgaaaaaaagatcgacaagccaggcggcactcgtcggagcgctcgagcaggaagaggaagaagttgagcggttcatggtctggggcatgacaggtcgtatgctcgttgatgcggctcgtattgcatacggacgcgaaccggaatttgagcacaacacgcattttggggacgaaaagctcattgcgcatcttgagggtggagggcagctgaaggaaaagaagaagaaagaagttgggcttgaggcagttaaggaggatgtgaaagatgccaagatttagtgactatgatacagcactgtggcaacatagcggttaaatagacatagaggtgggacgtcgtgtgtgtatcattacagcaatcccagcagcctgatgatgaaggatcgaggcatgcggtagtcataatcccgtggttttgctggcagtcacctttacaagttcatctatcactacgggaacgagatttgatctctcctttataattggctagattagcgcgtctgtgccagtgtaaggcaatatcctcgatctcgagatgcgatcctcctagtgtttcatgaaagtccacaatgaaagatcaaaatccatgcaaacatataattcgttaaccatgtagcgaaagctttgtcaaatgttcagcaggaaggccctcgttagacattccacctttgtgtctgtattcgtactcagtggcaagctgtttcctttgtggctctggtgtgtgagccgaagaagtagaatcccaatccagcgccaacagtaacggcaattatgacatagccgttgtaagtcatgaaaagaagcctattcaacgtcattcaggtcagatattcgactgagagaactttattattgataaagggtaatgtaaaactcacatgatcataaaagcgtagaagttctgtaccgcatacagtacggccttgacaatacgagcccgctggctgatggtcgactcagaggctggggccccactggtatttgcgccaactcgttctgtttccaggagcgacgagttctcagtaacgttttcttgtgtttgttgcaggccgtaatcttgcgatcggcgagcttgtggcaatgactgctctcagcgatggttcttcatcactttgatatcgactgagaagagggattcgtttggagcatgttccagttcttatctggtatttgctttcgcgcttgcgaggaatttgaacccaacatcccccctcactatcgcgtctcgccttagactctcgcttctcttcatccattcacattcgtagagtcttgcctcttccgcttattgcatagtgccatattgacaggaagcactactaaggacatgaaaaaagagagaaataactcactgtaaccatcgccactcgtaagccacaactcgtacttcctcgttgcctcgcggagaacttcgtaaccggcgcagatggcaacgatgataagcaggctagagatgagcgaccaagtccctgtgacacgccattgccggaagatgatgcacaagttgtttgtgtcccaagtgaacaacatct

SEQ ID NO: 1525 - DNA, 1407 bp, Muscodor strobelii
  misc_feature: SGI cDNA ID NO. 560112
  misc_feature: Encodes the peptide sequence at SEQ ID NO 1526
atgtatgcagccttgaatcctactaaagcagaattcaggctactctctataaaaccaagcgctgcgtatgacgacagaatctcctgcacgatcacggttgttcaactagattgctttacgccacagtatgcagcattgtcatacgtttggggcgatgcgacaaacactgaggaaatcgtagtcaacgagcattcattccaggctacgagaagtctcgcttcagcacttagacagttcagagaaacatacaccggaaactatgagagcccttcattcctgtgggctgatgccatctgcattaaccagcatgatatagctgagaagagccagcaggtctctatgatgggttctatattcctgaaagctactctggtcatgtcctggctgggctacccagctgaagatgccctgtcgtctctcgaatggggattgaggcttattcgagcttgcgccgctcatgttgaagcagctacgacaagattgggtgcgtatccagagcgacgagccgtcatgggtgattcagaccttgattttctgagagagtgctctgagttctacgaagagaacactacacgattcgctaagaataaagcttggaatgcacttgacaaccttagcgagcacgtctactggactcgcatctggatcgttcaggaggtcgtccttgcgcagaggcccgatatcaacatcatccactgtggtagacataccattaccttccagcaattgatctacttcgacctcttcgcggagtggctcttacgccaaaagcccacgaaaccttcctttttcaatcaacgagtgtgggactggatcatgaatgggagcgagctaccactttccttcatcgaatccataaaggcactgcgagatcctgaatttagatcagaaggatcctatcgagccattctattaatcaatgcttcgtgtcattcaagcgacccgagagatgctgtctttgcactctgtggattaactggcgtagatattgtaccagactatgccaaggaggttgttgatgtctgcagggatctggtagcctcagcactacagcgcaagaagtacaagaactttttctgcttcgctggcctcatactcgaaaacagagccgcctcggagtttccatcatgggtcccgagattaaacactttgaaagacgacgtaaattataccgttcttcctccgaatgcatttgctcaaccctggctccacgagctacaccccgaaggtccaacgattgtggatgagcgcacgattcggttcggtgtacaacttgatcattgcgcaagagtgatgcgttacttcggagatagatgcccagatctttttgagctaaggaatcagttctggtggcattgtgttgagatcatcaacaatgtcgagggttcgcccacgccgatgggatag

SEQ ID NO: 1526 - protein, 468 aa, Muscodor strobelii
  misc_feature: SGI Peptide ID NO. 560112
  misc_feature (43)..(219): Pfam Id: PF06985 Pfam Desc: Heterokaryon incompatibility protein (HET)
  misc_feature (43)..(141): Pfam Id: PF06985 Pfam Desc: Heterokaryon incompatibility protein (HET)
  misc_feature (1)..(445): NCBI GI: 256724547 Blast Desc: NECHADRAFT_88232 [Nectria haematococca mpVI 77-13-4]
  misc_feature (2)..(379): NCBI GI: 256724627 Blast Desc: NECHADRAFT_84376 [Nectria haematococca mpVI 77-13-4]
  misc_feature (6)..(386): NCBI GI: 154305655 Blast Desc: BC1G_07642 [Botryotinia fuckeliana B05.10] gi|150853161|gb|EDN28353.1| BC1G_07642 [Botryotinia fuckeliana B05.10]
  misc_feature (1)..(346): NCBI GI: 256734865 Blast Desc: NECHADRAFT_75566 [Nectria haematococca mpVI 77-13-4]
  misc_feature (1)..(381): NCBI GI: 171679799 Blast Desc: protein product [Podospora anserina] gi|170939525|emb|CAP64753.1| protein product [Podospora anserina]
  misc_feature (1)..(394): NCBI GI: 145234110 Blast Desc: An02g12950 [Aspergillus niger] gi|134057368|emb|CAK37923.1| protein product [Aspergillus niger]
  misc_feature (1)..(363): NCBI GI: 154292443 Blast Desc: BC1G_14540 [Botryotinia fuckeliana B05.10] gi|150846126|gb|EDN21319.1| BC1G_14540 [Botryotinia fuckeliana B05.10]
  misc_feature (1)..(401): NCBI GI: 67538668 Blast Desc: AN5504.2 [Aspergillus nidulans FGSC A4] gi|40743474|gb|EAA62664.1| AN5504.2 [Aspergillus nidulans FGSC A4] gi|259485046|tpe|CBF81783.1| TPA: HET domain protein nidulans
  misc_feature (5)..(412): NCBI GI: 168042194 Blast Desc: [Physcomitrella patens subsp. patens] gi|162675113|gb|EDQ61612.1| [Physcomitrella patens subsp. patens]
  misc_feature (1)..(219): NCBI GI: 189194125 Blast Desc: heterokaryon incompatibility protein [Pyrenophora tritici-repentis Pt-1C-BFP] gi|187978965|gb|EDU45591.1| heterokaryon incompatibility protein [Pyrenophora Pt-1C-BFP]
MYAALNPTKAEFRLLSIKPSAAYDDRISCTITVVQLDCFTPQYAALSYVWGDATNTEEIVVNEHSFQATRSLASALRQFRETYTGNYESPSFLWADAICINQHDIAEKSQQVSMMGSIFLKATLVMSWLGYPAEDALSSLEWGLRLIRACAAHVEAATTRLGAYPERRAVMGDSDLDFLRECSEFYEENTTRFAKNKAWNALDNLSEHVYWTRIWIVQEVVLAQRPDINIIHCGRHTITFQQLIYFDLFAEWLLRQKPTKPSFFNQRVWDWIMNGSELPLSFIESIKALRDPEFRSEGSYRAILLINASCHSSDPRDAVFALCGLTGVDIVPDYAKEVVDVCRDLVASALQRKKYKNFFCFAGLILENRAASEFPSWVPRLNTLKDDVNYTVLPPNAFAQPWLHELHPEGPTIVDERTIRFGVQLDHCARVMRYFGDRCPDLFELRNQFWWHCVEIINNVEGSPTPMG

SEQ ID NO: 1527 - DNA, 259 bp, Muscodor strobelii
  misc_feature: SGI EST ID NO. CUFF.3952.0
  misc_feature: Variant of the nucleotide sequence at SEQ ID NO 1525
actttttctgcttcgctggcctcatactcgaaaacagagccgcctcggagtttccatcatgggtcccgagattaaacactttgaaagacgacgtaaattataccgttcttcctccgaatgcatttgctcaaccctggctccacgagctacaccccgaaggtccaacgattgtggatgagcgcacgattcggttcggtgtacaacttgatcattgcgcaagagtgatgcgttacttcggagatagatgcccagatctttt

SEQ ID NO: 1528 - DNA, 918 bp, Muscodor strobelii
  misc_feature: SGI cDNA ID NO. 560113
  misc_feature: Encodes the peptide sequence at SEQ ID NO 1529
atggtcaaaccgcttcagcttagtacggccaacgtaccaaatcacgagcaagaaccggcccttgaatctcctcagccgcgacgtcctgaagcgagattatcagaatggtttgaaagcgatgattatgaatctgcgcctcagacagaagtaagccccgtctcgcctggactggcaacggctagtttagtttcacccctgacgccagccgctgggttcggaacattcccagtgaaagtcacggagcctccaaatagctcagagacggagacaaaacatcaatccttagagcctccgtgtgcaggcatgctgtctactcaaccacacaatccatctcgacttcggtatagtgacccaggtagcccaactgtgccagtacctggtccaagctatagagacttcggtgagccaggaccagatgtaggaggctcacgtcgttttgagaatgcgtcgaagagtcaaacaaaagaacggccagtgtcagccgggcagaaccatgtctcgttctcaacgaaaaagatagactcgttctcatccgtcagaccgagtggtaccgcccctccaccactcgctctgaagcaacgcgctgttggggctacttatgtgaagactccctttccaccactgtcgaacccagactcatcgcagaatagctccccggaaaccgacagtccgcaaggaactgaaagcactttacaaagggaggagcaggttgagaagacattcgaggctatggatatcaaaccacgggggcccaaacgagcttcttcgtacttggaaagatctacgcccaaggttaaagatatgttttctagggcaaaacagggcctgggacttggaaatgaggaagcgaagaaagagaagaggcggcaggctttgaaaagtcagatccgtttgagtcatggcgaaaatgttatataa

SEQ ID NO: 1529 - protein, 305 aa, Muscodor strobelii
  misc_feature: SGI Peptide ID NO. 560113
MVKPLQLSTANVPNHEQEPALESPQPRRPEARLSEWFESDDYESAPQTEVSPVSPGLATASLVSPLTPAAGFGTFPVKVTEPPNSSETETKHQSLEPPCAGMLSTQPHNPSRLRYSDPGSPTVPVPGPSYRDFGEPGPDVGGSRRFENASKSQTKERPVSAGQNHVSFSTKKIDSFSSVRPSGTAPPPLALKQRAVGATYVKTPFPPLSNPDSSQNSSPETDSPQGTESTLQREEQVEKTFEAMDIKPRGPKRASSYLERSTPKVKDMFSRAKQGLGLGNEEAKKEKRRQALKSQIRLSHGENVI

SEQ ID NO: 1530 - DNA, 2070 bp, Muscodor strobelii
  misc_feature: SGI cDNA ID NO. 560114
  misc_feature: Reduced expression when VOC is produced
  misc_feature: Encodes the peptide sequence at SEQ ID NO 1531
atggctccacgcgagaaaagccaattgaagcgccttcgagactctcccagccaggcagacagcgacctgaacaagaaacctcgtcgctccgagcgtctgtcacagaagcccgaccaccccaccgacaacaagcatgacaagcacgacaagctcaagactccagtcgtcaactaccagctcccctcgcccgtcacacacttgaccgacagcgacccggccatctacaaggagcccactgccgagccgcctgagggacgccccagccaggtcacacatcgctcgcccgaggagacgtactcccaggctcacgccctctcttcgccgccacaggacacacaagctttccccaactcccagtacgtcgatcccgagggcgctctatcggacgaggtcgaagatgagataaaggagggcgtctggggctatctgttccccctcgacacacgctatggcggaagatgcgttgtcctcaagaagcgctcgacatgtccccacgacggcgacgtctcgaccactctcggtcccaaatccaacaagaaggatgcgcccgccttggagcaggaggaatcctacgaggcttccaaagtcaagggcgtcgcatcaggtggctatctgatcggccgccaccccgagtgtgacgtcatcatagatgatcccatagtctcaaaccgccactgcttgatcttcaatgagaacaagggcgcagacaacatcgccatcatagaagatctctcaagtaacggcacattcgtgaacgaggctatcgttgggcgcaatcaacgccgtgagctgtcggagcaggacgagatcgcagttatggacaaggctcgtttcatattccgctatccccgcagccggacttcaagtggcttcttgcagcaatacacgttgcttgaacgcctcggcaagggccactttgccgaagtctttttgtgcgtcgagaaatcaacgggaacacgctatgccgtcaaagtcttcagcaaacaacccggtctggaggagcgatcaaaaacagacggcctgcagcaagagattgccgtcttgatgggtgtcagtcaccctaatgttctatgcctcaaggacaccttcaacgagaccaatgctgtctatctggttctggaactcgcacctgagggtgaactgttcaactttatagtgatgaaacagaagctttcggagaacgagacgagagatctgtttgtccaactgtttcaaggtatcaagtacttgcacgatcgcaatatcgttcatcgtgatatcaaacctgaaaacattctgttggtggacaaagaagcccacgcaaagcttgcggactttggtcttgccaagatcatcggtgaggagtcttttaccacaacgctctgtggaacgccaagctatgtcgctcctgagatattggcagaaggtcgacacaggaaatacacgaaagccgtcgatgtctggtcgcttggagtcgtgctatatatctgcctgtgtggatttcctccgttctccgatgaactttacagtcgcgacttcccttatactttgtcgcaacagattaagagcggacgattcgactatccttccccatactgggactcagtgggggatccagcccttgatctaattgatcgtatgctcgtggtcgagccagaaagacgctacaccgttgatgagtgtctacagcacccgtggctgaccaacaagcttcctggagtcgctgatagcacagatggcctcgtggacggtattggtggactcgacatgcatcgccgaggcgttgttcgcgaacgcacactcctcagctccattaattcagtccatctgacccacaaagctcctatagaccctgagggcaagcaaacggtgaaggtctacgcgaagaacccttccgcagagaagcatcagcccccagcaaaagagatgcgacctgatgatcagcgagcccccaatgagttcatgcaaatgggaggcaaaggcgatgagcagttattcggaaacgacaacggtagtttttattcgacatccgaagcgactgctgctaaaggtgggaaggtcaaggctaaggcaaagacgaatggtcgataa

SEQ ID NO: 1531 - protein, 689 aa, Muscodor strobelii
  misc_feature: SGI Peptide ID NO. 560114
  misc_feature (204)..(273): Pfam Id: PF00498 Pfam Desc: FHA domain
  misc_feature (295)..(560): Pfam Id: PF00069 Pfam Desc: Protein kinase domain
  misc_feature (295)..(558): Pfam Id: PF07714 Pfam Desc: Protein tyrosine kinase
  misc_feature (295)..(488): Pfam Id: PF07714 Pfam Desc: Protein tyrosine kinase
  misc_feature (1)..(674): NCBI GI: 107770479 Blast Desc: checkpoint kinase 2-like [Neurospora crassa]
  misc_feature (14)..(688): NCBI GI: 171696168 Blast Desc: protein product [Podospora anserina] gi|170948326|emb|CAP60490.1| protein product [Podospora anserina]
  misc_feature (1)..(674): NCBI GI: 164427690 Blast Desc: NCU02814 [Neurospora crassa OR74A] gi|157071846|gb|EAA35234.2| NCU02814 [Neurospora crassa OR74A]
  misc_feature (1)..(682): NCBI GI: 46125487 Blast Desc: FG07121.1 [Gibberella zeae PH-1]
  misc_feature (1)..(681): NCBI GI: 256732635 Blast Desc: [Nectria haematococca mpVI 77-13-4]
  misc_feature (16)..(676): NCBI GI: 145613492 Blast Desc: MGG_01596 [Magnaporthe grisea 70-15] gi|145020559|gb|EDK04688.1| MGG_01596 [Magnaporthe grisea 70-15]
  misc_feature (4)..(667): NCBI GI: 154323894 Blast Desc: BC1G_00346 [Botryotinia fuckeliana B05.10] gi|150842575|gb|EDN17768.1| BC1G_00346 [Botryotinia fuckeliana B05.10]
  misc_feature (5)..(684): NCBI GI: 156056677 Blast Desc: SS1G_04069 [Sclerotinia sclerotiorum 1980] gi|154701855|gb|EDO01594.1| SS1G_04069 [Sclerotinia sclerotiorum 1980]
  misc_feature (1)..(671): NCBI GI: 116181666 Blast Desc: CHGG_01461 [Chaetomium globosum CBS 148.51] gi|88185758|gb|EAQ93226.1| CHGG_01461 [Chaetomium globosum CBS 148.51]
  misc_feature (1)..(662): NCBI GI: 242775705 Blast Desc: cell-cycle checkpoint protein kinase, [Talaromyces stipitatus ATCC 10500] gi|218722313|gb|EED21731.1| cell-cycle checkpoint protein kinase, [Talaromyces stipitatus ATCC 10500]
  misc_feature (205)..(562): SWISSPROT Homolog: EC 2.7.11.1 Non-specific serine/threonine protein kinase
  misc_feature: Useful for introducing or modulating the production of volatile compounds
MAPREKSQLKRLRDSPSQADSDLNKKPRRSERLSQKPDHPTDNKHDKHDKLKTPVVNYQLPSPVTHLTDSDPAIYKEPTAEPPEGRPSQVTHRSPEETYSQAHALSSPPQDTQAFPNSQYVDPEGALSDEVEDEIKEGVWGYLFPLDTRYGGRCVVLKKRSTCPHDGDVSTTLGPKSNKKDAPALEQEESYEASKVKGVASGGYLIGRHPECDVIIDDPIVSNRHCLIFNENKGADNIAIIEDLSSNGTFVNEAIVGRNQRRELSEQDEIAVMDKARFIFRYPRSRTSSGFLQQYTLLERLGKGHFAEVFLCVEKSTGTRYAVKVFSKQPGLEERSKTDGLQQEIAVLMGVSHPNVLCLKDTFNETNAVYLVLELAPEGELFNFIVMKQKLSENETRDLFVQLFQGIKYLHDRNIVHRDIKPENILLVDKEAHAKLADFGLAKIIGEESFTTTLCGTPSYVAPEILAEGRHRKYTKAVDVWSLGVVLYICLCGFPPFSDELYSRDFPYTLSQQIKSGRFDYPSPYWDSVGDPALDLIDRMLVVEPERRYTVDECLQHPWLTNKLPGVADSTDGLVDGIGGLDMHRRGVVRERTLLSSINSVHLTHKAPIDPEGKQTVKVYAKNPSAEKHQPPAKEMRPDDQRAPNEFMQMGGKGDEQLFGNDNGSFYSTSEATAAKGGKVKAKAKTNGR

SEQ ID NO: 1532 - DNA, 2982 bp, Muscodor strobelii
  misc_feature: SGI EST ID NO. CUFF.4196.1
  misc_feature: Variant of the nucleotide sequence at SEQ ID NO 1530
gtgacctctacatcgcgttaaaaagaaaaaacggatgaaaaggcggtagcttggagctatcggtcactcagatccccgtcccaacgtgcatcctcctgcatcaagcttcaaagtcgactactccaagaccactcgacgcctgcctttccgtctcttccccaggcagcgaatccacttcctcgtgcgtcgcttgagtacatcgccgaatcgcacccattagtcactttcccatcctcgtcttgttttcccgtttttcttcggctgtcgtcattcccgtagctgttcgttcctgtactgtaccgttgcacctgagatttcagaaattcgcagcgcatttctaggcatctatccgcattccagccaggcaatcggcgtgttacattcattccctatcttatccagttgattactatacgtactatacgcactatacgcactgcctatccgccctgctggacgccgacatggctccacgcgagaaaagccaattgaagcgccttcgagactctcccagccaggcagacagcgacctgaacaagaaacctcgtcgctccgagcgtctgtcacagaagcccgaccaccccaccgacaacaagcatgacaagcacgacaagctcaagactccagtcgtcaactaccagctcccctcgcccgtcacacacttgaccgacagcgacccggccatctacaaggagcccactgccgagccgcctgagggacgccccagccaggtcacacatcgctcgcccgaggagacgtactcccaggctcacgccctctcttcgccgccacaggacacacaagctttccccaactcccagtacgtcgatcccgagggcgctctatcggacgaggtcgaagatgagataaaggagggcgtctggggctatctgttccccctcgacacacgctatggcggaagatgcgttgtcctcaagaagcgctcgacatgtccccacgacggcgacgtctcgaccactctcggtcccaaatccaacaagaaggatgcgcccgccttggagcaggaggaatcctacgaggcttccaaagtcaagggcgtcgcatcaggtggctatctgatcggccgccaccccgagtgtgacgtcatcatagatgatcccatagtctcaaaccgccactgcttgatcttcaatgagaacaagggcgcagacaacatcgccatcatagaagatctctcaagtaacggcacattcgtgaacgaggctatcgttgggcgcaatcaacgccgtgagctgtcggagcaggacgagatcgcagttatggacaaggctcgtttcatattccgctatccccgcagccggacttcaagtggcttcttgcagcaatacacgttgcttgaacgcctcggcaagggccactttgccgaagtctttttgtgcgtcgagaaatcaacgggaacacgctatgccgtcaaagtcttcagcaaacaacccggtctggaggagcgatcaaaaacagacggcctgcagcaagagattgccgtcttgatgggtgtcagtcaccctaatgttctatgcctcaaggacaccttcaacgagaccaatgctgtctatctggttctggaactcgcacctgagggtgaactgttcaactttatagtgatgaaacagaagctttcggagaacgagacgagagatctgtttgtccaactgtttcaaggtatcaagtacttgcacgatcgcaatatcgttcatcgtgatatcaaacctgaaaacattctgttggtggacaaagaagcccacgcaaagcttgcggactttggtcttgccaagatcatcggtgaggagtcttttaccacaacgctctgtggaacgccaagctatgtcgctcctgagatattggcagaaggtcgacacaggaaatacacgaaagccgtcgatgtctggtcgcttggagtcgtgctatatatctgcctgtgtggatttcctccgttctccgatgaactttacagtcgcgacttcccttatactttgtcgcaacagattaagagcggacgattcgactatccttccccatactgggactcagtgggggatccagcccttgatctaattgatcgtatgctcgtggtcgagccagaaagacgctacaccgttgatgagtgtctacagcacccgtggctgaccaacaagcttcctggagtcgctgatagcacagatggcctcgtggacggtattggtggactcgacatgcatcgccgaggcgttgttcgcgaacgcacactcctcagctccattaattcagtccatctgacccacaaagctcctatagaccctgagggcaagcaaacggtgaaggtctacgcgaagaacccttccgcagagaagcatcagcccccagcaaaagagatgcgacctgatgatcagcgagcccccaatgagttcatgcaaatgggaggcaaaggcgatgagcagttattcggaaacgacaacggtagtttttattcgacatccgaagcgactgctgctaaaggtgggaaggtcaaggctaaggcaaagacgaatggtcgataaatcaccacagtcacattgtcaggtgtgcgaagtagaattttgattctgagtgtatatattgtaccgacggtggcgttatcctcgttcaacctcgtggcatgacatcgaagagctcatgcgacgacacttatctgtcctttctgttttacggtcgaagatggtatctcatactggcatctcaattgctattgctcatactatattagcatgtacttgctgcttcggattctacggatatgtagaggatcgcaacacctgtgcatgggattttggaaggcttatacgggaaaagttgattggtacgtaacgtccgaagtcgagagacggtggcgtcgcgtcttgacctgagatatgattataatatacctgaagtacctcacaatgccattgggaatgtgaccgttgattcttatcggagtatcgtcaaagtagtaaaatggatatcttg

SEQ ID NO: 1533 - DNA, 2121 bp, Muscodor strobelii
  misc_feature: SGI cDNA ID NO. 560115
  misc_feature: Encodes the peptide sequence at SEQ ID NO 1534
atggctccacgcgagaaaagccaattgaagcgccttcgagactctcccagccaggcagacagcgacctgaacaagaaacctcgtcgctccgagcgtctgtcacagaagcccgaccaccccaccgacaacaagcatgacaagcacgacaagctcaagactccagtcgtcaactaccagctcccctcgcccgtcacacacttgaccgacagcgacccggccatctacaaggagcccactgccgagccgcctgagggacgccccagccaggtcacacatcgctcgcccgaggagacgtactcccaggctcacgccctctcttcgccgccacaggacacacaagctttccccaactcccagtacgtcgatcccgagggcgctctatcggacgaggtcgaagatgagataaaggagggcgtctggggctatctgttccccctcgacacacgctatggcggaagatgcgttgtcctcaagaagcgctcgacatgtccccacgacggcgacgtctcgaccactctcggtcccaaatccaacaagaaggatgcgcccgccttggagcaggaggaatcctacgaggcttccaaagtcaagggcgtcgcatcaggtggctatctgatcggccgccaccccgagtgtgacgtcatcatagatgatcccatagtctcaaaccgccactgcttgatcttcaatgagaacaagggcgcagacaacatcgccatcatagaagatctctcaagtaacggcacattcgtgaacgaggctatcgttgggcgcaatcaacgccgtgagctgtcggagcaggacgagatcgcagttatggacaaggctcgtttcatattccgctatccccgcagccggacttcaagtggcttcttgcagcaatacacgttgcttgaacgcctcggcaagggccactttgccgaagtctttttgtgcgtcgagaaatcaacgggaacacgctatgccgtcaaagtcttcagcaaacaacccggtctggaggagcgatcaaaaacagacggcctgcagcaagagattgccgtcttgatgggtgtcagtcaccctaatgttctatgcctcaaggacaccttcaacgagaccaatgctgtctatctggttctggaactcgcacctgagggtgaactgttcaactttatagtgatgaaacagaagctttcggagaacgagacgagagatctgtttgtccaactgtttcaaggtatcaagtacttggtatgtctcgctccattcacccatgccttcgatcatgctaacccttacaagcacgatcgcaatatcgttcatcgtgatatcaaacctgaaaacattctgttggtggacaaagaagcccacgcaaagcttgcggactttggtcttgccaagatcatcggtgaggagtcttttaccacaacgctctgtggaacgccaagctatgtcgctcctgagatattggcagaaggtcgacacaggaaatacacgaaagccgtcgatgtctggtcgcttggagtcgtgctatatatctgcctgtgtggatttcctccgttctccgatgaactttacagtcgcgacttcccttatactttgtcgcaacagattaagagcggacgattcgactatccttccccatactgggactcagtgggggatccagcccttgatctaattgatcgtatgctcgtggtcgagccagaaagacgctacaccgttgatgagtgtctacagcacccgtggctgaccaacaagcttcctggagtcgctgatagcacagatggcctcgtggacggtattggtggactcgacatgcatcgccgaggcgttgttcgcgaacgcacactcctcagctccattaattcagtccatctgacccacaaagctcctatagaccctgagggcaagcaaacggtgaaggtctacgcgaagaacccttccgcagagaagcatcagcccccagcaaaagagatgcgacctgatgatcagcgagcccccaatgagttcatgcaaatgggaggcaaaggcgatgagcagttattcggaaacgacaacggtagtttttattcgacatccgaagcgactgctgctaaaggtgggaaggtcaaggctaaggcaaagacgaatggtcgataa

SEQ ID NO: 1534 - protein, 706 aa, Muscodor strobelii
  misc_feature: SGI Peptide ID NO. 560115
  misc_feature (204)..(273): Pfam Id: PF00498 Pfam Desc: FHA domain
  misc_feature (295)..(577): Pfam Id: PF00069 Pfam Desc: Protein kinase domain
  misc_feature (295)..(410): Pfam Id: PF07714 Pfam Desc: Protein tyrosine kinase
  misc_feature (428)..(505): Pfam Id: PF07714 Pfam Desc: Protein tyrosine kinase
  misc_feature (1)..(691): NCBI GI: 107770479 Blast Desc: checkpoint kinase 2-like [Neurospora crassa]
  misc_feature (14)..(705): NCBI GI: 171696168 Blast Desc: protein product [Podospora anserina] gi|170948326|emb|CAP60490.1| protein product [Podospora anserina]
  misc_feature (1)..(691): NCBI GI: 164427690 Blast Desc: NCU02814 [Neurospora crassa OR74A] gi|157071846|gb|EAA35234.2| NCU02814 [Neurospora crassa OR74A]
  misc_feature (1)..(699): NCBI GI: 46125487 Blast Desc: FG07121.1 [Gibberella zeae PH-1]
  misc_feature (1)..(698): NCBI GI: 256732635 Blast Desc: [Nectria haematococca mpVI 77-13-4]
  misc_feature (16)..(693): NCBI GI: 145613492 Blast Desc: MGG_01596 [Magnaporthe grisea 70-15] gi|145020559|gb|EDK04688.1| MGG_01596 [Magnaporthe grisea 70-15]
  misc_feature (4)..(684): NCBI GI: 154323894 Blast Desc: BC1G_00346 [Botryotinia fuckeliana B05.10] gi|150842575|gb|EDN17768.1| BC1G_00346 [Botryotinia fuckeliana B05.10]
  misc_feature (5)..(701): NCBI GI: 156056677 Blast Desc: SS1G_04069 [Sclerotinia sclerotiorum 1980] gi|154701855|gb|EDO01594.1| SS1G_04069 [Sclerotinia sclerotiorum 1980]
  misc_feature (1)..(688): NCBI GI: 116181666 Blast Desc: CHGG_01461 [Chaetomium globosum CBS 148.51] gi|88185758|gb|EAQ93226.1| CHGG_01461 [Chaetomium globosum CBS 148.51]
  misc_feature (1)..(679): NCBI GI: 242775705 Blast Desc: cell-cycle checkpoint protein kinase, [Talaromyces stipitatus ATCC 10500] gi|218722313|gb|EED21731.1| cell-cycle checkpoint protein kinase, [Talaromyces stipitatus ATCC 10500]
  misc_feature (205)..(579): SWISSPROT Homolog: EC 2.7.11.1 Non-specific serine/threonine protein kinase
MAPREKSQLKRLRDSPSQADSDLNKKPRRSERLSQKPDHPTDNKHDKHDKLKTPVVNYQLPSPVTHLTDSDPAIYKEPTAEPPEGRPSQVTHRSPEETYSQAHALSSPPQDTQAFPNSQYVDPEGALSDEVEDEIKEGVWGYLFPLDTRYGGRCVVLKKRSTCPHDGDVSTTLGPKSNKKDAPALEQEESYEASKVKGVASGGYLIGRHPECDVIIDDPIVSNRHCLIFNENKGADNIAIIEDLSSNGTFVNEAIVGRNQRRELSEQDEIAVMDKARFIFRYPRSRTSSGFLQQYTLLERLGKGHFAEVFLCVEKSTGTRYAVKVFSKQPGLEERSKTDGLQQEIAVLMGVSHPNVLCLKDTFNETNAVYLVLELAPEGELFNFIVMKQKLSENETRDLFVQLFQGIKYLVCLAPFTHAFDHANPYKHDRNIVHRDIKPENILLVDKEAHAKLADFGLAKIIGEESFTTTLCGTPSYVAPEILAEGRHRKYTKAVDVWSLGVVLYICLCGFPPFSDELYSRDFPYTLSQQIKSGRFDYPSPYWDSVGDPALDLIDRMLVVEPERRYTVDECLQHPWLTNKLPGVADSTDGLVDGIGGLDMHRRGVVRERTLLSSINSVHLTHKAPIDPEGKQTVKVYAKNPSAEKHQPPAKEMRPDDQRAPNEFMQMGGKGDEQLFGNDNGSFYSTSEATAAKGGKVKAKAKTNGR

SEQ ID NO: 1535 - DNA, 2982 bp, Muscodor strobelii; identical to SEQ ID NO: 1532
  misc_feature: SGI EST ID NO. CUFF.4196.1
  misc_feature: Variant of the nucleotide sequence at SEQ ID NO 1533

SEQ ID NO: 1536 - DNA, 3207 bp, Muscodor strobelii
  misc_feature: SGI cDNA ID NO. 560116
  misc_feature: Reduced expression when VOC is produced
  misc_feature: Encodes the peptide sequence at SEQ ID NO 1537
atgccatggcccttccaaggtcgcgacgccgacagcaaatcgcttctccccacctccgtacccgccatcaacggcatcgatcgcgattatgactacaacactgctaaagatcgctcgagatcgccttcgccccgcccaggtctggtccgcaccacatcggcgcagtcgaggtctgtcgccgatgccttttcctccataacacccgccgaaaccgccacacgcctccaaagctccctgacacatggcctctcccccggcgaggccctgtcccgactacgagactatggccccaacgagattccacacgaggagccagaccccttatggctgcgcttcctcatgcagttccgagagccactcattgttctcttgctcgtctctgctttcctctccatattcgttggcaacatggacgacgccatcagcattaccgtcgccgtcaccatcgtcgtctctgtcggcttcatccaggaatatagatcagaaaagtccattgaggctctgagccatctcgttccaaaccacgcgcacctggttcgatctcagaattcaagggtcacggccagcgccagaccggcgtggccccccgtggagaatggtcagaatgcggttgatccatcagccggcgctgagactccagtggaagatcaaatggaagcgacatctactaaagttatggccgcacaattggttcctggggatctggtcttgttcacgactggcgatcgtatcccggccgatattcggataacggatgcgtctgatttgaccatcgatgagtctaatttgaccggcgagaacgagcccatgaggaagaccgaagacacaagaactcgcgatacgttagcagcgatatcgagtacagtgcgcaacccaagtcccgcactcacggcctcgcaaccaaaggaaaactcgcacgacaatgggttagacaatatcgcgtatatgggaacattggtcaaatcaggctacggacaaggcattgtgttcgcgactggcggcgatacacactttggcaccattgccacaagcgtctctggaaccgagagcccccgttcgcctctccaggtcaacatggaccagttgggaaagcaattgagccagatctcctttggtatcatcggcctcatatccatagtgggtttattacagggtaagaagatattggatcttttcaccatatccatatctcttgccgtagctgctatccctgagggtctacctattatcgtaaccgtgaccctggcgctgggtgtccaccggatggcaaaacacaacgccatcgttcgaaagatgccgagcgtggagaccttgggatctgtgaacgttgtgtgttccgataaaacgggaactttgacaatgaatcacatgaccactgccaagatgtggtatttcggctcgaatgcaccgctcgatgtcgattcaccggatcttgatgctggggtgactcctgatgttgcagctttgaaaatattacggattggcaatatcgccaacaatgctcgtcttgcacatggggtgaaaactgccatccctgacgcggggagcaaggatttcacctctttcacccgatgggtaggccagcccacagatgtcgccatgcttgatctcctcgacagattcaaggagcacgatgtaagggactcgataggaccgcgtacaacagaagtgccctttagttcagagcggaaatggatgggtgtggtgatcggtgcgcagcctggaaatagcgagaaggagtatgcgtacatgaaaggcgccgtggataagatattagagtcatgtgattcgtatctcacgcccgacggtcgagaagtcgtcatggactcccaacggcgccaggaagctcttcaggcagcagatgcgctggcagaaaaaggtctgcgcgtcttagcattcgcaagcggtccagtctctcgatccatgcggaccagatccggattctcatcggcccctcggagcggtacaccagtcgcccacgacggcaaacagagtccctcctcgacggcgaatgaagacttataccgaggtctgacatttgcgggcttggtgggaatgagtgacccgcccaggccaggtgtagcgcggtcgattcgaaagctcatgcgcggtggtgttaaagtcattatgattacaggagattctgctacaaccgcggtggccatcggaaggcagcttggcatgcaaattgccactccgcgagaccatgcttcgaaccaagcagcggtgaagccagtactaaccggcgtcgaggtggatgccatgagtgagcttgagctaggagcagcaatgcagtctacaacgatctttgcccgaaccaatccagaccataaactgaagatcatccgcgctctgcaatcccgaggcgatatcgtggcgatgactggagatggagtcaacgatgccccggcactgaaaaaggcagacattggtatatccatgggactgcacggaacagatgtcgccaaggaggcatctgatatgattctcacagacgacgacttctccacaatcttgagcgccatcgaggagggtaaaggcatcttcaacaacatccagaatttcatcacgttccagcttagcacgagcgtcgctagtctcacattggtcttcctctgcacgtgtctcggctttaagacacccctgaacgccatgcagattctctggatcaatatcatcatggacggccccccagctcaatctctaggcgtagaaaaggtcgacccagacgtcatgtctcgtccaccacgctctcgcagcgaaccggtcctcacgcgcgcgctattaacgcgtgtgttgacctctgccgccatcataatgacaggcacgatgctagtatactaccacgagatgttatcagacggcgaagtgacacgccgcgacacaacaatgacatttacgtgtttcgtactattcgacatgttcaacgcgctatcctgtcgctcagagagcaaatcagtctttcgcggcgaagtcggcttattctctaacaaactattcaactgggcggtatcactcagtctagccggtcaactactagttatctacttcccctggcttcaagaagtcttccagacggaagccctggggctcttcgatctgatccggcttttcgcgctagcgagctctgtgttttgggctgatgaggcgaggaaatggtataagtatggtcgcaggcggatcggcgcgtatagtcaagctgtgtaa

SEQ ID NO: 1537 - protein, 1068 aa, Muscodor strobelii
  misc_feature: SGI Peptide ID NO. 560116
  misc_feature (441)..(818): Pfam Id: PF00702 Pfam Desc: haloacid dehalogenase-like hydrolase
  misc_feature (914)..(1058): Pfam Id: PF00689 Pfam Desc: Cation transporting ATPase, C-terminus
  misc_feature (53)..(136): Pfam Id: PF00690 Pfam Desc: Cation transporter/ATPase, N-terminus
  misc_feature (142)..(437): Pfam Id: PF00122 Pfam Desc: E1-E2 ATPase
  misc_feature (1)..(1068): NCBI GI: 46107250 Blast Desc: FG00508.1 [Gibberella zeae PH-1]
  misc_feature (1)..(1068): NCBI GI: 256734531 Blast Desc: [Nectria haematococca mpVI 77-13-4]
  misc_feature (1)..(1068): NCBI GI: 261356009 Blast Desc: calcium-transporting ATPase [Verticillium albo-atrum VaMs.102]
  misc_feature (37)..(1068): NCBI GI: 145605393 Blast Desc: MGG_11727 [Magnaporthe grisea 70-15] gi|145013211|gb|EDJ97852.1| MGG_11727 [Magnaporthe grisea 70-15]
  misc_feature (35)..(1068): NCBI GI: 171695416 Blast Desc: protein product [Podospora anserina] gi|170947950|emb|CAP60114.1| protein product [Podospora anserina]
  misc_feature (36)..(1068): NCBI GI: 85112022 Blast Desc: calcium-transporting ATPase type 2C member 1 [Neurospora crassa OR74A] gi|6688835|emb|CAB65296.1| calcium P-type ATPase [Neurospora crassa] gi|28925990|gb|EAA34982.1| type
  misc_feature (37)..(1049): NCBI GI: 116182410 Blast Desc: CHGG_01833 [Chaetomium globosum CBS 148.51] gi|88186130|gb|EAQ93598.1| CHGG_01833 [Chaetomium globosum CBS 148.51]
  misc_feature (130)..(1068): NCBI GI: 154318738 Blast Desc: BC1G_02758 [Botryotinia fuckeliana B05.10] gi|150857888|gb|EDN33080.1| BC1G_02758 [Botryotinia fuckeliana B05.10]
  misc_feature (32)..(1060): NCBI GI: 169769456 Blast Desc: [Aspergillus oryzae RIB40] gi|238501924|ref|XP_002382196.1| calcium/mangenease P-type ATPase, [Aspergillus flavus NRRL3357] gi|83767056|dbj|BAE57196.1|
  misc_feature (32)..(1060): NCBI GI: 67900954 Blast Desc: AN7464.2 [Aspergillus nidulans FGSC A4] gi|40742854|gb|EAA62044.1| AN7464.2 [Aspergillus nidulans FGSC A4] gi|259483770|tpe|CBF79432.1| TPA: High affinity Ca2+/Mn2+ A4]
  misc_feature (61)..(1062): SWISSPROT Homolog: EC 3.6.3.8 Calcium-transporting ATPase
  misc_feature: Useful for introducing or modulating the production of volatile compounds
MPWPFQGRDADSKSLLPTSVPAINGIDRDYDYNTAKDRSRSPSPRPGLVRTTSAQSRSVADAFSSITPAETATRLQSSLTHGLSPGEALSRLRDYGPNEIPHEEPDPLWLRFLMQFREPLIVLLLVSAFLSIFVGNMDDAISITVAVTIVVSVGFIQEYRSEKSIEALSHLVPNHAHLVRSQNSRVTASARPAWPPVENGQNAVDPSAGAETPVEDQMEATSTKVMAAQLVPGDLVLFTTGDRIPADIRITDASDLTIDESNLTGENEPMRKTEDTRTRDTLAAISSTVRNPSPALTASQPKENSHDNGLDNIAYMGTLVKSGYGQGIVFATGGDTHFGTIATSVSGTESPRSPLQVNMDQLGKQLSQISFGIIGLISIVGLLQGKKILDLFTISISLAVAAIPEGLPIIVTVTLALGVHRMAKHNAIVRKMPSVETLGSVNVVCSDKTGTLTMNHMTTAKMWYFGSNAPLDVDSPDLDAGVTPDVAALKILRIGNIANNARLAHGVKTAIPDAGSKDFTSFTRWVGQPTDVAMLDLLDRFKEHDVRDSIGPRTTEVPFSSERKWMGVVIGAQPGNSEKEYAYMKGAVDKILESCDSYLTPDGREVVMDSQRRQEALQAADALAEKGLRVLAFASGPVSRSMRTRSGFSSAPRSGTPVAHDGKQSPSSTANEDLYRGLTFAGLVGMSDPPRPGVARSIRKLMRGGVKVIMITGDSATTAVAIGRQLGMQIATPRDHASNQAAVKPVLTGVEVDAMSELELGAAMQSTTIFARTNPDHKLKIIRALQSRGDIVAMTGDGVNDAPALKKADIGISMGLHGTDVAKEASDMILTDDDFSTILSAIEEGKGIFNNIQNFITFQLSTSVASLTLVFLCTCLGFKTPLNAMQILWINIIMDGPPAQSLGVEKVDPDVMSRPPRSRSEPVLTRALLTRVLTSAAIIMTGTMLVYYHEMLSDGEVTRRDTTMTFTCFVLFDMFNALSCRSESKSVFRGEVGLFSNKLFNWAVSLSLAGQLLVIYFPWLQEVFQTEALGLFDLIRLFALASSVFWADEARKWYKYGRRRIGAYSQAV

SEQ ID NO: 1538 - DNA, 3974 bp, Muscodor strobelii
  misc_feature: SGI EST ID NO. CUFF.4122.0
  misc_feature: Variant of the nucleotide sequence at SEQ ID NO 1536
ggaatatagtatggccaaaattattgcactacgtgtccgccatccgcatttggtataatctgaatatagatagtcgtaattaaatcatcgtagaaagcgattcgactcggaagctagaagagcccaggcatttgttcttcttctggcacccaacgacgactaataaggttccccgagagtcgaccgagacagacgaacacgcacacgagaggaccctgattcaaatccgccttgatcattatctcgaacctgtgctggtgacttgcaagtcaatttggccagcattcatcgacattgcgtcagcgacgacagcgacaacagcgcccaagacttcgcagacacctcgcaagacgtgcgcagcctcgtctcaatgatggtttcttgtctcccatagtctgttgcctcctaacgctctcgcgttgcaccgccaacccatcttcctctgctgcacttgcgatccgacaattctccaaccatgccatggcccttccaaggtcgcgacgccgacagcaaatcgcttctccccacctccgtacccgccatcaacggcatcgatcgcgattatgactacaacactgctaaagatcgctcgagatcgccttcgccccgcccaggtctggtccgcaccacatcggcgcagtcgagggtgagtcttgaacctattcttcctacccaagtcaccaagtcactgacaccaggaatcctcgcagtctgtcgccgatgccttttcctccataacacccgccgaaaccgccacacgcctccaaagctccctgacacatggcctctcccccggcgaggccctgtcccgactacgagactatggccccaacgagattccacacgaggagccagaccccttatggctgcgcttcctcatgcagttccgagagccactcattgttctcttgctcgtctctgctttcctctccatattcgttggcaacatggacgacgccatcagcattaccgtcgccgtcaccatcgtcgtctctgtcggcttcatccaggaatatagatcagaaaagtccattgaggctctgagccatctcgttccaaaccacgcgcacctggttcgatctcagaattcaagggtcacggccagcgccagaccggcgtggccccccgtggagaatggtcagaatgcggttgatccatcagccggcgctgagactccagtggaagatcaaatggaagcgacatctactaaagttatggccgcacaattggttcctggggatctggtcttgttcacgactggcgatcgtatcccggccgatattcggataacggatgcgtctgatttgaccatcgatgagtctaatttgaccggcgagaacgagcccatgaggaagaccgaagacacaagaactcgcgatacgttagcagcgatatcgagtacagtgcgcaacccaagtcccgcactcacggcctcgcaaccaaaggaaaactcgcacgacaatgggttagacaatatcgcgtatatgggaacattggtcaaatcaggctacggacaaggcattgtgttcgcgactggcggcgatacacactttggcaccattgccacaagcgtctctggaaccgagagcccccgttcgcctctccaggtcaacatggaccagttgggaaagcaattgagccagatctcctttggtatcatcggcctcatatccatagtgggtttattacagggtaagaagatattggatcttttcaccatatccatatctcttgccgtagctgctatccctgagggtctacctattatcgtaaccgtgaccctggcgctgggtgtccaccggatggcaaaacacaacgccatcgttcgaaagatgccgagcgtggagaccttgggatctgtgaacgttgtgtgttccgataaaacgggaactttgacaatgaatcacatgaccactgccaagatgtggtatttcggctcgaatgcaccgctcgatgtcgattcaccggatcttgatgctggggtgactcctgatgttgcagctttgaaaatattacggattggcaatatcgccaacaatgctcgtcttgcacatggggtgaaaactgccatccctgacgcggggagcaaggatttcacctctttcacccgatgggtaggccagcccacagatgtcgccatgcttgatctcctcgacagattcaaggagcacgatgtaagggactcgataggaccgcgtacaacagaagtgccctttagttcagagcggaaatggatgggtgtggtgatcggtgcgcagcctggaaatagcgagaaggagtatgcgtacatgaaaggcgccgtggataagatattagagtcatgtgattcgtatctcacgcccgacggtcgagaagtcgtcatggactcccaacggcgccaggaagctcttcaggcagcagatgcgctggcagaaaaaggtctgcgcgtcttagcattcgcaagcggtccagtctctcgatccatgcggaccagatccggattctcatcggcccctcggagcggtacaccagtcgcccacgacggcaaacagagtccctcctcgacggcgaatgaagacttataccgaggtctgacatttgcgggcttggtgggaatgagtgacccgcccaggccaggtgtagcgcggtcgattcgaaagctcatgcgcggtggtgttaaagtcattatgattacaggagattctgctacaaccgcggtggccatcggaaggcagcttggcatgcaaattgccactccgcgagaccatgcttcgaaccaagcagcggtgaagccagtactaaccggcgtcgaggtggatgccatgagtgagcttgagctaggagcagcaatgcagtctacaacgatctttgcccgaaccaatccagaccataaactgaagatcatccgcgctctgcaatcccgaggcgatatcgtggcgatgactggagatggagtcaacgatgccccggcactgaaaaaggcagacattggtatatccatgggactgcacggaacagatgtcgccaaggaggcatctgatatgattctcacagacgacgacttctccacaatcttgagcgccatcgaggagggtaaaggcatcttcaacaacatccagaatttcatcacgttccagcttagcacgagcgtcgctagtctcacattggtcttcctctgcacgtgtctcggctttaagacacccctgaacgccatgcagattctctggatcaatatcatcatggacggccccccagctcaatctctaggcgtagaaaaggtcgacccagacgtcatgtctcgtccaccacgctctcgcagcgaaccggtcctcacgcgcgcgctattaacgcgtgtgttgacctctgccgccatcataatgacaggcacgatgctagtatactaccacgagatgttatcagacggcgaagtgacacgccgcgacacaacaatgacatttacgtgtttcgtactattcgacatgttcaacgcgctatcctgtcgctcagagagcaaatcagtctttcgcggcgaagtcggcttattctctaacaaactattcaactgggcggtatcactcagtctagccggtcaactactagttatctacttcccctggcttcaagaagtcttccagacggaagccctggggctcttcgatctgatccggcttttcgcgctagcgagctctgtgttttgggctgatgaggcgaggaaatggtataagtatggtcgcaggcggatcggcgcgtatagtcaagctgtgtaagctagaggaggtgtttgatgattattatatagagagggggtttcatgaactccacttgtacaagacggcgaccaagcgctcaacatagacgaatggatggaaggtatgggattgtattgtatcatcatggtcatcgtgggaggtgcgaggacatatatatacatcaatacatatacgtacttataaatactctatcccaaatgctgaaaaggagactatgagttccag

SEQ ID NO: 1539 - DNA, 1944 bp, Muscodor strobelii
  misc_feature: SGI cDNA ID NO. 560117
  misc_feature: Reduced expression when VOC is produced
  misc_feature: Encodes the peptide sequence at SEQ ID NO 1540
atgttctattccgaagagctcctccacaagtccgggcctctggcccgggtctggctgtccgcaaaccagcacaagctgtccaagacccatgttctacagtccaatctcgcccacagtgttgatgccatcatcgcgcccacccaggctccactggcgctacgattgagtagtcagttgcttcttggtgttgtcagaatgtatagccgaaaagcgcgctaccttttggatgattgcaacgaagctcttctaaagatcaaaatggctttccgtgctaccggaaacaatgatattcctgaaaacctcaacgtgcacaaccgagaggctttaatgctgcctgatcgcatcacgcccgctgacaacttaaatatgttgccacctctgtcatcgggtcccgatgccaactggctgctcagtcagatggacgacgtcagtgccacacctgcgagctcaaacacacgcagtcgtggtagaccgagcaaccgcgacatcaacctgcaggaggacttcaacaacagccagttcctgcaagccgacgatctggatggtggcgaacttgcattggcccccatggacgatttagaacttgagctggatttcggtatggatctcgatggggcaccgaacaagagcattgaaatgggtcgagacgccccagctgcacgagctcttgaagatgatatcttcagtgagatggacatgggaacccgcacgaaaggtgctgatatggatccaaccatggatctggatctagatttcggtgacgatgggatcagaattgccgatgctgatggtgatctgcccatggatgacgatctccaattcaacatcgacgaccaatctgctatgcctgagatgggaggcatcccgccaatgactcgtgcacgtatctctgaatcgcctctttccgatattgatgagaacacagctcgcgacgtcgaagaatggactcggcttaacaacaccagcatatacgagcctggccttgatatcgaagaccctgagcctcagccacaaaagagatcaaagaagcgcaagatctttggcctggatcctgctacacagctcaccagtgctcacattaaagagcaacagcaaaaccatgacaacattcttaaggcccccagcttcatctcaagagacccttacttccttgccttgcttgaactgaagaacaacggtagctttgtctcaaacatcatgggggatggtcgcagtaaagcttgggcgcctgagctacgtgggctgttatcactggacgcgattaggcctgccaacgacctgaagcgcaagcgcgacagcggcattgctgatatgggcactgatgaggaacaaggaaactccaaatctcctcgcttagagatcgccgaggacgacgaccattttgctataaccaacaacggcatcggagaacagagcgttgcgcctgacggaaccatcctggagatccctgcagatgacggcatcgtgatccatgatgatgacgacctccaccacccaagagatgagactttgaacccagcattcgatgagacgatggcaccacttgtgcatccggccgacagtggtcccgtctcgctaggcactaagcatgccgtacacgtactccgggaactatttggctccgaggcagctaccaacgacgagaagcgcaagaaagccgtcgtgttccaggaattgctacctgagaagagagctacgaaagcagacgcgaccaagatgttcttcgagtgcttggtcctcgctaccaaggacgccatcaaagtggagcaaaaggagggcagcctgggaagtgcgattcgcgtacgaggcaagcgcggcctctggggcgagtgggctgagaaagaagccggcggcgagatggctgcacagcaagaagaggacgccatgaacgagcctgagccggccatcgccagctcgtcgcgtgccatagcggccgccgcataa

SEQ ID NO: 1540 - protein, 647 aa, Muscodor strobelii
  misc_feature: SGI Peptide ID NO. 560117
  misc_feature (550)..(599): Pfam Id: PF04824 Pfam Desc: Conserved region of Rad21 / Rec8 like protein
  misc_feature (1)..(112): Pfam Id: PF04825 Pfam Desc: N terminus of Rad21 / Rec8 like protein
  misc_feature (550)..(592): Pfam Id: PF04824 Pfam Desc: Conserved region of Rad21 / Rec8 like protein
  misc_feature (1)..(633): NCBI GI: 116182414 Blast Desc: CHGG_01835 [Chaetomium globosum CBS 148.51] gi|88186132|gb|EAQ93600.1| CHGG_01835 [Chaetomium globosum CBS 148.51]
  misc_feature (1)..(647): NCBI GI: 85112020 Blast Desc: NCU03291 [Neurospora crassa OR74A] gi|28925989|gb|EAA34981.1| conserved [Neurospora crassa OR74A]
  misc_feature (1)..(647): NCBI GI: 171695414 Blast Desc: protein product [Podospora anserina] gi|170947949|emb|CAP60113.1| protein product [Podospora anserina]
  misc_feature (23)..(639): NCBI GI: 145605395 Blast Desc: MGG_09891 [Magnaporthe grisea 70-15] gi|145013212|gb|EDJ97853.1| MGG_09891 [Magnaporthe grisea 70-15]
  misc_feature (1)..(623): NCBI GI: 256735248 Blast Desc: NECHADRAFT_90127 [Nectria haematococca mpVI 77-13-4]
  misc_feature (1)..(633): NCBI GI: 46107252 Blast Desc: FG00509.1 [Gibberella zeae PH-1]
  misc_feature (1)..(647): NCBI GI: 154318736 Blast Desc: BC1G_02757 [Botryotinia fuckeliana B05.10] gi|150857887|gb|EDN33079.1| BC1G_02757 [Botryotinia fuckeliana B05.10]
  misc_feature (1)..(623): NCBI GI: 156045391 Blast Desc: SS1G_09884 [Sclerotinia sclerotiorum 1980] gi|154694279|gb|EDN94017.1| SS1G_09884 [Sclerotinia sclerotiorum 1980]
  misc_feature (1)..(628): NCBI GI: 119480357 Blast Desc: double-strand-break repair protein rad21 [Neosartorya fischeri NRRL 181] gi|119408361|gb|EAW18310.1| double-strand-break repair protein rad21 [Neosartorya fischeri
  misc_feature (1)..(628): NCBI GI: 159129122 Blast Desc: double-strand-break repair protein rad21 [Aspergillus fumigatus A1163]
  misc_feature: Useful for introducing or modulating the production of volatile compounds
MFYSEELLHKSGPLARVWLSANQHKLSKTHVLQSNLAHSVDAIIAPTQAPLALRLSSQLLLGVVRMYSRKARYLLDDCNEALLKIKMAFRATGNNDIPENLNVHNREALMLPDRITPADNLNMLPPLSSGPDANWLLSQMDDVSATPASSNTRSRGRPSNRDINLQEDFNNSQFLQADDLDGGELALAPMDDLELELDFGMDLDGAPNKSIEMGRDAPAARALEDDIFSEMDMGTRTKGADMDPTMDLDLDFGDDGIRIADADGDLPMDDDLQFNIDDQSAMPEMGGIPPMTRARISESPLSDIDENTARDVEEWTRLNNTSIYEPGLDIEDPEPQPQKRSKKRKIFGLDPATQLTSAHIKEQQQNHDNILKAPSFISRDPYFLALLELKNNGSFVSNIMGDGRSKAWAPELRGLLSLDAIRPANDLKRKRDSGIADMGTDEEQGNSKSPRLEIAEDDDHFAITNNGIGEQSVAPDGTILEIPADDGIVIHDDDDLHHPRDETLNPAFDETMAPLVHPADSGPVSLGTKHAVHVLRELFGSEAATNDEKRKKAVVFQELLPEKRATKADATKMFFECLVLATKDAIKVEQKEGSLGSAIRVRGKRGLWGEWAEKEAGGEMAAQQEEDAMNEPEPAIASSSRAIAAAA

SEQ ID NO: 1541 - DNA, 2779 bp, Muscodor strobelii
  misc_feature: SGI EST ID NO. CUFF.3979.0
  misc_feature: Variant of the nucleotide sequence at SEQ ID NO 1539
cgtacctgtccgccagtgcagctcgcaacgacacccctccacctcagtcccagttccttcgatttcctcctcaaccaccacgaatttcatcgcccgcaacaagagtctatttgcgccggcgccagcgaccgcgttgcacgcgcgaaaacatttgaactattctcccaacctaatcgtcacacttgccattatttggataccctccctcgaggcgcggtgcttaaagcgcgcttcctgacccgacgaaacgcgctccgtgtttactgccgctgcctcgactatcaccaccgaccgtgcactgaccctcgcttctcctttcgcccacgcaacaacatcgtctgtgcctgatcgcatctgcattgtactaccgcctgttgcatagtgttctgtcgtctgcacgcgcattcgcattgctaccacctcgctgtcgtcgcgggtcgctgtcgcgatgttctattccgaagagctcctccacaagtccgggcctctggcccgggtctggctgtccgcaaaccagcacaagctgtccaagacccatgttctacagtccaatctcgcccacagtgttgatgccatcatcgcgcccacccaggctccactggcgctacgattgagtagtcagttgcttcttggtgttgtcagaatgtatagccgaaaagcgcgctaccttttggatgattgcaacgaagctcttctaaagatcaaaatggctttccgtgctaccggaaacaatgatattcctgaaaacctcaacgtgcacaaccgagaggctttaatgctgcctgatcgcatcacgcccgctgacaacttaaatatgttgccacctctgtcatcgggtcccgatgccaactggctgctcagtcagatggacgacgtcagtgccacacctgcgagctcaaacacacgcagtcgtggtagaccgagcaaccgcgacatcaacctgcaggaggacttcaacaacagccagttcctgcaagccgacgatctggatggtggcgaacttgcattggcccccatggacgatttagaacttgagctggatttcggtatggatctcgatggggcaccgaacaagagcattgaaatgggtcgagacgccccagctgcacgagctcttgaagatgatatcttcagtgagatggacatgggaacccgcacgaaaggtgctgatatggatccaaccatggatctggatctagatttcggtgacgatgggatcagaattgccgatgctgatggtgatctgcccatggatgacgatctccaattcaacatcgacgaccaatctgctatgcctgagatgggaggcatcccgccaatgactcgtgcacgtatctctgaatcgcctctttccgatattgatgagaacacagctcgcgacgtcgaagaatggactcggcttaacaacaccagcatatacgagcctggccttgatatcgaagaccctgagcctcagccacaaaagagatcaaagaagcgcaagatctttggcctggatcctgctacacagctcaccagtgctcacattaaagagcaacagcaaaaccatgacaacattcttaaggcccccagcttcatctcaagagacccttacttccttgccttgcttgaactgaagaacaacggtagctttgtctcaaacatcatgggggatggtcgcagtaaagcttgggcgcctgagctacgtgggctgttatcactggacgcgattaggcctgccaacgacctgaagcgcaagcgcgacagcggcattgctgatatgggcactgatgaggaacaaggaaactccaaatctcctcgcttagagatcgccgaggacgacgaccattttgctataaccaacaacggcatcggagaacagagcgttgcgcctgacggaaccatcctggagatccctgcagatgacggcatcgtgatccatgatgatgacgacctccaccacccaagagatgagactttgaacccagcattcgatgagacgatggcaccacttgtgcatccggccgacagtggtcccgtctcgctaggcactaagcatgccgtacacgtactccgggaactatttggctccgaggcagctaccaacgacgagaagcgcaagaaagccgtcgtgttccaggaattgctacctgagaagagagctacgaaagcagacgcgaccaagatgttcttcgagtgcttggtcctcgctaccaaggacgccatcaaagtggagcaaaaggagggcagcctgggaagtgcgattcgcgtacgaggcaagcgcggcctctggggcgagtgggctgagaaagaagccggcggcgagatggctgcacagcaagaagaggacgccatgaacgagcctgagccggccatcgccagctcgtcgcgtgccatagcggccgccgcataatcctccctctttctctctcacggcctcaagtggtcgtttgcttggcgtgtgtgtttaatctgtcaagagcaattctttgtacaaattggccgaaaaggcttgggaatgggcatcaaataggcgaacggcgcatgggcgaaactggagctcgacggtggggatataccatgactgcgggtttgaggcagttctgttgaacgttaaaaattatgatggacgtacgcatattctgtagtgtttcaataagcttcattttgagcatgatggattaaatcaggtagcttagtagtaagatagcaactgaaaaggggccaagtcgtggccccttgacgaagtaattgatgtagtacttctggacaatatgtcataactcctgatagcgtgaca

SEQ ID NO: 1542 - DNA, 1878 bp, Muscodor strobelii
  misc_feature: SGI cDNA ID NO. 560118
  misc_feature: Encodes the peptide sequence at SEQ ID NO 1543
atgtttgggaaacagaagttccatgtcctccacagaagtgaggtgagagattccgactcttaccctcaagatggcgcctccctgtccggccgggacaactgcgaggtcttgcaataccaggtggcgatttcgaatacaggcgaagaggatgacgacgatgacgacgaaaacaaagaagcaaatgaccgtgatgaaaaggatgaggaagggcaagacggggactgggacaataatggtgaagattgcgggactgtgtcgaattcagacgggtcctgggtagatgtgaatgaagactctgagtgtgtgacccgttccaagaagcgtgagcgtcctccaccagaaactcaaaaagatagggcccctacaaagttaagtcttgtggtgagatgcaatttggagccgactggggatcatggcgacagggaagaattcaagctcgagattttcaccctgcatggagacgctcttcccacgtttccctttatcggtccggccggggagattacccctaatcctacaccggcagattatgcgaccgtcatcagctgctggctgaaggactgtctccagtcccatgccacttgcggactacgttctgaaagttgtaagacaccaattctactgccaaagcgagttctggacctggtcgatgataaaattgtcctcgtcgagacccaggcgcagccggggatgtatgttgcgctcagtcactgctggggtcaggagcagctgctcactaccacgcgcgacactctcgaagctagaatgtttggtatcactctagaggagatgccgcagacttttcaggacaccgtgacattgacacgggcgctcggcctccgttacctgtggatcgattccctgtgcattattcagaaggacgtcagggactgggaggagcagtccgctgtcatggccgatatctatgctggttgctacctcaatatcgcgaccacgcgatcgtccggaggcacacaaggctttttgaagtcgcgatggacgtcgcggaactcgctaatgagatggtttgggactgtcccgcacaccagcggtctacatgggctctggaggacggtggtcgaggactattgccgactcaacctcacttatgagacggaccggttgccggcattgggtggactcgccaaacgctttgctgaagctcgcccggatgatgagtaccttgccggcttatggcggagcagctttgcgcgcgatctactctggtccgtcgatgatacaatatccaagacgacgacacgatcgcagaatgccggagcgggcccaccaagctggtcttgggggtcgctctgccacggtgagcacgcaccgggcattaggtacgagttcgagacaaagccgaagttggccaaatgggccgagacggtcacgtatacacaggaccaacggttttcagtactttccgcgtcttgttcttatagtgggccaacgccgtacgggaacatcttcgggggacgcatcacagttgtcggtcccatatacgccatcgccgtcgccgcccaggcgaaggatcacataccgaaatgggcagggcagatccctatccggcagcagtccgagttcaacagcctccacctgaagtacgacgacaagaacgacgccgaggcggtagagaaggcgacgaacccggccgacggtttcatcttctgccttttcataggttcattctttcggcactttgatcatgacgcggataacaaccatccagaacgctgtggcttgatcctgaagccgtccgaggagcagccggggctggcgagaaggatcggctcttggaagcaatatatcgagagttgggtaaggtgcgagcatgtcttcaccaaggaagcagttatggtaaaactgacgatcgtttaa

SEQ ID NO: 1543 - protein, 625 aa, Muscodor strobelii
  misc_feature: SGI Peptide ID NO. 560118
  misc_feature (232)..(362): Pfam Id: PF06985 Pfam Desc: Heterokaryon incompatibility protein (HET)
  misc_feature (232)..(317): Pfam Id: PF06985 Pfam Desc: Heterokaryon incompatibility protein (HET)
  misc_feature (144)..(330): NCBI GI: 225558616 Blast Desc: HET domain-containing protein [Ajellomyces capsulatus G186AR]
  misc_feature (144)..(330): NCBI GI: 154286502 Blast Desc: [Ajellomyces capsulatus NAm1] gi|150407687|gb|EDN03228.1| [Ajellomyces capsulatus NAm1]
  misc_feature (184)..(437): NCBI GI: 256722925 Blast Desc: NECHADRAFT_25690 [Nectria haematococca mpVI 77-13-4]
  misc_feature (142)..(330): NCBI GI: 240275057 Blast Desc: conserved [Ajellomyces capsulatus H143]
  misc_feature (141)..(321): NCBI GI: 256722024 Blast Desc: NECHADRAFT_86169 [Nectria haematococca mpVI 77-13-4]
  misc_feature (167)..(330): NCBI GI: 46126545 Blast Desc: FG07650.1 [Gibberella zeae PH-1]
  misc_feature (154)..(332): NCBI GI: 154302410 Blast Desc: BC1G_09989 [Botryotinia fuckeliana B05.10] gi|150855477|gb|EDN30669.1| BC1G_09989 [Botryotinia fuckeliana B05.10]
  misc_feature (147)..(332): NCBI GI: 46110314 Blast Desc: FG02039.1 [Gibberella zeae PH-1]
  misc_feature (144)..(328): NCBI GI: 226291939 Blast Desc: conserved [Paracoccidioides brasiliensis Pb18]
  misc_feature (144)..(328): NCBI GI: 225680144 Blast Desc: conserved [Paracoccidioides brasiliensis Pb03]
MFGKQKFHVLHRSEVRDSDSYPQDGASLSGRDNCEVLQYQVAISNTGEEDDDDDDENKEANDRDEKDEEGQDGDWDNNGEDCGTVSNSDGSWVDVNEDSECVTRSKKRERPPPETQKDRAPTKLSLVVRCNLEPTGDHGDREEFKLEIFTLHGDALPTFPFIGPAGEITPNPTPADYATVISCWLKDCLQSHATCGLRSESCKTPILLPKRVLDLVDDKIVLVETQAQPGMYVALSHCWGQEQLLTTTRDTLEARMFGITLEEMPQTFQDTVTLTRALGLRYLWIDSLCIIQKDVRDWEEQSAVMADIYAGCYLNIATTRSSGGTQGFLKSRWTSRNSLMRWFGTVPHTSGLHGLWRTVVEDYCRLNLTYETDRLPALGGLAKRFAEARPDDEYLAGLWRSSFARDLLWSVDDTISKTTTRSQNAGAGPPSWSWGSLCHGEHAPGIRYEFETKPKLAKWAETVTYTQDQRFSVLSASCSYSGPTPYGNIFGGRITVVGPIYAIAVAAQAKDHIPKWAGQIPIRQQSEFNSLHLKYDDKNDAEAVEKATNPADGFIFCLFIGSFFRHFDHDADNNHPERCGLILKPSEEQPGLARRIGSWKQYIESWVRCEHVFTKEAVMVKLTIV

SEQ ID NO: 1544 - DNA, 891 bp, Muscodor strobelii
  misc_feature: SGI cDNA ID NO. 560119
  misc_feature: Encodes the peptide sequence at SEQ ID NO 1545
atgccttacgagctgcggctcatgattttcaaggagctcagcggccacgcagaagtcaaggcccttgccagcacccatttcctacttgagattatttatctcgatcgaaaacgagagacattactgactgcgccccttgctacttccatacaccgaaagcatgaacgcgagatttgggctgccgttggcaacaatcttgcacgcaagcttagcaaggatacgattggacatgagtccactgagcttggagcactctgttcggcagtgagcgcatttctgcacccggacaccaatcacagggagatatgtgatatatcggaacacaatacagagatggcgcgtgtctgtgaggtatttcgtgacagcaaattcaccgaaacagatctcagtcgtctggaaacgcacggccacaggaccctgcaccgcttcaaacgccgtatgtggagagtcggaacgatgaaggaagatttcagccgaactgccctaccaaaccgaacgactaagcccgttgtcactttgaatgattacaaattttatatgatcacgaagatccagtcggccagtgctgtgtcctacaaccttaccaagactaataaaaatgccactgacccgctgcttgctgcctatgatgacacagttagagcagaaatcaagcggcttactgcaagaagtctttttataccgatcatctgcccattggacaatatcaaagacatcctccacggcatcctccacgaggccctcttcaacgactgcgacgcgatttgtgcatattttgatgcctccggaatcgattactacgaagtcgagtaccaaaaaatcatgaataaagtctttagagcacagtggcgtgttctaggcgaaagctcgactctgaccaagacgagataa

SEQ ID NO: 1545 - protein, 296 aa, Muscodor strobelii
  misc_feature: SGI Peptide ID NO. 560119
MPYELRLMIFKELSGHAEVKALASTHFLLEIIYLDRKRETLLTAPLATSIHRKHEREIWAAVGNNLARKLSKDTIGHESTELGALCSAVSAFLHPDTNHREICDISEHNTEMARVCEVFRDSKFTETDLSRLETHGHRTLHRFKRRMWRVGTMKEDFSRTALPNRTTKPVVTLNDYKFYMITKIQSASAVSYNLTKTNKNATDPLLAAYDDTVRAEIKRLTARSLFIPIICPLDNIKDILHGILHEALFNDCDAICAYFDASGIDYYEVEYQKIMNKVFRAQWRVLGESSTLTKTR

SEQ ID NO: 1546 - DNA, 1140 bp, Muscodor strobelii
  misc_feature: SGI cDNA ID NO. 560120
  misc_feature: Elevated expression when VOC is produced
  misc_feature: Encodes the peptide sequence at SEQ ID NO 1547
atggctcccaacggcttgggtcgcgctcttcttgcgcttttggccaccgcacctgtcaccatggcccacagctgggtcgaggacctgtacctccttgatgacaagggcgctttcactggcaagcctggctaccccatcggatacattgcccataacgctcctggattcagtgatctcatcgtccagaataagatcttggacacctccaacaaccccgccgcttgcaagccttcgtcctcgagcaacacggctctctatccccccttgactgcgtctgctggtgactatctcgctatgcagtaccaggagaacggccatgttagccagcctgagctcaccagccgcccgtaccgtggtggcaatgtatatgtctacggcacgctcgagcatcaagactctgatggcatcaacgatgtgctcaattcatggaacgctcagggaaccggcggcaataagaagggcaagctccttgcatcgcactactacgacgatggccagtgcttccaaaacaatcccgccaataacattgctcagacccgcagcaaggcggctggtggtctcagcgagctctggtgccagaccgatgtccaacttcctaccgacctacctgactcaggaacctacacactcatgtgggtatgggactggcccctgatcgtcagtgacacgaacaacgtgactgagatctacacatcatgcgcccaaattaacctcggcggaagtaacgccccgaccaaatcccagaaggtccccaagatcaagtatgccacagataacaagatccagagcgctggtatttcttcccagcttgacaccctgatcgaggcgactgctcttggtgaaggccaaagctctcctgctcctgtcaccattgatcagcctactgttacgggtggcgctcccgattcaacttcgacttcatctaagcagggcaacggcgatcacatcaagacagtcacggtgactgctgatgccgagacggtcacacggttcaccaccgttactgcgggtgcacccacttctgcccctaccaacaccgctacacccgtaagcgatggtcccccaacggtcacaggttttttgcgtgctaggcgcaccggtcaccaacgccgccagcctctcgagacttcgtcgtcctga

SEQ ID NO: 1547 - protein, 379 aa, Muscodor strobelii
  misc_feature: SGI Peptide ID NO. 560120
  misc_feature (8)..(286): NCBI GI: 225562683 Blast Desc: conserved [Ajellomyces capsulatus G186AR]
  misc_feature (8)..(273): NCBI GI: 261196968 Blast Desc: conserved [Ajellomyces dermatitidis SLH14081] gi|239596132|gb|EEQ78713.1| conserved [Ajellomyces dermatitidis SLH14081]
  misc_feature (8)..(281): NCBI GI: 154279672 Blast Desc: conserved [Ajellomyces capsulatus NAm1] gi|150412592|gb|EDN07979.1| conserved [Ajellomyces capsulatus NAm1]
  misc_feature (18)..(270): NCBI GI: 169778991 Blast Desc: [Aspergillus oryzae RIB40] gi|238499575|ref|XP_002381022.1| conserved [Aspergillus flavus NRRL3357] gi|83772699|dbj|BAE62827.1| protein product oryzae]
  misc_feature (4)..(341): NCBI GI: 67526721 Blast Desc: AN3818.2 [Aspergillus nidulans FGSC A4] gi|40740836|gb|EAA60026.1| AN3818.2 [Aspergillus nidulans FGSC A4] gi|259481625|tpe|CBF75318.1| TPA: conserved [Aspergillus FGSC
  misc_feature (9)..(273): NCBI GI: 255943167 Blast Desc: Pc18g05250 [Penicillium chrysogenum Wisconsin 54-1255] gi|211587085|emb|CAP94749.1| Pc18g05250 [Penicillium chrysogenum Wisconsin 54-1255]
  misc_feature (22)..(274): NCBI GI: 115442672 Blast Desc: conserved [Aspergillus terreus NIH2624] gi|114188012|gb|EAU29712.1| conserved [Aspergillus terreus NIH2624]
  misc_feature (22)..(314): NCBI GI: 256734718 Blast Desc: NECHADRAFT_75253 [Nectria haematococca mpVI 77-13-4]
  misc_feature (6)..(285): NCBI GI: 119498343 Blast Desc: NFIA_036040 [Neosartorya fischeri NRRL 181] gi|119414093|gb|EAW24032.1| conserved [Neosartorya fischeri NRRL 181]
  misc_feature (22)..(290): NCBI GI: 145238506 Blast Desc: An07g08250 [Aspergillus niger] gi|134076389|emb|CAK48207.1| protein product [Aspergillus niger]
  misc_feature: Useful for introducing or modulating the production of volatile compounds
MAPNGLGRALLALLATAPVTMAHSWVEDLYLLDDKGAFTGKPGYPIGYIAHNAPGFSDLIVQNKILDTSNNPAACKPSSSSNTALYPPLTASAGDYLAMQYQENGHVSQPELTSRPYRGGNVYVYGTLEHQDSDGINDVLNSWNAQGTGGNKKGKLLASHYYDDGQCFQNNPANNIAQTRSKAAGGLSELWCQTDVQLPTDLPDSGTYTLMWVWDWPLIVSDTNNVTEIYTSCAQINLGGSNAPTKSQKVPKIKYATDNKIQSAGISSQLDTLIEATALGEGQSSPAPVTIDQPTVTGGAPDSTSTSSKQGNGDHIKTVTVTADAETVTRFTTVTAGAPTSAPTNTATPVSDGPPTVTGFLRARRTGHQRRQPLETSSS

SEQ ID NO: 1548 - DNA, 2240 bp, Muscodor strobelii
  misc_feature: SGI EST ID NO. CUFF.3997.0
  misc_feature: Variant of the nucleotide sequence at SEQ ID NO 1546
ggtgaatgctggatcctggtcggtccggcgcccgttgagcaaacacaatcataagaacatgccacacctcaaccgcacccctctacctctcttcccttgcccgtgattgatcgacctgtgcctgaattggtccgtcactcctacatgtaccccgtctttgccatccttgtgcaagtctttgttcttgttcttggcatttcacattccagcactccatcctctcaacgaccacatctctgaacctcagccaacttgcacatcttcccttgatcaccatcaaggccattgtggttgtcgtggcgcacgccaacgccacttgacaaagactgaccatcaacaactctctttgttgattgttcaccgtgcaaagcttcagttgttggccattctttgccatgctgatctagcccgagtcaaaggacttatcctcgggtatttctattcttgacgcagcaggcctgtctcactcgacgctgtgcgtattttatcgagccctcttgttgtctcacgatatcaatcttctcttcgtttccgtaccaccttactcttcttttacgcgcaagtcgcaccacactattacgtttacaactttgtcttcgtacacaaccccgcgcccgcctaatcaactttcagcaaaatatcaacttctacttcagtagcaatctttgcaattctccaccaagacgattttctacacaggccaacgccctaagtctcgcaggcgagatcatcactcaagctctgcactcgccagtcgtcttcaacctaccaacttgaagatggctcccaacggcttgggtcgcgctcttcttgcgcttttggccaccgcacctgtcaccatggcccacagctgggtcgaggacctgtacctccttgatgacaagggcgctttcactggcaagcctggctaccccatcggatacattgcccataacgctcctggattcagtgatctcatcgtccagaataagatcttggacacctccaacaaccccgccgcttgcaagccttcgtcctcgagcaacacggctctctatccccccttgactgcgtctgctggtgactatctcgctatgcagtaccaggagaacggccatgttagccagcctgagctcaccagccgcccgtaccgtggtggcaatgtatatgtctacggcacgctcgagcatcaagactctgatggcatcaacgatgtgctcaattcatggaacgctcagggaaccggcggcaataagaagggcaagctccttgcatcgcactactacgacgatggccagtgcttccaaaacaatcccgccaataacattgctcagacccgcagcaaggcggctggtggtctcagcgagctctggtgccagaccgatgtccaacttcctaccgacctacctgactcaggaacctacacactcatgtgggtatgggactggcccctgatcgtcagtgacacgaacaacgtgactgagatctacacatcatgcgcccaaattaacctcggcggaagtaacgccccgaccaaatcccagaaggtccccaagatcaagtatgccacagataacaagatccagagcgctggtatttcttcccagcttgacaccctgatcgaggcgactgctcttggtgaaggccaaagctctcctgctcctgtcaccattgatcagcctactgttacgggtggcgctcccgattcaacttcgacttcatctaagcagggcaacggcgatcacatcaagacagtcacggtgactgctgatgccgagacggtcacacggttcaccaccgttactgcgggtgcacccacttctgcccctaccaacaccgctacacccgtaagcgatggtcccccaacggtcacaggttttttgcgtgctaggcgcaccggtcaccaacgccgccagcctctcgagacttcgtcgtcctgagtgcacagaccatcgctgggtttctcttctttgtaaatatttgcggatacgcctctcgtttccgaacaggagattgcatttggagtcattggtgcatgaacacacaggctaggcggttccggcgttcggttaggctatggcgcaaaggacggtaccaagaggtattgcatgagacagtggagtacaggtaaaaggaaaggaaacaggatcttttacatcatgatcgagggaatgatcagatgtcggctttgcattgtcgaggcgttcgtttgtaatgctagtcactaggtagttaggtagatgccaatttgacaccttgcc

SEQ ID NO: 1549 - DNA, 1992 bp, Muscodor strobelii
  misc_feature: SGI cDNA ID NO. 560121
  misc_feature: Encodes the peptide sequence at SEQ ID NO 1550
atggctaccgcttggacagcagacaatgctgggaaagagtatgacatctatgtcggtgtttggaccaattgggacggcggacgcataatgggcaagacactgactctagccaaggatgacggggctactctcattgctttcactgcattcttcatcacgatcgtcgcctctcgcttttggtacatctcatcttttgcccttcatcaattctattcgactgcagaccttagagatgggttacatcatcagcgtcaagtcatacttcggaattccaagtcagctgcatatgcatttgtgacaatgattgcaatgcagctggcttggcgtagacgatctcaccgaatcatgagtagaacgttacctctgataattttcgctgttgtatatctcgtcgttttcaccgcagctagtgggttgtcttcatggcttaccaaagcacctggagaccaagtcctcattcgaagcgggaattgtggttatgttgtcttatatcagaatctcgacggatcggctgcccaatcagaggcattgacggttctaaatccctactatgcaaatcaagccaaagaagcagatacatacgcggagcaatgctatgtgtcagatgcagaagggcttctcgattgctcggccctcgtgcaagagcgcttaccatcaatagtgaatactaccgcgagctgtccgttcaacgaaacggtttgtcaaagccaaaccgataatctgatacttgacacggggttcatcaacagccatgatcatctcggcgttaatgcgccaccaaatgaaagaattgaaacgaggtggagccttgaatgtgcacctttgaaaacccaaggctacaccacaatctccagcagttctatcgccaattatacgagatattggtacggtgcaggcctgggtagcgctcccttcagcggtaatgagaagcacaattggacttttgaagcaagggatgtccagtcccaatatcaagacaacaagaccgttggcgcaaactatattctgacctactccttctatcagccatttggcggaggtcatggatcaggaacattcttaccaattgacgaattatatgacgaaagtgctgatatctacatccttttcctctctggaaatggtgttgtctattggggaacggtagatgatccctggtaccgggctcatgggaacggtcccgtggtacagaatagcatcgggggctgcggtcctccgggtggcgcctatactggcgttgtccaagccgccagcctattcaatacaagcgtcgacgagctgacttcgggaaatgttaccacggaaacaggcgcacgattcttgcaattcattaacatgcaggctacgagcccttcactcagccacattatcagaaacttgggcccgcgagcacttgcttcccaatcaaagttatatcagggtgtccaacagaagctgcccgtcgaccagtggcagctcgatcttactcgcctttggggcgcaaatctcgcgggattccaggccatgttcctcactacggcacaaggacagacggatcctcaacttcaaccataccgatcattacctgctgatcgtgcaactgagactctttgcaacaaccagaaaatgcgaagcgctcaatacacttcattcagcgtctttgggctgttcttcacgttagttgtcgggatcctcgttattatcatatcgtttctcttggagccaggactcagctttctataccgacaaggactctacaaggaatacaaacttttggaatggattacaaactcggcattacaacttcagcgattaggatacgaggggtcatatggagcccgctctagatgggaaagatgcacgagaatgattcccgttaccgaagctagggccataatgtcgcctttagatctatctgaccctaggcatccgacactgtctcacacagagatttacagagtcaaagataggtttgacaaggtgacctcagaacgtcaagagagcagcatctag

SEQ ID NO: 1550 - protein, 663 aa, Muscodor strobelii
  misc_feature: SGI Peptide ID NO. 560121
  misc_feature (14)..(649): NCBI GI: 169615058 Blast Desc: SNOG_10683 [Phaeosphaeria nodorum SN15] gi|111060957|gb|EAT82077.1| SNOG_10683 [Phaeosphaeria nodorum SN15]
  misc_feature (9)..(621): NCBI GI: 70986226 Blast Desc: conserved [Aspergillus fumigatus Af293] gi|66846236|gb|EAL86569.1| conserved [Aspergillus fumigatus Af293]
  misc_feature (9)..(621): NCBI GI: 159128250 Blast Desc: conserved [Aspergillus fumigatus A1163]
  misc_feature (9)..(621): NCBI GI: 119474227 Blast Desc: NFIA_004500 [Neosartorya fischeri NRRL 181] gi|119407142|gb|EAW17092.1| conserved [Neosartorya fischeri NRRL 181]
  misc_feature (9)..(621): NCBI GI: 115399382 Blast Desc: [Aspergillus terreus NIH2624] gi|114192163|gb|EAU33863.1| [Aspergillus terreus NIH2624]
  misc_feature (10)..(659): NCBI GI: 189194015 Blast Desc: conserved [Pyrenophora tritici-repentis Pt-1C-BFP] gi|187978910|gb|EDU45536.1| conserved [Pyrenophora tritici-repentis Pt-1C-BFP]
  misc_feature (16)..(601): NCBI GI: 121699395 Blast Desc: ACLA_082720 [Aspergillus clavatus NRRL 1] gi|119396149|gb|EAW06581.1| ACLA_082720 [Aspergillus clavatus NRRL 1]
  misc_feature (16)..(610): NCBI GI: 169772941 Blast Desc: [Aspergillus oryzae RIB40] gi|83768800|dbj|BAE58937.1| protein product [Aspergillus oryzae]
  misc_feature (16)..(621): NCBI GI: 256723662 Blast Desc: NECHADRAFT_86728 [Nectria haematococca mpVI 77-13-4]
  misc_feature (17)..(389): NCBI GI: 115433432 Blast Desc: [Aspergillus terreus NIH2624] gi|114189705|gb|EAU31405.1| [Aspergillus terreus NIH2624]
MATAWTADNAGKEYDIYVGVWTNWDGGRIMGKTLTLAKDDGATLIAFTAFFITIVASRFWYISSFALHQFYSTADLRDGLHHQRQVILRNSKSAAYAFVTMIAMQLAWRRRSHRIMSRTLPLIIFAVVYLVVFTAASGLSSWLTKAPGDQVLIRSGNCGYVVLYQNLDGSAAQSEALTVLNPYYANQAKEADTYAEQCYVSDAEGLLDCSALVQERLPSIVNTTASCPFNETVCQSQTDNLILDTGFINSHDHLGVNAPPNERIETRWSLECAPLKTQGYTTISSSSIANYTRYWYGAGLGSAPFSGNEKHNWTFEARDVQSQYQDNKTVGANYILTYSFYQPFGGGHGSGTFLPIDELYDESADIYILFLSGNGVVYWGTVDDPWYRAHGNGPVVQNSIGGCGPPGGAYTGVVQAASLFNTSVDELTSGNVTTETGARFLQFINMQATSPSLSHIIRNLGPRALASQSKLYQGVQQKLPVDQWQLDLTRLWGANLAGFQAMFLTTAQGQTDPQLQPYRSLPADRATETLCNNQKMRSAQYTSFSVFGLFFTLVVGILVIIISFLLEPGLSFLYRQGLYKEYKLLEWITNSALQLQRLGYEGSYGARSRWERCTRMIPVTEARAIMSPLDLSDPRHPTLSHTEIYRVKDRFDKVTSERQESSI

SEQ ID NO: 1551 - DNA, 844 bp, Muscodor strobelii
  misc_feature: SGI EST ID NO. CUFF.4018.0
  misc_feature: Variant of the nucleotide sequence at SEQ ID NO 1549
ccgggtggcgcctatactggcgttgtccaagccgccagcctattcaatacaagcgtcgacgagctgacttcgggaaatgttaccacggaaacaggcgcacgattcttgcaattcattaacatgcaggctacgagcccttcactcagccacattatcagaaacttgggcccgcgagcacttgcttcccaatcaaagttatatcagggtgtccaacagaagctgcccgtcgaccagtggcagctcgatcttactcgcctttggggcgcaaatctcgcgggattccaggccatgttcctcactacggcacaaggacagacggatcctcaacttcaaccataccgatcattacctgctgatcgtgcaactgagactctttgcaacaaccagaaaatgcgaagcgctcaatacacttcattcagcgtctttgggctgttcttcacgttagttgtcgggatcctcgttattatcatatcgtttctcttggagccaggactcagctttctataccgacaaggactctacaaggaatacaaacttttggaatggattacaaactcggcattacaacttcagcgattaggatacgaggggtcatatggagcccgctctagatgggaaagatgcacgagaatgattcccgttaccgaagctagggccataatgtcgcctttagatctatctgaccctaggcatccgacactgtctcacacagagatttacagagtcaaagataggtttgacaaggtgacctcagaacgtcaagagagcagcatctagtgtagagggtgcgccggacgtaagctacatcggaaagtacctagagatcagctacaatcgagagagt

SEQ ID NO: 1552 - DNA, 1194 bp, Muscodor strobelii
  misc_feature: SGI cDNA ID NO. 560122
  misc_feature: Encodes the peptide sequence at SEQ ID NO 1553
atggcatccactttcacacctccaagcggggctcccatccgcatagcaatcatcggatttgggggcttaataggacgtcgacacacagcacatgtactctcaaatctgtctactactctcgttgctgtcgtcgatgcatccccaaatgcattagaagtcgcgagcgaaatcgcgccgggtgtaccgtgtttcagggatgtagcgtccatgctatcctccacgtcaccagcaccagatgccgcgattgtatgcacgccgaatgcacatcatgtctccgtgggactggagttggcagatgcaggtgtgcatctgcttgtcgaaaagccaattgctgagacaatggtgagcgcccgtgcgctagtggagcgtgcgcgggagaagggcgttaagctattagtggggcatcaccgccggttcaatcgctatgtcgtggctacgcgtagactgctcgacgactcggacttcgagtccggtacaggtattggagggatcacagcaatatcaggcctttggaccacattcaaacctgattcatacttcagcacggcaccttggagattgaatagagcacagggcggaggaacagtgatgattaatctcgttcatgagattgacattctccagcatctctacgggtcgatcatcagagtcggtgcagaaaaaacggtaagccgacggagtgatggagggaagggatcggtggaagaaggcgccgctctgaccttgcgtttcgagtctggggtcgtgggctcctttgttatctccgacgctgtcgtctcgcctcattttttcgaggcaggcacgggcgagaaccccatgataccgcgtgtttcccggcctagtttgcagaaacacgacccgaaaagtgaagtcgagggacctgttgatgtatatcgcatcttcggtacgcacggaactctcagtgtacctgacatggctctttggaactacggggataaaccccggagctgggaaaacgaattgtgtgctactcatgtggaattagacaatgatcctcgtgttccgtttgaccgccaacttgatcatttcattgatgttgtcaggggtaagaaggcacccgacgagggtcctggatgcacgggtgaacaagggcttaggggtctagcagtttgtgaggctatcataacggcattagaagatggtgaagggagtaaagtgtcaattcagtattga

SEQ ID NO: 1553 - protein, 397 aa, Muscodor strobelii
  misc_feature: SGI Peptide ID NO. 560122
  misc_feature (152)..(267): Pfam Id: PF02894 Pfam Desc: Oxidoreductase family, C-terminal alpha/beta domain
  misc_feature (13)..(135): Pfam Id: PF01408 Pfam Desc: Oxidoreductase family, NAD-binding Rossmann fold
  misc_feature (156)..(267): Pfam Id: PF02894 Pfam Desc: Oxidoreductase family, C-terminal alpha/beta domain
  misc_feature (13)..(389): NCBI GI: 238498278 Blast Desc: quinate utilisation oxidoreductase QutH [Aspergillus flavus NRRL3357] gi|220693648|gb|EED49993.1| quinate utilisation oxidoreductase QutH [Aspergillus flavus NRRL3357]
  misc_feature (13)..(389): NCBI GI: 121701707 Blast Desc: quinate utilisation oxidoreductase QutH [Aspergillus clavatus NRRL 1] gi|119397261|gb|EAW07692.1| quinate utilisation oxidoreductase QutH [Aspergillus clavatus NRRL 1]
  misc_feature (12)..(396): NCBI GI: 255936465 Blast Desc: Pc13g08340 [Penicillium chrysogenum Wisconsin 54-1255] gi|211583879|emb|CAP91903.1| Pc13g08340 [Penicillium chrysogenum Wisconsin 54-1255]
  misc_feature (9)..(385): NCBI GI: 46127367 Blast Desc: FG08061.1 [Gibberella zeae PH-1]
  misc_feature (12)..(395): NCBI GI: 159131278 Blast Desc: quinate utilisation oxidoreductase QutH [Aspergillus fumigatus A1163]
  misc_feature (13)..(393): NCBI GI: 261352863 Blast Desc: quinate utilisation oxidoreductase QutH [Verticillium albo-atrum VaMs.102]
  misc_feature (12)..(395): NCBI GI: 70995536 Blast Desc: quinate utilisation oxidoreductase QutH [Aspergillus fumigatus Af293] gi|41581233|emb|CAE47882.1| QutH protein, [Aspergillus fumigatus] gi|66850158|gb|EAL90485.1| quinate QutH
  misc_feature (13)..(393): NCBI GI: 256725670 Blast Desc: NECHADRAFT_94396 [Nectria haematococca mpVI 77-13-4]
  misc_feature (12)..(393): NCBI GI: 119495648 Blast Desc: quinate utilisation oxidoreductase QutH [Neosartorya fischeri NRRL 181] gi|119412766|gb|EAW22707.1| quinate utilisation oxidoreductase QutH [Neosartorya fischeri NRRL 181]
  misc_feature (13)..(388): NCBI GI: 255731254 Blast Desc: conserved [Candida tropicalis MYA-3404] gi|240131560|gb|EER31119.1| conserved [Candida tropicalis MYA-3404]
  misc_feature (76)..(393): SWISSPROT Homolog: EC 1.1.1.292 1,5-anhydro-D-fructose reductase (1,5-anhydro-D-mannitol-forming)
MASTFTPPSGAPIRIAIIGFGGLIGRRHTAHVLSNLSTTLVAVVDASPNALEVASEIAPGVPCFRDVASMLSSTSPAPDAAIVCTPNAHHVSVGLELADAGVHLLVEKPIAETMVSARALVERAREKGVKLLVGHHRRFNRYVVATRRLLDDSDFESGTGIGGITAISGLWTTFKPDSYFSTAPWRLNRAQGGGTVMINLVHEIDILQHLYGSIIRVGAEKTVSRRSDGGKGSVEEGAALTLRFESGVVGSFVISDAVVSPHFFEAGTGENPMIPRVSRPSLQKHDPKSEVEGPVDVYRIFGTHGTLSVPDMALWNYGDKPRSWENELCATHVELDNDPRVPFDRQLDHFIDVVRGKKAPDEGPGCTGEQGLRGLAVCEAIITALEDGEGSKVSIQY

SEQ ID NO: 1554 - DNA, 797 bp, Muscodor strobelii
  misc_feature: SGI EST ID NO. CUFF.4024.0
  misc_feature: Variant of the nucleotide sequence at SEQ ID NO 1552
gacgactcggacttcgagtccggtacaggtattggagggatcacagcaatatcaggcctttggaccacattcaaacctgattcatacttcagcacggcaccttggagattgaatagagcacagggcggaggaacagtgatgattaatctcgttcatgagattgacattctccagcatctctacgggtcgatcatcagagtcggtgcagaaaaaacggtaagccgacggagtgatggagggaagggatcggtggaagaaggcgccgctctgaccttgcgtttcgagtctggggtcgtgggctcctttgttatctccgacgctgtcgtctcgcctcattttttcgaggcaggcacgggcgagaaccccatgataccgcgtgtttcccggcctagtttgcagaaacacgacccgaaaagtgaagtcgagggacctgttgatgtatatcgcatcttcggtacgcacggaactctcagtgtacctgacatggctctttggaactacggggataaaccccggagctgggaaaacgaattgtgtgctactcatgtggaattagacaatgatcctcgtgttccgtttgaccgccaacttgatcatttcattgatgttgtcaggggtaagaaggcacccgacgagggtcctggatgcacgggtgaacaagggcttaggggtctagcagtttgtgaggctatcataacggcattagaagatggtgaagggagtaaagtgtcaattcagtattgatcatcgacgaatgccagatatgtagtcatgtactaatttaatgagtgagtaag

SEQ ID NO: 1555 - DNA, 795 bp, Muscodor strobelii
  misc_feature: SGI cDNA ID NO. 560123
  misc_feature: Encodes the peptide sequence at SEQ ID NO 1556
atgttggcgcatacactctcaagcctagctatcgtcatcgctgcatgtggcagtgttgctcaagcggaatgcacccgcgaaggcctcctcgcagcagcggatagctacctcgccgcacaaacaagcgggagtattgccgatctaaagctctcgagcaactttacctatgaacagaacaacaaagtcgcagacatcaagactggcgttcttactcaaccgcttaagatcgacctcaatcggtcgactgccgatacgacagcttgcgctagttacacaatgctcatctcgacgacaggcgctaaaccctacgtgattgcgacgcagatccggcacgctgataatgacacaagcactatctcgatgatagacactattgccgcgaccactggatccctgttcttcaacgcgaagcaaacgcttggctacatacagaaagagaactggggtacactcgacgagagccaaagatcgaatcgcacggagctgaagagagttggtgatgcgtatctcgatatgtggacggatcccaaagccgcggactcgatcccttggggtacggattgtgagcgcgttgaaggatcgtccttgacaaaaccttgtggtgctagcttgccaaggggtggaagcgcgaagaataatggtcatcgacgatatgttattgatgagacgattgggtcagttgatgtactatgtacgtttgactcgcttggggactatcaggactcacatgagattcgccttgaaggcggcaaggtcaaatatgttcataccgttacggttgttggaagtggttga

SEQ ID NO: 1556 - protein, 264 aa, Muscodor strobelii
  misc_feature: SGI Peptide ID NO. 560123
  misc_feature (1)..(261): NCBI GI: 169598118 Blast Desc: SNOG_01857 [Phaeosphaeria nodorum SN15] gi|111068949|gb|EAT90069.1| SNOG_01857 [Phaeosphaeria nodorum SN15]
  misc_feature (22)..(248): NCBI GI: 85107679 Blast Desc: NCU07903 [Neurospora crassa OR74A] gi|28924025|gb|EAA33183.1| [Neurospora crassa OR74A]
  misc_feature (1)..(261): NCBI GI: 189209155 Blast Desc: conserved [Pyrenophora tritici-repentis Pt-1C-BFP] gi|187977003|gb|EDU43629.1| conserved [Pyrenophora tritici-repentis Pt-1C-BFP]
  misc_feature (5)..(260): NCBI GI: 116200969 Blast Desc: CHGG_08369 [Chaetomium globosum CBS 148.51] gi|88176887|gb|EAQ84355.1| CHGG_08369 [Chaetomium globosum CBS 148.51]
  misc_feature (18)..(262): NCBI GI: 171678034 Blast Desc: protein product [Podospora anserina] gi|170937086|emb|CAP61744.1| protein product [Podospora anserina]
  misc_feature (1)..(261): NCBI GI: 169854321 Blast Desc: CC1G_01512 [Coprinopsis cinerea okayama7#130] gi|116504970|gb|EAU87865.1| CC1G_01512 [Coprinopsis cinerea okayama7#130]
  misc_feature (4)..(261): NCBI GI: 116200452 Blast Desc: CHGG_10771 [Chaetomium globosum CBS 148.51] gi|88175485|gb|EAQ82953.1| CHGG_10771 [Chaetomium globosum CBS 148.51]
  misc_feature (12)..(261): NCBI GI: 171676424 Blast Desc: protein product [Podospora anserina] gi|170936278|emb|CAP60937.1| protein product [Podospora anserina]
  misc_feature (9)..(262): NCBI GI: 189194003 Blast Desc: conserved [Pyrenophora tritici-repentis Pt-1C-BFP] gi|187978904|gb|EDU45530.1| conserved [Pyrenophora tritici-repentis Pt-1C-BFP]
  misc_feature (1)..(261): NCBI GI: 85085104 Blast Desc: NCU07222 [Neurospora crassa OR74A] gi|28918538|gb|EAA28211.1| [Neurospora crassa OR74A] gi|28950194|emb|CAD71061.1| [Neurospora crassa]
MLAHTLSSLAIVIAACGSVAQAECTREGLLAAADSYLAAQTSGSIADLKLSSNFTYEQNNKVADIKTGVLTQPLKIDLNRSTADTTACASYTMLISTTGAKPYVIATQIRHADNDTSTISMIDTIAATTGSLFFNAKQTLGYIQKENWGTLDESQRSNRTELKRVGDAYLDMWTDPKAADSIPWGTDCERVEGSSLTKPCGASLPRGGSAKNNGHRRYVIDETIGSVDVLCTFDSLGDYQDSHEIRLEGGKVKYVHTVTVVGSG

SEQ ID NO: 1557 - DNA, 119 bp, Muscodor strobelii
  misc_feature: SGI EST ID NO. CUFF.4027.0
  misc_feature: Variant of the nucleotide sequence at SEQ ID NO 1555
gcgcgttgaaggatcgtccttgacaaaaccttgtggtgctagcttgccaaggggtggaagcgcgaagaataatggtcatcgacgatatgttattgatgagacgattgggtcagttgatg

SEQ ID NO: 1558 - DNA, 4524 bp, Muscodor strobelii
  misc_feature: SGI cDNA ID NO. 560124
  misc_feature: Encodes the peptide sequence at SEQ ID NO 1559
atggccgacttcacttgcaaacccccaatctgggaagatggctggccgtccaagtgtttggctcacataatactcaacaattatgtgccgctcagtttgttcataatcacatttgctatcttcgtgtacccccgattccgccgccgtcgtcgactggccctcccaccgggctccagaacaggcatcatgggtacaccaaatgagccgccaaagcgacgtgagcgccctgaattcaatactcagatatcatggcgtggtcggtcattcgaaacggcagcgatctttataaacttcatactgctcggcgttctgtccgtttctagaagagacatccgtggctggccgatgcttctcatcgccgcttcgcttttgcttaatattgtacgtccaaatgagcatttcccgctaggctacctcagtgtatattcttcatacgcattagcgactgcctttcttataccctcagtctttgatgaagatcatgacaatttgactcgtgccacccatcttgtacgtctcttcctgttcgttggagttgtagcagtcatcgggctatctccaagggtcaaggtgcagggaagcggcgacaatgaaatcgatgattctggttcaaagcaagatcacgccagcttcttctctcgactctccttttcatgggccaatggcctactatggaaagcctataaagcaggaccattagaaaaggacgatctttacccgctgagctatgcacaacgatccctggtcattacctcatccgacaggtacgactctactacgacactgctctggactatctttcagttcataagatgggacaccgtacaacaaggcgcctgggctgcagccaccagtgtcttcgttttcatccctccgcttctcatcaaagtcgtcctcgaatacttggacgacatggtacatccatgggaggcgagtgctatctggcaagtggtgggcggaatattcgtcgcagggcttattgctggtgttgcagagtcgcaatgtggctggaagggcaacaacataactgcaacggttcgaagcgtgctcttgaacttgatacacgataagctgatgcgaagagcgaacgtcaaaatgcgaagcgactcagcttcaggcaaggaaaagactgcagctgatggcagaattaccaacatggtctctgcagatgtagactcgatttccttcatgtcgggctatctatacttagtgtgggttacctttccagtgcaaatcaccattggcactttgcttctgtacggaatcctaggctggagtggagtactcggcgtagtgctaatgataggtcttctgccgctcaatgttctgctgtccaagcacttcgcagcagttcaacgaagagtactcgtggccagtgatgagcgaattcagaccagcaacgaagtccttcgtacaatgagattcataaaatactatgcttgggaagcgctgttcagaaccagggtactgagcaaacggaaggccgagttgaagagcgtgagaacgagattcatttggtggtcaatcaacataaccgtcttctattcgctaccgttcatcgccaccctcattacgttccttctttatacggcagtctggggaaatcaattgaagacaacaacagcatttcctgctctggcggcgttcgcagtacttcgaattcccctaaacaggctggcagactccatcaccttcctacttcaggcctacgtctctctccgtcgcattgaaaaactcctccaagagcgcgagagtgataaagattcgcaaacgaaaacgtcggagtcttcggaaatcggctttgaaaatgccaccttgacgtggcctatgccccaggacacttcttcatcgactccaaccaccgctcgtgcttgtgatttacaagttgttctaccatctagtcagacattcacgttgtctaaattgacaatacaattcaagcgcaacgggttgaatatggtatgtggtccaagtggctccggaaaatcatcacttctgttgagtcttttgggcgagatgcatcttcgcgatggtcaacttcggttcctgggcggcgatagcctaaacttcgccgccaacatccaagtgcaagccacagccgggtccccaaaagccacagtggcatactgtccacatgaagcttggataatgaatcaaagtataaaatccaacattctactcggcagtgcgtttgatcgtgaccgctacgagaaggtgctggacgcttgtcaacttcgtccggacctacttgttcttgctgatagagatcagtcactcgctggtgacaagggaagtcgcttaagtggaggtcaaaagcagcgagtagctcttgctcgagctttatacagttcatcacaacttgtaatcctcgatgactgtctgagtgcagtagattcgcaaacggcaaatcgaatttttcataacgcggtcaagggcccattgatgaccggtcgaacttgtgtcttggctactcaccagcttcgactggcgctacctcattgtgactacgttgtcgttctcgaggacggtcagatcaaggctcaaggaacggcagacactgtgatagccacaggatgtctcgacaaggcacttgaagatacatcagttctgacacctaatcacgaagacgccgcatcggatacagagaatgtgcttctctccaatacagacgtgattgtttccagcgatccgatagccaaggcgggccatgaagaaaagaagctcgaaggcgctgtgccttggtcaactgttcggcattatctccgaaacatgggtcactttgttttctggagtctggttttctgtggcttcgcagctcaacagctagccgcgctgggtactaatatctggatcaagcactgggctatgcagtatgatgaaaaagaggtcatccaggcagccgaagcacctaatcctcgatactatctagccatctatgcggcgatagttggtgcatatgctataattacgttcactagggatatgatcacactctcaggatccttgagagcatcgtccaaggtgtttgaacagcttctggattcggtaatgtcggccaagattgcctttttcgaccggcctctgggtcagattaccaatcgattttcccgagacattactctcgttgatcaaaacttagcaacgttcgctgtcagtcttctccagctaacagcatcaattgccatgataatgggtctcacgatttgggcgcttccgaacgccgcgctcgtcattgctcttgtcgtcgtctgtcttgcgcattacggtgtcattgctctatatacgagcggtgcacgagacttgaagcgtatggaatctgttgctcggtcgccgctctaccagtgtatcgaggagactcagacgggctgcatctctatccggggctataggcgtgagcccctgttcgcggtccgattcggggagcatgtgaatcaactcaaccagccttacctcctacttgctgccagtaaacagtggatgaccttgcgtatcagtatccttggcagcttcattacttttctagccgctgcttttgctgtcgcaggaaaaggatcaatcgaacctggtgttgcaggcctcgtgcttacatacctgtcgacgctaacagaaagcatgctctggctagcagagatttacgctcttgtccaagagaacctgacatcgcttgagcgcgtcgtagagtatatcgctattgaaaaagagcctattgacttacaggcacagtgtcacggcgtcgagccctatcgagatgcatcgcacgttccacaggattggccagatacagcttatgtccaattcagtaatttcagcgctcgttatgcgccacacctcgagcctgtgctcaaagctatcaactttgaagtccggcctggccagcgccttgctatcgttggccgtactggtgcgggcaaaagctctatgatacttgctctactacgagctctcgatccagatgacggtggttcaatcaaaatcgacggaatagatatcgcggctatacccctttctcgactaagaggcaaggctattacggtcgtgccacaagatgtccagctattcgatggaagtgtgcgtgataatctggatccactgcacgaacatgacgatgatcaactagctggcgtcttacgctctatgcaataccaactgaacctggatatgtctgccgaggagctatcacgtggccaacgtcaactgctctgcgtagctcgcggccttcttcgtcggacacgcgtgttggttcttgatgaggccacagcatcaattgaccatgccaccgatagggccatccaacaaggcctacgcaactacgctgccatgaacaacactactgtgatcacgattgcccatagattactcaccattgctgactacgaccgggtgatcgtactggatggtgggcagattgtcgaggaaggtagcgtggaggaactgttgaacgaccaaaaaaacaacggggtattccgtcgattatgtgtggaatctggggatatggatgccattgcgcgagccgctcaagagtga

SEQ ID NO: 1559 - protein, 1507 aa, Muscodor strobelii
  misc_feature: SGI Peptide ID NO. 560124
  misc_feature (927)..(1205): Pfam Id: PF00664 Pfam Desc: ABC transporter transmembrane region
  misc_feature (274)..(556): Pfam Id: PF00664 Pfam Desc: ABC transporter transmembrane region
  misc_feature (1291)..(1467): Pfam Id: PF00005 Pfam Desc: ABC transporter
  misc_feature (649)..(843): Pfam Id: PF00005 Pfam Desc: ABC transporter
  misc_feature (947)..(1205): Pfam Id: PF00664 Pfam Desc: ABC transporter transmembrane region
  misc_feature (381)..(556): Pfam Id: PF00664 Pfam Desc: ABC transporter transmembrane region
  misc_feature (654)..(843): Pfam Id: PF00005 Pfam Desc: ABC transporter
  misc_feature (4)..(1501): NCBI GI: 212533733 Blast Desc: ATP-dependent bile acid permease, [Penicillium marneffei ATCC 18224] gi|210072387|gb|EEA26476.1| ATP-dependent bile acid permease, [Penicillium marneffei ATCC 18224]
  misc_feature (77)..(1503): NCBI GI: 242780311 Blast Desc: multidrug resistance protein, [Talaromyces stipitatus ATCC 10500] gi|218719715|gb|EED19134.1| multidrug resistance protein, [Talaromyces stipitatus ATCC 10500]
  misc_feature (273)..(1507): NCBI GI: 242787564 Blast Desc: multidrug resistance protein, [Talaromyces stipitatus ATCC 10500] gi|218721183|gb|EED20602.1| multidrug resistance protein, [Talaromyces stipitatus ATCC 10500]
  misc_feature (205)..(1507): NCBI GI: 119183517 Blast Desc: CIMG_06690 [Coccidioides immitis RS]
  misc_feature (205)..(1507): NCBI GI: 240109635 Blast Desc: ABC transporter family protein [Coccidioides posadasii C735 delta SOWgp]
  misc_feature (198)..(1507): NCBI GI: 154311367 Blast Desc: BC1G_06536 [Botryotinia fuckeliana B05.10] gi|150850933|gb|EDN26126.1| BC1G_06536 [Botryotinia fuckeliana B05.10]
  misc_feature (204)..(1507): NCBI GI: 85098587 Blast Desc: NCU03591 [Neurospora crassa OR74A] gi|28922145|gb|EAA31399.1| NCU03591 [Neurospora crassa OR74A] gi|38566788|emb|CAE76098.1| related to bile acid ABC transport
  misc_feature (205)..(1507): NCBI GI: 171692993 Blast Desc: protein product [Podospora anserina] gi|170946445|emb|CAP73246.1| protein product [Podospora anserina]
  misc_feature (204)..(1507): NCBI GI: 255726772 Blast Desc: ATP-dependent bile acid permease [Candida tropicalis MYA-3404] gi|240134236|gb|EER33791.1| ATP-dependent bile acid permease [Candida tropicalis MYA-3404]
  misc_feature (209)..(1507): NCBI GI: 254585517 Blast Desc: ZYRO0G07612p [Zygosaccharomyces rouxii] gi|238941220|emb|CAR29393.1| ZYRO0G07612p [Zygosaccharomyces rouxii]
  misc_feature (206)..(1500): SWISSPROT Homolog: EC 3.6.3.44 Xenobiotic-transporting ATPase
MADFTCKPPIWEDGWPSKCLAHIILNNYVPLSLFIITFAIFVYPRFRRRRRLALPPGSRTGIMGTPNEPPKRRERPEFNTQISWRGRSFETAAIFINFILLGVLSVSRRDIRGWPMLLIAASLLLNIVRPNEHFPLGYLSVYSSYALATAFLIPSVFDEDHDNLTRATHLVRLFLFVGVVAVIGLSPRVKVQGSGDNEIDDSGSKQDHASFFSRLSFSWANGLLWKAYKAGPLEKDDLYPLSYAQRSLVITSSDRYDSTTTLLWTIFQFIRWDTVQQGAWAAATSVFVFIPPLLIKVVLEYLDDMVHPWEASAIWQVVGGIFVAGLIAGVAESQCGWKGNNITATVRSVLLNLIHDKLMRRANVKMRSDSASGKEKTAADGRITNMVSADVDSISFMSGYLYLVWVTFPVQITIGTLLLYGILGWSGVLGVVLMIGLLPLNVLLSKHFAAVQRRVLVASDERIQTSNEVLRTMRFIKYYAWEALFRTRVLSKRKAELKSVRTRFIWWSINITVFYSLPFIATLITFLLYTAVWGNQLKTTTAFPALAAFAVLRIPLNRLADSITFLLQAYVSLRRIEKLLQERESDKDSQTKTSESSEIGFENATLTWPMPQDTSSSTPTTARACDLQVVLPSSQTFTLSKLTIQFKRNGLNMVCGPSGSGKSSLLLSLLGEMHLRDGQLRFLGGDSLNFAANIQVQATAGSPKATVAYCPHEAWIMNQSIKSNILLGSAFDRDRYEKVLDACQLRPDLLVLADRDQSLAGDKGSRLSGGQKQRVALARALYSSSQLVILDDCLSAVDSQTANRIFHNAVKGPLMTGRTCVLATHQLRLALPHCDYVVVLEDGQIKAQGTADTVIATGCLDKALEDTSVLTPNHEDAASDTENVLLSNTDVIVSSDPIAKAGHEEKKLEGAVPWSTVRHYLRNMGHFVFWSLVFCGFAAQQLAALGTNIWIKHWAMQYDEKEVIQAAEAPNPRYYLAIYAAIVGAYAIITFTRDMITLSGSLRASSKVFEQLLDSVMSAKIAFFDRPLGQITNRFSRDITLVDQNLATFAVSLLQLTASIAMIMGLTIWALPNAALVIALVVVCLAHYGVIALYTSGARDLKRMESVARSPLYQCIEETQTGCISIRGYRREPLFAVRFGEHVNQLNQPYLLLAASKQWMTLRISILGSFITFLAAAFAVAGKGSIEPGVAGLVLTYLSTLTESMLWLAEIYALVQENLTSLERVVEYIAIEKEPIDLQAQCHGVEPYRDASHVPQDWPDTAYVQFSNFSARYAPHLEPVLKAINFEVRPGQRLAIVGRTGAGKSSMILALLRALDPDDGGSIKIDGIDIAAIPLSRLRGKAITVVPQDVQLFDGSVRDNLDPLHEHDDDQLAGVLRSMQYQLNLDMSAEELSRGQRQLLCVARGLLRRTRVLVLDEATASIDHATDRAIQQGLRNYAAMNNTTVITIAHRLLTIADYDRVIVLDGGQIVEEGSVEELLNDQKNNGVFRRLCVESGDMDAIARAAQE

SEQ ID NO: 1560 - DNA, 3189 bp, Muscodor strobelii
  misc_feature: SGI EST ID NO. CUFF.4030.0
  misc_feature: Variant of the nucleotide sequence at SEQ ID NO 1558
gactccatcaccttcctacttcaggcctacgtctctctccgtcgcattgaaaaactcctccaagagcgcgagagtgataaagattcgcaaacgaaaacgtcggagtcttcggaaatcggctttgaaaatgccaccttgacgtggcctatgccccaggacacttcttcatcgactccaaccaccgctcgtgcttgtgatttacaagttgttctaccatctagtcagacattcacgttgtctaaattgacaatacaattcaagcgcaacgggttgaatatggtatgtggtccaagtggctccggaaaatcatcacttctgttgagtcttttgggcgagatgcatcttcgcgatggtcaacttcggttcctgggcggcgatagcctaaacttcgccgccaacatccaagtgcaagccacagccgggtccccaaaagccacagtggcatactgtccacatgaagcttggataatgaatcaaagtataaaatccaacattctactcggcagtgcgtttgatcgtgaccgctacgagaaggtgctggacgcttgtcaacttcgtccggacctacttgttcttgctgatagagatcagtcactcgctggtgacaagggaagtcgcttaagtggaggtcaaaagcagcgagtagctcttgctcgagctttatacagttcatcacaacttgtaatcctcgatgactgtctgagtgcagtagattcgcaaacggcaaatcgaatttttcataacgcggtcaagggcccattgatgaccggtcgaacttgtgtcttggctactcaccagcttcgactggcgctacctcattgtgactacgttgtcgttctcgaggacggtcagatcaaggctcaaggaacggcagacactgtgatagccacaggatgtctcgacaaggcacttgaagatacatcagttctgacacctaatcacgaagacgccgcatcggatacagagaatgtgcttctctccaatacagacgtgattgtttccagcgatccgatagccaaggcgggccatgaagaaaagaagctcgaaggcgctgtgccttggtcaactgttcggcattatctccgaaacatgggtcactttgttttctggagtctggttttctgtggcttcgcagctcaacagctagccgcgctgggtactaatatctggatcaagcactgggctatgcagtatgatgaaaaagaggtcatccaggcagccgaagcacctaatcctcgatactatctagccatctatgcggcgatagttggtgcatatgctataattacgttcactagggatatgatcacactctcaggatccttgagagcatcgtccaaggtgtttgaacagcttctggattcggtaatgtcggccaagattgcctttttcgaccggcctctgggtcagattaccaatcgattttcccgagacattactctcgttgatcaaaacttagcaacgttcgctgtcagtcttctccagctaacagcatcaattgccatgataatgggtctcacgatttgggcgcttccgaacgccgcgctcgtcattgctcttgtcgtcgtctgtcttgcgcattacggtgtcattgctctatatacgagcggtgcacgagacttgaagcgtatggaatctgttgctcggtcgccgctctaccagtgtatcgaggagactcagacgggctgcatctctatccggggctataggcgtgagcccctgttcgcggtccgattcggggagcatgtgaatcaactcaaccagccttacctcctacttgctgccagtaaacagtggatgaccttgcgtatcagtatccttggcagcttcattacttttctagccgctgcttttgctgtcgcaggaaaaggatcaatcgaacctggtgttgcaggcctcgtgcttacatacctgtcgacgctaacagaaagcatgctctggctagcagagatttacgctcttgtccaagagaacctgacatcgcttgagcgcgtcgtagagtatatcgctattgaaaaagagcctattgacttacaggcacagtgtcacggcgtcgagccctatcgagatgcatcgcacgttccacaggattggccagatacagcttatgtccaattcagtaatttcagcgctcgttatgcgccacacctcgagcctgtgctcaaagctatcaactttgaagtccggcctggccagcgccttgctatcgttggccgtactggtgcgggcaaaagctctatgatacttgctctactacgagctctcgatccagatgacggtggttcaatcaaaatcgacggaatagatatcgcggctatacccctttctcgactaagaggcaaggctattacggtcgtgccacaagatgtccagctattcgatggaagtgtgcgtgataatctggatccactgcacgaacatgacgatgatcaactagctggcgtcttacgctctatgcaataccaactgaacctggatatgtctgccgaggagctatcacgtggccaacgtcaactgctctgcgtagctcgcggccttcttcgtcggacacgcgtgttggttcttgatgaggccacagcatcaattgaccatgccaccgatagggccatccaacaaggcctacgcaactacgctgccatgaacaacactactgtgatcacgattgcccatagattactcaccattgctgactacgaccgggtgatcgtactggatggtgggcagattgtcgaggaaggtagcgtggaggaactgttgaacgaccaaaaaaacaacggggtattccgtcgattatgtgtggaatctggggatatggatgccattgcgcgagccgctcaagagtgactcacgcgcaggtgtcgttgaaaacaaatattattcagcaattgagccgaacagaagagctatcacaacgtatgtacttaggcaggttgtatgtcgatctttcccttgccacgagctaaaggcgtagtattactttgacatacaagtatgtcgcagaacacactttagcttacacgaaaatatctatcattgaattaaaatctgtttcttgtcggaactgaatcagacctgcaatgcttaatggagtgcatcagctttgaacgggcacgctctaccatcggtgtacaagagaggagagcttttatttaaccggacagggcgatgcctccaactcgccacacaccc

SEQ ID NO: 1561 - DNA, 1380 bp, Muscodor strobelii
  misc_feature: SGI cDNA ID NO. 560125
  misc_feature: Encodes the peptide sequence at SEQ ID NO 1562
atgagggctacctacgtcctcacctctattgccctggcgcattcggctgtcagtactgcagtcaagagacagaccgctgtaggtacagcgactgttaacctagcagtgacttcagggactccacagcatttgggagacggcttcatctatggcctgcccgacagcaccaacggagctgccaatactgcgatcccaagcaacctcctgagtggctctggctttaactactgccgagccggaggtgctcaacttccctccccgagcctcggatatgctaagggccaactcagcggccgcctgacgtcctttctgtcaaattatcgcacttgccgccagtatggggctcgcttccagctactcgttcacgacctctggggcgcggatggagttcaagggagtaatttcccgtaccccggtgataatgggagctggaccgcgtttgacgacttcctgggccaggtaattgcctttatcaaggcgaataacatgctagatggtctcgatctcgacctctggaatgagcctgactctacactcttttggggagggtccctctcgcaataccaagccatgtggacacgatcatatcagcgtttcaaagcggagctgccatccgcactcatcgctggtccatccatctctgttccgcccaacacaagcaaccagttttggacaggcttcttggacaatatcaaatctaccaacacggttccagatatatatacgtaccatttgctaggcttaagctttgacgtccgcacctctcaaagcactctaagctctatgatcagctctagaggccttgcctcgaaaccagtgattgtcaatgaatacggcgcagccgcaggcggcgatcagaccaacgcgggcagtgtctggtatattgccaattttgagagggcgaatatcagaggtcttagagctcactggggcatgggcgccaccaacctccacaacgacatggcaggcttagtcaaccaggtgggttcgagctatgtccctgcggctcagtggtgggtgtataattactattcccaatctatgacgggcaatcgcgtggccactacatcgtctggagatggagtcttcgaagtttacgctacccgtggaagcgcaagcaacaccgttaaagttcttaccggtttgaggccccagtacggcgtcagaacttacgacgtgaccatcaagggcctaagtgctgtgggcatctctgggtccgttaacatcaggacattgcgatttaatcacgttgagtggtatgaacaaggtcctgccccgactgacctaggtactgtcgcacacaccgtcactagtgacgcggttacgttttgggtgactccggataacgagtatacggcgtatgcttttgagttcgtctga

SEQ ID NO: 1562 - protein, 459 aa, Muscodor strobelii
  misc_feature: SGI Peptide ID NO. 560125
  misc_feature (7)..(459): NCBI GI: 256729344 Blast Desc: NECHADRAFT_47861 [Nectria haematococca mpVI 77-13-4]
  misc_feature (22)..(459): NCBI GI: 261360930 Blast Desc: conserved [Verticillium albo-atrum VaMs.102]
  misc_feature (6)..(458): NCBI GI: 115383814 Blast Desc: [Aspergillus terreus NIH2624] gi|114196146|gb|EAU37846.1| [Aspergillus terreus NIH2624]
  misc_feature (23)..(458): NCBI GI: 145614971 Blast Desc: MGG_14055 [Magnaporthe grisea 70-15] gi|145021853|gb|EDK05930.1| MGG_14055 [Magnaporthe grisea 70-15]
  misc_feature (23)..(458): NCBI GI: 149209081 Blast Desc: MGCH7_ch7g33 [Magnaporthe grisea 70-15] gi|86195988|gb|EAQ70626.1| MGCH7_ch7g33 [Magnaporthe grisea 70-15]
  misc_feature (1)..(458): NCBI GI: 242795747 Blast Desc: conserved [Talaromyces stipitatus ATCC 10500] gi|218719243|gb|EED18663.1| conserved [Talaromyces stipitatus ATCC 10500]
  misc_feature (4)..(458): NCBI GI: 119467406 Blast Desc: NFIA_049520 [Neosartorya fischeri NRRL 181] gi|119405661|gb|EAW15612.1| conserved [Neosartorya fischeri NRRL 181]
  misc_feature (6)..(458): NCBI GI: 121703904 Blast Desc: conserved [Aspergillus clavatus NRRL 1] gi|119398360|gb|EAW08790.1| conserved [Aspergillus clavatus NRRL 1]
  misc_feature (26)..(458): NCBI GI: 46109732 Blast Desc: FG01748.1 [Gibberella zeae PH-1]
  misc_feature (21)..(458): NCBI GI: 255940192 Blast Desc: Pc16g05200 [Penicillium chrysogenum Wisconsin 54-1255] gi|211585488|emb|CAP93190.1| Pc16g05200 [Penicillium chrysogenum Wisconsin 54-1255]
MRATYVLTSIALAHSAVSTAVKRQTAVGTATVNLAVTSGTPQHLGDGFIYGLPDSTNGAANTAIPSNLLSGSGFNYCRAGGAQLPSPSLGYAKGQLSGRLTSFLSNYRTCRQYGARFQLLVHDLWGADGVQGSNFPYPGDNGSWTAFDDFLGQVIAFIKANNMLDGLDLDLWNEPDSTLFWGGSLSQYQAMWTRSYQRFKAELPSALIAGPSISVPPNTSNQFWTGFLDNIKSTNTVPDIYTYHLLGLSFDVRTSQSTLSSMISSRGLASKPVIVNEYGAAAGGDQTNAGSVWYIANFERANIRGLRAHWGMGATNLHNDMAGLVNQVGSSYVPAAQWWVYNYYSQSMTGNRVATTSSGDGVFEVYATRGSASNTVKVLTGLRPQYGVRTYDVTIKGLSAVGISGSVNIRTLRFNHVEWYEQGPAPTDLGTVAHTVTSDAVTFWVTPDNEYTAYAFEFV

SEQ ID NO: 1563 - DNA, 1086 bp, Muscodor strobelii
  misc_feature: SGI cDNA ID NO. 560126
  misc_feature: Elevated expression when VOC is produced
  misc_feature: Encodes the peptide sequence at SEQ ID NO 1564
atgtcgctccccaaaattgctatcttagacgactatcagaggatatctgatgcccaatttgagcgtttgcgctcacaggggtataaaatcacaacctttacagacactttactaccgtataaccacccggatactccacaggatgctaaagatgctctcgtcaagcgattggaacccttcgacgtcatatgtactatgagagagcggacgccatttccagcagaactagtcaatcgcctcccaaatcttaagctcttactcaccaccggcccccgcaacgcagcactgaacgtcgaggcgtgcaccgcccgcaacatacccgtcgccggcactggcaagaaccgattcgccagcactggtcccgacagcactacacagcactgcgtcgcactcaacctagcactcgcgcgtaacatcccacgcgatgacgcttcggtaaagtcaggcgggtggcaaaccggtgacgccatcggtttgggcggaaagactttcggcactgtcggtttggggagactaggcgtaaatgtcgcgcggattatgcatatcgctttcggtatgaaggtcattgcttggagtcagaacctgacacaagatgctgctgatgaacaggctaaggctgcgggactcccggtcgaggatgagaatggggaaaagacttttaaggctgttagtcgggatgatctgtttagtagtgctgatgttgttaatattcacatcgttctctctgagcgatcaagaggcctcatcggcacaagtgacctggccaagatgaagaaaacagccctgctcatcaacacatcacgaggtcccatcatcaacaacgccgaccttctcgaggccgccaagaacgggacgatccgagggattggcttagatgtattcgatctcgaacctctgcccgcgaccagcgagtggcgcaccatcaaatggggagaggagggaaggagtcaggtcgtcctcacacctcatatggggtatgtcgagtttgaagggataggcggctggtacgaacagcaagtcgagaacatcttgcgttggcaaaagggagagtctttgaatgtgctgtataaagataatggctactaa

SEQ ID NO: 1564 - protein, 361 aa, Muscodor strobelii
  misc_feature: SGI Peptide ID NO. 560126
  misc_feature (129)..(325): Pfam Id: PF02826 Pfam Desc: D-isomer specific 2-hydroxyacid dehydrogenase, NAD binding domain
  misc_feature (1)..(353): NCBI GI: 256734810 Blast Desc: NECHADRAFT_75447 [Nectria haematococca mpVI 77-13-4]
  misc_feature (5)..(356): NCBI GI: 164428663 Blast Desc: NCU11195 [Neurospora crassa OR74A] gi|157072233|gb|EDO65386.1| conserved [Neurospora crassa OR74A]
  misc_feature (1)..(352): NCBI GI: 39950113 Blast Desc: MGG_01182 [Magnaporthe grisea 70-15] gi|145021027|gb|EDK05156.1| MGG_01182 [Magnaporthe grisea 70-15]
  misc_feature (5)..(353): NCBI GI: 171694824 Blast Desc: protein product [Podospora anserina] gi|170947654|emb|CAP59816.1| protein product [Podospora anserina]
  misc_feature (1)..(352): NCBI GI: 116182680 Blast Desc: CHGG_01968 [Chaetomium globosum CBS 148.51] gi|88186265|gb|EAQ93733.1| CHGG_01968 [Chaetomium globosum CBS 148.51]
  misc_feature (1)..(355): NCBI GI: 46107854 Blast Desc: FG00810.1 [Gibberella zeae PH-1]
  misc_feature (3)..(353): NCBI GI: 154291436 Blast Desc: BC1G_15179 [Botryotinia fuckeliana B05.10] gi|150846792|gb|EDN21985.1| BC1G_15179 [Botryotinia fuckeliana B05.10]
  misc_feature (5)..(352): NCBI GI: 156054220 Blast Desc: SS1G_05958 [Sclerotinia sclerotiorum 1980] gi|154703738|gb|EDO03477.1| SS1G_05958 [Sclerotinia sclerotiorum 1980]
  misc_feature (5)..(352): NCBI GI: 189201752 Blast Desc: glycerate dehydrogenase [Pyrenophora tritici-repentis Pt-1C-BFP] gi|187984311|gb|EDU49799.1| glycerate dehydrogenase [Pyrenophora tritici-repentis Pt-1C-BFP]
  misc_feature (6)..(352): NCBI GI: 225559834 Blast Desc: D-isomer specific 2-hydroxyacid dehydrogenase [Ajellomyces capsulatus G186AR]
  misc_feature (41)..(325): SWISSPROT Homolog: EC 1.1.1.95 Phosphoglycerate dehydrogenase
  misc_feature: Useful for introducing or modulating the production of volatile compounds
MSLPKIAILDDYQRISDAQFERLRSQGYKITTFTDTLLPYNHPDTPQDAKDALVKRLEPFDVICTMRERTPFPAELVNRLPNLKLLLTTGPRNAALNVEACTARNIPVAGTGKNRFASTGPDSTTQHCVALNLALARNIPRDDASVKSGGWQTGDAIGLGGKTFGTVGLGRLGVNVARIMHIAFGMKVIAWSQNLTQDAADEQAKAAGLPVEDENGEKTFKAVSRDDLFSSADVVNIHIVLSERSRGLIGTSDLAKMKKTALLINTSRGPIINNADLLEAAKNGTIRGIGLDVFDLEPLPATSEWRTIKWGEEGRSQVVLTPHMGYVEFEGIGGWYEQQVENILRWQKGESLNVLYKDNGY

SEQ ID NO: 1565 - DNA, 1695 bp, Muscodor strobelii
  misc_feature: SGI EST ID NO. CUFF.4051.0
  misc_feature: Variant of the nucleotide sequence at SEQ ID NO 1563
gcggatgagtcgcgaagtgtcgaccacgaataattaaatgtcaaattaatggtatgaatacctattgagtaatttctcgaagttgatctaagtctacgagtggacatcgcgtacctcataattatgagaatgaatatggtccttgacttgtccctgtgacggccggggccagggaaaacctcggtctcgcagtcttgatcttgcgagagtctcagcaccaagagctcgccgagcccggctgtaacggaatattttaattcggcaatcagaactgagagaccgtatgtttgtaaccttccgattgttgctgaatcatacttagaactctccagccatggccgggtaaagatagtcccgtagctagctccgcgcggggaaagccggcccaggccaacgggacagtgtggaggtgtcttgcatcatattgcagcatcgttgtttgacttacagcttacatacccaagtgtttgattacaagcccatcgctatcttcacgatcgatttttttgcttgaaaaggtcaagtagaaagatccggattgatcatgtcgctccccaaaattgctatcttagacgactatcagaggatatctgatgcccaatttgagcgtttgcgctcacaggggtataaaatcacaacctttacagacactttactaccgtataaccacccggatactccacaggatgctaaagatgctctcgtcaagcgattggaacccttcgacgtcatatgtactatgagagagcggacgccatttccagcagaactagtcaatcgcctcccaaatcttaagctcttactcaccaccggcccccgcaacgcagcactgaacgtcgaggcgtgcaccgcccgcaacatacccgtcgccggcactggcaagaaccgattcgccagcactggtcccgacagcactacacagcactgcgtcgcactcaacctagcactcgcgcgtaacatcccacgcgatgacgcttcggtaaagtcaggcgggtggcaaaccggtgacgccatcggtttgggcggaaagactttcggcactgtcggtttggggagactaggcgtaaatgtcgcgcggattatgcatatcgctttcggtatgaaggtcattgcttggagtcagaacctgacacaagatgctgctgatgaacaggctaaggctgcgggactcccggtcgaggatgagaatggggaaaagacttttaaggctgttagtcgggatgatctgtttagtagtgctgatgttgttaatattcacatcgttctctctgagcgatcaagaggcctcatcggcacaagtgacctggccaagatgaagaaaacagccctgctcatcaacacatcacgaggtcccatcatcaacaacgccgaccttctcgaggccgccaagaacgggacgatccgagggattggcttagatgtattcgatctcgaacctctgcccgcgaccagcgagtggcgcaccatcaaatggggagaggagggaaggagtcaggtcgtcctcacacctcatatggggtatgtcgagtttgaagggataggcggctggtacgaacagcaagtcgagaacatcttgcgttggcaaaagggagagtctttgaatgtgctgtataaagataatggctactaatggaatctatccacgacttgaacgtagctacctttgtgcagacaattgctaatgatgttataaac

SEQ ID NO: 1566 - DNA, 1548 bp, Muscodor strobelii
  misc_feature: SGI cDNA ID NO. 560127
  misc_feature: Encodes the peptide sequence at SEQ ID NO 1567
atgtctgaccaggccgagcccaacaaacatgtggctcctcaggtagcccccactgttctctgtgaagttgatcctgcagccaaagagtccgcagctactgccctcactgataagggcaccggcctatctgctgccgctgacaactctgagggagtagcccccgagagcaactctcttcctcctgccctccgccgctcccccacatcgttcctaggtacaggtgctctggccattgatcagaatctcttgcgagccaagctcgaccgcgagcacaagatggctaagatgacctacaacgctcagggcggcaacgagccgtccaagatgtctgagtccatgaagatggacattaccaagaccagcaagggtccctattcccccggcttgaaggttaatccgactcctcctttcactagcatgtaccagggcaagtctgggttttctcttcgctccggcggagagaacaaccctatgacccctctcattcccgctagtcccgggtttgccaccatgtctcctgccctgtccccgggctcagcctacccgtcgggaaaagcacctgctcccttcgggggcaacgctctgaacatggcgaatcactcgtctcctttcgcccagctcagcagtaattccaagaagacctcgaaagatagcgtcacggtgaagagcgagccccgtagcttcccgctcactctggatcaactggtcgctaacaacccgaccgaccgtggcggcactggcgtgccccagcaggcaggccctcgtgtcatggaggcaggccctcgcgtcatgctgccggtcgaacgtctcagtaaggaatgccagagtcgtggattcaatcctcagttcattgagcgcaacggtttcggctggtatgggtacgacgtcaaactcaagaccgacatcatcgagggcgcgcgaaaggactcttccaacgccgctaagcagtcttgtgcgtccaaagctctggccttcctcgcaggaacccctagtaccggctggacaggaacccctgccgtgcagaagccttctctcgccaccacaggccctgctgctgctaacaacagcaacaaggggtacttgcagcgtgaactcaagcgtgcctcgaacttgatcccgatcaagcctcgtcctgccgctcgcggaaccggggctccctcttcggaggctaccaaagctggtcttgctagtgacgcccgacgtgctgaagcccatgacctgatccagcacattcagggtgcctatagggctagtggtcctagcccgaagaacctcgctaacaaagaatacgctcaggcctatctccagggcctttccgcgggagtcgccatgcagcaggccagtgttggtgccggcatcagcaccagcaacgccgtcgacacgcgaggtcctgcctccgcccacgcctcgtctaagcagcgaggtcacaacggttcgggcagctatcacgaccgccgcgaccgccacgaccgtcgcgagcgttcaccttcgggtgagcgtgaccgccgctaccgtgaccgctcagatcccagcggccgccgctcgtga

SEQ ID NO: 1567 - protein, 515 aa, Muscodor strobelii
  misc_feature: SGI Peptide ID NO. 560127
MSDQAEPNKHVAPQVAPTVLCEVDPAAKESAATALTDKGTGLSAAADNSEGVAPESNSLPPALRRSPTSFLGTGALAIDQNLLRAKLDREHKMAKMTYNAQGGNEPSKMSESMKMDITKTSKGPYSPGLKVNPTPPFTSMYQGKSGFSLRSGGENNPMTPLIPASPGFATMSPALSPGSAYPSGKAPAPFGGNALNMANHSSPFAQLSSNSKKTSKDSVTVKSEPRSFPLTLDQLVANNPTDRGGTGVPQQAGPRVMEAGPRVMLPVERLSKECQSRGFNPQFIERNGFGWYGYDVKLKTDIIEGARKDSSNAAKQSCASKALAFLAGTPSTGWTGTPAVQKPSLATTGPAAANNSNKGYLQRELKRASNLIPIKPRPAARGTGAPSSEATKAGLASDARRAEAHDLIQHIQGAYRASGPSPKNLANKEYAQAYLQGLSAGVAMQQASVGAGISTSNAVDTRGPASAHASSKQRGHNGSGSYHDRRDRHDRRERSPSGERDRRYRDRSDPSGRRS

SEQ ID NO: 1568 - DNA, 477 bp, Muscodor strobelii
  misc_feature: SGI cDNA ID NO. 560128
  misc_feature: Encodes the peptide sequence at SEQ ID NO 1569
atggccatactccctgatggcatcaatgaagctgttgaggccattgttgatcgcaaggtcgcggcggcactcaaatctctggtcgctgcattgcgagcagccaccggtgaactcgagccaaggaatacggtggataaagagatgttttcagtcagtactgagaggtgtgaatctgacttatcgcaaagcaccgtcgcctaccgcacttcatatcacagtggcagtgcaaaaagcggacagctacgagaaatcatcgtcgacacactagcagagaacgttcccaatgaagagttcgacgacgataccgacctcttcaaattcgggctggacagcttgcaagtctctgctctccttaccgccattaatgcctttattgtcaagtcccaactgccagtggatctcgtccgaagcgaggtgatctactccaacccgacaatctcaaaaatcgtggcagcagttgccaaggaatttcggtaa

SEQ ID NO: 1569 - protein, 158 aa, Muscodor strobelii
  misc_feature: SGI Peptide ID NO. 560128
MAILPDGINEAVEAIVDRKVAAALKSLVAALRAATGELEPRNTVDKEMFSVSTERCESDLSQSTVAYRTSYHSGSAKSGQLREIIVDTLAENVPNEEFDDDTDLFKFGLDSLQVSALLTAINAFIVKSQLPVDLVRSEVIYSNPTISKIVAAVAKEFR

SEQ ID NO: 1570 - DNA, 951 bp, Muscodor strobelii
  misc_feature: SGI cDNA ID NO. 560129
  misc_feature: Encodes the peptide sequence at SEQ ID NO 1571
atgccgttcgctactctgtcttctaagccagatgcccctatagcctacgagttactttcaggagcaccagagagtactctcctcgttgtatgtctcaacggccttgctcttcctcagacgacttggaagccagtcatcgagctctttcaacaatcagaaatcccaatctgctcgatgccatgggtcttgacgtatgaccgttacggtcaaggcgattctccgagagaccctcgcgagaactggcctgataaggaccctggttatgcccacacagtagacgatgtcacagatgatctctacgagctgatcgcaactgtttctccgcagcgacgcgaacgtcttatctttatgaacaatagtattggtgcgcatgtggcccgtcggtatgctgatagatatcccaatgttgtcgaaggaattcttttcctagattccaatcccggcaacaccgactatgagatcatgtggcccaacccgctagacccgtctttcgacctggcgactatggtcccccacggcactccgctcgatgtctataagaaagcttctaataacatgacgacaatcttctctccagagaacaagaacaaggagggtttcgatcgacgtggtgtcaaggccctcttgcctgacccatcaaagccaaggctcgagggttcgaagacttcaaataagggcccttgggtgaccgtggtcggccacgacgtcgaccaattctccaaggaagagtgggagaatccgatgatgaaagtctccattggcatggctgcaatgtatacccaacccgtatggagcgagtacaacgaagggctgagtaaatttattgatccagaaagatccaaggggccggtaattgcgcccaacgcggggcatctcatccagagagataacccatctttcgtggctgaggaacttgttgatctcgtcaagaaggtcgagagctctagctag

SEQ ID NO: 1571 - protein, 316 aa, Muscodor strobelii
  misc_feature: SGI Peptide ID NO. 560129
  misc_feature (1)..(315): NCBI GI: 156045067 Blast Desc: SS1G_09722 [Sclerotinia sclerotiorum 1980] gi|154694117|gb|EDN93855.1| SS1G_09722 [Sclerotinia sclerotiorum 1980]
  misc_feature (3)..(312): NCBI GI: 169763546 Blast Desc: [Aspergillus oryzae RIB40] gi|83770701|dbj|BAE60834.1| protein product [Aspergillus oryzae]
  misc_feature (3)..(312): NCBI GI: 145231329 Blast Desc: An02g00110 [Aspergillus niger] gi|134056051|emb|CAK96226.1| protein product [Aspergillus niger]
  misc_feature (1)..(262): NCBI GI: 154314748 Blast Desc: BC1G_04083 [Botryotinia fuckeliana B05.10] gi|150848705|gb|EDN23898.1| BC1G_04083 [Botryotinia fuckeliana B05.10]
  misc_feature (5)..(312): NCBI GI: 145245447 Blast Desc: An11g10340 [Aspergillus niger] gi|134079691|emb|CAK97117.1| protein product [Aspergillus niger]
  misc_feature (6)..(312): NCBI GI: 169626234 Blast Desc: SNOG_16400 [Phaeosphaeria nodorum SN15] gi|160705797|gb|EAT76225.2| SNOG_16400 [Phaeosphaeria nodorum SN15]
  misc_feature (3)..(313): NCBI GI: 256723628 Blast Desc: NECHADRAFT_52191 [Nectria haematococca mpVI 77-13-4]
  misc_feature (5)..(312): NCBI GI: 169773071 Blast Desc: [Aspergillus oryzae RIB40] gi|83768865|dbj|BAE59002.1| protein product [Aspergillus oryzae]
  misc_feature (6)..(312): NCBI GI: 189209634 Blast Desc: conserved [Pyrenophora tritici-repentis Pt-1C-BFP] gi|187977242|gb|EDU43868.1| conserved [Pyrenophora tritici-repentis Pt-1C-BFP]
  misc_feature (6)..(298): NCBI GI: 238491004 Blast Desc: conserved [Aspergillus flavus NRRL3357] gi|220697152|gb|EED53493.1| conserved [Aspergillus flavus NRRL3357]
MPFATLSSKPDAPIAYELLSGAPESTLLVVCLNGLALPQTTWKPVIELFQQSEIPICSMPWVLTYDRYGQGDSPRDPRENWPDKDPGYAHTVDDVTDDLYELIATVSPQRRERLIFMNNSIGAHVARRYADRYPNVVEGILFLDSNPGNTDYEIMWPNPLDPSFDLATMVPHGTPLDVYKKASNNMTTIFSPENKNKEGFDRRGVKALLPDPSKPRLEGSKTSNKGPWVTVVGHDVDQFSKEEWENPMMKVSIGMAAMYTQPVWSEYNEGLSKFIDPERSKGPVIAPNAGHLIQRDNPSFVAEELVDLVKKVESSS

SEQ ID NO: 1572 - DNA, 2700 bp, Muscodor strobelii
  misc_feature: SGI cDNA ID NO. 560130
  misc_feature: Elevated expression when VOC is produced
  misc_feature: Encodes the peptide sequence at SEQ ID NO 1573
atggatgccattgcgccggtagcacgccccattcagggactagaactggccgtcgcaaatttcagtgccgcacttacagatgaccagcgccgcaagctttacgagactcgcgctgttcctgatgctgactcaatccttgtcttcactgcggaactcgattctgcaaataggaacagaaagggtcgaagtgtcggtagtcgagtttctaaaatcctacaatcagttcgagactttgccagcatcattggtaccttcgtgtcgtcaaatccacagatcgcggcacttgtctgggggagtgtgcgattgacaatgcaaattgttgtcaactacacatcatactatgaggcgatctcggagttgcttatgaacttgggccatctttggcatgaacagcttcgagaagctttttataaatccttcgaccaagagttccggccagatacggatgagatccacagatgcagcaagaatgtgaagcatgccatcagccttgccaaggcatacatcgatgcacaagaacagaaactccaagctgaagaacggacggaggccgccaaggagaggaaatggctgaaaaatatcacctcgcgtacgcagaatgatactgattctattcatttgttattattacgaaaggcagaacgagatgaggatgaacgaaagcagaagctcctagatgcgatttgcactcatgatcccgaaaggttactcaagcagaatcaacggaaacgcttcggcaacaccgcagcatggattttccatacaaaagagttctgcaaatggaacaaccacgagagttcttctcttctatggtgttcaggaaaaattggatcggggaagagtgtcgttaccgagcaggagtctctcaagattgagatcatcatgagatcacttgtacggcaacggctaccaatatcgactcagctgtccgagcaaatggagaaaaagctacaaagacttcaacgcgactgtgaagtggacgaaattgcaaaggtcattcgcgatatcacgcccgtgttacagctgtcctatatcatagtggatggcttagatgaatgcgaccatttggatcgatctaagattctgaaggcgctgtcgttattactcaattcaacaccaagcacgaaattattcttggcaagccgcgtgagtctttcggaagatctacagaaatatttcggctccatgatccaagtatccatggataactcggatgtttcagacgatatcagaacgtacatcgctgggacactggaggaaaaaataaaatgcaaggacttgaaaattggagaccccaaattgaagaatgaaattgcacaagcattggcgcacggtgccgatggcatgttcctgtgggtagattttcaagtaagggaagtctgtttgcaattatgcgacgaagatattctacacgtcgacgaggagtatcgatcgatccaatttgctcatcacactgtgaagcaattcctgcttcaacaaccagccgagtatccgcaatctgatctcgacatgtttttaattgatttcgaagaggcagatcatttcattggtgagatatgcgtcacctacctggctttcaatgacttcaaaacgacgctcagccgaagagcaaagccattgctgcttccaagcccagatgcgtttgtcacagaagtaccatttggaaagaccttgaagcgtttattgagggccacgcagaaacacgggtctagcgggaccgcagttcctatctcacatttcgaccacacgaatgacccagttatgacttcccaaacagtcctcgacgcacatccatttctcaaatatgcatcaactaattggattctgcataccaagcattttcaatacaatcggtcaaaaacctggtctttttggaagaatatgataatcgagggacacgatctggcatcgaacccatggcaaccagaatcgttgactgtagatagccacggtcttctagactgggcccaagaggcacatcactatgcgttaatgcgcctgattgtttcatcaaggatattgttggaaccagagcaaagaaaaggcattacaaatgctatctatcgccatgattacctacagctggacattttcctaacaaataatgcgcatgctgcagtggtagatgaggcgctccagtttgcaacggcaagcgaccttcttaattttgtcgaaagactactcgcagcaaacgccgacgtcaatgctattggagaagatagcctttcagcactccaaacagcggtcaaacaccagaatattgaaatcgttgaaagactactcgcagcaaacgccgacgttaacgctattagagaggatagcctttcagcaatccaaatagcggtcaaccacaagcatctcaaaatcatcgaaagactgcttgtagctgacgctgacgttaatactattggacaggacggcctatcggcactgcaagtagcgactagcttcgggcatctcgatattgtcgaaagactgcttgcagctgacgccaatgtcaatgctcctgcgtttaatgggtatacagcactccatatggcggccgaggatgggcgtcttgacgtcgtcgaaagcctgctcgtagctaatgccaacgtcaatgttactggacacgacggtctttcagcagcccaagtagcggccaagcaccagcatcccaaaatcgtcaaaagactaaattgggcagaggcccaatggtaa

SEQ ID NO: 1573 - protein, 899 aa, Muscodor strobelii
  misc_feature: SGI Peptide ID NO. 560130
  misc_feature (839)..(871): Pfam Id: PF00023 Pfam Desc: Ankyrin repeat
  misc_feature (806)..(838): Pfam Id: PF00023 Pfam Desc: Ankyrin repeat
  misc_feature (740)..(772): Pfam Id: PF00023 Pfam Desc: Ankyrin repeat
  misc_feature (80)..(864): NCBI GI: 145611432 Blast Desc: MGG_00388 [Magnaporthe grisea 70-15] gi|145018721|gb|EDK03000.1| MGG_00388 [Magnaporthe grisea 70-15]
  misc_feature (14)..(470): NCBI GI: 46139711 Blast Desc: FG11370.1 [Gibberella zeae PH-1]
  misc_feature (11)..(469): NCBI GI: 256733361 Blast Desc: NECHADRAFT_77352 [Nectria haematococca mpVI 77-13-4]
  misc_feature (17)..(463): NCBI GI: 171696018 Blast Desc: protein product [Podospora anserina] gi|170948251|emb|CAP60415.1| protein product [Podospora anserina]
  misc_feature (711)..(892): NCBI GI: 46118594 Blast Desc: FG04718.1 [Gibberella zeae PH-1]
  misc_feature (738)..(892): NCBI GI: 46118594 Blast Desc: FG04718.1 [Gibberella zeae PH-1]
  misc_feature (702)..(892): NCBI GI: 242764427 Blast Desc: ankyrin repeat-containing protein, [Talaromyces stipitatus ATCC 10500] gi|218723967|gb|EED23384.1| ankyrin repeat-containing protein, [Talaromyces stipitatus ATCC 10500]
  misc_feature (711)..(893): NCBI GI: 46118594 Blast Desc: FG04718.1 [Gibberella zeae PH-1]
  misc_feature (702)..(892): NCBI GI: 242760147 Blast Desc: Pfs, NACHT and Ankyrin domain protein [Talaromyces stipitatus ATCC 10500] gi|218723125|gb|EED22542.1| Pfs, NACHT and Ankyrin domain protein [Talaromyces stipitatus ATCC 10500]
  misc_feature (653)..(892): NCBI GI: 115620299 Blast Desc: : similar to ankyrin 2,3/unc44 [Strongylocentrotus purpuratus]
  misc_feature: Useful for introducing or modulating the production of volatile compounds
MDAIAPVARPIQGLELAVANFSAALTDDQRRKLYETRAVPDADSILVFTAELDSANRNRKGRSVGSRVSKILQSVRDFASIIGTFVSSNPQIAALVWGSVRLTMQIVVNYTSYYEAISELLMNLGHLWHEQLREAFYKSFDQEFRPDTDEIHRCSKNVKHAISLAKAYIDAQEQKLQAEERTEAAKERKWLKNITSRTQNDTDSIHLLLLRKAERDEDERKQKLLDAICTHDPERLLKQNQRKRFGNTAAWIFHTKEFCKWNNHESSSLLWCSGKIGSGKSVVTEQESLKIEIIMRSLVRQRLPISTQLSEQMEKKLQRLQRDCEVDEIAKVIRDITPVLQLSYIIVDGLDECDHLDRSKILKALSLLLNSTPSTKLFLASRVSLSEDLQKYFGSMIQVSMDNSDVSDDIRTYIAGTLEEKIKCKDLKIGDPKLKNEIAQALAHGADGMFLWVDFQVREVCLQLCDEDILHVDEEYRSIQFAHHTVKQFLLQQPAEYPQSDLDMFLIDFEEADHFIGEICVTYLAFNDFKTTLSRRAKPLLLPSPDAFVTEVPFGKTLKRLLRATQKHGSSGTAVPISHFDHTNDPVMTSQTVLDAHPFLKYASTNWILHTKHFQYNRSKTWSFWKNMIIEGHDLASNPWQPESLTVDSHGLLDWAQEAHHYALMRLIVSSRILLEPEQRKGITNAIYRHDYLQLDIFLTNNAHAAVVDEALQFATASDLLNFVERLLAANADVNAIGEDSLSALQTAVKHQNIEIVERLLAANADVNAIREDSLSAIQIAVNHKHLKIIERLLVADADVNTIGQDGLSALQVATSFGHLDIVERLLAADANVNAPAFNGYTALHMAAEDGRLDVVESLLVANANVNVTGHDGLSAAQVAAKHQHPKIVKRLNWAEAQW

SEQ ID NO: 1574 - DNA, 2504 bp, Muscodor strobelii
  misc_feature: SGI EST ID NO. CUFF.4079.0
  misc_feature: Variant of the nucleotide sequence at SEQ ID NO 1572
tttttgtccaaagggacactcgaacatcctggtgtcttatttttttgctcattatagcgagcaggagtctctcaagattgagatcatcatgagatcacttgtacggcaacggctaccaatatcgactcagctgtccgagcaaatggagaaaaagctacaaagacttcaacgcgactgtgaagtggacgaaattgcaaaggtcattcgcgatatcacgcccgtgttacagctgtcctatatcatagtggatggcttagatgaatgcgaccatttggatcgatctaagattctgaaggcgctgtcgttattactcaattcaacaccaagcacgaaattattcttggcaagccgcgtgagtctttcggaagatctacagaaatatttcggctccatgatccaagtatccatggataactcggatgtttcagacgatatcagaacgtacatcgctgggacactggaggaaaaaataaaatgcaaggacttgaaaattggagaccccaaattgaagaatgaaattgcacaagcattggcgcacggtgccgatggcatgttcctgtgggtagattttcaagtaagggaagtctgtttgcaattatgcgacgaagatattcgtcagtgcctgaagaacctcccaagaacactggaagagcttttttgtcgggtgttacgccggatcttgtgtcgaaaccgtgagaagataaccgcaaggattttctggtggatcgcgggctcgacacgacctctaactcttgaagagcttagagaagcaatcgcaacagaaattggccaggaatataccatgccgggacgtcttcacaacaatatgaatgacatagtctcagtatgcgaaaatttagtacacgtcgacgaggagtatcgatcgatccaatttgctcatcacactgtgaagcaattcctgcttcaacaaccagccgagtatccgcaatctgatctcgacatgtttttaattgatttcgaagaggcagatcatttcattggtgagatatgcgtcacctacctggctttcaatgacttcaaaacgacgctcagccgaagagcaaagccattgctgcttccaagcccagatgcgtttgtcacagaagtaccatttggaaagaccttgaagcgtttattgagggccacgcagaaacacgggtctagcgggaccgcagttcctatctcacatttcgaccacacgaatgacccagttatgacttcccaaacagtcctcgacgcacatccatttctcaaatatgcatcaactaattggattctgcataccaagcattttcaatacaatcggtcaaaaacctggtctttttggaagaatatgataatcgagggacacgatctggcatcgaacccatggcaaccagaatcgttgactgtagatagccacggtcttctagactgggcccaagaggcacatcactatgcgttaatgcgcctgattgtttcatcaaggatattgttggaaccagagcaaagaaaaggcattacaaatgctatctatcgccatgattacctacagctggacattttcctaacaaataatgcgcatgctgcagtggtagatgaggcgctccagtttgcaacggcaagcgaccttcttaattttgtcgaaagactactcgcagcaaacgccgacgtcaatgctattggagaagatagcctttcagcactccaaacagcggtcaaacaccagaatattgaaatcgttgaaagactactcgcagcaaacgccgacgttaacgctattagagaggatagcctttcagcaatccaaatagcggtcaaccacaagcatctcaaaatcatcgaaagactgcttgtagctgacgctgacgttaatactattggacaggacggcctatcggcactgcaagtagcgactagcttcgggcatctcgatattgtcgaaagactgcttgcagctgacgccaatgtcaatgctcctgcgtttaatgggtatacagcactccatatggcggccgaggatgggcgtcttgacgtcgtcgaaagcctgctcgtagctaatgccaacgtcaatgttactggacacgacggtctttcagcagcccaagtagcggccaagcaccagcatcccaaaatcgtcaaaagactaaattgggcagaggcccaatggtaaaaaggctggcgtttgttattccttggtcaactccgaagaatatcgccagtttggctatcctattttgaactcctgctcattatccggttcccgcctatatagagagcaaacccttactgttgatagtacatatatgttgttgggaaggacctctgtacaggagaagcaaatccacttcgaaggggaattccgggcctaagcgtagtccttgcggcaataatctttacataactctataatgcatgaaacctataaagtgatcaaagaagctcttttaatcgaacattttgcaatcgatcatcttcaactgcacccacaggttgccatatgtttctgtcgcctcctctgctcg

SEQ ID NO: 1575 - DNA, 975 bp, Muscodor strobelii
  misc_feature: SGI cDNA ID NO. 560131
  misc_feature: Encodes the peptide sequence at SEQ ID NO 1576
atgacgcgtccgcgacgctcctcggctgcgagcgaggagagcacggacacggctggtgtccaggagttggggagcatgtacgactatctggccaagatcatattgcttgggcccagtggtactggaaaatcatgtctattgcaccgcttcgtcaaaagcgaatggcgcgtcctctcctcccagaccatcggcgttgagttcgccagcaagatcataaaagttggcactggcgcacggaggaagcgcataaagctccagctctgggacacagcaggaacagaacgcttccgctccgtcagccgatcctactaccgtggcgccgcaggcgcaatcctggtctacgacctaacatcgcacaactccttccgcgccctccaaccctttctaaacgacgcacgcgccctcgcctcgccgaacttgaccctattactggcaggcaacaaactagatctcgccaacgactctttaatcgatacctccatcccacctcccacgccctcttccacaacctcttcattcccctactcaacatcggccggcacgacatcaacaaccctcggctcccaactccgcgccaccgtcgcgccagaaggccgcgaagtaacacccgaggaagcgagtcgctgggcaagcggtgtaaatgtccccgtcactatggaagtctctgccttctccggcgagggtgtagacgaagtgtttaatcgtctcgcgcggcaaatcttgacgaaaatcgagcttggagagatcgatcccgatgatccgatgagtggcatacagtatggtgatgggggtgtttggaacgccggagcatctgatggggcgagtattaagagtagccttaccgctgacgaggttggtggtgtgagaagacggaggaggggaaagagtaggacgcagaattggggcatcggcgttagggattgggaggaagtttttaccctgaatcgcggacgcggtagaggtggttgctgttag

SEQ ID NO: 1576 - protein, 324 aa, Muscodor strobelii
  misc_feature: SGI Peptide ID NO. 560131
  misc_feature (32)..(150): Pfam Id: PF08477 Pfam Desc: Miro-like protein
  misc_feature (32)..(242): Pfam Id: PF00071 Pfam Desc: Ras family
  misc_feature (1)..(324): NCBI GI: 46107850 Blast Desc: FG00808.1 [Gibberella zeae PH-1]
  misc_feature (1)..(324): NCBI GI: 256735521 Blast Desc: NECHADRAFT_75445 [Nectria haematococca mpVI 77-13-4]
  misc_feature (1)..(324): NCBI GI: 261361355 Blast Desc: GTP-binding protein ypt4 [Verticillium albo-atrum VaMs.102]
  misc_feature (1)..(324): NCBI GI: 116182674 Blast Desc: CHGG_01965 [Chaetomium globosum CBS 148.51] gi|88186262|gb|EAQ93730.1| CHGG_01965 [Chaetomium globosum CBS 148.51]
  misc_feature (19)..(324): NCBI GI: 164428667 Blast Desc: NCU00889 [Neurospora crassa OR74A] gi|157072235|gb|EAA35569.2| conserved [Neurospora crassa OR74A]
  misc_feature (1)..(324): NCBI GI: 145614050 Blast Desc: MGG_01179 [Magnaporthe grisea 70-15] gi|145021030|gb|EDK05159.1| MGG_01179 [Magnaporthe grisea 70-15]
  misc_feature (21)..(324): NCBI GI: 171694830 Blast Desc: protein product [Podospora anserina] gi|170947657|emb|CAP59819.1| protein product [Podospora anserina]
  misc_feature (1)..(324): NCBI GI: 238843623 Blast Desc: GTP-binding protein ypt4 [Microsporum canis CBS 113480]
  misc_feature (1)..(324): NCBI GI: 240281021 Blast Desc: conserved [Ajellomyces capsulatus H143]
  misc_feature (1)..(324): NCBI GI: 225562547 Blast Desc: conserved [Ajellomyces capsulatus G186AR]
MTRPRRSSAASEESTDTAGVQELGSMYDYLAKIILLGPSGTGKSCLLHRFVKSEWRVLSSQTIGVEFASKIIKVGTGARRKRIKLQLWDTAGTERFRSVSRSYYRGAAGAILVYDLTSHNSFRALQPFLNDARALASPNLTLLLAGNKLDLANDSLIDTSIPPPTPSSTTSSFPYSTSAGTTSTTLGSQLRATVAPEGREVTPEEASRWASGVNVPVTMEVSAFSGEGVDEVFNRLARQILTKIELGEIDPDDPMSGIQYGDGGVWNAGASDGASIKSSLTADEVGGVRRRRRGKSRTQNWGIGVRDWEEVFTLNRGRGRGGCC

SEQ ID NO: 1577 - DNA, 1656 bp, Muscodor strobelii
  misc_feature: SGI EST ID NO. CUFF.4273.2
  misc_feature: Variant of the nucleotide sequence at SEQ ID NO 1575
gtgctctattgctgactgataagcgcaaaggtgagactatcgcattttaggcttgatggcaccctgtatttccaaataatcgcaatcaaaccatgcccgattacgaccgcatgcgataaatttcccatgtgaccctcccgagatatcaacacacatatccataccctcccgttccgttccgttccgttgatactgcatacgactatctctatcaccgtccgagtttcgaaatcatcgttcgacccgtccttagagaagcaacaaggtcgagatgacgcgtccgcgacgctcctcggctgcgagcgaggagagcacggacacggctggtgtccaggagttggggagcatgtacgactatctggccaagatcatattgcttgggcccagtggtactggaaaatcatgtctattgcaccgcttcgtcaaaagcgaatggcgcgtcctctcctcccagaccatcggcgttgagttcgccagcaagatcataaaagttggcactggcgcacggaggaagcgcataaagctccagctctgggacacagcaggaacagaacgcttccgctccgtcagccgatcctactaccgtggcgccgcaggcgcaatcctggtctacgacctaacatcgcacaactccttccgcgccctccaaccctttctaaacgacgcacgcgccctcgcctcgccgaacttgaccctattactggcaggcaacaaactagatctcgccaacgactctttaatcgatacctccatcccacctcccacgccctcttccacaacctcttcattcccctactcaacatcggccggcacgacatcaacaaccctcggctcccaactccgcgccaccgtcgcgccagaaggccgcgaagtaacacccgaggaagcgagtcgctgggcaagcggtgtaaatgtccccgtcactatggaagtctctgccttctccggcgagggtgtagacgaagtgtttaatcgtctcgcgcggcaaatcttgacgaaaatcgagcttggagagatcgatcccgatgatccgatgagtggcatacagtatggtgatgggggtgtttggaacgccggagcatctgatggggcgagtattaagagtagccttaccgctgacgaggttggtggtgtgagaagacggaggaggggaaagagtaggacgcagaattggggcatcggcgttagggattgggaggaagtttttaccctgaatcgcggacgcggtagaggtggttgctgttaggttggatacctaacgttagagtgttgggcataatggacatgaaggatgccgttggagctcgacacatggataggagtacgagtacgatggctggatgcgacatttggcatacgatatacctccttgtttttgttttatctcctttttgcccccatatggttctccttgcaggacaggtgacgcagaagggctgatatgtttcaagtctgttcatcataagtttcggagtcaaacaagcgcactcgttaagtatggcgttgaatagaaggacggcaccatattttctacaccaatattttcacgattacatactaatgagatttcggatcggacatgagatgagaatatttttacatacatatcttacttaacttaatgatacagatctgtctagattcccggaatgggcg

SEQ ID NO: 1578 - DNA, 792 bp, Muscodor strobelii
  misc_feature: SGI cDNA ID NO. 560132
  misc_feature: Encodes the peptide sequence at SEQ ID NO 1579
atgaaaatcgaaggccggacgttcataatctcaggcggagcctcaggcctaggtcaagcagcagcagaggaaatatgtcgtgcaggcggatacgccgcgattctcgatcttaacgaggagctcggcaatgaagcagtcaaatcactgcccgcaggccagggcaaattcttcgtctgtgatgtcttagaaacagacagtattgctgctgctgtaaaagaagccggagaatggatcaaagagactggaaagccagtgggcggcgttataccagctgccggcgttgggaatccttcaacgatactagatagaaccggcgcccccttcagtctagattccttcgatttcgtggtaaacatcaacctccgaggaactgttgacctaatccgccaatgtctgcccctcctctccaccaccgagcccgtagccccagactctgagcgcggtgtaatcataatggtgtcatccgtcgctgcgttcgacgggcaaaagggccaagtagcctacgccgcctccaagggagcagtagcttctatgaccctgcccatgacgagagatttggcgcgctacgggattaggtgtaatacgattgcgccgggcattttcgaaagtagaatgacggcgatgatgccgaagaaattatttgagggtctcgcggctattgcggagttcccgaggagggcggggaaaccggccgaatttgcgctgctggttaggcagattattgagaatccgatgttaaatgggacggttattaggttggatggggggatgaggatgccttctaagatttga

SEQ ID NO: 1579 - protein, 263 aa, Muscodor strobelii
  misc_feature: SGI Peptide ID NO. 560132
  misc_feature (6)..(187): Pfam Id: PF00106 Pfam Desc: short chain dehydrogenase
  misc_feature (7)..(186): Pfam Id: PF08659 Pfam Desc: KR domain
  misc_feature (1)..(263): NCBI GI: 154320406 Blast Desc: 3-hydroxyacyl-CoA dehydrogenase [Botryotinia fuckeliana B05.10] gi|150853364|gb|EDN28556.1| 3-hydroxyacyl-CoA dehydrogenase [Botryotinia fuckeliana B05.10]
  misc_feature (1)..(263): NCBI GI: 156040645 Blast Desc: SS1G_12339 [Sclerotinia sclerotiorum 1980] gi|154696395|gb|EDN96133.1| SS1G_12339 [Sclerotinia sclerotiorum 1980]
  misc_feature (1)..(263): NCBI GI: 46107852 Blast Desc: FG00809.1 [Gibberella zeae PH-1]
  misc_feature (1)..(263): NCBI GI: 164428665 Blast Desc: NCU11196 [Neurospora crassa OR74A] gi|157072234|gb|EDO65387.1| NCU11196 [Neurospora crassa OR74A]
  misc_feature (1)..(263): NCBI GI: 145614048 Blast Desc: MGG_01180 [Magnaporthe grisea 70-15] gi|145021029|gb|EDK05158.1| MGG_01180 [Magnaporthe grisea 70-15]
  misc_feature (1)..(263): NCBI GI: 171694828 Blast Desc: protein product [Podospora anserina] gi|170947656|emb|CAP59818.1| protein product [Podospora anserina]
  misc_feature (1)..(263): NCBI GI: 261361354 Blast Desc: 3-hydroxyacyl-CoA dehydrogenase type-2 [Verticillium albo-atrum VaMs.102]
  misc_feature (1)..(263): NCBI GI: 189197389 Blast Desc: 3-hydroxyacyl-CoA dehydrogenase type-2 [Pyrenophora tritici-repentis Pt-1C-BFP] gi|187980980|gb|EDU47606.1| 3-hydroxyacyl-CoA dehydrogenase type-2 [Pyrenophora Pt-1C-BFP]
  misc_feature (1)..(263): NCBI GI: 212530838 Blast Desc: C6 transcription factor, [Penicillium marneffei ATCC 18224] gi|210074974|gb|EEA29061.1| C6 transcription factor, [Penicillium marneffei ATCC 18224]
  misc_feature (1)..(263): NCBI GI: 169622071 Blast Desc: SNOG_14250 [Phaeosphaeria nodorum SN15] gi|111057367|gb|EAT78487.1| SNOG_14250 [Phaeosphaeria nodorum SN15]
  misc_feature (23)..(259): SWISSPROT Homolog: EC 1.1.1.178 3-hydroxy-2-methylbutyryl-CoA dehydrogenase
  misc_feature (23)..(259): SWISSPROT Homolog: EC 1.1.1.35 3-hydroxyacyl-CoA dehydrogenase
MKIEGRTFIISGGASGLGQAAAEEICRAGGYAAILDLNEELGNEAVKSLPAGQGKFFVCDVLETDSIAAAVKEAGEWIKETGKPVGGVIPAAGVGNPSTILDRTGAPFSLDSFDFVVNINLRGTVDLIRQCLPLLSTTEPVAPDSERGVIIMVSSVAAFDGQKGQVAYAASKGAVASMTLPMTRDLARYGIRCNTIAPGIFESRMTAMMPKKLFEGLAAIAEFPRRAGKPAEFALLVRQIIENPMLNGTVIRLDGGMRMPSKI

SEQ ID NO: 1580 - DNA, 1079 bp, Muscodor strobelii
  misc_feature: SGI EST ID NO. CUFF.4303.0
  misc_feature: Variant of the nucleotide sequence at SEQ ID NO 1578
ctttgacagccctatcgcgcattaagctcttgggtggcctggccaatcatataccgaagagatgcttgtcgcataccttagctagcccatagtcaaccccaactcatctcacacctcagccaattcacttcggtcaacatatatgtcttcatattgactaacggaagaagcgattcaatacttttaaccgattctctcatatttctaactaattaggatgaaaatcgaaggccggacgttcataatctcaggcggagcctcaggcctaggtcaagcagcagcagaggaaatatgtcgtgcaggcggatacgccgcgattctcgatcttaacgaggagctcggcaatgaagcagtcaaatcactgcccgcaggccagggcaaattcttcgtctgtgatgtcttagaaacagacagtattgctgctgctgtaaaagaagccggagaatggatcaaagagactggaaagccagtgggcggcgttataccagctgccggcgttgggaatccttcaacgatactagatagaaccggcgcccccttcagtctagattccttcgatttcgtggtaaacatcaacctccgaggaactgttgacctaatccgccaatgtctgcccctcctctccaccaccgagcccgtagccccagactctgagcgcggtgtaatcataatggtgtcatccgtcgctgcgttcgacgggcaaaagggccaagtagcctacgccgcctccaagggagcagtagcttctatgaccctgcccatgacgagagatttggcgcgctacgggattaggtgtaatacgattgcgccgggcattttcgaaagtagaatgacggcgatgatgccgaagaaattatttgagggtctcgcggctattgcggagttcccgaggagggcggggaaaccggccgaatttgcgctgctggttaggcagattattgagaatccgatgttaaatgggacggttattaggttggatggggggatgaggatgccttctaagatttgagtgtgttgtcgtgagccaaggtgtagagtggctattagtgcatgatatatttattttataatcatcactc

SEQ ID NO: 1581 - DNA, 834 bp, Muscodor strobelii
  misc_feature: SGI cDNA ID NO. 560133
  misc_feature: Encodes the peptide sequence at SEQ ID NO 1582
atggatgacggaaactttttaattgctgacctcctactacatgcctcggatctcgatgagaagaaggacatgatcgaacaaagcgttgagcgacagtacgttgactgtcgggaagaggaacttgtccgtattcgatccattatagcactgaagccatggatatggttcgacctagacgacaccctccacgagttccgcaaagcttccgaaatcgcaactgagaagaccttacttctcatcgctaagaaattcggcgtgcctctccaggcattgaagtctacatatgcagatgtactaaggcagaacacatcccatgcctttacaaatggcaaaacgtcgcatttctatcgccaacaacggttgtccgcattactttctcgttactcccttcccatcaacgagcaattcatgaatacgctcctagagacctacgagactacgcttaacgacgcgctcgagccgaaatgcggagccttagacttattaaaacgtctcaaagcccttggaaagaaaatcgcaatcatcaccgaaggaccccaagatgcacaagagcgaacaattaataaactggaaatctccgaatgtgtggatttcctagccactactaatcacttcggcatctctaaactaaatggtctgtttcggagggtattggatcatctccagattcaggctagtgatgttgcctacgttggagacagccaaacgcgggacatggaccctgctgtggctgagggcatttactcaattcatcttgacgagagaagccgttccaatttgaaagcttctcccgcgaaaatcaatgtactgaaaaccctggaattcatattgtaa

SEQ ID NO: 1582 - protein, 277 aa, Muscodor strobelii
  misc_feature: SGI Peptide ID NO. 560133
  misc_feature (51)..(254): Pfam Id: PF00702 Pfam Desc: haloacid dehalogenase-like hydrolase
  misc_feature (51)..(234): Pfam Id: PF00702 Pfam Desc: haloacid dehalogenase-like hydrolase
  misc_feature (43)..(254): NCBI GI: 46127859 Blast Desc: FG08307.1 [Gibberella zeae PH-1]
  misc_feature (51)..(277): NCBI GI: 256733389 Blast Desc: NECHADRAFT_36336 [Nectria haematococca mpVI 77-13-4]
  misc_feature (48)..(277): NCBI GI: 169617315 Blast Desc: SNOG_11835 [Phaeosphaeria nodorum SN15] gi|111059759|gb|EAT80879.1| SNOG_11835 [Phaeosphaeria nodorum SN15]
  misc_feature (23)..(277): NCBI GI: 145236332 Blast Desc: protein product [Aspergillus niger] gi|134075266|emb|CAK44907.1| protein product [Aspergillus niger]
  misc_feature (44)..(260): NCBI GI: 255956013 Blast Desc: Pc21g17620 [Penicillium chrysogenum Wisconsin 54-1255] gi|211590470|emb|CAP96659.1| Pc21g17620 [Penicillium chrysogenum Wisconsin 54-1255]
  misc_feature (44)..(254): NCBI GI: 169769092 Blast Desc: [Aspergillus oryzae RIB40] gi|83766874|dbj|BAE57014.1| protein product [Aspergillus oryzae]
  misc_feature (44)..(254): NCBI GI: 238501522 Blast Desc: conserved [Aspergillus flavus NRRL3357] gi|220692232|gb|EED48579.1| conserved [Aspergillus flavus NRRL3357]
  misc_feature (44)..(193): NCBI GI: 115399066 Blast Desc: [Aspergillus terreus NIH2624] gi|114192005|gb|EAU33705.1| [Aspergillus terreus NIH2624]
  misc_feature (54)..(255): NCBI GI: 262037861 Blast Desc: hydrolase [Leptotrichia goodfellowii F0264] gi|261748104|gb|EEY35511.1| hydrolase [Leptotrichia goodfellowii F0264]
  misc_feature (50)..(247): NCBI GI: 281413004 Blast Desc: HAD superfamily (subfamily IA) hydrolase, TIGR02254 [Thermotoga naphthophila RKU-10] gi|281374107|gb|ADA67669.1| HAD superfamily (subfamily IA) hydrolase, TIGR02254 [Thermotoga
MDDGNFLIADLLLHASDLDEKKDMIEQSVERQYVDCREEELVRIRSIIALKPWIWFDLDDTLHEFRKASEIATEKTLLLIAKKFGVPLQALKSTYADVLRQNTSHAFTNGKTSHFYRQQRLSALLSRYSLPINEQFMNTLLETYETTLNDALEPKCGALDLLKRLKALGKKIAIITEGPQDAQERTINKLEISECVDFLATTNHFGISKLNGLFRRVLDHLQIQASDVAYVGDSQTRDMDPAVAEGIYSIHLDERSRSNLKASPAKINVLKTLEFIL

SEQ ID NO: 1583 - DNA, 1243 bp, Muscodor strobelii
  misc_feature: SGI EST ID NO. CUFF.4097.0
  misc_feature: Variant of the nucleotide sequence at SEQ ID NO 1581
cacctctcaaggcattcatctggacagaccctctcaacatcgcataatggatgacggaaactttttaattgctgacctcctactacatgcctcggatctcgatgagaagaaggacatgatcgaacaaagcgttgagcgacagtacgttgactgtcgggaagaggaacttgtccgtattcgatccattatagcactgaagccatggatatggttcgacctagacgacaccctccacgagttccgcaaagcttccgaaatcgcaactgagaagaccttacttctcatcgctaagaaattcggcgtgcctctccaggcattgaagtctacatatgcagatgtactaaggcagaacacatcccatgcctttacaaatggcaaaacgtcgcatttctatcgccaacaacggttgtccgcattactttctcgttactcccttcccatcaacgagcaattcatgaatacgctcctagagacctacgagactacgcttaacgacgcgctcgagccgaaatgcggagccttagacttattaaaacgtctcaaagcccttggaaagaaaatcgcaatcatcaccgaaggaccccaagatgcacaagagcgaacaattaataaactggaaatctccgaatgtgtggatttcctagccactactaatcacttcggcatctctaaactaaatggtctgtttcggagggtattggatcatctccagattcaggctagtgatgttgcctacgttggagacagccaaacgcgggacatggaccctgctgtggctgagggcatttactcaattcatcttgacgagagaagccgttccaatttgaaagcttctcccgcgaaaatcaatgtactgaaaaccctggaattcatattgtaatgcttgcaatatcgcgtgttcaatgcggcaaacgtggcatacacgggcatattcaacttcacatttgaacgccgcacctttgcccttatttcgacgactgggagcagagatatgtggaaatgttgttgctactttggctactatcgtatgagtcgcttgaaatgaaagtagttaattgcagaagtatacaataatactggactatgccatttacgaggagatctagcgcgacgttattatcacacaagtgtagatctccgtcgaggccgccatgacagctctgtctctacgctgtcttcaaatctaagcagaatttatacgtcaacgcgttcgaataccttcttaccgcccactcactttgca

SEQ ID NO: 1584 - DNA, 1317 bp, Muscodor strobelii
  misc_feature: SGI cDNA ID NO. 560134
  misc_feature: Encodes the peptide sequence at SEQ ID NO 1585
atgaagatgtacatgaccgtcccatttctctacgaactacatcgcatgtacggcagtaccctccagacagacagtttgaccggagctctcactatctgcaccattgccccagaaaaccttcgacatataaacactccttgcgactttggtgtttcacctatgagacttcctgcaatgagatacttctatgatcgtggctttatcaccacagatggtgacacatggaaacagtcacgcaagatgttaaaactctcgttcgaactcgataatgttgccgatattaccattctcagggaagaggtcgactcgctcttgcaaaacctgccagatgacggctcagccgttgacctgcgacctctcctatatgctactgcaagccatcacccgttcggacgcctatacaggcgaccaccaccaccacatgctactgctcgctggcgggagttcttgcattctgctcttcacttcgtattaggtatcgatccatcgcagcaactgtcgggtgcacccctaacggctgatcaatttattaccaccttccacagtgcactcgtttctagcatgtttcgtgtcatactaggtcgagctttcgatttgctgcctcaaaagaagttcatagaagtttgtacttctgcacaccaattcctagactacttcatcgacgctgcgtttacagctaaagacgacgaaagagcgaagagtctcattaaagctttgtccaccgagacggatgactcagtgttcattaggagtcaagtcattcaagtcatgatggccgctcaagataccacatccgacttattgacaaatgctctgtttctacttgcgcgacaccccgaatattggcagcagcttccattacgattgtataccattctcgctctcctcggacgcatcgctctcaacgacactcgactcccagcgggcggagggtctgatcaccagcaatctatgtttatcactgagggtagtgtggtcgtcatgtcatactacgcgttacatcgcgatcggccagtctttgggaacgaagtcgagatcttccgaccaggacgctgggatacagttaagccagagccatgggagtttcagtggtttggtggcgggaaccacgcttgtttgggtcagcagaaggctatgatcgaggcctcctatgttcttgtaagactcgctcgtggcatcaaaacgcttgagaaccgagatgatagggattgggtcagggaactgaagatgacgtgcaaaagtgcgcacgggtgcaaggttgctgtcaagctcagttccgctcgtatttcggtgttattagagcggtgtcaattataa

SEQ ID NO: 1585 - protein, 438 aa, Muscodor strobelii
  misc_feature: SGI Peptide ID NO. 560134
  misc_feature (5)..(422): Pfam Id: PF00067 Pfam Desc: Cytochrome P450
  misc_feature (287)..(389): Pfam Id: PF00067 Pfam Desc: Cytochrome P450
  misc_feature (249)..(285): Pfam Id: PF00067 Pfam Desc: Cytochrome P450
  misc_feature (7)..(421): NCBI GI: 156054506 Blast Desc: SS1G_06101 [Sclerotinia sclerotiorum 1980] gi|154703881|gb|EDO03620.1| SS1G_06101 [Sclerotinia sclerotiorum 1980]
  misc_feature (59)..(420): NCBI GI: 154321077 Blast Desc: BC1G_01413 [Botryotinia fuckeliana B05.10] gi|150851951|gb|EDN27143.1| BC1G_01413 [Botryotinia fuckeliana B05.10]
  misc_feature (14)..(422): NCBI GI: 156039263 Blast Desc: SS1G_11768 [Sclerotinia sclerotiorum 1980] gi|154697505|gb|EDN97243.1| SS1G_11768 [Sclerotinia sclerotiorum 1980]
  misc_feature (14)..(425): NCBI GI: 154309945 Blast Desc: BC1G_06893 [Botryotinia fuckeliana B05.10] gi|150851681|gb|EDN26874.1| BC1G_06893 [Botryotinia fuckeliana B05.10]
  misc_feature (11)..(425): NCBI GI: 154319876 Blast Desc: BC1G_02419 [Botryotinia fuckeliana B05.10] gi|150856077|gb|EDN31269.1| BC1G_02419 [Botryotinia fuckeliana B05.10]
  misc_feature (12)..(422): NCBI GI: 145233653 Blast Desc: An02g10700 [Aspergillus niger] gi|134057131|emb|CAK44419.1| protein product [Aspergillus niger]
  misc_feature (15)..(423): NCBI GI: 261192238 Blast Desc: cytochrome P450 alkane hydroxylase [Ajellomyces dermatitidis SLH14081] gi|239589401|gb|EEQ72044.1| cytochrome P450 alkane hydroxylase [Ajellomyces dermatitidis SLH14081] P450
  misc_feature (15)..(422): NCBI GI: 115383936 Blast Desc: ATEG_01150 [Aspergillus terreus NIH2624] gi|114196207|gb|EAU37907.1| ATEG_01150 [Aspergillus terreus NIH2624]
  misc_feature (14)..(423): NCBI GI: 225556140 Blast Desc: N-alkane-inducible cytochrome P450 [Ajellomyces capsulatus G186AR]
  misc_feature (22)..(421): NCBI GI: 212539338 Blast Desc: N-alkane-inducible cytochrome P450, [Penicillium marneffei ATCC 18224] gi|210067123|gb|EEA21215.1| N-alkane-inducible cytochrome P450, [Penicillium marneffei ATCC
  misc_feature (62)..(392): SWISSPROT Homolog: EC 1.14.14.1 Unspecific monooxygenase
MKMYMTVPFLYELHRMYGSTLQTDSLTGALTICTIAPENLRHINTPCDFGVSPMRLPAMRYFYDRGFITTDGDTWKQSRKMLKLSFELDNVADITILREEVDSLLQNLPDDGSAVDLRPLLYATASHHPFGRLYRRPPPPHATARWREFLHSALHFVLGIDPSQQLSGAPLTADQFITTFHSALVSSMFRVILGRAFDLLPQKKFIEVCTSAHQFLDYFIDAAFTAKDDERAKSLIKALSTETDDSVFIRSQVIQVMMAAQDTTSDLLTNALFLLARHPEYWQQLPLRLYTILALLGRIALNDTRLPAGGGSDHQQSMFITEGSVVVMSYYALHRDRPVFGNEVEIFRPGRWDTVKPEPWEFQWFGGGNHACLGQQKAMIEASYVLVRLARGIKTLENRDDRDWVRELKMTCKSAHGCKVAVKLSSARISVLLERCQL

SEQ ID NO: 1586 - DNA, 417 bp, Muscodor strobelii
  misc_feature: SGI cDNA ID NO. 560135
  misc_feature: Reduced expression when VOC is produced
  misc_feature: Encodes the peptide sequence at SEQ ID NO 1587
atgcagctctcaaatctcctcagcatcttcactctcgcaaccgctgcctcagcaatcacagtggcatacgacgaaggctatgaccaatccagtcgctccatgacagcagtagcctgttcagacggtgcaaacggtctaacaacgcgttttgggtggacgacacagggacaaattcccagatttccctatattggtgccgccgctagtgtggcaggctggaactcgccgaattgcggaacttgctataagttgacgtacaagagcaagagtatttatgtgctggctattgaccatgcgggtgcgggctataatattgggttgaaggctatgaatgctttgacgaataaccaggcggtggcgttaggaagaattgatgctacggctactaaggttgctgttgctaattgtggattgtag

SEQ ID NO: 1587 - protein, 138 aa, Muscodor strobelii
  misc_feature: SGI Peptide ID NO. 560135
  misc_feature (19)..(138): Pfam Id: PF07249 Pfam Desc: Cerato-platanin
  misc_feature (1)..(138): NCBI GI: 256721387 Blast Desc: NECHADRAFT_123372 [Nectria haematococca mpVI 77-13-4]
  misc_feature (1)..(138): NCBI GI: 46139381 Blast Desc: FG11205.1 [Gibberella zeae PH-1]
  misc_feature (1)..(138): NCBI GI: 118402806 Blast Desc: Epl1 protein [Trichoderma asperellum]
  misc_feature (1)..(138): NCBI GI: 118402804 Blast Desc: Epl1 protein [Trichoderma atroviride]
  misc_feature (1)..(138): NCBI GI: 92112038 Blast Desc: eliciting plant response-like protein [Hypocrea atroviridis]
  misc_feature (1)..(138): NCBI GI: 93009002 Blast Desc: snodprot1 [Hypocrea virens]
  misc_feature (1)..(138): NCBI GI: 73672053 Blast Desc: extracellular small protein 1 [Hypocrea virens] gi|118402808|emb|CAL80759.1| Epl1 protein [Trichoderma longibrachiatum] gi|118402810|emb|CAL80760.1| Epl1 protein Epl1
  misc_feature (1)..(138): NCBI GI: 118402816 Blast Desc: Epl1 protein [Trichoderma viride]
  misc_feature (1)..(138): NCBI GI: 284808701 Blast Desc: small protein 1 [Hypocrea lixii]
  misc_feature (1)..(138): NCBI GI: 39940864 Blast Desc: MGG_05344 [Magnaporthe grisea 70-15] gi|145021972|gb|EDK05992.1| MGG_05344 [Magnaporthe grisea 70-15]
  misc_feature: Useful for introducing or modulating the production of volatile compounds
MQLSNLLSIFTLATAASAITVAYDEGYDQSSRSMTAVACSDGANGLTTRFGWTTQGQIPRFPYIGAAASVAGWNSPNCGTCYKLTYKSKSIYVLAIDHAGAGYNIGLKAMNALTNNQAVALGRIDATATKVAVANCGL

SEQ ID NO: 1588 - DNA, 837 bp, Muscodor strobelii
  misc_feature: SGI EST ID NO. CUFF.4312.0
  misc_feature: Variant of the nucleotide sequence at SEQ ID NO 1586
gttttttggagagagagaattgtatcatctcataatacttagaaacaacgcctatagacctcatctcttacctaccacaacctcacatacaaaaacgcaaatctcacacctcacatttcgcaccagcttttaaatacaaaaagagacaaaatgcagctctcaaatctcctcagcatcttcactctcgcaaccgctgcctcagcaatcacagtggcatacgacgaaggctatgaccaatccagtcgctccatgacagcagtagcctgttcagacggtgcaaacggtctaacaacgcgttttgggtggacgacacagggacaaattcccagatttccctatattggtgccgccgctagtgtggcaggctggaactcgccgaattgcggaacttgctataagttgacgtacaagagcaagagtatttatgtgctggctattgaccatgcgggtgcgggctataatattgggttgaaggctatgaatgctttgacgaataaccaggcggtggcgttaggaagaattgatgctacggctactaaggttgctgttgctaattgtggattgtaggtattttgttgccagagagggacggggttggggagtgggagagacatgtgtgaagagagggaggaggatgtattgaatataatgatgagctatgaatggaattgattagattggtatactgcgggtgtcagttgtgatacgatatttggagtttgatctgtcgagtctggaactttagacaagactgtgtgacactattttctattttctcaaatcctttttttttgcctctcgaatttgccaataagtctctttgagcgttagtcggat

SEQ ID NO: 1589 - DNA, 210 bp, Muscodor strobelii
  misc_feature: SGI cDNA ID NO. 560136
  misc_feature: Encodes the peptide sequence at SEQ ID NO 1590
atgcagttctccgctgtcctcgtctccgtcgtggccatgttcttcgctggtcaagccatggccgtcgctgcggatccgatcgcggcgtgcaactgccccaacaactgcggctacaccgtaggccattcctgcgcctttatcggcggcgaccagaatgtctacacgggctcttgcaaggacgcctttggtcagcttttctgctctgcttag

SEQ ID NO: 1590 - protein, 69 aa, Muscodor strobelii
  misc_feature: SGI Peptide ID NO. 560136
  misc_feature (7)..(67): NCBI GI: 238581178 Blast Desc: MPER_11337 [Moniliophthora perniciosa FA553] gi|215451887|gb|EEB90454.1| MPER_11337 [Moniliophthora perniciosa FA553]
  misc_feature (1)..(69): NCBI GI: 119485016 Blast Desc: NFIA_098870 [Neosartorya fischeri NRRL 181] gi|119410306|gb|EAW20253.1| NFIA_098870 [Neosartorya fischeri NRRL 181]
MQFSAVLVSVVAMFFAGQAMAVAADPIAACNCPNNCGYTVGHSCAFIGGDQNVYTGSCKDAFGQLFCSA

SEQ ID NO: 1591 - DNA, 1470 bp, Muscodor strobelii
  misc_feature: SGI cDNA ID NO. 560137
  misc_feature: Encodes the peptide sequence at SEQ ID NO 1592
atggcgtcgcacaaagcgcacggcgcggccaccgagcatcctccgccttcggagtcgacaccgctgctagccgactcatcatcgcaggcagctcttacagtcactcctccaaaggaggattggtggacggagttatggttattattgagatactcaataccactgatagccacatacttattacaatactcatggtgtgttattgtgactttcattgctggtcacttgagtgccgatgacctcgccgcggcgagcattgggatgaccacaatgaatattgtcgggttcgccgtcttcgagggtatggccaccgctcttgataccctctgttctcaagcatacggctctgggaattttacgggcgtcggcttgcatgttcagcgatcactgattttcatggctttcgcggccattccgatcgcagcgatctgggccgcttcgccatacatcctggcgctcttcgtgaagcagcatcatctcgcagtaatggctggcacatttctgcgtgtgagcattattggaatgccaggatatgcatcattcgaagctggaaagcggtttttgcaggctcaggggaactttaaggccgctatggtgatactcttgatttgcatgccgactaatgctttgctgagctggctattcgctttcaaatttgagatgggacttgctggcgctgcgcttggggctgctcttactaataatctccgtccgacgcttttgttgctttatattgtcagccctctaggaaaatggtctcatcagtgttggggtggcctttcgcgctctgcgttggctgttagaaaatggggtcccatggcgaagctttcattcgctgggtcggctgtcaatctcgctgaatgggctgcgtttgagatcgttgctttcagcacttcatatctcagcacgaatcacctcgcagctcaaactgttttgactactatctctgtggtgtcatggcacatcccattttccgtcagtgtcgggataagtacgcgtattggtcacctcatcggtgctggaatgcttccgaccgctcgtcgagccgcgattctatatggctgcgtttttctgttcatcggctgctttgatggactagtcattttccttcttagatatcctctatcccatttcttctccgaagacccgacagttgccaacttggctatcaagaccatgctcgcactttgtgttttccaggtcatagattctctcatctgctataccaatggaatgcttcgcggcctcgggcggcagtctgttgctgcttgggtcatgacagttatcaattactgcggagccgtgccacttgcgatctggctagagcttggaccttctggtctgaagctcaatggagtttggattggtatcggaagtggtatgcttttaatcttcacgatcgagagtctttacataaaattcttaaggtggcaagattgtgtcgatggcgttaaagaacgggaaggttga

SEQ ID NO: 1592 - protein, 489 aa, Muscodor strobelii
  misc_feature: SGI Peptide ID NO. 560137
  misc_feature (54)..(214): Pfam Id: PF01554 Pfam Desc: MatE
  misc_feature (279)..(440): Pfam Id: PF01554 Pfam Desc: MatE
  misc_feature (17)..(488): NCBI GI: 46130666 Blast Desc: FG08937.1 [Gibberella zeae PH-1]
  misc_feature (17)..(488): NCBI GI: 226508862 Blast Desc: LOC100274589 [Zea mays] gi|194708706|gb|ACF88437.1| [Zea mays]
  misc_feature (18)..(488): NCBI GI: 256723652 Blast Desc: NECHADRAFT_97317 [Nectria haematococca mpVI 77-13-4]
  misc_feature (11)..(488): NCBI GI: 46114496 Blast Desc: FG03090.1 [Gibberella zeae PH-1]
  misc_feature (9)..(488): NCBI GI: 261356059 Blast Desc: conserved [Verticillium albo-atrum VaMs.102]
  misc_feature (44)..(488): NCBI GI: 169598906 Blast Desc: SNOG_02262 [Phaeosphaeria nodorum SN15] gi|111069354|gb|EAT90474.1| SNOG_02262 [Phaeosphaeria nodorum SN15]
  misc_feature (44)..(488): NCBI GI: 189208754 Blast Desc: conserved [Pyrenophora tritici-repentis Pt-1C-BFP] gi|187976803|gb|EDU43429.1| conserved [Pyrenophora tritici-repentis Pt-1C-BFP]
  misc_feature (13)..(488): NCBI GI: 242803564 Blast Desc: MATE efflux family protein subfamily, [Talaromyces stipitatus ATCC 10500] gi|218717545|gb|EED16966.1| MATE efflux family protein subfamily, [Talaromyces stipitatus ATCC 10500]
  misc_feature (17)..(488): NCBI GI: 261193369 Blast Desc: MATE efflux family protein subfamily [Ajellomyces dermatitidis SLH14081] gi|239588695|gb|EEQ71338.1| MATE efflux family protein subfamily [Ajellomyces dermatitidis SLH14081]
  misc_feature (17)..(488): NCBI GI: 239613983 Blast Desc: MATE efflux family protein subfamily [Ajellomyces dermatitidis ER-3]
MASHKAHGAATEHPPPSESTPLLADSSSQAALTVTPPKEDWWTELWLLLRYSIPLIATYLLQYSWCVIVTFIAGHLSADDLAAASIGMTTMNIVGFAVFEGMATALDTLCSQAYGSGNFTGVGLHVQRSLIFMAFAAIPIAAIWAASPYILALFVKQHHLAVMAGTFLRVSIIGMPGYASFEAGKRFLQAQGNFKAAMVILLICMPTNALLSWLFAFKFEMGLAGAALGAALTNNLRPTLLLLYIVSPLGKWSHQCWGGLSRSALAVRKWGPMAKLSFAGSAVNLAEWAAFEIVAFSTSYLSTNHLAAQTVLTTISVVSWHIPFSVSVGISTRIGHLIGAGMLPTARRAAILYGCVFLFIGCFDGLVIFLLRYPLSHFFSEDPTVANLAIKTMLALCVFQVIDSLICYTNGMLRGLGRQSVAAWVMTVINYCGAVPLAIWLELGPSGLKLNGVWIGIGSGMLLIFTIESLYIKFLRWQDCVDGVKEREG

SEQ ID NO: 1593 - DNA, 3574 bp, Muscodor strobelii
  misc_feature: SGI EST ID NO. CUFF.4285.0
  misc_feature: Variant of the nucleotide sequence at SEQ ID NO 1591
cggcaatctggatccataagttgagggaccggacccctgaactttcaatctttagcgggacagcctattaaatttattttgatatctttctttccgactgataaaaaagtctctaaggttctctgactttggagggcagcccgcctcatcctcaagtctttttcgaccttgcaaccttccagacttagaggctcatagacttaaggtttcggtcatattatcgatcaatggcgtcgcacaaagcgcacggcgcggccaccgagcatcctccgccttcggagtcgacaccgctgctagccgactcatcatcgcaggcagctcttacagtcactcctccaaaggaggattggtggacggagttatggttattattgagatactcaataccactgatagccacatacttattacaatactcatggtgtgttattgtgactttcattgctggtcacttgagtgccgatgacctcgccgcggcgagcattgggatgaccacaatgaatattgtcgggttcgccgtcttcgagggtatggccaccgctcttgataccctctgttctcaagcatacggctctgggaattttacgggcgtcggcttgcatgttcagcgatcactgattttcatggctttcgcggccattccgatcgcagcgatctgggccgcttcgccatacatcctggcgctcttcgtgaagcagcatcatctcgcagtaatggctggcacatttctgcgtgtgagcattattggaatgccaggatatgcatcattcgaagctggaaagcggtttttgcaggctcaggggaactttaaggccgctatggtgatactcttgatttgcatgccgactaatgctttgctgagctggctattcgctttcaaatttgagatgggacttgctggcgctgcgcttggggctgctcttactaataatctccgtccgacgcttttgttgctttatattgtcagccctctaggaaaatggtctcatcagtgttggggtggcctttcgcgctctgcgttggctgttagaaaatggggtcccatggcgaagctttcattcgctgggtcggctgtcaatctcgctgaatgggctgcgtttgagatcgttgctttcagcacttcatatctcagcacgaatcacctcgcagctcaaactgttttgactactatctctgtggtgtcatggcacatcccattttccgtcagtgtcgggataagtacgcgtattggtcacctcatcggtgctggaatgcttccgaccgctcgtcgagccgcgattctatatggctgcgtttttctgttcatcggctgctttgatggactagtcattttccttcttagatatcctctatcccatttcttctccgaagacccgacagttgccaacttggctatcaagaccatgctcgcactttgtgttttccaggtcatagattctctcatctgctataccaatggaatgcttcgcggcctcgggcggcagtctgttgctgcttgggtcatgacagttatcaattactgcggagccgtgccacttgcgatctggctagagcttggaccttctggtctgaagctcaatggagtttggattggtatcggaagtggtatgcttttaatcttcacgatcgagagtctttacataaaattcttaaggtggcaagattgtgtcgatggcgttaaagaacgggaaggttgataaacagattgaaacagcgagcaaaaatgattaataaagggttgggttaatttcgcatggaggtagtggtctgcatcttaattttcgcggtttcggtagagtagacttggcaatgaaaggttgacgacaggcgaaagtctatcaaacacttcacgttggttcattggcatgagtacgagtgctatgccatacgaattgtcgtacaacaatccagttccgacgcgcagcctgtcgtacccagcacaaacttgggaggcaaacgcggcgacgttttcgtcgattccggcgcatcgcattctcgatatgtgccacgttcctgtctcgtctgctacaagtcacatccctcctcaaagccacattcctgttgagatgcttatctgtaacaagcttccatttttcgacggtgcatatgagtagttcatggtctttgcatggcgagccaggcgaaatgtaagaaatattctcaagcaactagaccttgcgtagtctagaggaatccgagccaagagaaatcgagacctccagctgaaaaccgtgatcgcttcagcgccaagattctaaggcagattttgttagtatgcacctcagctgcccccgcctaggactcttttaagcactgttgatagcatcaaacatcctaattgagcgaagccaagtgaggtctccaatctgcgctgggtacgtgataattatatgagcagccatttcttcaagtttgttaacgattatctcaagtgcagcactttgacaattggtttgccggtcatcagctcaacacttacttggtattccaagcgcaggggaacgcacaatcaggcccaacgtcattccagcgcaatgcgacctcttcttctaatcgcggcgcgcgtcgcaaaatcatcaacaaagtcgcatgggcaccatcatcaccacagcagcggaggaagctccagtagcaacaatgactacgatgacgatggcggcgaggatgacggccttccttggtgggtttatctcatcattgcatatgtagttctcgagctgctcttgttcgccggatcattgatatactatcttcgccgagaaggaaaacgcaaggatagaggcgaaactttccggaccggccacgccttctggaaggccttctgtgtggcttcgggtctctggctaccaatcttgataatgaagaagtatcgctcgaggaagacaggcagtggcgctgcagcgacctatgcgaaagtggaagaaggacaatcccacgagcctctcgcggaaccagcgccgtcggcccatgacgtcgactattacggtctcacagaccataattctgcctacgcaccgtacggcgaaccggcgacagataataagtacgagccaatgggctacaaccgcgacggtctatcaacaccgcaccagccacctcctcggagctcaagtcctgcacccccgtacgccggggaaaaggctggttatgcatagactgttctggggacgttttcgatcgttatactagtccgagagacagcctaacataattgacaatcgattacgctgcatgaaattggtagagcctggcgttggcggagtttcgggttgtcatcaagcctgcggcttggagaattggggatatgagtgagcattttcaggcagattgaagtttagaaagatactcaggaagatacattgtctttcgtcttagatcggtcttctactaggattggggtcagattgatagctgtaatttcatcgctaatgagtaatctcgctcgtaacggttttgcgaatgtgcggaaataaggtcggggccgagacgggggaggactgcatcatctaactggacagagcggctttaacacccaagtcttccgcccgtagcattcattgcaaatggcagtcta

SEQ ID NO: 1594 - DNA, 1200 bp, Muscodor strobelii
  misc_feature: SGI cDNA ID NO. 560138
  misc_feature: Encodes the peptide sequence at SEQ ID NO 1595
atgaatattgtcgggttcgccgtcttcgagggtatggccaccgctcttgataccctctgttctcaagcatacggctctgggaattttacgggcgtcggcttgcatgttcagcgatcactgattttcatggctttcgcggccattccgatcgcagcgatctgggccgcttcgccatacatcctggcgctcttcgtgaagcagcatcatctcgcagtaatggctggcacatttctgcgtgtgagcattattggaatgccaggatatgcatcattcgaagctggaaagcggtttttgcaggctcaggggaactttaaggccgctatggtgatactcttgatttgcatgccgactaatgctttgctgagctggctattcgctttcaaatttgagatgggacttgctggcgctgcgcttggggctgctcttactaataatctccgtccgacgcttttgttgctttatattgtcagccctctaggaaaatggtctcatcagtgttggggtggcctttcgcgctctgcgttggctgttagaaaatggggtcccatggcgaagctttcattcgctgggtcggctgtcaatctcgctgaatgggctgcgtttgagatcgttgctttcagcacttcatatctcagcacgaatcacctcgcagctcaaactgttttgactactatctctgtggtgtcatggcacatcccattttccgtcagtgtcgggataagtacgcgtattggtcacctcatcggtgctggaatgcttccgaccgctcgtcgagccgcgattctatatggctgcgtttttctgttcatcggctgctttgatggactagtcattttccttcttagatatcctctatcccatttcttctccgaagacccgacagttgccaacttggctatcaagaccatgctcgcactttgtgttttccaggtcatagattctctcatctgctataccaatggaatgcttcgcggcctcgggcggcagtctgttgctgcttgggtcatgacagttatcaattactgcggagccgtgccacttgcgatctggctagagcttggaccttctggtctgaagctcaatggagtttggattggtatcggaagtggtatgcttttaatcttcacgatcgagagtctttacataaaattcttaaggtggcaagattgtgtcgatggcgttaaagaacgggaaggttga

SEQ ID NO: 1595 - protein, 399 aa, Muscodor strobelii
  misc_feature: SGI Peptide ID NO. 560138
  misc_feature (189)..(350): Pfam Id: PF01554 Pfam Desc: MatE
  misc_feature (1)..(124): Pfam Id: PF01554 Pfam Desc: MatE
  misc_feature (6)..(124): Pfam Id: PF01554 Pfam Desc: MatE
  misc_feature (1)..(398): NCBI GI: 46130666 Blast Desc: FG08937.1 [Gibberella zeae PH-1]
  misc_feature (1)..(398): NCBI GI: 256723652 Blast Desc: NECHADRAFT_97317 [Nectria haematococca mpVI 77-13-4]
  misc_feature (1)..(398): NCBI GI: 226508862 Blast Desc: LOC100274589 [Zea mays] gi|194708706|gb|ACF88437.1| [Zea mays]
  misc_feature (1)..(398): NCBI GI: 261356059 Blast Desc: conserved [Verticillium albo-atrum VaMs.102]
  misc_feature (1)..(398): NCBI GI: 46114496 Blast Desc: FG03090.1 [Gibberella zeae PH-1]
  misc_feature (2)..(398): NCBI GI: 169598906 Blast Desc: SNOG_02262 [Phaeosphaeria nodorum SN15] gi|111069354|gb|EAT90474.1| SNOG_02262 [Phaeosphaeria nodorum SN15]
  misc_feature (2)..(398): NCBI GI: 189208754 Blast Desc: conserved [Pyrenophora tritici-repentis Pt-1C-BFP] gi|187976803|gb|EDU43429.1| conserved [Pyrenophora tritici-repentis Pt-1C-BFP]
  misc_feature (2)..(398): NCBI GI: 261193369 Blast Desc: MATE efflux family protein subfamily [Ajellomyces dermatitidis SLH14081] gi|239588695|gb|EEQ71338.1| MATE efflux family protein subfamily [Ajellomyces dermatitidis SLH14081]
  misc_feature (2)..(398): NCBI GI: 239613983 Blast Desc: MATE efflux family protein subfamily [Ajellomyces dermatitidis ER-3]
  misc_feature (2)..(398): NCBI GI: 225558595 Blast Desc: multidrug and toxin extrusion protein [Ajellomyces capsulatus G186AR]
MNIVGFAVFEGMATALDTLCSQAYGSGNFTGVGLHVQRSLIFMAFAAIPIAAIWAASPYILALFVKQHHLAVMAGTFLRVSIIGMPGYASFEAGKRFLQAQGNFKAAMVILLICMPTNALLSWLFAFKFEMGLAGAALGAALTNNLRPTLLLLYIVSPLGKWSHQCWGGLSRSALAVRKWGPMAKLSFAGSAVNLAEWAAFEIVAFSTSYLSTNHLAAQTVLTTISVVSWHIPFSVSVGISTRIGHLIGAGMLPTARRAAILYGCVFLFIGCFDGLVIFLLRYPLSHFFSEDPTVANLAIKTMLALCVFQVIDSLICYTNGMLRGLGRQSVAAWVMTVINYCGAVPLAIWLELGPSGLKLNGVWIGIGSGMLLIFTIESLYIKFLRWQDCVDGVKEREG

SEQ ID NO: 1596 - DNA, 3574 bp, Muscodor strobelii; identical to SEQ ID NO: 1593
  misc_feature: SGI EST ID NO. CUFF.4285.0
  misc_feature: Variant of the nucleotide sequence at SEQ ID NO 1594

SEQ ID NO: 1597 - DNA, 621 bp, Muscodor strobelii
  misc_feature: SGI cDNA ID NO. 560139
  misc_feature: Elevated expression when VOC is produced
  misc_feature: Encodes the peptide sequence at SEQ ID NO 1598
atgcgacctcttcttctaatcgcggcgcgcgtcgcaaaatcatcaacaaagtcgcatgggcaccatcatcaccacagcagcggaggaagctccagtagcaacaatgactacgatgacgatggcggcgaggatgacggccttccttggtgggtttatctcatcattgcatatgtagttctcgagctgctcttgttcgccggatcattgatatactatcttcgccgagaaggaaaacgcaaggatagaggcgaaactttccggaccggccacgccttctggaaggccttctgtgtggcttcgggtctctggctaccaatcttgataatgaagaagtatcgctcgaggaagacaggcagtggcgctgcagcgacctatgcgaaagtggaagaaggacaatcccacgagcctctcgcggaaccagcgccgtcggcccatgacgtcgactattacggtctcacagaccataattctgcctacgcaccgtacggcgaaccggcgacagataataagtacgagccaatgggctacaaccgcgacggtctatcaacaccgcaccagccacctcctcggagctcaagtcctgcacccccgtacgccggggaaaaggctggttatgcatag

SEQ ID NO: 1598 - protein, 206 aa, Muscodor strobelii
  misc_feature: SGI Peptide ID NO. 560139
  misc_feature: Useful for introducing or modulating the production of volatile compounds
MRPLLLIAARVAKSSTKSHGHHHHHSSGGSSSSNNDYDDDGGEDDGLPWWVYLIIAYVVLELLLFAGSLIYYLRREGKRKDRGETFRTGHAFWKAFCVASGLWLPILIMKKYRSRKTGSGAAATYAKVEEGQSHEPLAEPAPSAHDVDYYGLTDHNSAYAPYGEPATDNKYEPMGYNRDGLSTPHQPPPRSSSPAPPYAGEKAGYA

SEQ ID NO: 1599 - DNA, 3574 bp, Muscodor strobelii; identical to SEQ ID NO: 1593
  misc_feature: SGI EST ID NO. CUFF.4285.0
  misc_feature: Variant of the nucleotide sequence at SEQ ID NO 1597

SEQ ID NO: 1600 - DNA, 819 bp, Muscodor strobelii
  misc_feature: SGI cDNA ID NO. 560140
  misc_feature: Encodes the peptide sequence at SEQ ID NO 1601
atgtactcaaactaccagtcgcaacctccagggccaccccaacagtactttcaaccaaactatggcgcctctatgacaccatacccgccgccgcagcctatggcaccaccaccgccatatcacggttatagcaattacgggcccgggtcctctatgccaccccaagccccgccacagacgatgggaggactagtccttcaattctacaaagaaggaaaacatcagcaagtcgtgaagacagccgatcggcccgacgcgctcgtcgtcttgtcccttccatgggatgataattatggattcaccgaagggagctctaacctgacagccaacagaggctttgcgacgggagagcaaatagccgacgcgaaattccattctatgacaacaagcaaggtggacatgtcgatctgggggcggcatgtgcgctggaaaaaagaatacgactcgttcacggggctgggacacctgacgtggcaggtaaacaaggggcagggcctcatgctcgagatggacggacgcctgttggcgaggtattccattaataagaaggcgaagagcggaggaaagggtggttccgggtctaagacgcttgacaaactgttgtatgggagctcatgttcatcggcggagacgaacaatggcggcatccaggaaccagttgctagtctagagctcttcgctcacggcttgagtcgggaacagcttgaggaaatcgtcattgctagtgccgttgagtgggagagagcgaagaaggcgaaggagacttctgaaggcgtggaggcagcgtttgagatcgctagtgctcttgggggtgcatga

SEQ ID NO: 1601 - protein, 272 aa, Muscodor strobelii
  misc_feature: SGI Peptide ID NO. 560140
MYSNYQSQPPGPPQQYFQPNYGASMTPYPPPQPMAPPPPYHGYSNYGPGSSMPPQAPPQTMGGLVLQFYKEGKHQQVVKTADRPDALVVLSLPWDDNYGFTEGSSNLTANRGFATGEQIADAKFHSMTTSKVDMSIWGRHVRWKKEYDSFTGLGHLTWQVNKGQGLMLEMDGRLLARYSINKKAKSGGKGGSGSKTLDKLLYGSSCSSAETNNGGIQEPVASLELFAHGLSREQLEEIVIASAVEWERAKKAKETSEGVEAAFEIASALGGA

SEQ ID NO: 1602 - DNA, 1299 bp, Muscodor strobelii
  misc_feature: SGI EST ID NO. CUFF.4151.0
  misc_feature: Variant of the nucleotide sequence at SEQ ID NO 1600
atgctaccaggctcgccaggtcagcctccaactgaagcccacgcgctatttgacgcctctgacgcgtgaaactccttacgctatcataggatggcaatctctagattgcatttgctcaacaggtaccttgggtgcatacgcgccgatccaggggctatacggcgtattgctattcacctaatcggtcggaacaatggccaagattctagttccgagttctgaggatgacacacagcctcgacagtggttaatgaaaagcattgattgttaagcacgctgaatataaagtatctccaatgaagccaaatcgaagaccaaaagtctagtatccctccgtgcaaacaaacctataagacgaaacttatatcacaactagattcgcaggacctatttcgcgaagagaacacaaatgtactcaaactaccagtcgcaacctccagggccaccccaacagtactttcaaccaaactatggcgcctctatgacaccatacccgccgccgcagcctatggcaccaccaccgccatatcacggttatagcaattacgggcccgggtcctctatgccaccccaagccccgccacagacgatgggaggactagtccttcaattctacaaagaaggaaaacatcagcaagtcgtgaagacagccgatcggcccgacgcgctcgtcgtcttgtcccttccatgggatgataattatggattcaccgaagggagctctaacctgacagccaacagaggctttgcgacgggagagcaaatagccgacgcgaaattccattctatgacaacaagcaaggtggacatgtcgatctgggggcggcatgtgcgctggaaaaaagaatacgactcgttcacggggctgggacacctgacgtggcaggtaaacaaggggcagggcctcatgctcgagatggacggacgcctgttggcgaggtattccattaataagaaggcgaagagcggaggaaagggtggttccgggtctaagacgcttgacaaactgttgtatgggagctcatgttcatcggcggagacgaacaatggcggcatccaggaaccagttgctagtctagagctcttcgctcacggcttgagtcgggaacagcttgaggaaatcgtcattgctagtgccgttgagtgggagagagcgaagaaggcgaaggagacttctgaaggcgtggaggcagcgtttgagatcgctagtgctcttgggggtgcatgagccaaactccaatttctcttcgtgctattgacgtcttatataaacagcgcatcgttctgaaaacattcgcc

SEQ ID NO: 1603 - DNA, 1113 bp, Muscodor strobelii
  misc_feature: SGI cDNA ID NO. 560141
  misc_feature: Encodes the peptide sequence at SEQ ID NO 1604
atggccaatattccctctcactatcgcgctctggtgcttgatcgagttggcgatgacctacgcgttgagcaacgtgcaatgccacaagttgactccggtagtgttctcgttcgaattttggagtcctcagtactctcctatcaaagtgagatctacaacggcaaacgtcactatccattcattacccctattgttggaggctgtagtgctgtgggacgcgttgcggccaccggaaatgactctacgatcatcagcccagggcagctgatatgggttgactctgttgttcgcgggcgagatgatcctagcgcaagatatctttggggtattcatgaaggctcaagccccggaagcaagaagctgcacaaggatgtctggcatgacggcacttttgcagagtttgccaaagtacccctcgagaattgtatccccttgaacgagaatcgtctctgtagagagcttggatactcgccgcgagagctgatctacctatcccatttatttgtgccatttggtgggttcaggacaatcgatctcaagccaggtgagactgtcgtcgtcttcccggccactggtggctttggaggtgctggtgtccatgtcgctgcagctatgggggccaaagtcatcgctatgggtcgcaatgaaggcgaacttgctagacttaagacattcgtcacgaaaggcattccttgggccaatgtggagactgtcaagatcactggcaacaaagaagcggacactgcgactcttcaggctttcggcaccatcgatgctgtactcgatctttcgcctcccgctgcgtcacggtcgactcatatactgagcgccgttgcctcgcttcgacgcggtggaaggatcagcctgatgggtttcatagaccagaacatcatcgactggaactttctctccaacgatctacaagtcaaaggcaaattcatgtacgagagagaggacttgatactatttgtcaagatgctggaagcgggactcttttcgaagggcacagaccttgtggaaaccaagtccttccctctcgaagcttggaaggaggcattcgacatggcagagacatattatggtgttggaagaattgtgacgctgacaccgtaa

SEQ ID NO: 1604 - protein, 370 aa, Muscodor strobelii
  misc_feature: SGI Peptide ID NO. 560141
  misc_feature (32)..(145): Pfam Id: PF08240 Pfam Desc: Alcohol dehydrogenase GroES-like domain
  misc_feature (181)..(329): Pfam Id: PF00107 Pfam Desc: Zinc-binding dehydrogenase
  misc_feature (181)..(225): Pfam Id: PF00107 Pfam Desc: Zinc-binding dehydrogenase
  misc_feature (3)..(370): NCBI GI: 242823919 Blast Desc: quinone oxidoreductase, [Talaromyces stipitatus ATCC 10500] gi|218713077|gb|EED12502.1| quinone oxidoreductase, [Talaromyces stipitatus ATCC 10500]
  misc_feature (3)..(370): NCBI GI: 145615352 Blast Desc: MGG_05519 [Magnaporthe grisea 70-15] gi|145022190|gb|EDK06210.1| MGG_05519 [Magnaporthe grisea 70-15]
  misc_feature (4)..(370): NCBI GI: 212544364 Blast Desc: alcohol dehydrogenase, [Penicillium marneffei ATCC 18224] gi|210065305|gb|EEA19399.1| alcohol dehydrogenase, [Penicillium marneffei ATCC 18224]
  misc_feature (3)..(368): NCBI GI: 256726237 Blast Desc: NECHADRAFT_81942 [Nectria haematococca mpVI 77-13-4]
  misc_feature (4)..(370): NCBI GI: 156061299 Blast Desc: SS1G_02792 [Sclerotinia sclerotiorum 1980] gi|154700196|gb|EDN99934.1| SS1G_02792 [Sclerotinia sclerotiorum 1980]
  misc_feature (4)..(353): NCBI GI: 154319662 Blast Desc: BC1G_02312 [Botryotinia fuckeliana B05.10] gi|150855970|gb|EDN31162.1| BC1G_02312 [Botryotinia fuckeliana B05.10]
  misc_feature (1)..(370): NCBI GI: 281211102 Blast Desc: isopropanol dehydrogenase [Polysphondylium pallidum PN500]
  misc_feature (4)..(335): NCBI GI: 39960341 Blast Desc: MGG_09359 [Magnaporthe grisea 70-15] gi|145014309|gb|EDJ98877.1| MGG_09359 [Magnaporthe grisea 70-15]
  misc_feature (4)..(370): NCBI GI: 256728770 Blast Desc: NECHADRAFT_86057 [Nectria haematococca mpVI 77-13-4]
  misc_feature (21)..(369): NCBI GI: 255946325 Blast Desc: Pc20g14540 [Penicillium chrysogenum Wisconsin 54-1255] gi|211588665|emb|CAP86783.1| Pc20g14540 [Penicillium chrysogenum Wisconsin 54-1255]
MANIPSHYRALVLDRVGDDLRVEQRAMPQVDSGSVLVRILESSVLSYQSEIYNGKRHYPFITPIVGGCSAVGRVAATGNDSTIISPGQLIWVDSVVRGRDDPSARYLWGIHEGSSPGSKKLHKDVWHDGTFAEFAKVPLENCIPLNENRLCRELGYSPRELIYLSHLFVPFGGFRTIDLKPGETVVVFPATGGFGGAGVHVAAAMGAKVIAMGRNEGELARLKTFVTKGIPWANVETVKITGNKEADTATLQAFGTIDAVLDLSPPAASRSTHILSAVASLRRGGRISLMGFIDQNIIDWNFLSNDLQVKGKFMYEREDLILFVKMLEAGLFSKGTDLVETKSFPLEAWKEAFDMAETYYGVGRIVTLTP

SEQ ID NO: 1605 - DNA, 1427 bp, Muscodor strobelii
  misc_feature: SGI EST ID NO. CUFF.4154.0
  misc_feature: Variant of the nucleotide sequence at SEQ ID NO 1603
ttggtgggttcaggacaatcgatctcaagccaggtgagactgtcgtcgtcttcccggccactggtggctttggaggtgctggtgtccatgtcgctgcagctatgggggccaaagtcatcgctatgggtcgcaatgaaggcgaacttgctagacttaagacattcgtcacgaaaggcattccttgggccaatgtggagactgtcaagatcactggcaacaaagaagcggacactgcgactcttcaggctttcggcaccatcgatgctgtactcgatctttcgcctcccgctgcgtcacggtcgactcatatactgagcgccgttgcctcgcttcgacgcggtggaaggatcagcctgatgggtttcatagaccagaacatcatcgactggaactttctctccaacgatctacaagtcaaaggcaaattcatgtacgagagagaggacttgatactatttgtcaagatgctggaagcgggactcttttcgaagggcacagaccttgtggaaaccaagtccttccctctcgaagcttggaaggaggcattcgacatggcagagacatattatggtgttggaagaattgtgacgctgacaccgtaaattcaaacatgcaacctgaaacttgagaggtcatataaggcttaagtgttgggtgatagcgaatatgtctgagacggtacatcgggctacgatggaaacgaaatgagcagtgcctgaataaccatgaagggattttcgggtctttgagacgcgctaaaaatcatagctttttaagcttgctgaacttgccgtctaccctctatcctctttcctactgcgaagactacttctctaagcactcgagcccctagcgcagacaatacagagaaaagagatactaaaatcaaaaggaacgtgaagataacaaacccctttgcaactgatgtgatcaacgccgtgggaaatagaccgtctacctgtaatgctacctgtagtgcacccaatatgacactgaaaacaccaaaaatgaagagcagaggtgcataaaacttggctaaataggagctgtactgactcgtgaccttggcatactctatatcacgtagaaagaccttcgcccagaaattcagcctgctaaggcgcagctcgccgaacttccacctcggggatacgtgaacgtcttcgatacgctcttctacagttatcaggagctcagccaattcccggaatcgtaactgacgaggcaggagtggcggattgtacgactgggctaattgaaaatctgacttgtgccgcaaaagaaatgcgtaagatcgaagaaggccaagcgcactggatctgacctctttccagcgatcactgtcgttccgtgccattgaccaggattcttcccgaccggattgtgtttggatattcaaatagacccaaaatgcatgagagaagagg

SEQ ID NO: 1606 - DNA, 1152 bp, Muscodor strobelii
  misc_feature: SGI cDNA ID NO. 560142
  misc_feature: Encodes the peptide sequence at SEQ ID NO 1607
atggcagaacaaactcagagaaacatattcattattgggggtggggccattggttgctgtgctgcttattatttagctcatcatcctttattccatcaagataaacacaccatcactctcatagaatcaaccaagatcgcaggaggtgcatccgggaaggccgcaggctgcctcggcgcctgggctgatccagcctgtctgggtgacgccagtttccggttgcacgcacagctcgccgcagatcacgacggcgaaaagatctggggataccgcaaatgcttgtctgcggactgcgatgctgttgagagtcatcccgatgatcccgactcgagcactcccgttcccaagcgtatagactgggttgaccacgataagttcaagtggttcaagccgctaggagaaagcgctcagtgccatccatatctctttaccacgacgcttgctcgactcgcagaggagaaaggtgtttcgtttgtcgaaggctctgcagaatcgcttgttttctcggaggaccgaagcgaagtcaaaggttttatgttgcgcacaaaagggtcggaggttcggatgatcaatgccaccgacgttattctcgctacaggcccatggacaagccagattctaccaggtgccccgatatccggggaaaagagtcacagtatcgtaattaagccggagggagagatatcgccagatattatcttcttcgacccgggccatatcgatgcggatgacaaggacaaccagttagagatgtatccgcggcccgacgcgactgtctacatgagtgggcaaacagactatgggctggacttacctcccacaacggatgacgttcaagtcgactacgagcgttgcgaaaagctttttaaaacagcccatacgatctcgcctagttttgttaaaagtgaagttcttattcagcaagcctgcttcaggccgatggtaaatgtcgaagggagggatcctgaacttgggccacttttaggtccgacgggagtcgaaggattgctgcttgcagctggtcataatcaatggggtattcaaaactcgcccattactggcaaagttttgagcgaattggtattcgaggggaaagcgataagcgcagacatatcagagcttgatcctcgagaccatttgcgtctaaggtaa

SEQ ID NO: 1607 - protein, 383 aa, Muscodor strobelii
  misc_feature: SGI Peptide ID NO. 560142
  misc_feature (8)..(360): Pfam Id: PF01266 Pfam Desc: FAD dependent oxidoreductase
  misc_feature (134)..(360): Pfam Id: PF01266 Pfam Desc: FAD dependent oxidoreductase
  misc_feature (8)..(93): Pfam Id: PF01266 Pfam Desc: FAD dependent oxidoreductase
  misc_feature (10)..(380): NCBI GI: 115386380 Blast Desc: conserved [Aspergillus terreus NIH2624] gi|114190729|gb|EAU32429.1| conserved [Aspergillus terreus NIH2624]
  misc_feature (3)..(380): NCBI GI: 154320103 Blast Desc: BC1G_02032 [Botryotinia fuckeliana B05.10] gi|150854771|gb|EDN29963.1| BC1G_02032 [Botryotinia fuckeliana B05.10]
  misc_feature (19)..(380): NCBI GI: 238494210 Blast Desc: fad NAD binding oxidoreductase, [Aspergillus flavus NRRL3357] gi|220694991|gb|EED51334.1| fad NAD binding oxidoreductase, [Aspergillus flavus NRRL3357]
  misc_feature (19)..(380): NCBI GI: 145250335 Blast Desc: An15g01410 [Aspergillus niger] gi|134082200|emb|CAL00955.1| protein product [Aspergillus niger]
  misc_feature (19)..(380): NCBI GI: 67540870 Blast Desc: AN6605.2 [Aspergillus nidulans FGSC A4] gi|40738944|gb|EAA58134.1| AN6605.2 [Aspergillus nidulans FGSC A4]
  misc_feature (19)..(380): NCBI GI: 259480184 Blast Desc: TPA: conserved [Aspergillus nidulans FGSC A4]
  misc_feature (1)..(380): NCBI GI: 212526488 Blast Desc: conserved [Penicillium marneffei ATCC 18224] gi|210072799|gb|EEA26886.1| conserved [Penicillium marneffei ATCC 18224]
  misc_feature (1)..(380): NCBI GI: 242781044 Blast Desc: conserved [Talaromyces stipitatus ATCC 10500] gi|218719868|gb|EED19287.1| conserved [Talaromyces stipitatus ATCC 10500]
  misc_feature (20)..(380): NCBI GI: 240111827 Blast Desc: fad oxidoreductase, [Coccidioides posadasii C735 delta SOWgp]
  misc_feature (14)..(380): NCBI GI: 226293263 Blast Desc: highly conserved oxidoreductase [Paracoccidioides brasiliensis Pb18]
MAEQTQRNIFIIGGGAIGCCAAYYLAHHPLFHQDKHTITLIESTKIAGGASGKAAGCLGAWADPACLGDASFRLHAQLAADHDGEKIWGYRKCLSADCDAVESHPDDPDSSTPVPKRIDWVDHDKFKWFKPLGESAQCHPYLFTTTLARLAEEKGVSFVEGSAESLVFSEDRSEVKGFMLRTKGSEVRMINATDVILATGPWTSQILPGAPISGEKSHSIVIKPEGEISPDIIFFDPGHIDADDKDNQLEMYPRPDATVYMSGQTDYGLDLPPTTDDVQVDYERCEKLFKTAHTISPSFVKSEVLIQQACFRPMVNVEGRDPELGPLLGPTGVEGLLLAAGHNQWGIQNSPITGKVLSELVFEGKAISADISELDPRDHLRLR

SEQ ID NO: 1608 - DNA, 1685 bp, Muscodor strobelii
  misc_feature: SGI EST ID NO. CUFF.4158.0
  misc_feature: Variant of the nucleotide sequence at SEQ ID NO 1606
cctggttcaaaatttctaacgctctatgtatgtattgcgattgacgcgggccaattctatgacgtttcgaatgcgcgatatagaagataaataacaccaatgcaccttttgtacgcctcagagttttaatagtctattctcatttgataacttattgcgcttgtcccgtacgttcaatagacaccgactagcagttcagcaacgagctggcccacaggaaatacagagcaatggcagaacaaactcagagaaacatattcattattgggggtggggccattggttgctgtgctgcttattatttagctcatcatcctttattccatcaagataaacacaccatcactctcatagaatcaaccaagatcgcaggaggtgcatccgggaaggccgcaggctgcctcggcgcctgggctgatccagcctgtctgggtgacgccagtttccggttgcacgcacagctcgccgcagatcacgacggcgaaaagatctggggataccgcaaatgcttgtctgcggactgcgatgctgttgagagtcatcccgatgatcccgactcgagcactcccgttcccaagcgtatagactgggttgaccacgataagttcaagtggttcaagccgctaggagaaagcgctcagtgccatccatatctctttaccacgacgcttgctcgactcgcagaggagaaaggtgtttcgtttgtcgaaggctctgcagaatcgcttgttttctcggaggaccgaagcgaagtcaaaggttttatgttgcgcacaaaagggtcggaggttcggatgatcaatgccaccgacgttattctcgctacaggcccatggacaagccagattctaccaggtgccccgatatccggggaaaagagtcacagtatcgtaattaagccggagggagagatatcgccagatattatcttcttcgacccgggccatatcgatgcggatgacaaggacaaccagttagagatgtatccgcggcccgacgcgactgtctacatgagtgggcaaacagactatgggctggacttacctcccacaacggatgacgttcaagtcgactacgagcgttgcgaaaagctttttaaaacagcccatacgatctcgcctagttttgttaaaagtgaagttcttattcagcaagcctgcttcaggccgatggtaaatgtcgaagggagggatcctgaacttgggccacttttaggtccgacgggagtcgaaggattgctgcttgcagctggtcataatcaatggggtattcaaaactcgcccattactggcaaagttttgagcgaattggtattcgaggggaaagcgataagcgcagacatatcagagcttgatcctcgagaccatttgcgtctaaggtaatattggtggaagcctgacagagatgggggcggcacaaacatagcctaacattcttcactaccgccatggacagccatatcttgcagaggcaaccgagctgaattgacctagaatactgtgagaatcgacaggctctaaatacgtcctgaccttgcagatccaggcgtgatctttggtcgcgtgtggtgtcgctcggtcatgcttcttcttcggactatgattgtggacgatcttatgaacttctgtgatatgtacaaataggtatgcagagtactttcaacccctgttggctctattgtcgcc

SEQ ID NO: 1609 - DNA, 1101 bp, Muscodor strobelii
  misc_feature: SGI cDNA ID NO. 560143
  misc_feature: Encodes the peptide sequence at SEQ ID NO 1610
atggtgaacaaggctgtattgcaggccctcttggccgtcgcgtccttcggttccgttcaagctcatcccggggacctccctgaagaggttcgacgcgaactggctgcacacaatgcccgtcagcctatcgctcgccgtgctattcaagaatgtgcctctgctccgaacatggcagctctgaaagcccgcaccgtcgctcgccgtgccgcaacagctcaagcattgcgcgaagagcgtggactgactgaacaccgcctgaagtcgaagcgcgatcaggccggtttcgataagtgggctgcggtcaaccacgacgagtcgagtctgggatacgatcttgatacttctacaagcgtcatcttcagtggcaactccacgtgtgctcttgtccctgaagtaaccattgggccatactgggtcgagggagagctgattagggccgatgtgacagagggccaggcaggcgtgccactccacctcgatcttcagttccttgatatcactacttgttcgcctgtcacaactggaactcttatcgatatttggtccaccaactctaccggcgtctactctggtgtctcggctactggccaaggtggtctcaacacgacacacaatcgtggagtccaagcaacagactccgacggtgtggttcaattcgatgctatcttccctggccattacaccggtcgcaccccgcatattcacctgcttactacgtacggtgctgaaatcctcgagaacagcacatatcttgctgcgactggaacgcccacacacattgggcaaattttctttgaccaggacctcattactgaagttgaggctacggagccttatgcatctaacacacagagtctgaccaccaatgcccaagatggcattaatattcaagaggctacgacagactacgaccccttcattgactatgtccgtctgggtgatgctatcaccgatggtctcctgggtttcatcactgtcttcgtcgactcttcagccaatgtgaccagctcccgccaggctgctgcgcactactacgctggcggcggtgtctcagagtctaatggcggcggtggtggccctggccgcccgcctccgtcttaa

SEQ ID NO: 1610 - protein, 366 aa, Muscodor strobelii
  misc_feature: SGI Peptide ID NO. 560143
  misc_feature (133)..(311): Pfam Id: PF00775 Pfam Desc: Dioxygenase
  misc_feature (1)..(356): NCBI GI: 156030764 Blast Desc: SS1G_14321 [Sclerotinia sclerotiorum 1980] gi|154700712|gb|EDO00451.1| SS1G_14321 [Sclerotinia sclerotiorum 1980]
  misc_feature (1)..(356): NCBI GI: 154299611 Blast Desc: BC1G_10768 [Botryotinia fuckeliana B05.10] gi|150857260|gb|EDN32452.1| BC1G_10768 [Botryotinia fuckeliana B05.10]
  misc_feature (22)..(356): NCBI GI: 115399340 Blast Desc: conserved [Aspergillus terreus NIH2624] gi|114192142|gb|EAU33842.1| conserved [Aspergillus terreus NIH2624]
  misc_feature (22)..(359): NCBI GI: 70985996 Blast Desc: GPI anchored dioxygenase [Aspergillus fumigatus Af293] gi|66846130|gb|EAL86463.1| GPI anchored dioxygenase, [Aspergillus fumigatus Af293] gi|159128367|gb|EDP53482.1| GPI anchored A1163]
  misc_feature (5)..(356): NCBI GI: 256721882 Blast Desc: NECHADRAFT_92188 [Nectria haematococca mpVI 77-13-4]
  misc_feature (7)..(356): NCBI GI: 119473919 Blast Desc: GPI anchored dioxygenase, [Neosartorya fischeri NRRL 181] gi|119406988|gb|EAW16938.1| GPI anchored dioxygenase, [Neosartorya fischeri NRRL 181]
  misc_feature (7)..(351): NCBI GI: 116194560 Blast Desc: CHGG_03878 [Chaetomium globosum CBS 148.51] gi|88179791|gb|EAQ87259.1| CHGG_03878 [Chaetomium globosum CBS 148.51]
  misc_feature (22)..(356): NCBI GI: 67538316 Blast Desc: AN5328.2 [Aspergillus nidulans FGSC A4] gi|40743298|gb|EAA62488.1| AN5328.2 [Aspergillus nidulans FGSC A4] gi|259485231|tpe|CBF82093.1| TPA: GPI anchored dioxygenase,
  misc_feature (12)..(350): NCBI GI: 159122553 Blast Desc: extracellular dioxygenase, [Aspergillus fumigatus A1163]
  misc_feature (12)..(350): NCBI GI: 70984525 Blast Desc: extracellular dioxygenase [Aspergillus fumigatus Af293] gi|66845396|gb|EAL85731.1| extracellular dioxygenase, [Aspergillus fumigatus Af293]
MVNKAVLQALLAVASFGSVQAHPGDLPEEVRRELAAHNARQPIARRAIQECASAPNMAALKARTVARRAATAQALREERGLTEHRLKSKRDQAGFDKWAAVNHDESSLGYDLDTSTSVIFSGNSTCALVPEVTIGPYWVEGELIRADVTEGQAGVPLHLDLQFLDITTCSPVTTGTLIDIWSTNSTGVYSGVSATGQGGLNTTHNRGVQATDSDGVVQFDAIFPGHYTGRTPHIHLLTTYGAEILENSTYLAATGTPTHIGQIFFDQDLITEVEATEPYASNTQSLTTNAQDGINIQEATTDYDPFIDYVRLGDAITDGLLGFITVFVDSSANVTSSRQAAAHYYAGGGVSESNGGGGGPGRPPPS

SEQ ID NO: 1611 - DNA, 718 bp, Muscodor strobelii
  misc_feature: SGI EST ID NO. CUFF.4187.0
  misc_feature: Variant of the nucleotide sequence at SEQ ID NO 1609
cttatcgatatttggtccaccaactctaccggcgtctactctggtgtctcggctactggccaaggtggtctcaacacgacacacaatcgtggagtccaagcaacagactccgacggtgtggttcaattcgatgctatcttccctggccattacaccggtcgcaccccgcatattcacctgcttactacgtacggtgctgaaatcctcgagaacagcacatatcttgctgcgactggaacgcccacacacattgggcaaattttctttgaccaggacctcattactgaagttgaggctacggagccttatgcatctaacacacagagtctgaccaccaatgcccaagatggcattaatattcaagaggctacgacagactacgaccccttcattgactatgtccgtctgggtgatgctatcaccgatggtctcctgggtttcatcactgtcttcgtcgactcttcagccaatgtgaccagctcccgccaggctgctgcgcactactacgctggcggcggtgtctcagagtctaatggcggcggtggtggccctggccgcccgcctccgtcttaaattcactttctaagccgaacaacttcaataactccgagtccgcaaggaggcaggtctgcctagtagtataagaaacgtacaccatgcgaatggcaggaggcattggcgtatctcgtggaggccgtgcccagttgatctcgcaata

SEQ ID NO: 1612 - DNA, 1227 bp, Muscodor strobelii
  misc_feature: SGI cDNA ID NO. 560144
  misc_feature: Encodes the peptide sequence at SEQ ID NO 1613
atgcccttaatgataactcaaatgatcgtgctagctatcaccggactatttgcaacgggtacaatatcgatcgtctcaacgaagcccactgcccagcacagcaaaagatggctgccttcatctgagaaaattcgaggcgtgaatctcggtgcacaattcattctagaaccatggatggcattcgatgaatggactaagatgggctgcggtggctcatctgggcaagacgagtggtcgtgcgtgcagcatcttggccaagaagcagcagacgcagcctttaaggaacattggtcaacctggattaatgcttccgagattgataccatcaagacctacggtttgaacacggttagaattcctgtcggattttggatcaacgagagtctcgttcaagatgacgagttctatccgagaggagggctaccataccttgacgaccttgtggccgcttgcgccgcagcagatatctatgccatcatggatcttcatggcggcccaggagcacaatttcctaaccaacaatatacaggccacaatgtagggactccaggtttttacaatgattataactatgggcgtgcatacgcatttctggactggatgacagagcgtattcatacacatccatcttattctagtgttggtatgcttcaagtcatcaacgagccagtccacttggacgacgctacgcatgccaatgacatggtcgaaaactattatccaggtgcatggaacacaattcgagaccgtgaagagcagctaggcatatcggatgaagaaaagttgcatatacaatacatgtccactgcttggggctctggtgatcccactgggtacttacctcctgataggacatttgataattacgatgatcatcgttacttgaaatgggatacttctttcccagctactaaagacagctaccttgcccaagcgtgcagtgatgatagaggcgatgtcataatcggcgagtggtcaatcgacgttgctgatggcgccggcgatgagttcgatatcaagaatactaatgaaaataacgaatggtacagccagttcttcgctgcacaagtgcaagcattcgagcgatctcagggatggatattttggtcatggaaatgtaactggatccaggggtataatgattggaggtggtgttataagagcgccgtggatgctggcatcattcccaaagatgctgcaagcatagctagcactagtccatgctag

SEQ ID NO: 1613 - protein, 408 aa, Muscodor strobelii
  misc_feature: SGI Peptide ID NO. 560144
  misc_feature (1)..(408): NCBI GI: 67526639 Blast Desc: AN3777.2 [Aspergillus nidulans FGSC A4] gi|40740795|gb|EAA59985.1| AN3777.2 [Aspergillus nidulans FGSC A4] gi|95025907|gb|ABF50867.1| endo-beta-1,6-glucanase nidulans]
  misc_feature (32)..(408): NCBI GI: 46109428 Blast Desc: FG01596.1 [Gibberella zeae PH-1]
  misc_feature (11)..(408): NCBI GI: 256724529 Blast Desc: glycoside hydrolase family 5 [Nectria haematococca mpVI 77-13-4]
  misc_feature (34)..(405): NCBI GI: 256729667 Blast Desc: NECHADRAFT_47058 [Nectria haematococca mpVI 77-13-4]
  misc_feature (34)..(408): NCBI GI: 242768379 Blast Desc: endo-beta-1,6-glucanase, [Talaromyces stipitatus ATCC 10500] gi|218724753|gb|EED24170.1| endo-beta-1,6-glucanase, [Talaromyces stipitatus ATCC 10500]
  misc_feature (34)..(408): NCBI GI: 212542563 Blast Desc: endo-beta-1,6-glucanase, [Penicillium marneffei ATCC 18224] gi|210066343|gb|EEA20436.1| endo-beta-1,6-glucanase, [Penicillium marneffei ATCC 18224]
  misc_feature (8)..(408): NCBI GI: 115443318 Blast Desc: conserved [Aspergillus terreus NIH2624] gi|114188335|gb|EAU30035.1| conserved [Aspergillus terreus NIH2624]
  misc_feature (4)..(408): NCBI GI: 119480803 Blast Desc: cellulase, [Neosartorya fischeri NRRL 181] gi|119408584|gb|EAW18533.1| cellulase, [Neosartorya fischeri NRRL 181]
  misc_feature (7)..(408): NCBI GI: 169783754 Blast Desc: [Aspergillus oryzae RIB40] gi|83775083|dbj|BAE65206.1| protein product [Aspergillus oryzae]
  misc_feature (16)..(408): NCBI GI: 156046196 Blast Desc: SS1G_09365 [Sclerotinia sclerotiorum 1980] gi|154693760|gb|EDN93498.1| SS1G_09365 [Sclerotinia sclerotiorum 1980]
  misc_feature (23)..(396): SWISSPROT Homolog: EC 3.2.1.58 Glucan 1,3-beta-glucosidase
MPLMITQMIVLAITGLFATGTISIVSTKPTAQHSKRWLPSSEKIRGVNLGAQFILEPWMAFDEWTKMGCGGSSGQDEWSCVQHLGQEAADAAFKEHWSTWINASEIDTIKTYGLNTVRIPVGFWINESLVQDDEFYPRGGLPYLDDLVAACAAADIYAIMDLHGGPGAQFPNQQYTGHNVGTPGFYNDYNYGRAYAFLDWMTERIHTHPSYSSVGMLQVINEPVHLDDATHANDMVENYYPGAWNTIRDREEQLGISDEEKLHIQYMSTAWGSGDPTGYLPPDRTFDNYDDHRYLKWDTSFPATKDSYLAQACSDDRGDVIIGEWSIDVADGAGDEFDIKNTNENNEWYSQFFAAQVQAFERSQGWIFWSWKCNWIQGYNDWRWCYKSAVDAGIIPKDAASIASTSPC

SEQ ID NO: 1614 - DNA, 240 bp, Muscodor strobelii
  misc_feature: SGI EST ID NO. CUFF.4193.0
  misc_feature: Variant of the nucleotide sequence at SEQ ID NO 1612
tccacttggacgacgctacgcatgccaatgacatggtcgaaaactattatccaggtgcatggaacacaattcgagaccgtgaagagcagctaggcatatcggatgaagaaaagttgcatatacaatacatgtccactgcttggggctctggtgatcccactgggtacttacctcctgataggacatttgataattacgatgatcatcgttacttgaaatgggatacttctttcccagcta

SEQ ID NO: 1615 - DNA, 813 bp, Muscodor strobelii
  misc_feature: SGI cDNA ID NO. 560145
  misc_feature: Encodes the peptide sequence at SEQ ID NO 1616
atggcaactacgacatgggtggttgtaggcgcctcccgaggaatcgggctagagtttgttgatcaattgctcgaagctggacaccaagtagtcgcggcagtacgtaacgtgtcccaggccccaaaattgctcgacttaatcgattcccgaaaagcagaagacagatgcattgtcgaggagtgtgacgtctcgaatgatgagagtatcactattttcattcgcgcaatgagggcccttgtgctttctggcatgaagctgggaaatatcattctaaatgcaggaattttgaaatatcccaacagagcgactgagatatcattctctgactttgcccttcatttgcacacgaacacgatcggtccaatcatttgcgcgcagaagttagtcaatctggacattaactttccaccgagcaagatcgttttcatatcgtccaactccgggtcggcaacagagttcctagatttcgaggacggttttggagcttacgctgcaagcaagagtgccttgaaccagatgttacgacacatggcagctgaacttggacgatcaaaggagaagaagcgcgagacagtgattttggcactccatcctggggaggtggcaacggatatggcggacgtggagcttggttgggaagtaaaagggtcgattagtgctcaagagagcgtgtctggtatgttgcaggtgatatcagagaaaggaacggcgggcactgcttccttctggtgctgggatggaagagtaagctttgaacgccccgtgaattttttgccatcattgcgaggttcgaaggctaacgatatggaatag

SEQ ID NO: 1616 - protein, 270 aa, Muscodor strobelii
  misc_feature: SGI Peptide ID NO. 560145
  misc_feature (4)..(182): Pfam Id: PF00106 Pfam Desc: short chain dehydrogenase
  misc_feature (2)..(248): NCBI GI: 46117526 Blast Desc: FG04605.1 [Gibberella zeae PH-1]
  misc_feature (4)..(248): NCBI GI: 189199218 Blast Desc: conserved [Pyrenophora tritici-repentis Pt-1C-BFP] gi|187983045|gb|EDU48533.1| conserved [Pyrenophora tritici-repentis Pt-1C-BFP]
  misc_feature (5)..(259): NCBI GI: 242800434 Blast Desc: 3-oxoacyl-[acyl-carrier-protein] reductase, [Talaromyces stipitatus ATCC 10500] gi|218716932|gb|EED16353.1| 3-oxoacyl-[acyl-carrier-protein] reductase, [Talaromyces ATCC
  misc_feature (2)..(245): NCBI GI: 212540850 Blast Desc: short-chain dehydrogenase, [Penicillium marneffei ATCC 18224] gi|210067879|gb|EEA21971.1| short-chain dehydrogenase, [Penicillium marneffei ATCC 18224]
  misc_feature (85)..(245): NCBI GI: 115388115 Blast Desc: conserved [Aspergillus terreus NIH2624] gi|114195647|gb|EAU37347.1| conserved [Aspergillus terreus NIH2624]
  misc_feature (6)..(175): NCBI GI: 156062516 Blast Desc: SS1G_01374 [Sclerotinia sclerotiorum 1980] gi|154696710|gb|EDN96448.1| SS1G_01374 [Sclerotinia sclerotiorum 1980]
  misc_feature (1)..(250): NCBI GI: 126137842 Blast Desc: short chain-type dehydrogenase [Pichia stipitis CBS 6054] gi|126092722|gb|ABN67415.1| short chain-type dehydrogenase [Pichia stipitis CBS 6054]
  misc_feature (6)..(247): NCBI GI: 154304998 Blast Desc: [Botryotinia fuckeliana B05.10] gi|150853752|gb|EDN28944.1| [Botryotinia fuckeliana B05.10]
  misc_feature (7)..(247): NCBI GI: 196259294 Blast Desc: short-chain dehydrogenase/reductase SDR [Cyanothece sp. PCC 7822] gi|196199506|gb|EDX94330.1| short-chain dehydrogenase/reductase SDR [Cyanothece sp. PCC 7822]
  misc_feature (6)..(248): NCBI GI: 115379856 Blast Desc: CsgA [Stigmatella aurantiaca DW4/3-1] gi|115363135|gb|EAU62306.1| CsgA [Stigmatella aurantiaca DW4/3-1]
  misc_feature (7)..(247): SWISSPROT Homolog: EC 1.1.1.10 L-xylulose reductase
MATTTWVVVGASRGIGLEFVDQLLEAGHQVVAAVRNVSQAPKLLDLIDSRKAEDRCIVEECDVSNDESITIFIRAMRALVLSGMKLGNIILNAGILKYPNRATEISFSDFALHLHTNTIGPIICAQKLVNLDINFPPSKIVFISSNSGSATEFLDFEDGFGAYAASKSALNQMLRHMAAELGRSKEKKRETVILALHPGEVATDMADVELGWEVKGSISAQESVSGMLQVISEKGTAGTASFWCWDGRVSFERPVNFLPSLRGSKANDME

SEQ ID NO: 1617 - DNA, 1782 bp, Muscodor strobelii
  misc_feature: SGI cDNA ID NO. 560146
  misc_feature: Encodes the peptide sequence at SEQ ID NO 1618
atggcttcaattgacaatcaaccctctgagatacctaagcgcatcattatatgctgcgatggaacctggcaatcggcagtcagtggcgaggaaaacagcccatctaatgtgacccggcttgctcgcagcttgcagcgcattgccactgatgaggacggcaagaaatggcaacagattgtctggtacgactccggtgtcggcacaacatccggttggctgggaaagaagtatgagggtttcctgggagccggtctcgaaggcaacgtcatcgaagcttacaactttgtgtcactgaactggtcccccggtgaccaggtaatgtgctttggcttctctcgtggcgcctacactgcgcgcacgattgcgggactaatctccgacattggaatctgtgaaccgcgtcagcttcagtactttcccgaaatttggaaactgatcaaggaagacaaaagtggcgaacgattctacgggagcgacagttacttcaaatggattgacggggtagccgacgccgagaagcagcctgatgacctgggttacaagaacatgaatttcgtgtgggacaagcatccgcatggtgaatgggctacgacagccgagtctcgtgagattgaggtcgtaggcgtctacgatactgttggagcgttagggatgcctagtgtcctagggtttgagattgacttgtcgtttgggccggacaaaaagggctttcacaatgtgaagttgaataggactcttgacgatcaccgtgaagctttcacgccaacattatggtcactacccgacgccaaacagccaaaagcagaagatattaccaagcaacaacaagccgttgctgatgcgctgcaagcatggtgcccggtcgcatacgacaagaagacccctaaatcgaaacgcgatgagctgaaggctgcgtacaatgaagctaggagacagttgatacgaatggaggaggctgtgagagatcaatcgaaattgacacaagtctggttccctggcgttcacatcaacatcggtggtggttctagcgactcactcaagtcagagggcgatcttgaagaaatatccaacattacgtttgcatggatgttagatcaaatcaaacatcatgtcagcatcaacgagaccattttcatgcaagagactcgagcccgtcaaaatcacattgatgacctcaacacagaactccgcaaatatcaggagctcatggagaagcagcaaaaggaacgtgcggcggagtcgtactgggcctggacgcgtcggagcgccacgactgcgttcaactcggcgaagaactcagtgatgcatcccttcaccgaagtcaaacacccaaacaccctgcgccgtgattatggttggggtacgggcactatcattgattcttacacactcatgtacaaggcaaacgggtccaaagccaggacaccaggtggttacgccagtgatgcaaagcacaccaccatcggcgagaccaatgaattcatccaccctactataggtttcaggatcaagatgactgaaagtgctaaagatcaaaagctgagatacaagccggccgggctagagccaaaggatcaatttgtccgaagaaaggttgacagcggcgagggctatgaatatagtatcgccggtgctgctaagcccttgccagaatggcaattggctaagccggactacagcaacggcatttgctttgaaaggctcgttatcgctggcgacgaggcgatgaaatttgttgaagatttggacaaagagcttggccatgccgcgccatcctattag

SEQ ID NO: 1618 - protein, 593 aa, Muscodor strobelii
  misc_feature: SGI Peptide ID NO. 560146
  misc_feature (13)..(586): NCBI GI: 154322284 Blast Desc: BC1G_01289 [Botryotinia fuckeliana B05.10] gi|150850536|gb|EDN25729.1| BC1G_01289 [Botryotinia fuckeliana B05.10]
  misc_feature (5)..(586): NCBI GI: 156046787 Blast Desc: SS1G_09477 [Sclerotinia sclerotiorum 1980] gi|154693872|gb|EDN93610.1| SS1G_09477 [Sclerotinia sclerotiorum 1980]
  misc_feature (13)..(586): NCBI GI: 255933069 Blast Desc: Pc12g11890 [Penicillium chrysogenum Wisconsin 54-1255] gi|211582624|emb|CAP80816.1| Pc12g11890 [Penicillium chrysogenum Wisconsin 54-1255]
  misc_feature (12)..(583): NCBI GI: 46108488 Blast Desc: FG01126.1 [Gibberella zeae PH-1]
  misc_feature (13)..(587): NCBI GI: 171676808 Blast Desc: protein product [Podospora anserina] gi|170936471|emb|CAP61128.1| protein product [Podospora anserina]
  misc_feature (9)..(515): NCBI GI: 256734407 Blast Desc: NECHADRAFT_90006 [Nectria haematococca mpVI 77-13-4]
  misc_feature (13)..(567): NCBI GI: 169603369 Blast Desc: SNOG_04694 [Phaeosphaeria nodorum SN15] gi|111067334|gb|EAT88454.1| SNOG_04694 [Phaeosphaeria nodorum SN15]
  misc_feature (13)..(502): NCBI GI: 189203747 Blast Desc: peptidoglycan binding domain containing protein [Pyrenophora tritici-repentis Pt-1C-BFP] gi|187985308|gb|EDU50796.1| peptidoglycan binding domain protein
  misc_feature (12)..(554): NCBI GI: 169605619 Blast Desc: SNOG_05835 [Phaeosphaeria nodorum SN15] gi|160706801|gb|EAT86899.2| SNOG_05835 [Phaeosphaeria nodorum SN15]
  misc_feature (13)..(522): NCBI GI: 121720200 Blast Desc: ACLA_060400 [Aspergillus clavatus NRRL 1] gi|119405010|gb|EAW15372.1| ACLA_060400 [Aspergillus clavatus NRRL 1]
MASIDNQPSEIPKRIIICCDGTWQSAVSGEENSPSNVTRLARSLQRIATDEDGKKWQQIVWYDSGVGTTSGWLGKKYEGFLGAGLEGNVIEAYNFVSLNWSPGDQVMCFGFSRGAYTARTIAGLISDIGICEPRQLQYFPEIWKLIKEDKSGERFYGSDSYFKWIDGVADAEKQPDDLGYKNMNFVWDKHPHGEWATTAESREIEVVGVYDTVGALGMPSVLGFEIDLSFGPDKKGFHNVKLNRTLDDHREAFTPTLWSLPDAKQPKAEDITKQQQAVADALQAWCPVAYDKKTPKSKRDELKAAYNEARRQLIRMEEAVRDQSKLTQVWFPGVHINIGGGSSDSLKSEGDLEEISNITFAWMLDQIKHHVSINETIFMQETRARQNHIDDLNTELRKYQELMEKQQKERAAESYWAWTRRSATTAFNSAKNSVMHPFTEVKHPNTLRRDYGWGTGTIIDSYTLMYKANGSKARTPGGYASDAKHTTIGETNEFIHPTIGFRIKMTESAKDQKLRYKPAGLEPKDQFVRRKVDSGEGYEYSIAGAAKPLPEWQLAKPDYSNGICFERLVIAGDEAMKFVEDLDKELGHAAPSY

SEQ ID NO: 1619 - DNA, 1620 bp, Muscodor strobelii
  misc_feature: SGI EST ID NO. CUFF.4238.1
  misc_feature: Variant of the nucleotide sequence at SEQ ID NO 1617
aacgcgatgagctgaaggctgcgtacaatgaagctaggagacagttgatacgaatggaggaggctgtgagagatcaatcgaaattgacacaagtctggttccctggcgttcacatcaacatcggtggtggttctagcgactcactcaagtcagagggcgatcttgaagaaatatccaacattacgtttgcatggatgttagatcaaatcaaacatcatgtcagcatcaacgagaccattttcatgcaagagactcgagcccgtcaaaatcacattgatgacctcaacacagaactccgcaaatatcaggagctcatggagaagcagcaaaaggaacgtgcggcggagtcgtactgggcctggacgcgtcggagcgccacgactgcgttcaactcggcgaagaactcagtgatgcatcccttcaccgaagtcaaacacccaaacaccctgcgccgtgattatggttggggtacgggcactatcattgattcttacacactcatgtacaaggcaaacgggtccaaagccaggacaccaggtggttacgccagtgatgcaaagcacaccaccatcggcgagaccaatgaattcatccaccctactataggtttcaggatcaagatgactgaaagtgctaaagatcaaaagctgagatacaagccggccgggctagagccaaaggatcaatttgtccgaagaaaggttgacagcggcgagggctatgaatatagtatcgccggtgctgctaagcccttgccagaatggcaattggctaagccggactacagcaacggcatttgctttgaaaggctcgttatcgctggcgacgaggcgatgaaatttgttgaagatttggacaaagagcttggccatgccgcgccatcctattagaagcaaacagaaggtatgaaaggcttactaggaatatcatgtggcgaaacggtacatcaatgcctgctctatcccaatgccagccgttatataagatcaaagcgggtggcattgcgatggaaattgacgacgagacgtgtgaggcggtacaaaatgctcacttcttccatcccaccagaattagggtatacgtttggacatctcgcaagctctatgaagttttatagtgtcgactttatcatttgttccatcgaaatagccttggatagctttgtattgacatgggcttgaatggcgagtatacgtggcgtgctccatatcctgagttatatagatccctggtcggtttagcaagagaggatcatcttccaagcgtgactctacaattcccagaaaccgttgttttccatgctctgcatatcctgttggatacaagaggaggcttacctctaagccgatttttgtcctttggggagggcgatcaacatctgaaggacactcgattaagctgtaaggctgatcgaagtcgtctggtgagcttgcaagcggactcagagcttgcccaacttgattatgcaatgggagactttgatcgcccatgcccagaatgatatgttcctgaagccttcgaaatgcctttttctcaccttctccgcagatgagcggcatattcacatcaaaaagaccaagcaagctgtatgccctgtcttctggccgagttgtcttacgg

SEQ ID NO: 1620 - DNA, 801 bp, Muscodor strobelii
  misc_feature: SGI cDNA ID NO. 560147
  misc_feature: Encodes the peptide sequence at SEQ ID NO 1621
atgaagatcaccgccattatcttttcggccgtagcagtaggcgctgtctgcgctgataacactggctgtccattctctcaatggaaacctgagaccgcgacagatactcgaggagtctgtcccatgctcaatgctctctcgaatcacggttatctgccacacaacggaagagatatgactaaggagcaggtcgtaggcggtcttaaagaggccttgaacctcgcgccgtcctttggtgaattcttatggggtgcagccctgcagtcggccgaggcggcgaacaaaacaaagttcaatctcaaccatctcgatcgccataacttgttcgagcatgacggaagtctaagccgtcaagacgcttacttcggccaatggagccgcttcaatgcaaccattttcgaatggactgaggcatactggcccggtgacactctcgatgtccagatagtgtctgccgcccgagcatctcgccacatgcgttctatgttgaccaacccggactattctctttcgaacacaggttactcgttcagcgtgggcgaaaactctgctctgttatccattattggcgacaagcactcgcaaactgtacctaagaaattcgttgaatatttgtttgaaaacgaacgcctgccttgtagcctcggatggaagaagcccaaagaggagattactctggatgaccttatctatactttccacgccatcgagaacgcgactttctatccacctgcagttccagatgatgaggagaagacagcttccaagacgcgccgctggactcacgctggcttccactaa

SEQ ID NO: 1621 - protein, 266 aa, Muscodor strobelii
  misc_feature: SGI Peptide ID NO. 560147
  misc_feature (34)..(123): Pfam Id: PF01328 Pfam Desc: Peroxidase, family 2
  misc_feature (1)..(240): NCBI GI: 145236505 Blast Desc: An06g00720 [Aspergillus niger] gi|134075355|emb|CAK39169.1| protein product [Aspergillus niger]
  misc_feature (27)..(240): NCBI GI: 156037790 Blast Desc: SS1G_12609 [Sclerotinia sclerotiorum 1980] gi|154698017|gb|EDN97755.1| SS1G_12609 [Sclerotinia sclerotiorum 1980]
  misc_feature (8)..(240): NCBI GI: 255950370 Blast Desc: Pc22g20520 [Penicillium chrysogenum Wisconsin 54-1255] gi|211592969|emb|CAP99340.1| Pc22g20520 [Penicillium chrysogenum Wisconsin 54-1255]
  misc_feature (28)..(265): NCBI GI: 154315332 Blast Desc: BC1G_04705 [Botryotinia fuckeliana B05.10] gi|150847668|gb|EDN22861.1| BC1G_04705 [Botryotinia fuckeliana B05.10]
  misc_feature (1)..(240): NCBI GI: 189189958 Blast Desc: conserved [Pyrenophora tritici-repentis Pt-1C-BFP] gi|187972924|gb|EDU40423.1| conserved [Pyrenophora tritici-repentis Pt-1C-BFP]
  misc_feature (1)..(219): NCBI GI: 115437934 Blast Desc: conserved [Aspergillus terreus NIH2624] gi|114188752|gb|EAU30452.1| conserved [Aspergillus terreus NIH2624]
  misc_feature (24)..(236): NCBI GI: 171677819 Blast Desc: protein product [Podospora anserina] gi|170936978|emb|CAP61636.1| protein product [Podospora anserina]
  misc_feature (1)..(266): NCBI GI: 116201155 Blast Desc: CHGG_08462 [Chaetomium globosum CBS 148.51] gi|88176980|gb|EAQ84448.1| CHGG_08462 [Chaetomium globosum CBS 148.51]
  misc_feature (1)..(265): NCBI GI: 67902816 Blast Desc: AN8395.2 [Aspergillus nidulans FGSC A4] gi|40747861|gb|EAA67017.1| AN8395.2 [Aspergillus nidulans FGSC A4] gi|259484328|tpe|CBF80452.1| TPA: conserved [Aspergillus FGSC
  misc_feature (42)..(265): NCBI GI: 238506631 Blast Desc: conserved [Aspergillus flavus NRRL3357] gi|220689230|gb|EED45581.1| conserved [Aspergillus flavus NRRL3357]
  misc_feature (19)..(220): SWISSPROT Homolog: EC 1.11.1.10 Chloride peroxidase
MKITAIIFSAVAVGAVCADNTGCPFSQWKPETATDTRGVCPMLNALSNHGYLPHNGRDMTKEQVVGGLKEALNLAPSFGEFLWGAALQSAEAANKTKFNLNHLDRHNLFEHDGSLSRQDAYFGQWSRFNATIFEWTEAYWPGDTLDVQIVSAARASRHMRSMLTNPDYSLSNTGYSFSVGENSALLSIIGDKHSQTVPKKFVEYLFENERLPCSLGWKKPKEEITLDDLIYTFHAIENATFYPPAVPDDEEKTASKTRRWTHAGFH

SEQ ID NO: 1622 - DNA, 1243 bp, Muscodor strobelii
  misc_feature: SGI EST ID NO. CUFF.4249.0
  misc_feature: Variant of the nucleotide sequence at SEQ ID NO 1620
gtttactctgatagcagttggcggagaaggccaagactccgcagccgaagcggccatggcttgatggctgtgataattggactgcgtagggagaaaaaggagacgaagatataaagtaaagacagttcaccatcgctatatgctgctttcttgtgggatatctttagtttccgcattaagacttctttctcaataaccagaacaccaagtttcggtcaatacttatacaattactgtcaagatgaagatcaccgccattatcttttcggccgtagcagtaggcgctgtctgcgctgataacactggctgtccattctctcaatggaaacctgagaccgcgacagatactcgaggagtctgtcccatgctcaatgctctctcgaatcacggttatctgccacacaacggaagagatatgactaaggagcaggtcgtaggcggtcttaaagaggccttgaacctcgcgccgtcctttggtgaattcttatggggtgcagccctgcagtcggccgaggcggcgaacaaaacaaagttcaatctcaaccatctcgatcgccataacttgttcgagcatgacggaagtctaagccgtcaagacgcttacttcggccaatggagccgcttcaatgcaaccattttcgaatggactgaggcatactggcccggtgacactctcgatgtccagatagtgtctgccgcccgagcatctcgccacatgcgttctatgttgaccaacccggactattctctttcgaacacaggttactcgttcagcgtgggcgaaaactctgctctgttatccattattggcgacaagcactcgcaaactgtacctaagaaattcgttgaatatttgtttgaaaacgaacgcctgccttgtagcctcggatggaagaagcccaaagaggagattactctggatgaccttatctatactttccacgccatcgagaacgcgactttctatccacctgcagttccagatgatgaggagaagacagcttccaagacgcgccgctggactcacgctggcttccactaaacagtctagcttgctgaagccggacccaaagatatgctgactgtaccggcgctggagatgttcttctgcagagggagcttctcagctcagatgcttgcgacgcaaggctttcgagatagttattggcttttgccttatttacattctaatggacgataattgcacatcgactttataaagaacacatttttctaccatgat

SEQ ID NO: 1623 - DNA, 1329 bp, Muscodor strobelii
  misc_feature: SGI cDNA ID NO. 560148
  misc_feature: Reduced expression when VOC is produced
  misc_feature: Encodes the peptide sequence at SEQ ID NO 1624
atggcggtcgtagatgccgcgatgcggaagaaggtgctgaaagttatcttcttctcgcttttactcgatctaatctccttcacgttcatcctcccacttttccccaaacttctcgagttctaccgaaacagcgaagccggacccggatcgcaaacaacactcttagcaaagattctcggaggcttaaatgcatacaagtcatcctttgcgcgaccaatcgactcgagatacgacattgtcttattgggcggagccctcggcagtttgttctctctcctccaagcaattgcatcacctatcattggacacctctccgataaatatggacgtcgaacggctttactcgccagcatgactggaaatatcttgtccgtactgctctgggtagtagccgtagacttccggactttcttagcttcacgcgtagttggtggattgtccgaaggcaatgtacagcttgcgacggccatagcgaccgatatttcagacgagaacagccgtggatcgacgatggcgctcattggtgcatgtttctcgatcgcatttaccttcgggcctgcacttggcgcttacctgagctcaattgcgacagtggccgcaaatccattcgccactgcggctgctgtctcattgtcgcttattgttaccgagacactgtacctctacgttgccctaccagagacattaccgatgaagaccgaaaaggcaaaggaagcgaagtcgataaccgcatctaagagcgtcgtccgcacgaactcgcacacgctacttaatagcgtgcactttctattcctgctcttcttctcgggcatggaattctcgctgccttttatgacctatgagcttttcgagtacacatccgcgaagaatggccgcttgctcggctacattggtctcgtatcttcggtcttacaaggtggagtcacgcgccgcttgccaccccttttgaatgtccgcatgggcgtgggtgcatgtctggcagctttcgtgatcctctcgcgcatgtctaccgtcggtacgctttacattgccgccacctgtcttgcaacaacttctgccaccgtcgtaagcggtttgaacactttggccagtttcgaagctggcgtagacgagcgaggaggcaagctgggcattctccgaagttacggtcaattaggacgtggccttggcccagttttattcacaagtgtctactggtgggccggaagagaactcgcatacatgatgggcaccgcaggattggtgctcgtgtccacgatagtgtttgcgggcctgaaagcgccaccaggttcaatcacgaaaaagtcatcggcgaagaaggagttgtaa

SEQ ID NO: 1624 - protein, 442 aa, Muscodor strobelii
  misc_feature: SGI Peptide ID NO. 560148
  misc_feature (16)..(391): Pfam Id: PF07690 Pfam Desc: Major Facilitator Superfamily
  misc_feature (1)..(430): NCBI GI: 39970511 Blast Desc: MGG_02722 [Magnaporthe grisea 70-15] gi|149209975|ref|XP_001522362.1| MGCH7_ch7g469 [Magnaporthe grisea 70-15] gi|86196424|gb|EAQ71062.1| MGCH7_ch7g469 grisea
  misc_feature (4)..(442): NCBI GI: 116193563 Blast Desc: CHGG_06499 [Chaetomium globosum CBS 148.51] gi|88182412|gb|EAQ89880.1| CHGG_06499 [Chaetomium globosum CBS 148.51]
  misc_feature (1)..(434): NCBI GI: 46129250 Blast Desc: FG08810.1 [Gibberella zeae PH-1]
  misc_feature (1)..(440): NCBI GI: 256734150 Blast Desc: [Nectria haematococca mpVI 77-13-4]
  misc_feature (4)..(442): NCBI GI: 164423335 Blast Desc: NCU09098 [Neurospora crassa OR74A] gi|157070049|gb|EAA35679.2| conserved [Neurospora crassa OR74A]
  misc_feature (25)..(441): NCBI GI: 171685021 Blast Desc: protein product [Podospora anserina] gi|170942471|emb|CAP68123.1| protein product [Podospora anserina]
  misc_feature (4)..(431): NCBI GI: 169612525 Blast Desc: SNOG_09385 [Phaeosphaeria nodorum SN15] gi|111062457|gb|EAT83577.1| SNOG_09385 [Phaeosphaeria nodorum SN15]
  misc_feature (4)..(440): NCBI GI: 189190402 Blast Desc: conserved [Pyrenophora tritici-repentis Pt-1C-BFP] gi|187973146|gb|EDU40645.1| conserved [Pyrenophora tritici-repentis Pt-1C-BFP]
  misc_feature (27)..(435): NCBI GI: 156058612 Blast Desc: SS1G_03318 [Sclerotinia sclerotiorum 1980] gi|154701105|gb|EDO00844.1| SS1G_03318 [Sclerotinia sclerotiorum 1980]
  misc_feature (53)..(435): NCBI GI: 154303166 Blast Desc: BC1G_09603 [Botryotinia fuckeliana B05.10] gi|150855066|gb|EDN30258.1| BC1G_09603 [Botryotinia fuckeliana B05.10]
  misc_feature: Useful for introducing or modulating the production of volatile compounds
MAVVDAAMRKKVLKVIFFSLLLDLISFTFILPLFPKLLEFYRNSEAGPGSQTTLLAKILGGLNAYKSSFARPIDSRYDIVLLGGALGSLFSLLQAIASPIIGHLSDKYGRRTALLASMTGNILSVLLWVVAVDFRTFLASRVVGGLSEGNVQLATAIATDISDENSRGSTMALIGACFSIAFTFGPALGAYLSSIATVAANPFATAAAVSLSLIVTETLYLYVALPETLPMKTEKAKEAKSITASKSVVRTNSHTLLNSVHFLFLLFFSGMEFSLPFMTYELFEYTSAKNGRLLGYIGLVSSVLQGGVTRRLPPLLNVRMGVGACLAAFVILSRMSTVGTLYIAATCLATTSATVVSGLNTLASFEAGVDERGGKLGILRSYGQLGRGLGPVLFTSVYWWAGRELAYMMGTAGLVLVSTIVFAGLKAPPGSITKKSSAKKEL

SEQ ID NO: 1625 - DNA, 2435 bp, Muscodor strobelii
  misc_feature: SGI EST ID NO. CUFF.4263.0
  misc_feature: Variant of the nucleotide sequence at SEQ ID NO 1623
gcggtatctttacatagacaagggctaaactctaaactatttcgggtcccagccgtttgcgctaagccacgagtagaaatattgcacgacggctacatcatcatccgtctcattttccgactccagacaaagctggagctggcatttcagcttgcgtcgcaatacacatcgcgtctggccatttctttcctttggcaacgtgttcttgcccacttacattctgtaacatatatcgcaatccctctttatagattgtctccctttgccgcttttctcacctcttccgcgagtcgtgtcgcgttcagtggctggtccaaacacggtgtttcttccccactgccatccccgcggcttcctcaaattcacagtgaagatggcggtcgtagatgccgcgatgcggaagaaggtgctgaaagttatcttcttctcgcttttactcgatctaatctccttcacgttcatcctcccacttttccccaaacttctcgagttctaccgaaacagcgaagccggacccggatcgcaaacaacactcttagcaaagattctcggaggcttaaatgcatacaagtcatcctttgcgcgaccaatcgactcgagatacgacattgtcttattgggcggagccctcggcagtttgttctctctcctccaagcaattgcatcacctatcattggacacctctccgataaatatggacgtcgaacggctttactcgccagcatgactggaaatatcttgtccgtactgctctgggtagtagccgtagacttccggactttcttagcttcacgcgtagttggtggattgtccgaaggcaatgtacagcttgcgacggccatagcgaccgatatttcagacgagaacagccgtggatcgacgatggcgctcattggtgcatgtttctcgatcgcatttaccttcgggcctgcacttggcgcttacctgagctcaattgcgacagtggccgcaaatccattcgccactgcggctgctgtctcattgtcgcttattgttaccgagacactgtacctctacgttgccctaccagagacattaccgatgaagaccgaaaaggcaaaggaagcgaagtcgataaccgcatctaagagcgtcgtccgcacgaactcgcacacgctacttaatagcgtgcactttctattcctgctcttcttctcgggcatggaattctcgctgccttttatgacctatgagcttttcgagtacacatccgcgaagaatggccgcttgctcggctacattggtctcgtatcttcggtcttacaaggtggagtcacgcgccgcttgccaccccttttgaatgtccgcatgggcgtgggtgcatgtctggcagctttcgtgatcctctcgcgcatgtctaccgtcggtacgctttacattgccgccacctgtcttgcaacaacttctgccaccgtcgtaagcggtttgaacactttggccagtttcgaagctggcgtagacgagcgaggaggcaagctgggcattctccgaagttacggtcaattaggacgtggccttggcccagttttattcacaagtgtctactggtgggccggaagagaactcgcatacatgatgggcaccgcaggattggtgctcgtgtccacgatagtgtttgcgggcctgaaagcgccaccaggttcaatcacgaaaaagtcatcggcgaagaaggagttgtaagatataagtgtacgatatctgtatatatgaaaagcattttctacgaatttcaagtgcgttagatcaatactatctagtcctgtacgtgggtggattattgctttctctatgttaggcgccgttatattcgggcgccagtagaaccccagactcctaaatgtagcatgttgaaagggttgtgttcattttaacgttgctcggtttttacacgtagccaatatgatatgtgtgatagagggaccggagtgaatgcagctaggttttcgtgctgtcacttcttggtcaatagtcctggtccgacgaggagtactcgcgcaataaggataaagacgccgccctgtcagtcaccgtcagcccatgtcgaccacatgcaatcaagatactacttacggtgattaagctaatgccgcagaagactttgagtcccaaatagctgccatgttgtgccgtcacaatagctccagcaatcggactaccaaataaagcaccgaaagacgagacactatacagagtcccaacacgagagcccagctttcggatatcggagattgaagcgactagggcaggaatgatcgagagagtcaacccagaagcgaacccgtaaaggactgcgtacacaatgattggcacaatggactgtgcggggagccataaggctaagctaataatcccagagaaaaggacaaaggcgatacaaacattgaaaacgccgtacaggtctccgagatgtgca

SEQ ID NO: 1626 - DNA, 1374 bp, Muscodor strobelii
  misc_feature: SGI cDNA ID NO. 560149
  misc_feature: Encodes the peptide sequence at SEQ ID NO 1627
atgaaatcagctccagttgctcccgagactggggtcctgggtctgcactcacacgacttacacgacgaatcggacaatgcaacatccacggagctatccagagatgacgctgccgcgaccaccgttcaattacaatctagccccgagaaactccaggttcctattgcctcggagatagatgtgaatgactttcccgatggagggctcaaggcctggctctgcatcgccggaggtttttgcgccaacttgtcgagtttgggatggatcaattgtatcggtgttttccaagattattaccagacacatcagctggcttcctactcaagtagtcaagtagcgtggatcccagcaacagaatcgttcttcttgttcttccttggcttgtttgtcggcaaattgactgataattacggcccgcggtggccattgttgttcggatcattgctacacatttacggtttgatgatgatctcgttatccaaagaatactaccagatattccttgcgcagtctattgcgagtgcgatcggcacgaccatcagtgcggctggctcttggttcaagaaacatcgcgcacaggcattcggtatcatggcgactggatctagcattggcggtgtcgtccttccaatactggtgcagcacctgattgtagaagtcgatttcgcttgggcgatacgcataaccgggtttttgatcctgggacttttgacattcgcgaacttgactattaagcatcgactactgcctagcaaacagccatggtccatcatggaatatttgacgtcatttcgcgatataccatttgtactcctcgccaccggctcctttttcatttatatcggagcacttctgcctttcaccttcatcatcattcaagcgaaggaggcgggtgctccagcggcgctcgccaactatctcgtgcccattctcaacgctgtcagtatatttggaagagtccttcctgcacatctcggagacctgtacggcgttttcaatgtttgtatcgcctttgtccttttctctgggattattagcttagccttatggctccccgcacagtccattgtgccaatcattgtgtacgcagtcctttacgggttcgcttctgggttgactctctcgatcattcctgccctagtcgcttcaatctccgatatccgaaagctgggctctcgtgttgggactctgtatagtgtctcgtctttcggtgctttatttggtagtccgattgctggagctattgtgacggcacaacatggcagctatttgggactcaaagtcttctgcggcattagcttaatcaccggcggcgtctttatccttattgcgcgagtactcctcgtcggaccaggactattgaccaagaagtga

SEQ ID NO: 1627 - protein, 457 aa, Muscodor strobelii
  misc_feature: SGI Peptide ID NO. 560149
  misc_feature (78)..(409): Pfam Id: PF07690 Pfam Desc: Major Facilitator Superfamily
  misc_feature (22)..(406): NCBI GI: 46102644 Blast Desc: FG00026.1 [Gibberella zeae PH-1]
  misc_feature (20)..(456): NCBI GI: 238487372 Blast Desc: monocarboxylate permease, [Aspergillus flavus NRRL3357] gi|220699803|gb|EED56142.1| monocarboxylate permease, [Aspergillus flavus NRRL3357]
  misc_feature (8)..(456): NCBI GI: 225560874 Blast Desc: monocarboxylate permease-like protein [Ajellomyces capsulatus G186AR]
  misc_feature (17)..(456): NCBI GI: 154277916 Blast Desc: [Ajellomyces capsulatus NAm1] gi|150413374|gb|EDN08757.1| [Ajellomyces capsulatus NAm1]
  misc_feature (18)..(456): NCBI GI: 261203705 Blast Desc: monocarboxylate permease-like protein [Ajellomyces dermatitidis SLH14081] gi|239586851|gb|EEQ69494.1| monocarboxylate permease-like protein [Ajellomyces dermatitidis
  misc_feature (21)..(456): NCBI GI: 239608116 Blast Desc: monocarboxylate permease-like protein [Ajellomyces dermatitidis ER-3]
  misc_feature (24)..(445): NCBI GI: 255946908 Blast Desc: Pc22g01770 [Penicillium chrysogenum Wisconsin 54-1255] gi|211591238|emb|CAP97465.1| Pc22g01770 [Penicillium chrysogenum Wisconsin 54-1255]
  misc_feature (6)..(456): NCBI GI: 238840755 Blast Desc: monocarboxylate permease-like protein [Microsporum canis CBS 113480]
  misc_feature (20)..(450): NCBI GI: 261354693 Blast Desc: riboflavin transporter MCH5 [Verticillium albo-atrum VaMs.102]
  misc_feature (19)..(450): NCBI GI: 46123917 Blast Desc: FG06336.1 [Gibberella zeae PH-1]
MKSAPVAPETGVLGLHSHDLHDESDNATSTELSRDDAAATTVQLQSSPEKLQVPIASEIDVNDFPDGGLKAWLCIAGGFCANLSSLGWINCIGVFQDYYQTHQLASYSSSQVAWIPATESFFLFFLGLFVGKLTDNYGPRWPLLFGSLLHIYGLMMISLSKEYYQIFLAQSIASAIGTTISAAGSWFKKHRAQAFGIMATGSSIGGVVLPILVQHLIVEVDFAWAIRITGFLILGLLTFANLTIKHRLLPSKQPWSIMEYLTSFRDIPFVLLATGSFFIYIGALLPFTFIIIQAKEAGAPAALANYLVPILNAVSIFGRVLPAHLGDLYGVFNVCIAFVLFSGIISLALWLPAQSIVPIIVYAVLYGFASGLTLSIIPALVASISDIRKLGSRVGTLYSVSSFGALFGSPIAGAIVTAQHGSYLGLKVFCGISLITGGVFILIARVLLVGPGLLTKK

SEQ ID NO: 1628 - DNA, 155 bp, Muscodor strobelii
  misc_feature: SGI EST ID NO. CUFF.4255.0
  misc_feature: Variant of the nucleotide sequence at SEQ ID NO 1626
gttttccaagattattaccagacacatcagctggcttcctactcaagtagtcaagtagcgtggatcccagcaacagaatcgttcttcttgttcttccttggcttgtttgtcggcaaattgactgataattacggcccgcggtggccattgttgtt

SEQ ID NO: 1629 - DNA, 1044 bp, Muscodor strobelii
  misc_feature: SGI cDNA ID NO. 560150
  misc_feature: Encodes the peptide sequence at SEQ ID NO 1630
atgggaccaaccattgaagtgaccaaggcaccgcgcccccctctaggtgacgccagcagtcgcgccaatcaatcgccagccaaacctaccggcaagggaaagacttccaatgctgcaggcaacaagcgaaagtcgcaaagtagtccggaagatgatatcgctgcttataagcaaaatctagaccacgttatcagccctaatcacttcaatctagaggagttcatcaaaaatgctgacatttttgacgactctgccgggggcttttgcgcggacgttcgtgatgatatcaacaaggttctcgatcgcggtatcatgaacaagactgagttcgcgaaggccattggcgtcagcgtctcgtccttgaacgacttcctcaagctagacggcaaaatggcagggtctggtagcaagtcctatcgcaatgcttatgtctggtttgggcaacgcaaatttgccaaactcgacatgccagaagttaataagcgacagaagagtaatgcaggtagccctactaccagcaaatccaacgccaatacatcttcgcagcagaagaaggcagagccaaaacagaaggcaaatgcaaagaacggagtgccagacataagcgacatttatctcgatggtgaagatgacgatgacgtcgaaatctacgatacatgcgatgagatgcgaaagaagatcaacgcgcacctacgaaagagcacaggcttgacgctagcgcaattctgcagagacctcaagacccaattacacagtgacgacagtccaaatatcacaactccaacgctcaacagattcctctcgcataaaggccctatcagcggcgctaagagcattgtctactatgcctcatatgtctatttcgaaaagatccgccttgcacagggtaaacccaagagtgttcatcgacagaatgtagaggaccgccatccgaatggcctggatcgtactatggatcataccactaccttcattactatggctcatgaaagaccctactttgataagtatggcagtttctccgtgggcggtggttcgtggtga

SEQ ID NO: 1630 - protein, 347 aa, Muscodor strobelii
  misc_feature: SGI Peptide ID NO. 560150
  misc_feature (3)..(319): NCBI GI: 46115960 Blast Desc: FG03822.1 [Gibberella zeae PH-1]
  misc_feature (71)..(342): NCBI GI: 164427929 Blast Desc: NCU10933 [Neurospora crassa OR74A] gi|38567101|emb|CAE76397.1| [Neurospora crassa] gi|157071940|gb|EAA35847.2| [Neurospora crassa OR74A]
  misc_feature (89)..(317): NCBI GI: 171695832 Blast Desc: protein product [Podospora anserina] gi|170948158|emb|CAP60322.1| protein product [Podospora anserina]
  misc_feature (89)..(346): NCBI GI: 121711563 Blast Desc: conserved [Aspergillus clavatus NRRL 1] gi|119401548|gb|EAW11971.1| conserved [Aspergillus clavatus NRRL 1]
  misc_feature (89)..(338): NCBI GI: 145237336 Blast Desc: An07g02290 [Aspergillus niger] gi|134075784|emb|CAK39320.1| protein product [Aspergillus niger]
  misc_feature (105)..(342): NCBI GI: 70986918 Blast Desc: conserved [Aspergillus fumigatus Af293] gi|66846575|gb|EAL86907.1| conserved [Aspergillus fumigatus Af293] gi|159123285|gb|EDP48405.1| conserved [Aspergillus A1163]
  misc_feature (89)..(335): NCBI GI: 154297828 Blast Desc: BC1G_11888 [Botryotinia fuckeliana B05.10] gi|150858329|gb|EDN33521.1| BC1G_11888 [Botryotinia fuckeliana B05.10]
  misc_feature (89)..(342): NCBI GI: 119482968 Blast Desc: NFIA_026890 [Neosartorya fischeri NRRL 181] gi|119409667|gb|EAW19615.1| conserved [Neosartorya fischeri NRRL 181]
  misc_feature (89)..(343): NCBI GI: 238485308 Blast Desc: conserved [Aspergillus flavus NRRL3357] gi|220698771|gb|EED55110.1| conserved [Aspergillus flavus NRRL3357]
  misc_feature (93)..(347): NCBI GI: 189188064 Blast Desc: conserved [Pyrenophora tritici-repentis Pt-1C-BFP] gi|187971977|gb|EDU39476.1| conserved [Pyrenophora tritici-repentis Pt-1C-BFP]
MGPTIEVTKAPRPPLGDASSRANQSPAKPTGKGKTSNAAGNKRKSQSSPEDDIAAYKQNLDHVISPNHFNLEEFIKNADIFDDSAGGFCADVRDDINKVLDRGIMNKTEFAKAIGVSVSSLNDFLKLDGKMAGSGSKSYRNAYVWFGQRKFAKLDMPEVNKRQKSNAGSPTTSKSNANTSSQQKKAEPKQKANAKNGVPDISDIYLDGEDDDDVEIYDTCDEMRKKINAHLRKSTGLTLAQFCRDLKTQLHSDDSPNITTPTLNRFLSHKGPISGAKSIVYYASYVYFEKIRLAQGKPKSVHRQNVEDRHPNGLDRTMDHTTTFITMAHERPYFDKYGSFSVGGGSW

SEQ ID NO: 1631 - DNA, 1475 bp, Muscodor strobelii
  misc_feature: SGI EST ID NO. CUFF.4276.0
  misc_feature: Variant of the nucleotide sequence at SEQ ID NO 1629
gcgctgtctagcgctgatccgaaactacgggcactggcacctttagcgggtgatttggcgccaaagcaccaggatatgagacgcgtctctccccattgcttgctttatggaagtcaacaaatctcagactttcaagaattcactttggctcagaaaataggaccactaaattctcaattatagtgtcaaactctccggaagcaaccatgggaccaaccattgaagtgaccaaggtaagataggagacagccccgtgtgcaacttggccaatgctaaacttgaaaggcaccgcgcccccctctaggtgacgccagcagtcgcgccaatcaatcgccagccaaacctaccggcaagggaaagacttccaatgctgcaggcaacaagcgaaagtcgcaaagtagtccggaagatgatatcgctgcttataagcaaaatctagaccacgttatcagccctaatcacttcaatctagaggagttcatcaaaaatgctgacatttttgacgactctgccgggggcttttgcgcggacgttcgtgatgatatcaacaaggttctcgatcgcggtatcatgaacaagactgagttcgcgaaggccattggcgtcagcgtctcgtccttgaacgacttcctcaagctagacggcaaaatggcagggtctggtagcaagtcctatcgcaatgcttatgtctggtttgggcaacgcaaatttgccaaactcgacatgccagaagttaataagcgacagaagagtaatgcaggtagccctactaccagcaaatccaacgccaatacatcttcgcagcagaagaaggcagagccaaaacagaaggcaaatgcaaagaacggagtgccagacataagcgacatttatctcgatggtgaagatgacgatgacgtcgaaatctacgatacatgcgatgagatgcgaaagaagatcaacgcgcacctacgaaagagcacaggcttgacgctagcgcaattctgcagagacctcaagacccaattacacagtgacgacagtccaaatatcacaactccaacgctcaacagattcctctcgcataaaggccctatcagcggcgctaagagcattgtctactatgcctcatatgtctatttcgaaaagatccgccttgcacagggtaaacccaagagtgttcatcgacagaatgtagaggaccgccatccgaatggcctggatcgtactatggatcataccactaccttcattactatggctcatgaaagaccctactttgataagtatggcagtttctccgtgggcggtggttcgtggtgaaggcagttgcgtcatgagcgaggtgcacacgaacaaaagtctgtacaatgcgtgtaattctaccttgtatttatttctacttaaggtgttaatcgggcccctgatttacccatgatacgttgctagctgcagtctggtaacagtatagtacaatatgtgacatttttgttatg

SEQ ID NO: 1632 - DNA, 726 bp, Muscodor strobelii
  misc_feature: SGI cDNA ID NO. 560151
  misc_feature: Elevated expression when VOC is produced
  misc_feature: Encodes the peptide sequence at SEQ ID NO 1633
atgggagtttcaaaacgaactgggcgtccgcgctcggtgttaatgaaacatgcacttgctctcgagaaacaagtcgcgagatcgcgaactacacgactgtatacgcacgagaagcttcttagtcaagaatcgctcttatcaatcgacaaagaaaccttcatatctttcgatatctccagcagatcaagttcgccgatcaatcgtccagaagtcaatatggtgaaggtgaaggctgggattaagaccgtggctaaagccattgagggattccgcgagaagaggaaggagaagcgtgaggaacgtgagcggaggctgtcaagggaacgaacagcaaacttgtcggatttcattggaagagacgttggaacgtggcgacccgaggtcccaattgatagatctctctcagagatccgatatcttcgagatcaaggtcaacaagtcactgagtctgagctccgaaaactagctgactccgagggtgtccgtctgaaccctccggcatcaggctcccagcgatttgtgggcgatgactatcactttcgtgatggtcttgtggctcgcttaggtggaccggatcacgatggatggtattttttcctgaccgcgaaggggtatcttatcaagtgtcgggactctctagggaagggcacgtggtctggagtgcctcctattgaagcatccagctggcaagaactggctcagcgatactggaatgggcgaagttaa

SEQ ID NO: 1633 - protein, 241 aa, Muscodor strobelii
  misc_feature: SGI Peptide ID NO. 560151
  misc_feature: Useful for introducing or modulating the production of volatile compounds
MGVSKRTGRPRSVLMKHALALEKQVARSRTTRLYTHEKLLSQESLLSIDKETFISFDISSRSSSPINRPEVNMVKVKAGIKTVAKAIEGFREKRKEKREERERRLSRERTANLSDFIGRDVGTWRPEVPIDRSLSEIRYLRDQGQQVTESELRKLADSEGVRLNPPASGSQRFVGDDYHFRDGLVARLGGPDHDGWYFFLTAKGYLIKCRDSLGKGTWSGVPPIEASSWQELAQRYWNGRS

SEQ ID NO: 1634 - DNA, 1405 bp, Muscodor strobelii
  misc_feature: SGI EST ID NO. CUFF.4267.0
  misc_feature: Variant of the nucleotide sequence at SEQ ID NO 1632
ttctacgtctctcgaagttgcacgcataacgtattgacttttatcctcggccatctttggctttcggcccgtcattgggaaccagtctttccaagcggtcgaacaaggaccagaaggatctattggaggccaaagagccttccagcattaatccctgcgatcaagactatagtgatgcttatttaaattcatctgtatcacgatttgctttggcgaaagtgatgagctactctgcaaagtttctgtcaaatttggcattccgttgaaactttctcaacccaccgaaggcgcactgcatgaaacgcaccactacgcaaacatcgatatatcacggcaagctcgtgatcacaccactcaaatagcgacaatagggaatcgaaaccatggcctgtattgtttcgtcttcgtcagtgttattgcacgccgacaagatgggagtttcaaaacgaactgggcgtccgcgctcggtgttaatgaaacatgcacttgctctcgagaaacaagtcgcgagatcgcgaactacacgactgtatacgcacgagaagcttcttagtcaagaatcgctcttatcaatcgacaaagaaaccttcatatctttcgatatctccagcagatcaagttcgccgatcaatcgtccagaagtcaatatggtgaaggtgaaggctgggattaagaccgtggctaaagccattgagggattccgcgagaagaggaaggagaagcgtgaggaacgtgagcggaggctgtcaagggaacgaacagcaaacttgtcggatttcattggaagagacgttggaacgtggcgacccgaggtcccaattgatagatctctctcagagatccgatatcttcgagatcaaggtcaacaagtcactgagtctgagctccgaaaactagctgactccgagggtgtccgtctgaaccctccggcatcaggctcccagcgatttgtgggcgatgactatcactttcgtgatggtcttgtggctcgcttaggtggaccggatcacgatggatggtattttttcctgaccgcgaaggggtatcttatcaagtgtcgggactctctagggaagggcacgtggtctggagtgcctcctattgaagcatccagctggcaagaactggctcagcgatactggaatgggcgaagttaaagcatcgagacggcaaggcagctaaagatccttcaacgcaagtcttcgtatgctgaaggttagatgggaggtctaagttatcacttcaccaactctcttcggtccccatatccctcttcattcctcgcatgcccggaacgctctttcttttgtctttcttattgttggattggtcggtactgtgcggtcaatgatgacatcggagtttagggagttgatatgtagcataatataaaaacactgctttt

SEQ ID NO: 1635 - DNA, 3177 bp, Muscodor strobelii
  misc_feature: SGI cDNA ID NO. 560152
  misc_feature: Encodes the peptide sequence at SEQ ID NO 1636
atggatgccgacgtcgtcaggagtcgcgtcctggccacgctctccgccgacgctaacatccgccgcaccgccgaactcgagctcaagcaggccgaggctcacccaggcttctgtgacgtcctcctcgacattctaagcaaagaagatgtcgacgctgtccgcctgtccactgtcatctacctcaagaacaagacaaaccgcgcctgggccaagacggaccactaccccgacgagcccctgatcgccgaagaagagaagcagcgcttccgcgaccgcatcctccccatccttgccgcttcgcgcggccccgtccggcaacagctcctgcagctgatccaacgcatcctccacttcgacttccccaacaaatggccgagttttatggacgtcactctgcagctcctccatgccaacgatccttcctccgttctcgctggtctgcagtgtctgctagtgacgtgccgcgcctatcggttcaagggctctcaggatgtcggcagaggcgagtttgacaaaatcatcgaggccagctttccccgactccagcagatctgcaacgagctcgtcaaccaagaaaatgatgaggccggagagatgctgcacattgctctcaaggcatacaaacacgccacttggcttgagctatcgagttatctgaggcagcacgatgtcaatatcggctggtgcaccactttcttgcagaccatatcgaagacgatacccgcgtcggctatggcggaagacgtcgacgagcgagaacgtcatcactggtggaaagctaagaagtgggcgtacttcaacctaaacaggctatggattcggcacggcaactctgctgctatcaccaccaaaaatgacgagacaaccaaatttgctaaggacttcgagaccaccattgcgccagagattatgaagcactatcttgccgagattgagaaatgggtctccaaaaccacctggttgagcaagccttgcctctcctacaccctggtcttcctggacgagtgtgtacgtcccaagtcgatgtggaaccagatgaagcagcacctgaatactctggtcacccacctggtctttccggtgctctgtctatcccccgaggacatcgagcggtttgaggacgagcctgaggagtatctgcaccggaaattgaatttttacgaggaggtctcagctccagacgttgctgctacgaacttcctcgtcacccttaccaaagccaggagaaaacagacctttgagctgcttcagtttgtgaatggtgtagtctatgagtatgagcaggcgcccaacgagagcaagaaccacattgccaaggaaggtgctttaaggatgataggcaccctcgcgcctgttcttctcgggaaaaagagccccatcgccgaccaggtggaatacttcctggtgcgatatgtcttccccgagttcaagagcacccaaggattcttgcgcgcccgcgcttgcgacacgattgagaagtttgagcagctgaacttcaacgatcagaataacctgcttgttatctatcgccacatcctggactgcatggctgatagcgatctccctgttcgggtcaccgcagcgttagctctgcaacccctgatcaggcatgacgcgatccggatcagcatgcaacaaagcattcctacgatcatgcagcagctactgaaattggccaatgagtgtgatattgacgcgcttgccaatgtcatggaggatttcgtcgaggtcttcgccaccgagctgacgccgtttgccgtcgctctaagtgagcagttacgagacacgtatctccgaatcgttcgcgagttactcgaaaagaacgagtctcgcaacgaggaggacggcgattacgacgattatctggatgacaagagcataacggcgttgggtgttctgcagaccatcggcactctcatccttacgctggaaagcaccccggatgtacttctgcacatcgaggcagttttgatgccggtaattcaaattactctacaaaacaaactttatgatctatacaatgaagtcttcgagatcattgatagctgcaccttcgctgccaagggcatctccccaactatgtggcaagccttcgagctcattcatgctacgttcaagtctggagccgagctttacctagaggacatgctgcctgctcttgacaacttcgttcagtatggcgcaccccaactgtgccagaagccggaatacgtcaatgccctgtactcgatggtctcggacatgtttgaggatcagaaggtcggcggtgttgatagaatctgcgcttgcaaattggctgaagctatgatgttgagtcttcgaggcaacattgatcaatctgtcactggcttcatcactatggctatgacgatcctgaacggccatgatgtcaaagtcaagtcttacaagatccatctcatggagatggtgatcaatgctgtttactataacccagttctcagcctccaggttctcgagaccaagggctggaccaataaattcttcagcctctggttcggaaatatggagcatttcagccgagttcacgacaagaagctttgcatcgtagccatcgccgctttgttaagcatcagccccgaccagatccctgctagcgtgtcgactggatggccgagacttttgtcgggggtaacatctcttttcaagactctacctgttgccatgaagaaccgcgaggatgctctgaaggacgatttccgatttggtgctgacagctacgactacgatgacgacgaggagtgggcggaagacgagacgaactggacggccgaggagggccccgaagaggagcagaccgatgctcgtgatgagagcactgcttacctcgaattcttgaacgaggaagctcagaagttcagtgccatgcagaatcagtatgctgatgctgattcggaagatgagctgggtgaggacagtgtgctcctcgaatcgcctttggacaaggtcgaaccgtaccagctcctacgaagtgttctaatgaaaatgcaacaagagaacccgcagttctataccagtgtcacctcccacctttctcaagacgagcaagatacgatacaatcagctttcaatcaggcagaggccaacgcccaggcacagatccaattagcagcccaagcagccgcccagaacccgcccgcgaatggcgccgcaagttag

SEQ ID NO: 1636 - protein, 1058 aa, Muscodor strobelii
  misc_feature: SGI Peptide ID NO. 560152
  misc_feature (24)..(99): Pfam Id: PF03810 Pfam Desc: Importin-beta N-terminal domain
  misc_feature (1)..(1035): NCBI GI: 261353434 Blast Desc: importin-7 [Verticillium albo-atrum VaMs.102]
  misc_feature (1)..(1057): NCBI GI: 116193775 Blast Desc: conserved [Chaetomium globosum CBS 148.51] gi|88182518|gb|EAQ89986.1| conserved [Chaetomium globosum CBS 148.51]
  misc_feature (1)..(1033): NCBI GI: 46130612 Blast Desc: FG08910.1 [Gibberella zeae PH-1]
  misc_feature (1)..(1033): NCBI GI: 256734249 Blast Desc: [Nectria haematococca mpVI 77-13-4]
  misc_feature (1)..(1025): NCBI GI: 171676159 Blast Desc: protein product [Podospora anserina] gi|170936145|emb|CAP60805.1| protein product [Podospora anserina]
  misc_feature (1)..(1029): NCBI GI: 85111827 Blast Desc: NCU01939 [Neurospora crassa OR74A] gi|28925890|gb|EAA34887.1| NCU01939 [Neurospora crassa OR74A]
  misc_feature (1)..(1033): NCBI GI: 39970921 Blast Desc: MGG_02927 [Magnaporthe grisea 70-15] gi|149210433|ref|XP_001522591.1| MGCH7_ch7g691 [Magnaporthe grisea 70-15] gi|86196646|gb|EAQ71284.1| MGCH7_ch7g691 grisea
  misc_feature (1)..(1030): NCBI GI: 156040894 Blast Desc: SS1G_11425 [Sclerotinia sclerotiorum 1980] gi|154695809|gb|EDN95547.1| SS1G_11425 [Sclerotinia sclerotiorum 1980]
  misc_feature (1)..(1031): NCBI GI: 255950280 Blast Desc: Pc22g20050 [Penicillium chrysogenum Wisconsin 54-1255] gi|211592924|emb|CAP99293.1| Pc22g20050 [Penicillium chrysogenum Wisconsin 54-1255]
  misc_feature (1)..(1031): NCBI GI: 67539672 Blast Desc: AN6006.2 [Aspergillus nidulans FGSC A4] gi|40738565|gb|EAA57755.1| AN6006.2 [Aspergillus nidulans FGSC A4] gi|259479811|tpe|CBF70375.1| TPA: nonsense-mediated mRNA FGSC
MDADVVRSRVLATLSADANIRRTAELELKQAEAHPGFCDVLLDILSKEDVDAVRLSTVIYLKNKTNRAWAKTDHYPDEPLIAEEEKQRFRDRILPILAASRGPVRQQLLQLIQRILHFDFPNKWPSFMDVTLQLLHANDPSSVLAGLQCLLVTCRAYRFKGSQDVGRGEFDKIIEASFPRLQQICNELVNQENDEAGEMLHIALKAYKHATWLELSSYLRQHDVNIGWCTTFLQTISKTIPASAMAEDVDERERHHWWKAKKWAYFNLNRLWIRHGNSAAITTKNDETTKFAKDFETTIAPEIMKHYLAEIEKWVSKTTWLSKPCLSYTLVFLDECVRPKSMWNQMKQHLNTLVTHLVFPVLCLSPEDIERFEDEPEEYLHRKLNFYEEVSAPDVAATNFLVTLTKARRKQTFELLQFVNGVVYEYEQAPNESKNHIAKEGALRMIGTLAPVLLGKKSPIADQVEYFLVRYVFPEFKSTQGFLRARACDTIEKFEQLNFNDQNNLLVIYRHILDCMADSDLPVRVTAALALQPLIRHDAIRISMQQSIPTIMQQLLKLANECDIDALANVMEDFVEVFATELTPFAVALSEQLRDTYLRIVRELLEKNESRNEEDGDYDDYLDDKSITALGVLQTIGTLILTLESTPDVLLHIEAVLMPVIQITLQNKLYDLYNEVFEIIDSCTFAAKGISPTMWQAFELIHATFKSGAELYLEDMLPALDNFVQYGAPQLCQKPEYVNALYSMVSDMFEDQKVGGVDRICACKLAEAMMLSLRGNIDQSVTGFITMAMTILNGHDVKVKSYKIHLMEMVINAVYYNPVLSLQVLETKGWTNKFFSLWFGNMEHFSRVHDKKLCIVAIAALLSISPDQIPASVSTGWPRLLSGVTSLFKTLPVAMKNREDALKDDFRFGADSYDYDDDEEWAEDETNWTAEEGPEEEQTDARDESTAYLEFLNEEAQKFSAMQNQYADADSEDELGEDSVLLESPLDKVEPYQLLRSVLMKMQQENPQFYTSVTSHLSQDEQDTIQSAFNQAEANAQAQIQLAAQAAAQNPPANGAAS

SEQ ID NO: 1637 - DNA, 4280 bp, Muscodor strobelii
  misc_feature: SGI EST ID NO. CUFF.4622.0
  misc_feature: Variant of the nucleotide sequence at SEQ ID NO 1635
ccacgacagtgtacacagtattttggctcggagtagctgagccctctgtcatcctgtgcatcgcgaatgccactgcattccaccgcttgttaatgattacatactactaccttccgcccaccctcgacgacacgccgctctgtattgtatcgcgcaccgcagcgcgcacttgtctcgcatcgcatcgctagctgctggctgctatctattgtctattgttggtgacagtctggaccgaagggcgttgccctgatgcattttcacgttcatccttaataattctcccacatccaagccctagcatctgcatctgcatctgcgtctgccctccaggcactcgcactcgccctcgcccggtcctcgcctccgtctccccgtgaacccgtataataatacgtcagtcttaccaaccgcacatcggcgcactcttgcgtgaccccgtatctcgcccgccatggatgccgacgtcgtcaggagtcgcgtcctggccacgctctccgccgacgctaacatccgccgcaccgccgaactcgagctcaagcaggccgaggctcacccaggcttctgtgacgtcctcctcgacattctaagcaaagaagatgtcgacgctgtccgcctgtccactgtcatctacctcaagaacaagacaaaccgcgcctgggccaagacggaccactaccccgacgagcccctgatcgccgaagaagagaagcagcgcttccgcgaccgcatcctccccatccttgccgcttcgcgcggccccgtccggcaacagctcctgcagctgatccaacgcatcctccacttcgacttccccaacaaatggccgagttttatggacgtcactctgcagctcctccatgccaacgatccttcctccgttctcgctggtctgcagtgtctgctagtgacgtgccgcgcctatcggttcaagggctctcaggatgtcggcagaggcgagtttgacaaaatcatcgaggccagctttccccgactccagcagatctgcaacgagctcgtcaaccaagaaaatgatgaggccggagagatgctgcacattgctctcaaggcatacaaacacgccacttgggtatgtgatgtgaccccagcaaggtgcagcaagggtaattgggagagagttagttgctgacagaatcttagcttgagctatcgagttatctgaggcagcacgatgtcaatatcggctggtgcaccactttcttgcagaccatatcgaagacgatacccgcgtcggctatggcggaagacgtcgacgagcgagaacgtcatcactggtggaaagctaagaagtgggcgtacttcaacctaaacaggctatggattcggcacggcaactctgctgctatcaccaccaaaaatgacgagacaaccaaatttgctaaggacttcgagaccaccattgcgccagagattatgaagcactatcttgccgagattgagaaatgggtctccaaaaccacctggttgagcaagccttgcctctcctacaccctggtcttcctggacgagtgtgtacgtcccaagtcgatgtggaaccagatgaagcagcacctgaatactctggtcacccacctggtctttccggtgctctgtctatcccccgaggacatcgagcggtttgaggacgagcctgaggagtatctgcaccggaaattgaatttttacgaggaggtctcagctccagacgttgctgctacgaacttcctcgtcacccttaccaaagccaggagaaaacagacctttgagctgcttcagtttgtgaatggtgtagtctatgagtatgagcaggcgcccaacgagagcaagaaccacattgccaaggaaggtgctttaaggatgataggcaccctcgcgcctgttcttctcgggaaaaagagccccatcgccgaccaggtggaatacttcctggtgcgatatgtcttccccgagttcaagagcacccaaggattcttgcgcgcccgcgcttgcgacacgattgagaagtttgagcagctgaacttcaacgatcagaataacctgcttgttatctatcgccacatcctggactgcatggctgatagcgatctccctgttcgggtcaccgcagcgttagctctgcaacccctgatcaggcatgacgcgatccggatcagcatgcaacaaagcattcctacgatcatgcagcagctactgaaattggccaatgagtgtgatattgacgcgcttgccaatgtcatggaggatttcgtcgaggtcttcgccaccgagctgacgccgtttgccgtcgctctaagtgagcagttacgagacacgtatctccgaatcgttcgcgagttactcgaaaagaacgagtctcgcaacgaggaggacggcgattacgacgattatctggatgacaagagcataacggcgttgggtgttctgcagaccatcggcactctcatccttacgctggaaagcaccccggatgtacttctgcacatcgaggcagttttgatgccggtaattcaaattactctacaaaacaaactttatgatctatacaatgaagtcttcgagatcattgatagctgcaccttcgctgccaagggcatctccccaactatgtggcaagccttcgagctcattcatgctacgttcaagtctggagccgagctttacctagaggacatgctgcctgctcttgacaacttcgttcagtatggcgcaccccaactgtgccagaagccggaatacgtcaatgccctgtactcgatggtctcggacatgtttgaggatcagaaggtcggcggtgttgatagaatctgcgcttgcaaattggctgaagctatgatgttgagtcttcgaggcaacattgatcaatctgtcactggcttcatcactatggctatgacgatcctgaacggccatgatgtcaaagtcaagtcttacaagatccatctcatggagatggtgatcaatgctgtttactataacccagttctcagcctccaggttctcgagaccaagggctggaccaataaattcttcagcctctggttcggaaatatggagcatttcagccgagttcacgacaagaagctttgcatcgtagccatcgccgctttgttaagcatcagccccgaccagatccctgctagcgtgtcgactggatggccgagacttttgtcgggggtaacatctcttttcaagactctacctgttgccatgaagaaccgcgaggatgctctgaaggacgatttccgatttggtgctgacagctacgactacgatgacgacgaggagtgggcggaagacgagacgaactggacggccgaggagggccccgaagaggagcagaccgatgctcgtgatgagagcactgcttacctcgaattcttgaacgaggaagctcagaagttcagtgccatgcagaatcagtatgctgatgctgattcggaagatgagctgggtgaggacagtgtgctcctcgaatcgcctttggacaaggtcgaaccgtaccagctcctacgaagtgttctaatgaaaatgcaacaagagaacccgcagttctataccagtgtcacctcccacctttctcaagacgagcaagatacgatacaatcagctttcaatcaggcagaggccaacgcccaggcacagatccaattagcagcccaagcagccgcccagaacccgcccgcgaatggcgccgcaagttagagacagacaacgctacagccggatcgcgactcataccctggagcgcttcgtataagtacagccgccgatccccgtgcgcgagagtggcggaaatctacgcgccggatgagatgaccggctctttttgcaagaaaatgaggtggcgagacagatggtcggtaaagattagtgctgttgggtattgtgcatatgatgacaaaagatgccacgaatcatgttactggcgtcggtgctgaccaggtgttgtatcggaataacctggcttcaagcctcctttttcttgctttacctttgcctttgtttggtagctttttagagaggcaagggcaaggcagatcgaagtccttgatggagttagaactggagcatcccatgtttgcttagttgagagtatcactgcgaactacctaccattagtaaaccccaccctctggcatacccgcttatgggatagtcagctagccaaatattagataaaaagaaaaacgaaaatgaatatgagaaatggaagtttagagacttccttattaagttacactacggcgtctttcgtctttgtgctgcgcaagttatattag

SEQ ID NO: 1638 - DNA, 2523 bp, Muscodor strobelii
  misc_feature: SGI cDNA ID NO. 560153
  misc_feature: Encodes the peptide sequence at SEQ ID NO 1639
atgacatctctgaagatcgataaaacatctattcctgatcttacaggcaagatcgcagtgattacaggcggcgcgtctggaatcggtctagaagcagtcaaagttatgcttgagaagggcgctaccgttcatattctggatagatacgagccaagcagtgagataggaaattggagggaatggccgaacacatactatcaccaatgcaatgtcactaattggacccagctgcgtgatgtgatgatgtctatagggccctttcacggtattgagtactatttgtttcatatcaaaggcctagcgacgatggcttttgccaatgcagggctcgcggagaaggttgactatttcgccgacacatttgacaaagacggaaacttagagctcccagacaactcactcttagaagtgaacttttggggagtcttgaacactgtcaagctagcttggagtatcatgcggcgtaacagcatcagcggctctattgtcatcacggccagtacaacaggctatgctcctgaagcagcattacctgtgtattcggcgggaaaattcgccctggttggtctcgtgcgttccctacgacacaatattgtcatggataatatcacgatcaacgctgtagcaccggcaggtactctgacccccttaatcgccgatcagccagtccaagctctcatagatgccggagtaacgtttggtaaacccgacgtggccggtctggcgctcgtattttccgcaactgcgatgcaagacagacgggttgaagcgtatggccgggaccgtgaagcagatatatggaagacagagcggtggaacggacgggtcatctacgtactaggggatacctatacagaactagaagaaaccaccgctgatctgcggccgttctggtttggacagcataatcataaacacacgcggtttcaacaagccgcaaccgacataagacaagttttcgcgacccccatcatcctcaatgttaggactctcccatttcgcatcctgacagccattgcaatgcaaatccgacctaagattaatgcaatcgcggcctgcaatgcactgcagagcgttctaccaggacagatcttctggcctggcagcagtgaacactacgccgcgtccgtaaagttaatctggtccacttcctgccacctcaatccagagtgcgtgttcgagccggaggatgtgagtgctctggccaccggcataaaagtcatcaagcagcatgcggctagattttctgtgagaggaggtggacatatgcccaacccaggatctcaatccatggatgacggtattatgatatccatgtccaactttaatagcaagtcgcttagccaagatcattctgtcgctagcattggagccgggcagctttggggcgaagtctacgactggctggcacaacataatcttgcggtaaatggcggtcgctatcccacagtgggagttggaggcgtattactcggaggtggcatggggtacttttctgggtcgcgcggatggtctatcgacgacgttgttgactgggaagtcgtcttgggcaatggcagcatcattgaagtgtctacagcacccggcagttcctatgcagatctcgcttgggcgttgaaaggtggacacaacaatttcggcatcatttcgcgcttcgacatgcgcacgtttccagcggatgccgcgtatgggggactcgtagtatacaatgccgatgccgaagagacgttttataacgcccttgtcgactatatgaggcctgaaggaggatccgcaattccaaacgctgccatcaacgcagtttccacgttgacgtctaccaatggccaatggagctgtgggttcttcaatgtgtatatgcactcgggtcccgactcgaatcctccagcgtttgagaatttcacgcaaatcccaaaggagcatgtggtaatagacaatacacaacttcaccctgcctggactgctgtccccaacagtatgggagcagtgggaacacatggttcgagacaactcttttgggctatgacactgaaggcagatcatcgtacaattggcattgcgaatcgcacattctactctggcgttacggaagagctcaaggacgtcaggggactgtctcttgcaatatcctaccagtctctgaccagcgtatggcttcagtcttcgaaagacaaggggggcaatatgatgggcctcgagccagaccgggatggagggtgttttgcggtcatcctgataccaacttggagcgatgcagaggacgatgaagctgtccttgaatttgtgcagaagtccgccagagccatagaaattcaggcgaagaaacttgaactattcaattcatttatatacctgaacgatgccgccattcaacagagaccatttgaaagttatgggcaagggagcttggcccgtttgatatcgatccaggccaagtacgattcagatggattcatccgggactcgcttcaacatgggtttccactgcagtcaaatgatgataagcatcataatgaattatga

SEQ ID NO: 1639 - protein, 840 aa, Muscodor strobelii
  misc_feature: SGI Peptide ID NO. 560153
  misc_feature (17)..(199): Pfam Id: PF00106 Pfam Desc: short chain dehydrogenase
  misc_feature (389)..(525): Pfam Id: PF01565 Pfam Desc: FAD binding domain
  misc_feature (17)..(41): Pfam Id: PF00106 Pfam Desc: short chain dehydrogenase
  misc_feature (351)..(829): NCBI GI: 121712465 Blast Desc: FAD binding domain protein [Aspergillus clavatus NRRL 1] gi|119401996|gb|EAW12418.1| FAD binding domain protein [Aspergillus clavatus NRRL 1]
  misc_feature (335)..(829): NCBI GI: 259485759 Blast Desc: TPA: FAD-binding oxidoreductase, (AFU_orthologue; AFUA_3G03300) [Aspergillus nidulans FGSC A4]
  misc_feature (335)..(814): NCBI GI: 67525633 Blast Desc: AN3274.2 [Aspergillus nidulans FGSC A4] gi|40744062|gb|EAA63242.1| AN3274.2 [Aspergillus nidulans FGSC A4]
  misc_feature (353)..(829): NCBI GI: 145231464 Blast Desc: An02g00740 [Aspergillus niger] gi|134056114|emb|CAK96289.1| protein product [Aspergillus niger]
  misc_feature (352)..(827): NCBI GI: 255931835 Blast Desc: Pc12g06320 [Penicillium chrysogenum Wisconsin 54-1255] gi|211582093|emb|CAP80259.1| Pc12g06320 [Penicillium chrysogenum Wisconsin 54-1255]
  misc_feature (350)..(829): NCBI GI: 154296896 Blast Desc: BC1G_12537 [Botryotinia fuckeliana B05.10] gi|150843191|gb|EDN18384.1| BC1G_12537 [Botryotinia fuckeliana B05.10]
  misc_feature (325)..(832): NCBI GI: 67523863 Blast Desc: AN2387.2 [Aspergillus nidulans FGSC A4] gi|40745342|gb|EAA64498.1| AN2387.2 [Aspergillus nidulans FGSC A4] gi|259487790|tpe|CBF86739.1| TPA: conserved [Aspergillus FGSC
  misc_feature (1)..(317): NCBI GI: 255931837 Blast Desc: Pc12g06330 [Penicillium chrysogenum Wisconsin 54-1255] gi|211582094|emb|CAP80260.1| Pc12g06330 [Penicillium chrysogenum Wisconsin 54-1255]
  misc_feature (343)..(829): NCBI GI: 261357103 Blast Desc: FAD binding domain-containing protein [Verticillium albo-atrum VaMs.102]
  misc_feature (353)..(836): NCBI GI: 225557314 Blast Desc: FAD binding domain-containing protein [Ajellomyces capsulatus G186AR]
MTSLKIDKTSIPDLTGKIAVITGGASGIGLEAVKVMLEKGATVHILDRYEPSSEIGNWREWPNTYYHQCNVTNWTQLRDVMMSIGPFHGIEYYLFHIKGLATMAFANAGLAEKVDYFADTFDKDGNLELPDNSLLEVNFWGVLNTVKLAWSIMRRNSISGSIVITASTTGYAPEAALPVYSAGKFALVGLVRSLRHNIVMDNITINAVAPAGTLTPLIADQPVQALIDAGVTFGKPDVAGLALVFSATAMQDRRVEAYGRDREADIWKTERWNGRVIYVLGDTYTELEETTADLRPFWFGQHNHKHTRFQQAATDIRQVFATPIILNVRTLPFRILTAIAMQIRPKINAIAACNALQSVLPGQIFWPGSSEHYAASVKLIWSTSCHLNPECVFEPEDVSALATGIKVIKQHAARFSVRGGGHMPNPGSQSMDDGIMISMSNFNSKSLSQDHSVASIGAGQLWGEVYDWLAQHNLAVNGGRYPTVGVGGVLLGGGMGYFSGSRGWSIDDVVDWEVVLGNGSIIEVSTAPGSSYADLAWALKGGHNNFGIISRFDMRTFPADAAYGGLVVYNADAEETFYNALVDYMRPEGGSAIPNAAINAVSTLTSTNGQWSCGFFNVYMHSGPDSNPPAFENFTQIPKEHVVIDNTQLHPAWTAVPNSMGAVGTHGSRQLFWAMTLKADHRTIGIANRTFYSGVTEELKDVRGLSLAISYQSLTSVWLQSSKDKGGNMMGLEPDRDGGCFAVILIPTWSDAEDDEAVLEFVQKSARAIEIQAKKLELFNSFIYLNDAAIQQRPFESYGQGSLARLISIQAKYDSDGFIRDSLQHGFPLQSNDDKHHNEL

SEQ ID NO: 1640 - DNA, 3090 bp, Muscodor strobelii
  misc_feature: SGI cDNA ID NO. 560154
  misc_feature: Reduced expression when VOC is produced
  misc_feature: Encodes the peptide sequence at SEQ ID NO 1641
atgttacgcaatgccgtcaaaggcgctgccaagagggccgtcaccgagctatcccagtatcccaagcctggcgagaagctgcacggcttcacgctgctgagaacgaaacatgtccccgagctggagttgactgctctgcatttaaaacacgacaagaccggcgccgactatctccatatcgcccgcgacgatagcaataatgtcttctctatcggcttcaagacgaatccgccggacgataccggtgttcctcacatcctcgagcacaccactctctgcggcagcgagaagtatcccatccgcgaccccttcttcaagatgctgccgcgtacattgtccaatttcatgaacgccttcaccgcgtccgatcataccttctaccccttcgccaccacaaacgcccaagacttccagaatttgatgtccgtctacctggatgccactctgcatccgctactgaagaacaccgatttcacacaggagggatggcgcataggacccgagaatccacgagtcgccgaggcaggtggcgaggtcaagccagaggatagtaagcttgtcttcaagggtgttgtatataacgagatgaaaggccagatgtcggatgcagggtatctctactacatccgtttccaggacgagatcttcccgtccatcaataactccggcggcgatccccagaagattaccgacttgacctacgaacagctcaagaagttccatgctgagcattatcacccaagcaatgccaagcttatgacctacggagatatgcctctggccgatcacctgagggaggtcgatgcgcaaatgagcgcgtttgacaagatccaggccgacattgaccacaagcaacctctcgacttaagtgatggaccccaaactataaaggtggcgggccccgtagatccgctggccgaccccgacaagcagttcaagacttcagtgtcatggattgcaggtgacaccagcgatgtactggagtctttctcgattgctctgctgtcatctctgctcatggatggttatggctcgcctctgtacaagggactcatcgagagtggattgggaacagatttcagccccaacgctggatacgatagttcggcggcaactggaattttctcggtcggtcttactggcgtcagcgaggtcaatgtagaaaaggtcaaggagacaattcatcagatcctgaaagatgtgcgcgggaaaggattcgaccagggcaagatcgaaggttaccttcaccaactcgagcttggtttgaaacataagacagccaatttcggcatgtctgtgatccagcggttgaaaggcaaatggttctcaggaaccgatccgttcgagtcgttggcttggaatgacaccgtcaacgcgttcgaagctaagcttgcagagggcgggtaccttgaaagtcttatggataagtacttcctgaatgacaatactctgacatttacaatggcgccatcggaatcgttcggttcggatcttgccaaagaagaggaagagcgcctcgcctctaagatcgcacttgcagcgaaagaagcaggtggtgcagacaaagctcagaaattccttgagcagcgagagctcgaattgctagcggagcaaggcaagtccaacacacaggatctcagctgtctcccaactgtctatgtgaaggatatcccaaggacaaaggagcctgtcgtcgtaagagacgaagtcgtcgatggaacgaaaattcagtggcgagaggcacctaccaacggcctcacttacttccgcgctatcaatacgtttgaaaatctgcccgatgagcttcgcgagctcattcccctcttcacagattccatcatgcgccttggcactaaggacatgacaatggaacaactcgaagatatgatcaagctcaagacaggtggcatttctgttggctacatgtcgacaccctctcctacagacttccagcaggcctccgaagggctcgttctcaggggtatggcgcttgatcgcaacgttccagacatgttcgatctcctgcgcaagctcattctcgagacaaattttgacagcccggaggcagcgttgcgcatcagacaattgctgcatgcctcagcggatggtgtcgtaaatgatattgcatcatcaggtcatgcttatgccagacgttatgctgagtctggactcactcgtgatgcatacctaacagagcaagttagtggcctgtcccaggtcaagctcatcacttcgttagctggaagacccgaatcagatcagctagccgatgttattgaaaagttgaagcagatccaagcattcgccatcgctggcgacaatatgcgcacagcccttacgtgtgggtctgacgtttcccaagcaaactcatctgccctcacgcagttcatggcatctcgtgccagccaatcaatcactttccccactcctccctcgcagaattcggctcgtgacatcaaagctttcttcccactgccatatcaggtctactatggatcgctggctctaccaacagtctcatacacttctccccatggtgcgcctctacagatattagcacagctccttacgcacaagcacctgcaccacgagattcgtgagaagggtggtgcatacggcggcggagcttacatgaaggggctcgaaggcttgttcggattctactcataccgagatcccaacccccagaacacgctctccattatgcgaaacgcaggtcgttgggccgtagacaaggagtggtcggaccaagatctcgaagaagccaagatttcagtcttccagggcgtcgatgcaccgaagtccgtaaacacggagggtatgctccgattcgtatctggcatcacagatgagatgcagcagacaagacgtgagcagctgcttgacgtgaccagggaccaggtccgtgaagtggcgcagaagtacatcgtcgatgcgctcgcctggaagaaagagcaaactgcgttcttggggacgaagcaagactgggtcgatgagtcttggaaggttaaggaaattggcgttgaggttgcccctgaggtcgtcgaagatgctgctccggaggcttcgcatcacggagctgcgtcgtag

SEQ ID NO: 1641 - protein, 1029 aa, Muscodor strobelii
  misc_feature: SGI Peptide ID NO. 560154
  misc_feature (231)..(418): Pfam Id: PF05193 Pfam Desc: Peptidase M16 inactive domain
  misc_feature (757)..(926): Pfam Id: PF05193 Pfam Desc: Peptidase M16 inactive domain
  misc_feature (488)..(746): Pfam Id: PF08367 Pfam Desc: Peptidase M16C associated
  misc_feature (833)..(926): Pfam Id: PF05193 Pfam Desc: Peptidase M16 inactive domain
  misc_feature (1)..(1008): NCBI GI: 171692173 Blast Desc: protein product [Podospora anserina] gi|170946035|emb|CAP72836.1| protein product [Podospora anserina]
  misc_feature (1)..(1011): NCBI GI: 46123049 Blast Desc: FG05902.1 [Gibberella zeae PH-1] gi|115311699|sp|Q4IA56.1|CYM1_GIBZE RecName: Full=Mitochondrial presequence protease; Flags: Precursor
  misc_feature (1)..(1008): NCBI GI: 85099301 Blast Desc: NCU01272 [Neurospora crassa OR74A] gi|74616343|sp|Q7S7C0.1|CYM1_NEUCR RecName: Full=Mitochondrial presequence protease gi|28922271|gb|EAA31514.1| NCU01272 crassa 1
  misc_feature (1)..(1014): NCBI GI: 261355501 Blast Desc: mitochondrial presequence protease [Verticillium albo-atrum VaMs.102]
  misc_feature (1)..(1008): NCBI GI: 116206600 Blast Desc: CHGG_02593 [Chaetomium globosum CBS 148.51] gi|88183190|gb|EAQ90658.1| CHGG_02593 [Chaetomium globosum CBS 148.51]
  misc_feature (13)..(1008): NCBI GI: 189193743 Blast Desc: mitochondrial presequence protease [Pyrenophora tritici-repentis Pt-1C-BFP] gi|187978774|gb|EDU45400.1| mitochondrial presequence protease [Pyrenophora tritici-repentis
  misc_feature (13)..(1019): NCBI GI: 169601340 Blast Desc: SNOG_03534 [Phaeosphaeria nodorum SN15] gi|160705910|gb|EAT88739.2| SNOG_03534 [Phaeosphaeria nodorum SN15]
  misc_feature (141)..(1017): NCBI GI: 156040377 Blast Desc: SS1G_12205 [Sclerotinia sclerotiorum 1980] gi|154696261|gb|EDN95999.1| SS1G_12205 [Sclerotinia sclerotiorum 1980]
  misc_feature (10)..(1022): NCBI GI: 169773635 Blast Desc: [Aspergillus oryzae RIB40] gi|115311698|sp|Q2UGN1.1|CYM1_ASPOR RecName: Full=Mitochondrial presequence protease gi|83769147|dbj|BAE59284.1| protein product
  misc_feature (3)..(1011): NCBI GI: 255936297 Blast Desc: Pc13g07450 [Penicillium chrysogenum Wisconsin 54-1255] gi|211583795|emb|CAP91814.1| Pc13g07450 [Penicillium chrysogenum Wisconsin 54-1255]
  misc_feature: Useful for introducing or modulating the production of volatile compounds
MLRNAVKGAAKRAVTELSQYPKPGEKLHGFTLLRTKHVPELELTALHLKHDKTGADYLHIARDDSNNVFSIGFKTNPPDDTGVPHILEHTTLCGSEKYPIRDPFFKMLPRTLSNFMNAFTASDHTFYPFATTNAQDFQNLMSVYLDATLHPLLKNTDFTQEGWRIGPENPRVAEAGGEVKPEDSKLVFKGVVYNEMKGQMSDAGYLYYIRFQDEIFPSINNSGGDPQKITDLTYEQLKKFHAEHYHPSNAKLMTYGDMPLADHLREVDAQMSAFDKIQADIDHKQPLDLSDGPQTIKVAGPVDPLADPDKQFKTSVSWIAGDTSDVLESFSIALLSSLLMDGYGSPLYKGLIESGLGTDFSPNAGYDSSAATGIFSVGLTGVSEVNVEKVKETIHQILKDVRGKGFDQGKIEGYLHQLELGLKHKTANFGMSVIQRLKGKWFSGTDPFESLAWNDTVNAFEAKLAEGGYLESLMDKYFLNDNTLTFTMAPSESFGSDLAKEEEERLASKIALAAKEAGGADKAQKFLEQRELELLAEQGKSNTQDLSCLPTVYVKDIPRTKEPVVVRDEVVDGTKIQWREAPTNGLTYFRAINTFENLPDELRELIPLFTDSIMRLGTKDMTMEQLEDMIKLKTGGISVGYMSTPSPTDFQQASEGLVLRGMALDRNVPDMFDLLRKLILETNFDSPEAALRIRQLLHASADGVVNDIASSGHAYARRYAESGLTRDAYLTEQVSGLSQVKLITSLAGRPESDQLADVIEKLKQIQAFAIAGDNMRTALTCGSDVSQANSSALTQFMASRASQSITFPTPPSQNSARDIKAFFPLPYQVYYGSLALPTVSYTSPHGAPLQILAQLLTHKHLHHEIREKGGAYGGGAYMKGLEGLFGFYSYRDPNPQNTLSIMRNAGRWAVDKEWSDQDLEEAKISVFQGVDAPKSVNTEGMLRFVSGITDEMQQTRREQLLDVTRDQVREVAQKYIVDALAWKKEQTAFLGTKQDWVDESWKVKEIGVEVAPEVVEDAAPEASHHGAAS

SEQ ID NO: 1642 - DNA, 3414 bp, Muscodor strobelii
  misc_feature: SGI EST ID NO. CUFF.4300.0
  misc_feature: Variant of the nucleotide sequence at SEQ ID NO 1640
tccggaccgatttccttgcggatgatcgactattctgttagttttcatagacatttgttgtacagtacttgttgagattttcttcgttccttcatttgcatcgcaagaggaaaaactagagtctagatctggtctcatgacctattaaactatacccaaactccatcccatcacttcgaactcctcttctacgataccatgttacgcaatgccgtcaaaggcgctgccaagagggccgtcaccgagctatcccagtatcccaagcctggcgagaagctgcacggcttcacgctgctgagaacgaaacatgtccccgagctggagttgactgctctgcatttaaaacacgacaagaccggcgccgactatctccatatcgcccgcgacgatagcaataatgtcttctctatcggcttcaagacgaatccgccggacgataccggtgttcctcacatcctcgagcacaccactctctgcggcagcgagaagtatcccatccgcgaccccttcttcaagatgctgccgcgtacattgtccaatttcatgaacgccttcaccgcgtccgatcataccttctaccccttcgccaccacaaacgcccaagacttccagaatttgatgtccgtctacctggatgccactctgcatccgctactgaagaacaccgatttcacacaggagggatggcgcataggacccgagaatccacgagtcgccgaggcaggtggcgaggtcaagccagaggatagtaagcttgtcttcaagggtgttgtatataacgagatgaaaggccagatgtcggatgcagggtatctctactacatccgtttccaggacgagatcttcccgtccatcaataactccggcggcgatccccagaagattaccgacttgacctacgaacagctcaagaagttccatgctgagcattatcacccaagcaatgccaagcttatgacctacggagatatgcctctggccgatcacctgagggaggtcgatgcgcaaatgagcgcgtttgacaagatccaggccgacattgaccacaagcaacctctcgacttaagtgatggaccccaaactataaaggtggcgggccccgtagatccgctggccgaccccgacaagcagttcaagacttcagtgtcatggattgcaggtgacaccagcgatgtactggagtctttctcgattgctctgctgtcatctctgctcatggatggttatggctcgcctctgtacaagggactcatcgagagtggattgggaacagatttcagccccaacgctggatacgatagttcggcggcaactggaattttctcggtcggtcttactggcgtcagcgaggtcaatgtagaaaaggtcaaggagacaattcatcagatcctgaaagatgtgcgcgggaaaggattcgaccagggcaagatcgaaggttaccttcaccaactcgagcttggtttgaaacataagacagccaatttcggcatgtctgtgatccagcggttgaaaggcaaatggttctcaggaaccgatccgttcgagtcgttggcttggaatgacaccgtcaacgcgttcgaagctaagcttgcagagggcgggtaccttgaaagtcttatggataagtacttcctgaatgacaatactctgacatttacaatggcgccatcggaatcgttcggttcggatcttgccaaagaagaggaagagcgcctcgcctctaagatcgcacttgcagcgaaagaagcaggtggtgcagacaaagctcagaaattccttgagcagcgagagctcgaattgctagcggagcaaggcaagtccaacacacaggatctcagctgtctcccaactgtctatgtgaaggatatcccaaggacaaaggagcctgtcgtcgtaagagacgaagtcgtcgatggaacgaaaattcagtggcgagaggcacctaccaacggcctcacttacttccgcgctatcaatacgtttgaaaatctgcccgatgagcttcgcgagctcattcccctcttcacagattccatcatgcgccttggcactaaggacatgacaatggaacaactcgaagatatgatcaagctcaagacaggtggcatttctgttggctacatgtcgacaccctctcctacagacttccagcaggcctccgaagggctcgttctcaggggtatggcgcttgatcgcaacgttccagacatgttcgatctcctgcgcaagctcattctcgagacaaattttgacagcccggaggcagcgttgcgcatcagacaattgctgcatgcctcagcggatggtgtcgtaaatgatattgcatcatcaggtcatgcttatgccagacgttatgctgagtctggactcactcgtgatgcatacctaacagagcaagttagtggcctgtcccaggtcaagctcatcacttcgttagctggaagacccgaatcagatcagctagccgatgttattgaaaagttgaagcagatccaagcattcgccatcgctggcgacaatatgcgcacagcccttacgtgtgggtctgacgtttcccaagcaaactcatctgccctcacgcagttcatggcatctcgtgccagccaatcaatcactttccccactcctccctcgcagaattcggctcgtgacatcaaagctttcttcccactgccatatcaggtctactatggatcgctggctctaccaacagtctcatacacttctccccatggtgcgcctctacagatattagcacagctccttacgcacaagcacctgcaccacgagattcgtgagaagggtggtgcatacggcggcggagcttacatgaaggggctcgaaggcttgttcggattctactcataccgagatcccaacccccagaacacgctctccattatgcgaaacgcaggtcgttgggccgtagacaaggagtggtcggaccaagatctcgaagaagccaagatttcagtcttccagggcgtcgatgcaccgaagtccgtaaacacggagggtatgctccgattcgtatctggcatcacagatgagatgcagcagacaagacgtgagcagctgcttgacgtgaccagggaccaggtccgtgaagtggcgcagaagtacatcgtcgatgcgctcgcctggaagaaagagcaaactgcgttcttggggacgaagcaagactgggtcgatgagtcttggaaggttaaggaaattggcgttgaggttgcccctgaggtcgtcgaagatgctgctccggaggcttcgcatcacggagctgcgtcgtagcggttgtaattctaatgtgttgtacaaaggacatcaacatgacatcgatgcgctgtatactgatatctgctacttgtatatagaactgtaccataatcccatgcatatacctgctcagtcgcccat

SEQ ID NO: 1643 - DNA, 1431 bp, Muscodor strobelii
  misc_feature: SGI cDNA ID NO. 560155
  misc_feature: Encodes the peptide sequence at SEQ ID NO 1644
atggcaactactgcgcatcgtgtaccctctgcgaccccagcccctctcgcttccaccccgaacggcacatccgcacacgcacacgacgacgcatctctcaccaacggccaccaccatgctcccgtagccgacccgcgacctgccccgacgcccaatcctgctctcgcctccaacgtcgccgggaagaaggcgaaagcaaagaaagccatggcctcgtccgaagcatccaagctggtcgccgcccgcatatcccagctcgagaccgacaatgccaccgagcgggaacaggaggctgagatcgatcgagaggtccgcaaggccaaccgcgaacttaatcatacaatgaataagatgaacgatatggataaaattgacttactcactaaacgatcatccgagctattcgcaaacctcaaacgcctcgaacgcgaaaatatcaagaacaagaaacgcgcagatcagctgcagaaggagaaggactccagccgcaccgatctgagcaaacaggtcggactgaaggagaagctagaaaagctctgtcgtgagctgcaaaaggagaacaacaagctcaagaacgaacaccgaaccctgaacgatgcccacgatcgcctcaagtcctcttccgacgagcgcttcaagaaggtgctggaaacgttagagggttaccaagaggagaaagacaacccgcgcaagcaggtagttcccattaaggccgacgaactattcaggaatcgcttcaagtctttcatcgatcagtacgagctacgagatcttcacttccactccgccatgcgaacgaaagagatcgaggtccaatggaatatggcccgatacgagcagcagaagaagacggccgaggccgaggcaacgcgtgcgcgccagcttaacaatcaggtgctcacctttaccaagaccgagaccgagctgaggaaccaactcaacgtctacgtcgagaagttcaagcaggtcgaggataccctgaataacagtaacgatctgtttttaacgtttcgcaaggagatggaagacatgtccaagaagacgaagaagctggagaaggagaatgagtcatatcgccgcaaggatacagcgttgaatcagaacatcctgaagatggccgaggagcggaacaagaacctgcaggatcttgatgacatcaagaagaagaacgacaagctgaagagcatcattaaccaaatgcagcagcaaggtcgtggcatacccgcaggcatgcaaggggccgtctccaccgaccgcgctcatggcgcggaagacttggacgaaggcatcgacgatagcgagtgcgagtatgaaggagaagaaggtctcagcgatgaaggcgagttcgatgacgacaccgaggaggaagtgcccaacgtgcctggggcttttgggcctgaacgcccccctgctataaatggtcatcgctag

SEQ ID NO: 1644 - protein, 476 aa, Muscodor strobelii
  misc_feature: SGI Peptide ID NO. 560155
  misc_feature (3)..(417): NCBI GI: 164426347 Blast Desc: NCU01273 [Neurospora crassa OR74A] gi|157071299|gb|EAA31515.2| NCU01273 [Neurospora crassa OR74A]
  misc_feature (3)..(417): NCBI GI: 38566812 Blast Desc: related to muscle-derived protein (neurite-outgrowth-promoting) [Neurospora crassa]
  misc_feature (5)..(422): NCBI GI: 171692175 Blast Desc: protein product [Podospora anserina] gi|170946036|emb|CAP72837.1| protein product [Podospora anserina]
  misc_feature (9)..(457): NCBI GI: 156040375 Blast Desc: SS1G_12204 [Sclerotinia sclerotiorum 1980] gi|154696260|gb|EDN95998.1| SS1G_12204 [Sclerotinia sclerotiorum 1980]
  misc_feature (2)..(422): NCBI GI: 116206598 Blast Desc: CHGG_02592 [Chaetomium globosum CBS 148.51] gi|88183189|gb|EAQ90657.1| CHGG_02592 [Chaetomium globosum CBS 148.51]
  misc_feature (70)..(428): NCBI GI: 46123047 Blast Desc: FG05901.1 [Gibberella zeae PH-1]
  misc_feature (70)..(456): NCBI GI: 256731541 Blast Desc: [Nectria haematococca mpVI 77-13-4]
  misc_feature (63)..(468): NCBI GI: 145606250 Blast Desc: MGG_11907 [Magnaporthe grisea 70-15] gi|145013958|gb|EDJ98599.1| MGG_11907 [Magnaporthe grisea 70-15]
  misc_feature (47)..(475): NCBI GI: 261355500 Blast Desc: conserved [Verticillium albo-atrum VaMs.102]
  misc_feature (22)..(406): NCBI GI: 240107736 Blast Desc: alpha-taxilin, [Coccidioides posadasii C735 delta SOWgp]
MATTAHRVPSATPAPLASTPNGTSAHAHDDASLTNGHHHAPVADPRPAPTPNPALASNVAGKKAKAKKAMASSEASKLVAARISQLETDNATEREQEAEIDREVRKANRELNHTMNKMNDMDKIDLLTKRSSELFANLKRLERENIKNKKRADQLQKEKDSSRTDLSKQVGLKEKLEKLCRELQKENNKLKNEHRTLNDAHDRLKSSSDERFKKVLETLEGYQEEKDNPRKQVVPIKADELFRNRFKSFIDQYELRDLHFHSAMRTKEIEVQWNMARYEQQKKTAEAEATRARQLNNQVLTFTKTETELRNQLNVYVEKFKQVEDTLNNSNDLFLTFRKEMEDMSKKTKKLEKENESYRRKDTALNQNILKMAEERNKNLQDLDDIKKKNDKLKSIINQMQQQGRGIPAGMQGAVSTDRAHGAEDLDEGIDDSECEYEGEEGLSDEGEFDDDTEEEVPNVPGAFGPERPPAINGHR

SEQ ID NO: 1645 - DNA, 2549 bp, Muscodor strobelii
  misc_feature: SGI EST ID NO. CUFF.4507.0
  misc_feature: Variant of the nucleotide sequence at SEQ ID NO 1643
ggcatgctgtgtggccctcgattaggccatcacatagctgcacttggtggtatccaactaagcagtattattcgacaaagcagtagctgtgatctcgccttcatcttgtcgacacagcaaacttctcttgagtcgccgaatgaagcaccgtgaccaccaactcccaactccccatacgcgccgacaacttctccaatcgctactccttttgctcaccccacgcctgcgcttcctctgtctcatagacaacctgtgcccgccgttcatcaccccaaatgctgttatctagctcgaggtaagcagcgcgtgcagccaatggggaggcaggtggtgacgactgatgatggatgcatccgcaaggttgctgtcgctgccactccccaccgccactgaccccccgtaactgacctcactaatcaaattgcaaatttggacaggcaacaacttacttcctagctctaccatggcaactactgcgcatcgtgtaccctctgcgaccccagcccctctcgcttccaccccgaacggcacatccgcacacgcacacgacgacgcatctctcaccaacggccaccaccatgctcccgtagccgacccgcgacctgccccgacgcccaatcctgctctcgcctccaacgtcgccgggaagaaggcgaaagcaaagaaagccatggcctcgtccgaagcatccaagctggtcgccgcccgcatatcccagctcgagaccgacaatgccaccgagcgggaacaggaggctgagatcgatcgagaggtccgcaaggccaaccgcgaacttaatcatacaatgaataagatgaacgatatggataaaattgacttactcactaaacgatcatccgagctattcgcaaacctcaaacgcctcgaacgcgaaaatatcaagaacaagaaacgcgcagatcagctgcagaaggagaaggactccagccgcaccgatctgagcaaacaggtcggactgaaggagaagctagaaaagctctgtcgtgagctgcaaaaggagaacaacaagctcaagaacgaacaccgaaccctgaacgatgcccacgatcgcctcaagtcctcttccgacgagcgcttcaagaaggtgctggaaacgttagagggttaccaagaggagaaagacaacccgcgcaagcaggtagttcccattaaggccgacgaactattcaggaatcgcttcaagtctttcatcgatcagtacgagctacgagatcttcacttccactccgccatgcgaacgaaagagatcgaggtccaatggaatatggcccgatacgagcagcagaagaagacggccgaggccgaggcaacgcgtgcgcgccagcttaacaatcaggtgctcacctttaccaagaccgagaccgagctgaggaaccaactcaacgtctacgtcgagaagttcaagcaggagatggaagacatgtccaagaagacgaagaagctggagaaggagaatgagtcatatcgccgcaaggatacagcgttgaatcagaacatcctgaagatggccgaggagcggaacaagaacctgcaggatcttgatgacatcaagaagaagaacgacaagctgaagagcatcattaaccaaatgcagcagcaaggtcgtggcatacccgcaggcatgcaaggggccgtctccaccgaccgcgctcatggcgcggaagacttggacgaaggcatcgacgatagcgagtgcgagtatgaaggagaagaaggtctcagcgatgaaggcgagttcgatgacgacaccgaggaggaagtgcccaacgtgcctggggcttttgggcctgaacgcccccctgctataaatggtcatcgctaggaagacggtacacctgaacagcaatggagatgcgaacaggaagacgaacgatcgctgcgctggtatacgcgctggattgcctgggtatccgagtggagaggctgcttgctcggcttctgaagaacaacgaacaactctgacaactcttgacatacatcatatatctgtcatcggccagtattcattactacagcaactctactccagcatacctccccaagctgctttttgatgcattttcgacgggttgtggctgctaggaaatcacaacagtgcgcttggctactgcatgcatgtgggacgtccccttttctgtatcgtaaccagcagagttttcgtctgaagtgcataggtacagatacaagatacattgtagcagtacgttgaattgatgctttctgtgaaacatgattggtgtctttttcttcattgtcgtgcgagggtccggatccatttctaatctggtcagccctcacgccgacggctggacagcgcgccgaacacgatctccgtcacataacaacgagaccatgccctggcgcctatcggtacagtatgtatagaaaggggagttagctctagcaagccgattatctatagcgaaatgaggatctctagccaaccaatcatctcagactggccggtcacccagcccaacgcgatgtgcccatgctgctggtaggttgatgttagaatcctgttgcag

SEQ ID NO: 1646 - DNA, 1488 bp, Muscodor strobelii
  misc_feature: SGI cDNA ID NO. 560156
  misc_feature: Reduced expression when VOC is produced
  misc_feature: Encodes the peptide sequence at SEQ ID NO 1647
atggcaactactgcgcatcgtgtaccctctgcgaccccagcccctctcgcttccaccccgaacggcacatccgcacacgcacacgacgacgcatctctcaccaacggccaccaccatgctcccgtagccgacccgcgacctgccccgacgcccaatcctgctctcgcctccaacgtcgccgggaagaaggcgaaagcaaagaaagccatggcctcgtccgaagcatccaagctggtcgccgcccgcatatcccagctcgagaccgacaatgccaccgagcgggaacaggaggctgagatcgatcgagaggtccgcaaggccaaccgcgaacttaatcatacaatgaataagatgaacgatatggataaaattgacttactcactaaacgatcatccgagctattcgcaaacctcaaacgcctcgaacgcgaaaatatcaagaacaagaaacgcgcagatcagctgcagaaggagaaggactccagccgcaccgatctgagcaaacaggtcggactgaaggagaagctagaaaagctctgtcgtgagctgcaaaaggagaacaacaagctcaagaacgaacaccgaaccctgaacgatgcccacgatcgcctcaagtcctcttccgacgagcgcttcaagaaggtgctggaaacgttagagggttaccaagaggagaaagacaacccgcgcaagcaggtagttcccattaaggccgacgaactattcaggaatcgcttcaagtctttcatcgatcagtacgagctacgagatcttcacttccactccgccatgcgaacgaaagagatcgaggtccaatggaatatggcccgatacgagcagcagaagaagacggccgaggccgaggcaacgcgtgcgcgccagcttaacaatcaggtgctcacctttaccaagaccgagaccgagctgaggaaccaactcaacgtctacgtcgagaagttcaagcaggtatgtatcctgtttctttcacttgcacgccccacgcaggcgttaacaagcgacgaggtcgaggataccctgaataacagtaacgatctgtttttaacgtttcgcaaggagatggaagacatgtccaagaagacgaagaagctggagaaggagaatgagtcatatcgccgcaaggatacagcgttgaatcagaacatcctgaagatggccgaggagcggaacaagaacctgcaggatcttgatgacatcaagaagaagaacgacaagctgaagagcatcattaaccaaatgcagcagcaaggtcgtggcatacccgcaggcatgcaaggggccgtctccaccgaccgcgctcatggcgcggaagacttggacgaaggcatcgacgatagcgagtgcgagtatgaaggagaagaaggtctcagcgatgaaggcgagttcgatgacgacaccgaggaggaagtgcccaacgtgcctggggcttttgggcctgaacgcccccctgctataaatggtcatcgctag

SEQ ID NO: 1647 - protein, 495 aa, Muscodor strobelii
  misc_feature: SGI Peptide ID NO. 560156
  misc_feature (3)..(436): NCBI GI: 164426347 Blast Desc: NCU01273 [Neurospora crassa OR74A] gi|157071299|gb|EAA31515.2| NCU01273 [Neurospora crassa OR74A]
  misc_feature (3)..(436): NCBI GI: 38566812 Blast Desc: related to muscle-derived protein (neurite-outgrowth-promoting) [Neurospora crassa]
  misc_feature (2)..(441): NCBI GI: 116206598 Blast Desc: CHGG_02592 [Chaetomium globosum CBS 148.51] gi|88183189|gb|EAQ90657.1| CHGG_02592 [Chaetomium globosum CBS 148.51]
  misc_feature (5)..(441): NCBI GI: 171692175 Blast Desc: protein product [Podospora anserina] gi|170946036|emb|CAP72837.1| protein product [Podospora anserina]
  misc_feature (9)..(476): NCBI GI: 156040375 Blast Desc: SS1G_12204 [Sclerotinia sclerotiorum 1980] gi|154696260|gb|EDN95998.1| SS1G_12204 [Sclerotinia sclerotiorum 1980]
  misc_feature (70)..(447): NCBI GI: 46123047 Blast Desc: FG05901.1 [Gibberella zeae PH-1]
  misc_feature (70)..(475): NCBI GI: 256731541 Blast Desc: [Nectria haematococca mpVI 77-13-4]
  misc_feature (63)..(487): NCBI GI: 145606250 Blast Desc: MGG_11907 [Magnaporthe grisea 70-15] gi|145013958|gb|EDJ98599.1| MGG_11907 [Magnaporthe grisea 70-15]
  misc_feature (47)..(494): NCBI GI: 261355500 Blast Desc: conserved [Verticillium albo-atrum VaMs.102]
  misc_feature (22)..(425): NCBI GI: 240107736 Blast Desc: alpha-taxilin, [Coccidioides posadasii C735 delta SOWgp]
  misc_feature: Useful for introducing or modulating the production of volatile compounds
MATTAHRVPSATPAPLASTPNGTSAHAHDDASLTNGHHHAPVADPRPAPTPNPALASNVAGKKAKAKKAMASSEASKLVAARISQLETDNATEREQEAEIDREVRKANRELNHTMNKMNDMDKIDLLTKRSSELFANLKRLERENIKNKKRADQLQKEKDSSRTDLSKQVGLKEKLEKLCRELQKENNKLKNEHRTLNDAHDRLKSSSDERFKKVLETLEGYQEEKDNPRKQVVPIKADELFRNRFKSFIDQYELRDLHFHSAMRTKEIEVQWNMARYEQQKKTAEAEATRARQLNNQVLTFTKTETELRNQLNVYVEKFKQVCILFLSLARPTQALTSDEVEDTLNNSNDLFLTFRKEMEDMSKKTKKLEKENESYRRKDTALNQNILKMAEERNKNLQDLDDIKKKNDKLKSIINQMQQQGRGIPAGMQGAVSTDRAHGAEDLDEGIDDSECEYEGEEGLSDEGEFDDDTEEEVPNVPGAFGPERPPAINGHR

SEQ ID NO: 1648 - DNA, 2549 bp, Muscodor strobelii; identical to SEQ ID NO: 1645
  misc_feature: SGI EST ID NO. CUFF.4507.0
  misc_feature: Variant of the nucleotide sequence at SEQ ID NO 1646

SEQ ID NO: 1649 - DNA, 1353 bp, Muscodor strobelii
  misc_feature: SGI cDNA ID NO. 560157
  misc_feature: Reduced expression when VOC is produced
  misc_feature: Encodes the peptide sequence at SEQ ID NO 1650
atgcctaaaggcaaatggatcgacaagaagacagcccagcacttcacgctggtgcaccgtccgcaaaatgaccctctcatccatgacaccgaagctccctccatggtcctcaacccaacccaaaacctcaacgcctccaaatccaagaaattagacgatctcgcctcagagctcggcaccgatgaagtctcccacatgcgcgccaacgagggcgaggctgcagcttacggcgtctactatgatgacaccgagtacgactacatgcagcacttacgcgatctcggtggttcagggtcgggagatgtatacttcgtcgaagccaagacggagcaaaaaaagaacaagggcaagggaaaacaaagtctcgaagtagccctcaaacaacttgatctcgaagccgaagagcgaaagaaaggggaactcttcgatgacaccttcctcccgtccaaaaatctccaacacgtcacctaccaagcccaacaagaagtccccgatgccatcggcgggtttcagccagacatggacccgcggctccgtgaagtgctagaagcgctcgaagacgaagagtacgtcgacggagaagacgacgatttcttcaaagagctcgccaaagacgggcgagagctcgacgacgcagaattcgatgacatgttcgaagacgaaggctgggaaacagacgatacggccaaacccacacgctcacaacacggtgacgatgaagcaccagcgcttgtccccgtaaggccagtaggagacgacgaagcgggcgaagaagcagacacgctccaaaacgaaaactggctagaagacttcgcgcgattcaaaaagggccagaaaacaggcggtcgtgcaccgaatcccgcacattccgaattagcgtctactatacttaccacgacgaccaacggcgggcgccgcaaaaagcggaaaggagcgcttacgtctcaatcaggcttctccatgacgtcttcggcattagttcgcacagaacaactcaccctgctagacgagcgatttgaagtcctcgagcagaaacactataacccgtccggtgacttcgacgatttccccgaggacgaggactcacaaagtatagcgccaagtatgatgagcacggcgtcttcagttacggggacgacgaggggagatttcgacgggatcttagatgagtttttgggagagtatagcatgcatgggaagagacgggtgaagaagggtcagtgggggaatggggttgagcaatttgatgagtttagacgagagctggggccagcgaagataccagctaagtatggggttaagcagaaaggcactgctgccgctctgagctttggagcgcctaaagggaagtaa

SEQ ID NO: 1650 - protein, 450 aa, Muscodor strobelii
  misc_feature: SGI Peptide ID NO. 560157
  misc_feature (8)..(427): Pfam Id: PF04180 Pfam Desc: Low temperature viability protein
  misc_feature (1)..(427): NCBI GI: 85099140 Blast Desc: NCU04165 [Neurospora crassa OR74A] gi|16944646|emb|CAC28727.2| related to low-temperature viability protein LTV1 [Neurospora crassa] gi|28922242|gb|EAA31487.1|
  misc_feature (1)..(429): NCBI GI: 154302973 Blast Desc: BC1G_09230 [Botryotinia fuckeliana B05.10] gi|150855154|gb|EDN30346.1| BC1G_09230 [Botryotinia fuckeliana B05.10]
  misc_feature (1)..(430): NCBI GI: 39972445 Blast Desc: MGG_07524 [Magnaporthe grisea 70-15] gi|145016721|gb|EDK01151.1| MGG_07524 [Magnaporthe grisea 70-15]
  misc_feature (1)..(427): NCBI GI: 46125635 Blast Desc: FG07195.1 [Gibberella zeae PH-1]
  misc_feature (8)..(437): NCBI GI: 171694007 Blast Desc: protein product [Podospora anserina] gi|170946952|emb|CAP73756.1| protein product [Podospora anserina]
  misc_feature (1)..(429): NCBI GI: 156048184 Blast Desc: SS1G_08823 [Sclerotinia sclerotiorum 1980] gi|154693220|gb|EDN92958.1| SS1G_08823 [Sclerotinia sclerotiorum 1980]
  misc_feature (35)..(431): NCBI GI: 116197997 Blast Desc: CHGG_07154 [Chaetomium globosum CBS 148.51] gi|88178433|gb|EAQ85901.1| CHGG_07154 [Chaetomium globosum CBS 148.51]
  misc_feature (1)..(430): NCBI GI: 189189226 Blast Desc: low-temperature viability protein ltv1 [Pyrenophora tritici-repentis Pt-1C-BFP] gi|187972558|gb|EDU40057.1| low-temperature viability protein ltv1 [Pyrenophora Pt-1C-BFP]
  misc_feature (2)..(430): NCBI GI: 169765111 Blast Desc: [Aspergillus oryzae RIB40] gi|238503596|ref|XP_002383031.1| low-temperature viability protein ltv1 [Aspergillus flavus NRRL3357] protein product ltv1
  misc_feature (1)..(427): NCBI GI: 169612159 Blast Desc: SNOG_09196 [Phaeosphaeria nodorum SN15] gi|111062268|gb|EAT83388.1| SNOG_09196 [Phaeosphaeria nodorum SN15]
  misc_feature: Useful for introducing or modulating the production of volatile compounds
MPKGKWIDKKTAQHFTLVHRPQNDPLIHDTEAPSMVLNPTQNLNASKSKKLDDLASELGTDEVSHMRANEGEAAAYGVYYDDTEYDYMQHLRDLGGSGSGDVYFVEAKTEQKKNKGKGKQSLEVALKQLDLEAEERKKGELFDDTFLPSKNLQHVTYQAQQEVPDAIGGFQPDMDPRLREVLEALEDEEYVDGEDDDFFKELAKDGRELDDAEFDDMFEDEGWETDDTAKPTRSQHGDDEAPALVPVRPVGDDEAGEEADTLQNENWLEDFARFKKGQKTGGRAPNPAHSELASTILTTTTNGGRRKKRKGALTSQSGFSMTSSALVRTEQLTLLDERFEVLEQKHYNPSGDFDDFPEDEDSQSIAPSMMSTASSVTGTTRGDFDGILDEFLGEYSMHGKRRVKKGQWGNGVEQFDEFRRELGPAKIPAKYGVKQKGTAAALSFGAPKGK

SEQ ID NO: 1651 - DNA, 4407 bp, Muscodor strobelii
  misc_feature: SGI EST ID NO. CUFF.4793.1
  misc_feature: Variant of the nucleotide sequence at SEQ ID NO 1649
attgtctccaaggagatgtttgctccgcagcctaacaggtcacgttatggtctttcacagttgctcagtaataaaggtggtcatgacgaccttgaatgcaattccctcatttctctttgtcactcgatgaactcctttgttaatgcatcccttggtcacccgcccagatccttctctttgccatgctcctttgacacatacctaacccagtgatacaacaaacgtgctcatttaatctagcatcttgttgtcgactcgctttccttttcccttaccccttcctttgaagtgcttctttcccgactcgagctgaatttcgcttggatcgagccccgtttctgccgcgatcattgctctctgcttacgtgcactcaactgcttgttgaaagcctgttctttgccttgttcagtgtacttgtgattgaaaggcatggtcaggtgacctgcatttcttgaagattgtgcaaaaaatgacttgtcgatactctgtgatttggctccagtcggtagggctagcatctcagtgtctactgtagactcgccatcgcctatttcgagggcttgcattgctgcctgcaatgcagcacgtcgttttgcaggtacgtggttcgcgtcgtacagctcttgattgaactcgctgccgtcgccgtcgtagttcgggggtggctccacgtagagaagcttcccgtttacgtaatccttaaggacaagtctggctgcacgggactcgtctggcagacccacaccctgcgttttgaatcctcttgccttggcataagcagcaaggagttcactggccgtggggattcctgttccgccttcctccagaggtctcgtcttgatctgtatgccatagattgcctcgaggaatggttgtggtatccggtgtgtgataagacccgctgggccaatgaattctctcatctggtcgattggcaacacgccgttacagacaagctctgccttggtagtcgcgaagttcgggaacaccaaacctgggcaatcgcaaagcatgactttgtcactgagatgaattgtttgaaaatgcttcgttttaccaggagtcgcagagaccgagactttcttggcaccgacgagcgcgttgatggtggaagactttccaacgttgggatatccgactagcccgatctccaacctcttgtcggggtctatatcagttagcatgatgaactttcttgtatgtgtgtggtggtcactcactatcggggtcataggcatgtctcaggaagatgtcttccaactcctcgactgtcaatatcctcgtgtcatcatcaacaatgcccggaactggtgctgcaagacccgcgccctcatcgtcatcgctctcctcatcgctcgtgccgtcctccaagtcatcttcttcgtcaatctcgggtttttgctttagtctctgtattgtcttcgggttggagcttgtgccatgcaacggctcctccggctcaagagcacgcgcctcgatcatctcttttgccaaatgtgcagagaagaagcggtatgagatgcgcttctctttgaagtattttgaccatgcctttctctgcgcagttgtcatcatatctgccttgttaactaatagcagattctttttggcggggttgacgtccttgacatagtgttcgagatcctccgaacggaacatgagggggttgcgggcgtctacgatctgaacaaccaaatcggagcgctcaataacacgccaaagctgtctccagacctctaaatttctctcgaagggtgtcataagcagatcattgtattcctgcaattcagcaagacctcttcgccataagaggaaggcttctctttccctctggtccagctcttcaggcgttgtgttgctgtcccatttcggccgtctgggtactgtcaacttccctctgtgctgcttgaacttgctctggacgttgcgctcctctgtggcggtaaggaggtacggatttcgctggtcggtgtgtataatcttgacgttattcaacttttctgccgtgaagtctgttccggctagttcggccgtggcaagaaactcatcgagagcaccctgctctgtgacggatcgcatcttgacccatgctgcctctttcttgtcatttgtgatatactatgtttcaccattagctgaaattctagataaattagtgtggaacatgcacacctcttctccggtggcatgattgatacgggtgacgcccgaacccttcttacggtcggcgcctttgcctttaccaaaacgatcattcatcaacgagttgccgagccccacggccgtcttggacttggcgagaggcatcttgatgccgttcttgacttcgtaattttctcgaatttgtcggaatgtgatgttgtgtgcttaaagttaaccagggaaatgcacttttgcttttgctttcgttcatgtgaaagagatgcgaaacgaagaggaatgtggttgatgtaggattacagagcaagcatggctgtcgcattgcgggtagcacgcggcaagcagtaggtgcgggctgattaatggaggggcaaatggaatttttgcgtcacctttaggcgataatgcccgataaggcagtaactcaggaaccccaccaaacttttcaaaggaaagggcgaccatagagaccctgacttttattgggccgaagacaaccttgatgtcgccaacattctctcgtttactattcacttgaggttgacatttccgacaattctttcgtcgccgaactagacatccaacgtctaagcgcgtagtcgcacgcatcattcgacaaaatgcctaaaggcaaatggatcgacaagaagacagcccagcacttcacgctggtgcaccgtccgcaaaatgaccctctcatccatgacaccgaagctccctccatggtcctcaacccaacccaaaacctcaacgcctccaaatccaagaaattagacgatctcgcctcagagctcggcaccgatgaagtctcccacatgcgcgccaacgagggcgaggctgcagcttacggcgtctactatgatgacaccgagtacgactacatgcagcacttacgcgatctcggtggttcagggtcgggagatgtatacttcgtcgaagccaagacggagcaaaaaaagaacaagggcaagggaaaacaaagtctcgaagtagccctcaaacaacttgatctcgaagccgaagagcgaaagaaaggggaactcttcgatgacaccttcctcccgtccaaaaatctccaacacgtcacctaccaagcccaacaagaagtccccgatgccatcggcgggtttcagccagacatggacccgcggctccgtgaagtgctagaagcgctcgaagacgaagagtacgtcgacggagaagacgacgatttcttcaaagagctcgccaaagacgggcgagagctcgacgacgcagaattcgatgacatgttcgaagacgaaggctgggaaacagacgatacggccaaacccacacgctcacaacacggtgacgatgaagcaccagcgcttgtccccgtaaggccagtaggagacgacgaagcgggcgaagaagcagacacgctccaaaacgaaaactggctagaagacttcgcgcgattcaaaaagggccagaaaacaggcggtcgtgcaccgaatcccgcacattccgaattagcgtctactatacttaccacgacgaccaacggcgggcgccgcaaaaagcggaaaggagcgcttacgtctcaatcaggcttctccatgacgtcttcggcattagttcgcacagaacaactcaccctgctagacgagcgatttgaagtcctcgagcagaaacactataacccgtccggtgacttcgacgatttccccgaggacgaggactcacaaagtatagcgccaagtatgatgagcacggcgtcttcagttacggggacgacgaggggagatttcgacgggatcttagatgagtttttgggagagtatagcatgcatgggaagagacgggtgaagaagggtcagtgggggaatggggttgagcaatttgatgagtttagacgagagctggggccagcgaagataccagctaagtatggggttaagcagaaaggcactgctgccgctctgagctttggagcgcctaaagggaagtaatggggagatatgtaggtgggtagagagggctaggaattgaggatgagataccctttgtgatgacacttgccctgtaatgtcgtgatggaagttctgaacttgaatatggtgaatgtgactgcgtcttcgtgggatctggctcatttgaaatttacgaattatgagaacctcataagtgggactcggtgtcagcatatttagaatatggttgcgaaaagtaattgttacgatagtgatgggacggaaaggtgaagtcccaaggtcaaaaacgat

SEQ ID NO: 1652 - DNA, 1971 bp, Muscodor strobelii
  misc_feature: SGI cDNA ID NO. 560158
  misc_feature: Encodes the peptide sequence at SEQ ID NO 1653
atgcctctcgccaagtccaagacggccgtggggctcggcaactcgttgatgaatgatcgttttggtaaaggcaaaggcgccgaccgtaagaagggttcgggcgtcacccgtatcaatcatgccaccggagaagagtatatcacaaatgacaagaaagaggcagcatgggtcaagatgcgatccgtcacagagcagggtgctctcgatgagtttcttgccacggccgaactagccggaacagacttcacggcagaaaagttgaataacgtcaagattatacacaccgaccagcgaaatccgtacctccttaccgccacagaggagcgcaacgtccagagcaagttcaagcagcacagagggaagttgacagtacccagacggccgaaatgggacagcaacacaacgcctgaagagctggaccagagggaaagagaagccttcctcttatggcgaagaggtcttgctgaattgcaggaatacaatgatctgcttatgacacccttcgagagaaatttagaggtctggagacagctttggcgtgttattgagcgctccgatttggttgttcagatcgtagacgcccgcaaccccctcatgttccgttcggaggatctcgaacactatgtcaaggacgtcaaccccgccaaaaagaatctgctattagttaacaaggcagatatgatgacaactgcgcagagaaaggcatggtcaaaatacttcaaagagaagcgcatctcataccgcttcttctctgcacatttggcaaaagagatgatcgaggcgcgtgctcttgagccggaggagccgttgcatggcacaagctccaacccgaagacaatacagagactaaagcaaaaacccgagattgacgaagaagatgacttggaggacggcacgagcgatgaggagagcgatgacgatgagggcgcgggtcttgcagcaccagttccgggcattgttgatgatgacacgaggatattgacagtcgaggagttggaagacatcttcctgagacatgcctatgaccccgataaccccgacaagaggttggagatcgggctagtcggatatcccaacgttggaaagtcttccaccatcaacgcgctcgtcggtgccaagaaagtctcggtctctgcgactcctggtaaaacgaagcattttcaaacaattcatctcagtgacaaagtcatgctttgcgattgcccaggtttggtgttcccgaacttcgcgactaccaaggcagagcttgtctgtaacggcgtgttgccaatcgaccagatgagagaattcattggcccagcgggtcttatcacacaccggataccacaaccattcctcgaggcaatctatggcatacagatcaagacgagacctctggaggaaggcggaacaggaatccccacggccagtgaactccttgctgcttatgccaaggcaagaggattcaaaacgcagggtgtgggtctgccagacgagtcccgtgcagccagacttgtccttaaggattacgtaaacgggaagcttctctacgtggagccacccccgaactacgacggcgacggcagcgagttcaatcaagagctgtacgacgcgaaccacgtacctgcaaaacgacgtgctgcattgcaggcagcaatgcaagccctcgaaataggcgatggcgagtctacagtagacactgagatgctagccctaccgactggagccaaatcacagagtatcgacaagtcattttttgcacaatcttcaagaaatgcaggtcacctgaccatgcctttcaatcacaagtacactgaacaaggcaaagaacaggctttcaacaagcagttgagtgcacgtaagcagagagcaatgatcgcggcagaaacggggctcgatccaagcgaaattcagctcgagtcgggaaagaagcacttcaaaggaaggggtaagggaaaaggaaagcgagtcgacaacaagatgctagattaa

SEQ ID NO: 1653 - protein, 656 aa, Muscodor strobelii
  misc_feature: SGI Peptide ID NO. 560158
  misc_feature (350)..(425): Pfam Id: PF01926 Pfam Desc: GTPase of function
  misc_feature (350)..(408): Pfam Id: PF01926 Pfam Desc: GTPase of function
  misc_feature (1)..(651): NCBI GI: 261351651 Blast Desc: nucleolar GTP-binding protein [Verticillium albo-atrum VaMs.102]
  misc_feature (1)..(656): NCBI GI: 171694009 Blast Desc: protein product [Podospora anserina] gi|170946953|emb|CAP73757.1| protein product [Podospora anserina]
  misc_feature (1)..(639): NCBI GI: 156048182 Blast Desc: SS1G_08822 [Sclerotinia sclerotiorum 1980] gi|154693219|gb|EDN92957.1| SS1G_08822 [Sclerotinia sclerotiorum 1980]
  misc_feature (1)..(651): NCBI GI: 226280566 Blast Desc: large-subunit GTPase [Paracoccidioides brasiliensis Pb01]
  misc_feature (1)..(651): NCBI GI: 225678353 Blast Desc: conserved [Paracoccidioides brasiliensis Pb03]
  misc_feature (1)..(651): NCBI GI: 226290592 Blast Desc: large-subunit GTPase [Paracoccidioides brasiliensis Pb18]
  misc_feature (1)..(653): NCBI GI: 261198425 Blast Desc: ribosome biogenesis GTPase Lsg1 [Ajellomyces dermatitidis SLH14081] gi|239594766|gb|EEQ77347.1| ribosome biogenesis GTPase Lsg1 [Ajellomyces dermatitidis SLH14081] GTPase
  misc_feature (1)..(653): NCBI GI: 242793530 Blast Desc: ribosome biogenesis GTPase Lsg1, [Talaromyces stipitatus ATCC 10500] gi|218718770|gb|EED18190.1| ribosome biogenesis GTPase Lsg1, [Talaromyces stipitatus ATCC 10500]
  misc_feature (1)..(653): NCBI GI: 212535602 Blast Desc: ribosome biogenesis GTPase Lsg1, [Penicillium marneffei ATCC 18224] gi|210070356|gb|EEA24446.1| ribosome biogenesis GTPase Lsg1, [Penicillium marneffei ATCC 18224]
  misc_feature (1)..(639): NCBI GI: 238503594 Blast Desc: ribosome biogenesis GTPase Lsg1, [Aspergillus flavus NRRL3357] gi|220690501|gb|EED46850.1| ribosome biogenesis GTPase Lsg1, [Aspergillus flavus NRRL3357]
MPLAKSKTAVGLGNSLMNDRFGKGKGADRKKGSGVTRINHATGEEYITNDKKEAAWVKMRSVTEQGALDEFLATAELAGTDFTAEKLNNVKIIHTDQRNPYLLTATEERNVQSKFKQHRGKLTVPRRPKWDSNTTPEELDQREREAFLLWRRGLAELQEYNDLLMTPFERNLEVWRQLWRVIERSDLVVQIVDARNPLMFRSEDLEHYVKDVNPAKKNLLLVNKADMMTTAQRKAWSKYFKEKRISYRFFSAHLAKEMIEARALEPEEPLHGTSSNPKTIQRLKQKPEIDEEDDLEDGTSDEESDDDEGAGLAAPVPGIVDDDTRILTVEELEDIFLRHAYDPDNPDKRLEIGLVGYPNVGKSSTINALVGAKKVSVSATPGKTKHFQTIHLSDKVMLCDCPGLVFPNFATTKAELVCNGVLPIDQMREFIGPAGLITHRIPQPFLEAIYGIQIKTRPLEEGGTGIPTASELLAAYAKARGFKTQGVGLPDESRAARLVLKDYVNGKLLYVEPPPNYDGDGSEFNQELYDANHVPAKRRAALQAAMQALEIGDGESTVDTEMLALPTGAKSQSIDKSFFAQSSRNAGHLTMPFNHKYTEQGKEQAFNKQLSARKQRAMIAAETGLDPSEIQLESGKKHFKGRGKGKGKRVDNKMLD

SEQ ID NO: 1654 - DNA, 4367 bp, Muscodor strobelii
  misc_feature: SGI EST ID NO. CUFF.4792.0
  misc_feature: Variant of the nucleotide sequence at SEQ ID NO 1652
atcgtttttgaccttgggacttcacctttccgtcccatcactatcgtaacaattacttttcgcaaccatattctaaatatgctgacaccgagtcccacttatgaggttctcataattcgtaaatttcaaatgagccagatcccacgaagacgcagtcacattcaccatattcaagttcagaacttccatcacgacattacagggcaagtgtcatcacaaagggtatctcatcctcaattcctagccctctctacccacctacatatctccccattacttccctttaggcgctccaaagctcagagcggcagcagtgcctttctgcttaaccccatacttagctggtatcttcgctggccccagctctcgtctaaactcatcaaattgctcaaccccattcccccactgacccttcttcacccgtctcttcccatgcatgctatactctcccaaaaactcatctaagatcccgtcgaaatctcccctcgtcgtccccgtaactgaagacgccgtgctcatcatacttggcgctatactttgtgagtcctcgtcctcggggaaatcgtcgaagtcaccggacgggttatagtgtttctgctcgaggacttcaaatcgctcgtctagcagggtgagttgttctgtgcgaactaatgccgaagacgtcatggagaagcctgattgagacgtaagcgctcctttccgctttttgcggcgcccgccgttggtcgtcgtggtaagtatagtagacgctaattcggaatgtgcgggattcggtgcacgaccgcctgttttctggccctttttgaatcgcgcgaagtcttctagccagttttcgttttggagcgtgtctgcttcttcgcccgcttcgtcgtctcctactggccttacggggacaagcgctggtgcttcatcgtcaccgtgttgtgagcgtgtgggtttggccgtatcgtctgtttcccagccttcgtcttcgaacatgtcatcgaattctgcgtcgtcgagctctcgcccgtctttggcgagctctttgaagaaatcgtcgtcttctccgtcgacgtactcttcgtcttcgagcgcttctagcacttcacggagccgcgggtccatgtctggctgaaacccgccgatggcatcggggacttcttgttgggcttggtaggtgacgtgttggagatttttggacgggaggaaggtgtcatcgaagagttcccctttctttcgctcttcggcttcgagatcaagttgtttgagggctacttcgagactttgttttcccttgcccttgttctttttttgctccgtcttggcttcgacgaagtatacatctcccgaccctgaaccaccgagatcgcgtaagtgctgcatgtagtcgtactcggtgtcatcatagtagacgccgtaagctgcagcctcgccctcgttggcgcgcatgtgggagacttcatcggtgccgagctctgaggcgagatcgtctaatttcttggatttggaggcgttgaggttttgggttgggttgaggaccatggagggagcttcggtgtcatggatgagagggtcattttgcggacggtgcaccagcgtgaagtgctgggctgtcttcttgtcgctgtttgaagagatatcttgttagagacggaatatttagacggatggaggggtaaagtaatcgtacatccatttgcctttaggcattttgtcgaatgatgcgtgcgactacgcgcttagacgttggatgtctagttcggcgacgaaagaattgtcggaaatgtcaacctcaagtgaatagtaaacgagagaatgttggcgacatcaaggttgtcttcggcccaataaaagtcagggtctctatggtcgccctttcctttgaaaagtttggtggggttcctgagttactgccttatcgggcattatcgcctaaaggtgacgcaaaaattccatttgcccctccattaatcagcccgcacctactgcttgccgcgtgctacccgcaatgcgacagccatgcttgctctgtaatcctacatcaaccacattcctcttcgtttcgcatctctttcacatgaacgaaagcaaaagcaaaagtgcatttccctggttaactttaagcacacaacatcacattccgacaaattcgagaaaattacgaagtcaagaacggcatcaagatgcctctcgccaagtccaagacggccgtggggctcggcaactcgttgatgaatgatcgttttggtaaaggcaaaggcgccgaccgtaagaagggttcgggcgtcacccgtatcaatcatgccaccggagaagagtatatcacaaatgacaagaaagaggcagcatgggtcaagatgcgatccgtcacagagcagggtgctctcgatgagtttcttgccacggccgaactagccggaacagacttcacggcagaaaagttgaataacgtcaagattatacacaccgaccagcgaaatccgtacctccttaccgccacagaggagcgcaacgtccagagcaagttcaagcagcacagagggaagttgacagtacccagacggccgaaatgggacagcaacacaacgcctgaagagctggaccagagggaaagagaagccttcctcttatggcgaagaggtcttgctgaattgcaggaatacaatgatctgcttatgacacccttcgagagaaatttagaggtctggagacagctttggcgtgttattgagcgctccgatttggttgttcagatcgtagacgcccgcaaccccctcatgttccgttcggaggatctcgaacactatgtcaaggacgtcaaccccgccaaaaagaatctgctattagttaacaaggcagatatgatgacaactgcgcagagaaaggcatggtcaaaatacttcaaagagaagcgcatctcataccgcttcttctctgcacatttggcaaaagagatgatcgaggcgcgtgctcttgagccggaggagccgttgcatggcacaagctccaacccgaagacaatacagagactaaagcaaaaacccgagattgacgaagaagatgacttggaggacggcacgagcgatgaggagagcgatgacgatgagggcgcgggtcttgcagcaccagttccgggcattgttgatgatgacacgaggatattgacagtcgaggagttggaagacatcttcctgagacatgcctatgaccccgataaccccgacaagaggttggagatcgggctagtcggatatcccaacgttggaaagtcttccaccatcaacgcgctcgtcggtgccaagaaagtctcggtctctgcgactcctggtaaaacgaagcattttcaaacaattcatctcagtgacaaagtcatgctttgcgattgcccaggtttggtgttcccgaacttcgcgactaccaaggcagagcttgtctgtaacggcgtgttgccaatcgaccagatgagagaattcattggcccagcgggtcttatcacacaccggataccacaaccattcctcgaggcaatctatggcatacagatcaagacgagacctctggaggaaggcggaacaggaatccccacggccagtgaactccttgctgcttatgccaaggcaagaggattcaaaacgcagggtgtgggtctgccagacgagtcccgtgcagccagacttgtccttaaggattacgtaaacgggaagcttctctacgtggagccacccccgaactacgacggcgacggcagcgagttcaatcaagagctgtacgacgcgaaccacgtacctgcaaaacgacgtgctgcattgcaggcagcaatgcaagccctcgaaataggcgatggcgagtctacagtagacactgagatgctagccctaccgactggagccaaatcacagagtatcgacaagtcattttttgcacaatcttcaagaaatgcaggtcacctgaccatgcctttcaatcacaagtacactgaacaaggcaaagaacaggctttcaacaagcagttgagtgcacgtaagcagagagcaatgatcgcggcagaaacggggctcgatccaagcgaaattcagctcgagtcgggaaagaagcacttcaaaggaaggggtaagggaaaaggaaagcgagtcgacaacaagatgctagattaaatgagcacgtttgttgtatcactgggttaggtatgtgtcaaaggagcatggcaaagagaaggatctgggcgggtgaccaagggatgcattaacaaaggagttcatcgagtgacaaagagaaatgagggaattgcattcaaggtcgtcatgaccacctttattactgagcaactgtgaaagaccataacgtgacctgttaggctgcggagcaaacatctccttggagacaat

SEQ ID NO: 1655 - DNA, 582 bp, Muscodor strobelii
  misc_feature: SGI cDNA ID NO. 560159
  misc_feature: Encodes the peptide sequence at SEQ ID NO 1656
atgtctgccaccaagatcaacggtaccaagaccaacaccaacaccgatggtgatgacggcggttggactcaagtgatttacaagcgcggcgccgagcaagaagagcagaaaccttgtaaggttcctcgccccatttacaaccgcccgaagaagacgtatgctctcaaggaagaattcaagaacacgttcggcactagcttccgcaacgagaagcccgctgccccgggttcgactcccggctcctctagctcgggttcgcctccgaataagggtgagcgccgtgcccgtgccccaagaagcaacaacaacgggtccgctgctggctctgtcaactctgagcgcaccgagcgcactgagcgtcgccaaccgggccagggttaccgacagactagggagagagaacacgacccgactagactccccgggtggtatggacccccggcctgggatgttcggcctaaacgtgagggtcagggccaggtgaagcgtgaggtgaagaagtcgaagaatatgaagcctgtgaagcaggaggtgaagaaggttgaggagaatgatgataatgattttacgggcgctatttaa

SEQ ID NO: 1656 - protein, 193 aa, Muscodor strobelii
  misc_feature: SGI Peptide ID NO. 560159
MSATKINGTKTNTNTDGDDGGWTQVIYKRGAEQEEQKPCKVPRPIYNRPKKTYALKEEFKNTFGTSFRNEKPAAPGSTPGSSSSGSPPNKGERRARAPRSNNNGSAAGSVNSERTERTERRQPGQGYRQTREREHDPTRLPGWYGPPAWDVRPKREGQGQVKREVKKSKNMKPVKQEVKKVEENDDNDFTGAI

SEQ ID NO: 1657 - DNA, 582 bp, Muscodor strobelii
  misc_feature: SGI EST ID NO. CUFF.4315.0
  misc_feature: Variant of the nucleotide sequence at SEQ ID NO 1655
cgggttcgactcccggctcctctagctcgggttcgcctccgaataagggtgagcgccgtgcccgtgccccaagaagcaacaacaacgggtccgctgctggctctgtcaactctgagcgcaccgagcgcactgagcgtcgccaaccgggccagggttaccgacagactagggagagagaacacgacccgactagactccccgggtggtatggacccccggcctgggatgttcggcctaaacgtgagggtcagggccaggtgaagcgtgaggtgaagaagtcgaagaatatgaagcctgtgaagcaggaggtgaagaaggttgaggagaatgatgataatgattttacgggcgctatttaaacggccgctggcgcttgagatgggatgattggtggtgagtgaagcgggataataggtatataagcgagaggttgtgacgagaatgatcaatacgaagttggtgtgaaagacatgagagacagcgtcctgggtttgtgatgctttttctctgtttctcaaggttgtatcatagggagcgattggcgctctaacgggcatggggcaatgcctcaacggggcctcg

SEQ ID NO: 1658 - DNA, 2178 bp, Muscodor strobelii
  misc_feature: SGI cDNA ID NO. 560160
  misc_feature: Encodes the peptide sequence at SEQ ID NO 1659
atgtccagaaagtctggtgttgccccagaacgtgatagagatggcccgcgttccccgtgggcggcacgatttggaacaatagccgaaccgctgttcgacgaaccaaatcttgtacactcaggaatcaagcatgtgtatccgcttcttgaccctaaatactacggcgacataccactttcaacatttgatggtgatctccaggtttttgaccagctcaaagtagccgagaagatacagctgatcaaaaaccacggcatcaaaacctatcaaattgccacgcttcacaaatgggttcattttggggttgaagaggacggaaatacaccgttgcttcccggcggccatgagaggaacactgcgggcttagcgggcttcgcaggcccagacgctgctcaaatttattatgagagacttgttatagaaactaacgagaccgagtggcttgactgtgtcttgtttcattccttagttctccagaaatgtcggtggtataacacggatgactggtcgatagacgacccacacaactggttggccctgactaaggcatttgcattagccgatcgaatgttgaaagcaatgataaatgataaacatgaagcacttcagactgcacttttcggacgaattagctattggaaaaattggcgcgaaaatgattcgccgagcccaacgcacatggttgtgtttactccggagtatgagaggagggagtttggagcaatacctgacttcatgaacagagaacctgatgagtggcgggcaaagcttcgccaactgctcgcaaatacaacgtggtgcatgggagggaccaaacatccaatctttgcttctggcttaacacaaggctacaacggaatcatatggctccacaaagactttggaaaagctctccgtgataccggcacaactttggcagagcgatgtatctacaattttgttcttgcggttacgatagtacacgagacaatgcatgcacttatatggcaacgagtcaatgtggacagagaagatgcttcgtggcaattagagactacaaggcgataccctgggggactgaaaatagctgagcctatcgtcgacttcgagtcaacagtatatgaattcggtactgccatggagaacaggatgttcggtggcaagctagttcaaacagccctcttggagcatgatagtgcgcatcctccgttgaacgtttgggtttctccccgtaaggacccgtcaatcaacgtacatgttaattccatgtacataacgatcgtgtctcaaggacatacgggggaagaaaatctggggttcacgggaattggcaacaaggagttcttaggaataaaccaatacgagctattatatcaagactgggcggaaaggaatcaactctgggaatctaacatgggactctggttgcctagcctaacaggacaatgggaacaaacgccgtggtcgcaggtcgctttgcgtgctaagctcgcctattttgaactgaaattcaacgcgaacaagtcatcagaaataccatgcgccagtatttccgagcagttcgttgatcaaatgcactggaatgatcgtgaagaatttctgtcaaagatacctgatatgaactcgtcacagagacacgaatggtactttcatgctattggcctattgatgatggctgcgatgcccttgcgcgggacgtcgagtgaatttgaagaggacgaggtgaccatcatgttggaacctagcacagaaatggtatctctgaatcctgagaacaaagcagtcaaatatcgcatgatgactgaatactcagatgcaatgccagattgtaccacatgcaatgcgagtatactatataatcacctaggtggcgaaactgaactgaagcggggaagaaacttgacgcaactcgactatctcgacgttcttcaacagcttatgagatatttacaacacactagctgccctgtgaatgtgccgtggttcaatgctatcgagaaagcaactgacgacatcagactgtcgcggggtaacatcgagctaccaaggagaggcaacacccgcagattatgggtccctgattggccattcagaataccttcatatgcggagtcctattgggcagtatgggacggagcacgaagtggctggcacgaaattaggtggaatgaccaggcgaaccagtttcagagagtataa

SEQ ID NO: 1659 - protein, 725 aa, Muscodor strobelii
  misc_feature: SGI Peptide ID NO. 560160
MSRKSGVAPERDRDGPRSPWAARFGTIAEPLFDEPNLVHSGIKHVYPLLDPKYYGDIPLSTFDGDLQVFDQLKVAEKIQLIKNHGIKTYQIATLHKWVHFGVEEDGNTPLLPGGHERNTAGLAGFAGPDAAQIYYERLVIETNETEWLDCVLFHSLVLQKCRWYNTDDWSIDDPHNWLALTKAFALADRMLKAMINDKHEALQTALFGRISYWKNWRENDSPSPTHMVVFTPEYERREFGAIPDFMNREPDEWRAKLRQLLANTTWCMGGTKHPIFASGLTQGYNGIIWLHKDFGKALRDTGTTLAERCIYNFVLAVTIVHETMHALIWQRVNVDREDASWQLETTRRYPGGLKIAEPIVDFESTVYEFGTAMENRMFGGKLVQTALLEHDSAHPPLNVWVSPRKDPSINVHVNSMYITIVSQGHTGEENLGFTGIGNKEFLGINQYELLYQDWAERNQLWESNMGLWLPSLTGQWEQTPWSQVALRAKLAYFELKFNANKSSEIPCASISEQFVDQMHWNDREEFLSKIPDMNSSQRHEWYFHAIGLLMMAAMPLRGTSSEFEEDEVTIMLEPSTEMVSLNPENKAVKYRMMTEYSDAMPDCTTCNASILYNHLGGETELKRGRNLTQLDYLDVLQQLMRYLQHTSCPVNVPWFNAIEKATDDIRLSRGNIELPRRGNTRRLWVPDWPFRIPSYAESYWAVWDGARSGWHEIRWNDQANQFQRV

SEQ ID NO: 1660 - DNA, 960 bp, Muscodor strobelii
  misc_feature: SGI cDNA ID NO. 560161
  misc_feature: Encodes the peptide sequence at SEQ ID NO 1661
atgcgttcccacagccaagttgcagctcttggtctgctcgccatgaagagtgtgcaggcagcacccaccacggccagtacctctcacctacttttgggcagagactaccaaggctacgacgagtgcagtcaggatcagaccgacaaaatcaacaaatctctccaggatgctgctatcatggcacgacaagtggttatcgaccgcacactgcctaacggaggaggaactcaaacgtaccgttcatcaccaggttatacaaactatttccaagacgacgaatgggacactggcgtctccaagatgtttgcggccatcggcgtacaatcccagcctcctgacaaggactccggcagtcctggcgcaggtgacccgatcacactcgatcagttcaccgtacacgttacgtgccaagatgatccaatctgcgcagacgctggcgcgggcaccaagtccctagtcgtcacggacatatctgccaaaacagacgacttcactccatccattcggttctgcccgcagttcttcgacgcgaacgaggcgcgcaccaagaacaatctcgatgcactgccttacaagaagaacccgggtcgccgcgaccccagctggtgcaaaccgggcatcaagttccgcgacttcgaggtcgcgggaactaccatcctccatgagttgactcatttgaatgaggcgggaaatcgagccggtctagcttcaaacgacgatggcaatggtggaaggtcccagggtacgttcgatatctacgggacaaacggatactcggttgatccggagacggccgcccgtcaactgcatgcgaactggaagaatgtcatcgacaataacctgcccgaggaccagtggccgccttacgttgagaagctcaatgcggagagctatgcggcctcggcaactgagtggtggtttatgtctatgtgtgactttgacagcatcgagggtaactag

SEQ ID NO: 1661 - protein, 319 aa, Muscodor strobelii
  misc_feature: SGI Peptide ID NO. 560161
  misc_feature (5)..(319): NCBI GI: 169626469 Blast Desc: SNOG_16523 [Phaeosphaeria nodorum SN15] gi|160706101|gb|EAT76063.2| SNOG_16523 [Phaeosphaeria nodorum SN15]
  misc_feature (195)..(299): NCBI GI: 145241424 Blast Desc: An09g00340 [Aspergillus niger] gi|134077896|emb|CAL00294.1| [Aspergillus niger]
MRSHSQVAALGLLAMKSVQAAPTTASTSHLLLGRDYQGYDECSQDQTDKINKSLQDAAIMARQVVIDRTLPNGGGTQTYRSSPGYTNYFQDDEWDTGVSKMFAAIGVQSQPPDKDSGSPGAGDPITLDQFTVHVTCQDDPICADAGAGTKSLVVTDISAKTDDFTPSIRFCPQFFDANEARTKNNLDALPYKKNPGRRDPSWCKPGIKFRDFEVAGTTILHELTHLNEAGNRAGLASNDDGNGGRSQGTFDIYGTNGYSVDPETAARQLHANWKNVIDNNLPEDQWPPYVEKLNAESYAASATEWWFMSMCDFDSIEGN

SEQ ID NO: 1662 - DNA, 669 bp, Muscodor strobelii
  misc_feature: SGI cDNA ID NO. 560162
  misc_feature: Elevated expression when VOC is produced
  misc_feature: Encodes the peptide sequence at SEQ ID NO 1663
atgtcttcaaaaccgcaagccgccgtggagctctcattatatctgtcatcaaacacactgagcctctcgcaacccgacgaggtcgtcaccatcaaagtcaccgccacgacggtgtcgtctagtaagccatcgtcaggaatatgttttaacgcacgatggacggtcatggatgaccgcctggtagcatatcgctatcccttccagctacgaagtcttactgagccggacaggctcataccactcagtcctgccatcagaatatcgagtagcaggggaccaacggagccagatcttcgccgcaatgagttggaacgcttccttgtggtgccgggagtaggacagggagatctcgcggtggaacacaaactctctgtatcaaggatattccagtatagccgactgaaggcatccgatatcgaatctgggtctgagtatcagttctatgtgcttcatcagagcttgccgcctcaatggtgggcatttgaagatgagactatagggaagcagttgcgggacggcggacagttcgaggagaacgggccgcacaggaacgacgatagcagtaacactgaagcccttcggagcgaggactgggtctgcagctatcctgtctctcattgccggtttactatcaaacccacgcctgcagtcataagattcacagcttga

SEQ ID NO: 1663 - protein, 222 aa, Muscodor strobelii
  misc_feature: SGI Peptide ID NO. 560162
  misc_feature: Useful for introducing or modulating the production of volatile compounds
MSSKPQAAVELSLYLSSNTLSLSQPDEVVTIKVTATTVSSSKPSSGICFNARWTVMDDRLVAYRYPFQLRSLTEPDRLIPLSPAIRISSSRGPTEPDLRRNELERFLVVPGVGQGDLAVEHKLSVSRIFQYSRLKASDIESGSEYQFYVLHQSLPPQWWAFEDETIGKQLRDGGQFEENGPHRNDDSSNTEALRSEDWVCSYPVSHCRFTIKPTPAVIRFTA

SEQ ID NO: 1664 - DNA, 1595 bp, Muscodor strobelii
  misc_feature: SGI EST ID NO. CUFF.4353.0
  misc_feature: Variant of the nucleotide sequence at SEQ ID NO 1662
tggttatggtacgtggatcgtaggcgaggtgctgaagtgtaaggcacagcatcgatcggccgaagatgcagaccccagtgtagttgttgggggcgaggctgaaatcggcactcatagttgaggtcatatgaaacacgtgctgacacttgatgacctctgtgcattcaaaaccaactcgattacgatatcatgtagtctcattgaaggcccagcagctacctcgctttctgaaagggaatgagaatatgagtgttaaatgaactgtgtaggcagtcacttgtatacagagagaaaggcaggaaatcgtcagtcttctcaatagatcgaaacattgggtttggcatagactgtgttgtacaggaacacccaggtggtatacctttagcccatgtggcatatcgaaacgtcctgtgcgtttttcggcattcagttggctaggctggatttggggcagtacaattgattggagaagactcaactgttggtaagccgcaatatgcaggttcacggcatggttataatgaaagactgtgcctgcccgcggtcttagccattgacgtcagtgtcagccgcggaacgacggtgatggcaccattcccgatgatatctcgatgtatgagcttccagtttgatttagacatgttgaaacgatcaggcttacagtcactgcgcactcacaactcgtaaaacatcagtgactctttgagccgcaaatagccgtcaatcagtctgtgccaggatttatacataccaacaaagaaacttcacgcatcatcacagttcactagacacgacatttgacaccccgcaacatgtcttcaaaaccgcaagccgccgtggagctctcattatatctgtcatcaaacacactgagcctctcgcaacccgacgaggtcgtcaccatcaaagtcaccgccacgacggtgtcgtctagtaagccatcgtcaggaatatgttttaacgcacgatggacggtcatggatgaccgcctggtagcatatcgctatcccttccagctacgaagtcttactgagccggacaggctcataccactcagtcctgccatcagaatatcgagtagcaggggaccaacggagccagatcttcgccgcaatgagttggaacgcttccttgtggtgccgggagtaggacagggagatctcgcggtggaacacaaactctctgtatcaaggatattccagtatagccgactgaaggcatccgatatcgaatctgggtctgagtatcagttctatgtgcttcatcagagcttgccgcctcaatggtgggcatttgaagatgagactatagggaagcagttgcgggacggcggacagttcgaggagaacgggccgcacaggaacgacgatagcagtaacactgaagcccttcggagcgaggactgggtctgcagctatcctgtctctcattgccggtttactatcaaacccacgcctgcagtcataagattcacagcttgaattgaatgaaaaaagggcggctgctagtgatacgccgggcttgcaggctggagtgtatgatatgcggctcgaattatgtattactatagtcctctttcgatgactgtttggccg

SEQ ID NO: 1665 - DNA, 2445 bp, Muscodor strobelii
  misc_feature: SGI cDNA ID NO. 560163
  misc_feature: Encodes the peptide sequence at SEQ ID NO 1666
atgaattcctatgaatactatccaattaccggaatcaaagagggctggggtcctgatggacaagtccccttgaggcgaaatatcaatgagtggtatagtagcagcgacccaaatgacaagaatcaagtcattttgtacctgctggctctcggcagcttccaagcccatccgccagattcgagagactcttattttcagatcgcaggcatccatggctttccttatcgatcctgggacgagcccgaggtcgagcaaaaggaaattggtaggaaggggtattgtgttcatgcaaataacctgtttcctccgtggcaccgaccatatctgcttctgtacgaggcaatacagcaacgcctgttcgaaatcatggtaaacgaaatcattccaaggtatgatgacaagttcaaagacgagtatctcaaagctgcccgtacctggcgactaccattctgggactgggccaaggaccccgcgatacctaagttggcccgatctcgtcgactcacgattaaatttggctccagcccaaagacgacgattgacaatcccctctaccagtttcgtatgccgaaccgaaagactatgggccactacggtgtaggctccgttgttgacttcgatggtggtccttttctcgactatggaaactgctacgccaccagccgctgccccgcagagaccgagcgtgatacaaaagggcaagcatggacagagggagtcgtacatgacgatgaggtggataggatgatgtccagacactcggcaattaccgatgagtcgtatgggagcgccgccgaactggtgtatcgactactgacctatccgatggattatccccactttgcaacgctagctagggatgaggatgctacaagtgcaacggccagcacatcaaaggttacaaacgacatcaacattgagttcattcacaacaatattcactattgggttgggggtaacggaggtcacatgtcccaaatcccagtagcgaccttcgatccaatcttctggctccatcactggcaagttcatttctataggatcaatattgaccgtctcttcgccctgtggcaaactcttcatcccgatgcgtggttcgaggcggacatccaaagattcttcgatcagaagattgtaggcagcggtacagtgattacgaacaagacgcctcttcgtcctttccacagggacacacagggtacggtatggacgcccgaggaaactcgtgactggttcaagttggggtacacatatccagagctgtcatcacgccagacagagccagctgggctgctcaagatgattaatgagacttacggtattagccgtcgcgaatatttgtcgctggttgagaactcaagcgacctgcctgctgggatcacagcccttcccgatggcaaaggagtgaaggggtatgactatgccctaagtattgcgtattcaaaatttgccttgggtggccagccgttcaacatcgagatattcttagcaccagagatgaagaatggagaaaaactcaccgaaaaatttcggacagaggacttcatttgtaatgtcttcaactttagtcaaccccccgacaatgccgatggtgaggaagtctgttccaattgtaaggatgggcaagcccagaacctgcaggcgatcgcatacatcccgatgacgtcgtaccttctcaggatggtccagcaacaacaggtcgacagcatggacgcaccagtggttgaggaagttctgaagaggatgtattggcgtttcgtagatattggcggtgcaactattcccgaagagaaatggcaaagcacggcgaaccttaaaatcaaggtctccaaaactcaagtgtcgtatagtaaagacccaagtgagcagccgatatttccagatccagaggtcattccgattttaggtacaagcgccgcagagattccatcaataccgccaggggcgatagcgaacaatctcatcttaggtaatatcaacgagctcgaggaagcagtcgcggcaggggggtccatcgtttttacgtcatcttcactaaatacgacgaggccagccagggattcaggtaccgtgattggtttactataccgagatcagagcaatcagcaagacgctcgagacacggagaactatgacattctgctcaccatggacctccggagcgcgaaaagggttgtgcagtgcaatcacaagctggccggccaggggtacgggctgataaaggagttcacaccaagcccttggttcaacgctcgcccagagctccgcgtggatatccaggatagccagttcattatctccgtggacggaaaacgtctcgggacatatgaccgagagatcaaaaagcctattacacatgtgcactactatactaaaccgactcggacccgacctgtattagcaaatggaattacggcgacgacttatcagaccacttctgcctaa

SEQ ID NO: 1666 - protein, 814 aa, Muscodor strobelii
  misc_feature: SGI Peptide ID NO. 560163
  misc_feature (2)..(424): Pfam Id: PF00264 Pfam Desc: Common central domain of tyrosinase
  misc_feature (46)..(158): Pfam Id: PF00264 Pfam Desc: Common central domain of tyrosinase
  misc_feature (309)..(361): Pfam Id: PF00264 Pfam Desc: Common central domain of tyrosinase
  misc_feature (3)..(813): NCBI GI: 225560938 Blast Desc: tyrosinase [Ajellomyces capsulatus G186AR]
  misc_feature (3)..(810): NCBI GI: 239608057 Blast Desc: tyrosinase [Ajellomyces dermatitidis ER-3]
  misc_feature (3)..(810): NCBI GI: 261200120 Blast Desc: tyrosinase [Ajellomyces dermatitidis SLH14081] gi|239594669|gb|EEQ77250.1| tyrosinase [Ajellomyces dermatitidis SLH14081]
  misc_feature (3)..(813): NCBI GI: 240280506 Blast Desc: tyrosinase [Ajellomyces capsulatus H143]
  misc_feature (3)..(813): NCBI GI: 154277792 Blast Desc: [Ajellomyces capsulatus NAm1] gi|150413314|gb|EDN08697.1| [Ajellomyces capsulatus NAm1]
  misc_feature (4)..(636): NCBI GI: 67902896 Blast Desc: AN8435.2 [Aspergillus nidulans FGSC A4] gi|40747901|gb|EAA67057.1| AN8435.2 [Aspergillus nidulans FGSC A4] gi|259484376|tpe|CBF80543.1| TPA: [Aspergillus nidulans FGSC
  misc_feature (4)..(811): NCBI GI: 255956845 Blast Desc: Pc21g22040 [Penicillium chrysogenum Wisconsin 54-1255] gi|211590886|emb|CAP97101.1| Pc21g22040 [Penicillium chrysogenum Wisconsin 54-1255]
  misc_feature (4)..(809): NCBI GI: 154273396 Blast Desc: [Ajellomyces capsulatus NAm1] gi|150416062|gb|EDN11406.1| [Ajellomyces capsulatus NAm1]
  misc_feature (4)..(809): NCBI GI: 261191941 Blast Desc: tyrosinase [Ajellomyces dermatitidis SLH14081] gi|239589694|gb|EEQ72337.1| tyrosinase [Ajellomyces dermatitidis SLH14081] gi|239608573|gb|EEQ85560.1| photo-regulated tyrosinase
  misc_feature (4)..(809): NCBI GI: 225555737 Blast Desc: photo-regulated tyrosinase [Ajellomyces capsulatus G186AR]
  misc_feature (1)..(594): SWISSPROT Homolog: EC 1.14.18.1 Monophenol monooxygenase
MNSYEYYPITGIKEGWGPDGQVPLRRNINEWYSSSDPNDKNQVILYLLALGSFQAHPPDSRDSYFQIAGIHGFPYRSWDEPEVEQKEIGRKGYCVHANNLFPPWHRPYLLLYEAIQQRLFEIMVNEIIPRYDDKFKDEYLKAARTWRLPFWDWAKDPAIPKLARSRRLTIKFGSSPKTTIDNPLYQFRMPNRKTMGHYGVGSVVDFDGGPFLDYGNCYATSRCPAETERDTKGQAWTEGVVHDDEVDRMMSRHSAITDESYGSAAELVYRLLTYPMDYPHFATLARDEDATSATASTSKVTNDINIEFIHNNIHYWVGGNGGHMSQIPVATFDPIFWLHHWQVHFYRINIDRLFALWQTLHPDAWFEADIQRFFDQKIVGSGTVITNKTPLRPFHRDTQGTVWTPEETRDWFKLGYTYPELSSRQTEPAGLLKMINETYGISRREYLSLVENSSDLPAGITALPDGKGVKGYDYALSIAYSKFALGGQPFNIEIFLAPEMKNGEKLTEKFRTEDFICNVFNFSQPPDNADGEEVCSNCKDGQAQNLQAIAYIPMTSYLLRMVQQQQVDSMDAPVVEEVLKRMYWRFVDIGGATIPEEKWQSTANLKIKVSKTQVSYSKDPSEQPIFPDPEVIPILGTSAAEIPSIPPGAIANNLILGNINELEEAVAAGGSIVFTSSSLNTTRPARDSGTVIGLLYRDQSNQQDARDTENYDILLTMDLRSAKRVVQCNHKLAGQGYGLIKEFTPSPWFNARPELRVDIQDSQFIISVDGKRLGTYDREIKKPITHVHYYTKPTRTRPVLANGITATTYQTTSA

SEQ ID NO: 1667 - DNA, 2484 bp, Muscodor strobelii
  misc_feature: SGI cDNA ID NO. 560164
  misc_feature: Encodes the peptide sequence at SEQ ID NO 1668
atgaattcctatgaatactatccaattaccggaatcaaagagggctggggtcctgatggacaagtccccttgaggcgaaatatcaatgagtggtatagtagcagcgacccaaatgacaagaatcaagtcattttgtacctgctggctctcggcagcttccaagcccatccgccagattcgagagactcttattttcagatcgcaggcatccatggctttccttatcgatcctgggacgagcccgaggtcgagcaaaaggaaattggtaggaaggggtattgtgttcatgcaaataacctgtttcctccgtggcaccgaccatatctgcttctgtacgaggcaatacagcaacgcctgttcgaaatcatggtaaacgaaatcattccaaggtatgatgacaagttcaaagacgagtatctcaaagctgcccgtacctggcgactaccattctgggactgggccaaggaccccgcgatacctaagttggcccgatctcgtcgactcacgattaaatttggctccagcccaaagacgacgattgacaatcccctctaccagtttcgtatgccgaaccgaaagactatgggccactacggtgtaggctccgttgttgacttcgatggtggtccttttctcgactatggaaactgctacgccaccagccgctgccccgcagagaccgagcgtgatacaaaagggcaagcatggacagagggagtcgtacatgacgatgaggtggataggatgatgtccagacactcggcaattaccgatgagtcgtatgggagcgccgccgaactggtgtatcgactactgacctatccgatggattatccccactttgcaacgctagctagggatgaggatgctacaagtgcaacggccagcacatcaaaggttacaaacgacatcaacattgagttcattcacaacaatattcactattgggttgggggtaacggaggtcacatgtcccaaatcccagtagcgaccttcgatccaatcttctggctccatcactggcaagttcatttctataggatcaatattgaccgtctcttcgccctgtggcaaactcttcatcccgatgcgtggttcgaggcggacatccaaagattcttcgatcagaagattgtaggcagcggtacagtgattacgaacaagacgcctcttcgtcctttccacagggacacacagggtacggtatggacgcccgaggaaactcgtgactggttcaagttggggtacacatatccagagctgtcatcacgccagacagagccagctgggctgctcaagatgattaatgagacttacggtattagccgtcgcgaatatttgtcgctggttgagaactcaagcgacctgcctgctgggatcacagcccttcccgatggcaaaggagtgaaggggtatgactatgccctaagtattgcgtattcaaagtatgtcaaaagctcgtttcccgtcacgcaccttctcagatttgccttgggtggccagccgttcaacatcgagatattcttagcaccagagatgaagaatggagaaaaactcaccgaaaaatttcggacagaggacttcatttgtaatgtcttcaactttagtcaaccccccgacaatgccgatggtgaggaagtctgttccaattgtaaggatgggcaagcccagaacctgcaggcgatcgcatacatcccgatgacgtcgtaccttctcaggatggtccagcaacaacaggtcgacagcatggacgcaccagtggttgaggaagttctgaagaggatgtattggcgtttcgtagatattggcggtgcaactattcccgaagagaaatggcaaagcacggcgaaccttaaaatcaaggtctccaaaactcaagtgtcgtatagtaaagacccaagtgagcagccgatatttccagatccagaggtcattccgattttaggtacaagcgccgcagagattccatcaataccgccaggggcgatagcgaacaatctcatcttaggtaatatcaacgagctcgaggaagcagtcgcggcaggggggtccatcgtttttacgtcatcttcactaaatacgacgaggccagccagggattcaggtaccgtgattggtttactataccgagatcagagcaatcagcaagacgctcgagacacggagaactatgacattctgctcaccatggacctccggagcgcgaaaagggttgtgcagtgcaatcacaagctggccggccaggggtacgggctgataaaggagttcacaccaagcccttggttcaacgctcgcccagagctccgcgtggatatccaggatagccagttcattatctccgtggacggaaaacgtctcgggacatatgaccgagagatcaaaaagcctattacacatgtgcactactatactaaaccgactcggacccgacctgtattagcaaatggaattacggcgacgacttatcagaccacttctgcctaa

SEQ ID NO: 1668 - protein, 827 aa, Muscodor strobelii
  misc_feature: SGI Peptide ID NO. 560164
  misc_feature (2)..(424): Pfam Id: PF00264 Pfam Desc: Common central domain of tyrosinase
  misc_feature (46)..(158): Pfam Id: PF00264 Pfam Desc: Common central domain of tyrosinase
  misc_feature (309)..(361): Pfam Id: PF00264 Pfam Desc: Common central domain of tyrosinase
  misc_feature (3)..(826): NCBI GI: 225560938 Blast Desc: tyrosinase [Ajellomyces capsulatus G186AR]
  misc_feature (3)..(823): NCBI GI: 261200120 Blast Desc: tyrosinase [Ajellomyces dermatitidis SLH14081] gi|239594669|gb|EEQ77250.1| tyrosinase [Ajellomyces dermatitidis SLH14081]
  misc_feature (3)..(823): NCBI GI: 239608057 Blast Desc: tyrosinase [Ajellomyces dermatitidis ER-3]
  misc_feature (3)..(826): NCBI GI: 240280506 Blast Desc: tyrosinase [Ajellomyces capsulatus H143]
  misc_feature (3)..(826): NCBI GI: 154277792 Blast Desc: [Ajellomyces capsulatus NAm1] gi|150413314|gb|EDN08697.1| [Ajellomyces capsulatus NAm1]
  misc_feature (4)..(649): NCBI GI: 67902896 Blast Desc: AN8435.2 [Aspergillus nidulans FGSC A4] gi|40747901|gb|EAA67057.1| AN8435.2 [Aspergillus nidulans FGSC A4] gi|259484376|tpe|CBF80543.1| TPA: [Aspergillus nidulans FGSC
  misc_feature (4)..(824): NCBI GI: 255956845 Blast Desc: Pc21g22040 [Penicillium chrysogenum Wisconsin 54-1255] gi|211590886|emb|CAP97101.1| Pc21g22040 [Penicillium chrysogenum Wisconsin 54-1255]
  misc_feature (4)..(822): NCBI GI: 154273396 Blast Desc: [Ajellomyces capsulatus NAm1] gi|150416062|gb|EDN11406.1| [Ajellomyces capsulatus NAm1]
  misc_feature (4)..(822): NCBI GI: 261191941 Blast Desc: tyrosinase [Ajellomyces dermatitidis SLH14081] gi|239589694|gb|EEQ72337.1| tyrosinase [Ajellomyces dermatitidis SLH14081] gi|239608573|gb|EEQ85560.1| photo-regulated tyrosinase
  misc_feature (4)..(822): NCBI GI: 225555737 Blast Desc: photo-regulated tyrosinase [Ajellomyces capsulatus G186AR]
  misc_feature (1)..(607): SWISSPROT Homolog: EC 1.14.18.1 Monophenol monooxygenase
MNSYEYYPITGIKEGWGPDGQVPLRRNINEWYSSSDPNDKNQVILYLLALGSFQAHPPDSRDSYFQIAGIHGFPYRSWDEPEVEQKEIGRKGYCVHANNLFPPWHRPYLLLYEAIQQRLFEIMVNEIIPRYDDKFKDEYLKAARTWRLPFWDWAKDPAIPKLARSRRLTIKFGSSPKTTIDNPLYQFRMPNRKTMGHYGVGSVVDFDGGPFLDYGNCYATSRCPAETERDTKGQAWTEGVVHDDEVDRMMSRHSAITDESYGSAAELVYRLLTYPMDYPHFATLARDEDATSATASTSKVTNDINIEFIHNNIHYWVGGNGGHMSQIPVATFDPIFWLHHWQVHFYRINIDRLFALWQTLHPDAWFEADIQRFFDQKIVGSGTVITNKTPLRPFHRDTQGTVWTPEETRDWFKLGYTYPELSSRQTEPAGLLKMINETYGISRREYLSLVENSSDLPAGITALPDGKGVKGYDYALSIAYSKYVKSSFPVTHLLRFALGGQPFNIEIFLAPEMKNGEKLTEKFRTEDFICNVFNFSQPPDNADGEEVCSNCKDGQAQNLQAIAYIPMTSYLLRMVQQQQVDSMDAPVVEEVLKRMYWRFVDIGGATIPEEKWQSTANLKIKVSKTQVSYSKDPSEQPIFPDPEVIPILGTSAAEIPSIPPGAIANNLILGNINELEEAVAAGGSIVFTSSSLNTTRPARDSGTVIGLLYRDQSNQQDARDTENYDILLTMDLRSAKRVVQCNHKLAGQGYGLIKEFTPSPWFNARPELRVDIQDSQFIISVDGKRLGTYDREIKKPITHVHYYTKPTRTRPVLANGITATTYQTTSA

SEQ ID NO: 1669 - DNA, 372 bp, Muscodor strobelii
  misc_feature: SGI cDNA ID NO. 560165
  misc_feature: Encodes the peptide sequence at SEQ ID NO 1670
atgagctgcggcgcacctttttcactccaaagacccgagtgtacctgtcaagcacccaaataccagccggatatcgtcatttttggaaagggcatcggcgtcaacggggctgcgatagactttgacggtcctatcacaaagaatttcgaatacaaggatccagcagacatagctcagaccatacgctactggcgcgctctaccgctacaaagcatgcacgtcggaaatgccgtccgcgacgtcctatacgaactagagcccagcgccaaagagccaggcgtaattcaaggcttaaaagcggttatcgccatgaacaaaaaactggtcttgcggtaccgtattatatgcgccatccaacgacggagcccttag

SEQ ID NO: 1670 - protein, 123 aa, Muscodor strobelii
  misc_feature: SGI Peptide ID NO. 560165
  misc_feature (1)..(123): NCBI GI: 261200116 Blast Desc: conserved [Ajellomyces dermatitidis SLH14081] gi|239594667|gb|EEQ77248.1| conserved [Ajellomyces dermatitidis SLH14081]
  misc_feature (3)..(123): NCBI GI: 240280504 Blast Desc: conserved [Ajellomyces capsulatus H143]
  misc_feature (1)..(123): NCBI GI: 239608055 Blast Desc: conserved [Ajellomyces dermatitidis ER-3]
  misc_feature (3)..(123): NCBI GI: 154277788 Blast Desc: [Ajellomyces capsulatus NAm1] gi|150413312|gb|EDN08695.1| [Ajellomyces capsulatus NAm1]
  misc_feature (3)..(123): NCBI GI: 225560940 Blast Desc: conserved [Ajellomyces capsulatus G186AR]
  misc_feature (3)..(122): NCBI GI: 238483899 Blast Desc: conserved [Aspergillus flavus NRRL3357] gi|220701238|gb|EED57576.1| conserved [Aspergillus flavus NRRL3357]
  misc_feature (1)..(122): NCBI GI: 169767078 Blast Desc: [Aspergillus oryzae RIB40] gi|83765865|dbj|BAE56008.1| protein product [Aspergillus oryzae]
MSCGAPFSLQRPECTCQAPKYQPDIVIFGKGIGVNGAAIDFDGPITKNFEYKDPADIAQTIRYWRALPLQSMHVGNAVRDVLYELEPSAKEPGVIQGLKAVIAMNKKLVLRYRIICAIQRRSP

SEQ ID NO: 1671 - DNA, 1026 bp, Muscodor strobelii
  misc_feature: SGI cDNA ID NO. 560166
  misc_feature: Encodes the peptide sequence at SEQ ID NO 1672
atggatgacaactctgcagcatggcttgtgcgattcaagagaaagcctctcgatgtggatgaagccgactcgagattcgcagatgagaatgaaattgtcatcaggaacgtggccgtatctgcgaatccgatcgatacggttatgcaagatgagccctatatgaattggacttatccgacaatactgggcacagacgtggctggcgaagtcaccgaggtcggctccctcgttcaggggttcagcgagggggatcgtgtcatgggccacgctctccgccttgtcacggacgatgaccggcacgccggctttcaaaaattcactgtcctcatgccaaatatggcgtgcatcataccttcgactctatcctttgagaatgcggcccccctacctctcggaatctcgaccgcttcggcagggctgtttcagaacaagtcacttcatctgagccccccgacgctaaatcccaggcccctagaggaatgggttgtcgtcgcaggtgcgacaggcaatgtcggcagccatggtgtgcggcttgcatctgccgctggatacaaagttttagccctagcttcgcagagagactttcaggtcgccagaagtttgggcgcgattgacgtgctagaagccaggcctgtagcaccgctgcagttagtgaacacattagctgaagcattgaaagataggacgattgcaggcgctttcgacgcaaccggtgtcgcgagtgtgactgtagcaatcgccaaggctatcgtagcgtgcaaaggcaatttagtagttgcgacggttgtggatgagatcgatgatgatgtgtcccccgttgtggttaagactgtgagggcagttgacatccgagataatgaggtaagtggtatggtttggggggattttatgccaaaggcacttgcaagtggcaaatatttcatgccctatcccaaggcgtctgtttatggaaatggcctcgacaagattcaagctgtcatgggggcaaaggcgaaagctggggagaagttcgtagtcacactgtag

SEQ ID NO: 1672 - protein, 341 aa, Muscodor strobelii
  misc_feature: SGI Peptide ID NO. 560166
  misc_feature (29)..(117): Pfam Id: PF08240 Pfam Desc: Alcohol dehydrogenase GroES-like domain
  misc_feature (29)..(87): Pfam Id: PF08240 Pfam Desc: Alcohol dehydrogenase GroES-like domain
  misc_feature (1)..(341): NCBI GI: 261200126 Blast Desc: oxidoreductase [Ajellomyces dermatitidis SLH14081] gi|239594672|gb|EEQ77253.1| oxidoreductase [Ajellomyces dermatitidis SLH14081]
  misc_feature (1)..(341): NCBI GI: 239608060 Blast Desc: oxidoreductase [Ajellomyces dermatitidis ER-3]
  misc_feature (1)..(341): NCBI GI: 225560935 Blast Desc: oxidoreductase [Ajellomyces capsulatus G186AR]
  misc_feature (1)..(339): NCBI GI: 240280509 Blast Desc: oxidoreductase [Ajellomyces capsulatus H143]
  misc_feature (1)..(341): NCBI GI: 119184622 Blast Desc: CIMG_07088 [Coccidioides immitis RS]
  misc_feature (1)..(341): NCBI GI: 240109921 Blast Desc: oxidoreductase, zinc-binding dehydrogenase family protein [Coccidioides posadasii C735 delta SOWgp]
  misc_feature (3)..(341): NCBI GI: 242821871 Blast Desc: zinc-binding oxidoreductase CipB [Talaromyces stipitatus ATCC 10500] gi|218712690|gb|EED12115.1| zinc-binding oxidoreductase CipB [Talaromyces stipitatus ATCC 10500]
  misc_feature (1)..(341): NCBI GI: 154277798 Blast Desc: HCAG_05199 [Ajellomyces capsulatus NAm1] gi|150413317|gb|EDN08700.1| HCAG_05199 [Ajellomyces capsulatus NAm1]
  misc_feature (4)..(341): NCBI GI: 70981714 Blast Desc: zinc-binding oxidoreductase CipB [Aspergillus fumigatus Af293] gi|66844008|gb|EAL84348.1| zinc-binding oxidoreductase CipB [Aspergillus fumigatus Af293]
  misc_feature (4)..(341): NCBI GI: 159122007 Blast Desc: zinc-binding oxidoreductase CipB [Aspergillus fumigatus A1163]
  misc_feature (29)..(212): SWISSPROT Homolog: EC 1.6.5.5 NADPH:quinone reductase
MDDNSAAWLVRFKRKPLDVDEADSRFADENEIVIRNVAVSANPIDTVMQDEPYMNWTYPTILGTDVAGEVTEVGSLVQGFSEGDRVMGHALRLVTDDDRHAGFQKFTVLMPNMACIIPSTLSFENAAPLPLGISTASAGLFQNKSLHLSPPTLNPRPLEEWVVVAGATGNVGSHGVRLASAAGYKVLALASQRDFQVARSLGAIDVLEARPVAPLQLVNTLAEALKDRTIAGAFDATGVASVTVAIAKAIVACKGNLVVATVVDEIDDDVSPVVVKTVRAVDIRDNEVSGMVWGDFMPKALASGKYFMPYPKASVYGNGLDKIQAVMGAKAKAGEKFVVTL

SEQ ID NO: 1673 - DNA, 339 bp, Muscodor strobelii
  misc_feature: SGI EST ID NO. CUFF.4384.0
  misc_feature: Variant of the nucleotide sequence at SEQ ID NO 1671
gccttgtcacggacgatgaccggcacgccggctttcaaaaattcactgtcctcatgccaaatatggcgtgcatcataccttcgactctatcctttgagaatgcggcccccctacctctcggaatctcgaccgcttcggcagggctgtttcagaacaagtcacttcatctgagccccccgacgctaaatcccaggcccctagaggaatgggttgtcgtcgcaggtgcgacaggcaatgtcggcagccatggtgtgcggcttgcatctgccgctggatacaaagttttagccctagcttcgcagagagactttcaggtcgccagaagtttgggcgcgattg

SEQ ID NO: 1674 - DNA, 1602 bp, Muscodor strobelii
  misc_feature: SGI cDNA ID NO. 560167
  misc_feature: Encodes the peptide sequence at SEQ ID NO 1675
atgtctaatatttgggacgacgcgggcgcaatcccgtcagtgctcaatgctaccaagttggccgcctatcttgaaagagacaaagatatcatcaacaaacaggataagggaggcttcaccccactcgccaaagcgctactcgctggcagcgcaacgacagttaagctactgttagaaaatggtgccaatcccgaccagaagacacaagatggaacaacacccctgtatatggcggcagacgctcgttcgcaaagagcaaggatgatccagctcctcctcgacaagaaacccactactatcgatgaagtagttgagccatacgttccatccaacacgcctttgatggcagccgttcgaagaggcgacgcagccgctgtcaggctactcgtgaagtttggagcctcgaaagacaagacgaacacaaatggccagacagcacaagacctcatagatgagtctaagcccacagcggccgacttgaggacggccttggcgaccacgccgagtatgggtatgggcgggctaatgacctacataaagtcgtgggttctgcccgttcttgcctatttcagacgtatgcgtcctctctccgatatctttgacgcagcttcccgtgctttttttaacatcaagcccgaccccgaactggaaccggggcaggatatcattgagcccaagacggcggccgacttcaataagaacttggataacatgatatcgagaaatggcctcgaaaagattttccctcctggtaacccttatacaaagcaagtggcgacgaaagctgctgagctgatcaacgacgataagaatgctttgaaagcgccggctcagatcgatatgctttccaaactagctctttaccaacccgtgttttacctcgacgacagcatgtcaatgtgggaagactacaagggttccccgacgaatcggtggccaccccaagtagggcttgtgaagaaaatgagtgagattgccacgagggcagacccgttgaataggggcagccatgttcgcttcatcaacttagacacgccgagcaacaacaatctaggttctgataccatcgaaaaaacgttgacggcatttcctaaaggaacaggctggacgcccataggtaccatgttaaggaagcatgtccttgatcaacttgtctacaaggatctcgatgccggcacactcatcaagcgcccctttctcattatttgcatcactgatggttttccaacgggagagaaagcaatggacggaactattccagcaaaagccgattctgagtaccggaacgaagatagtgacagattccggaaggaaatccgccatttggtgaaggaactagaaaaaaagggctataataatcaagaagatccctacacagcggtcagattttcaattagccgcattggaaacatcacagatccggatgacaagcgcgaagcagacaagttttgggacggcctgcagtcagacgacgttgtgccggatgtgttgtatatgaccccagacataatggacgagaagtacaatttgaaggaggatcagcaggaactggagacctgggtaataataggattccttgaattatatgagtatcagtcctga

SEQ ID NO: 1675 - protein, 533 aa, Muscodor strobelii
  misc_feature: SGI Peptide ID NO. 560167
  misc_feature (37)..(69): Pfam Id: PF00023 Pfam Desc: Ankyrin repeat
  misc_feature (109)..(141): Pfam Id: PF00023 Pfam Desc: Ankyrin repeat
  misc_feature (111)..(141): Pfam Id: PF00023 Pfam Desc: Ankyrin repeat
  misc_feature (3)..(526): NCBI GI: 239608059 Blast Desc: ankyrin repeat protein [Ajellomyces dermatitidis ER-3]
  misc_feature (3)..(526): NCBI GI: 261200124 Blast Desc: ankyrin repeat protein [Ajellomyces dermatitidis SLH14081] gi|239594671|gb|EEQ77252.1| ankyrin repeat protein [Ajellomyces dermatitidis SLH14081]
  misc_feature (20)..(505): NCBI GI: 154277796 Blast Desc: [Ajellomyces capsulatus NAm1] gi|150413316|gb|EDN08699.1| [Ajellomyces capsulatus NAm1]
  misc_feature (20)..(455): NCBI GI: 240280508 Blast Desc: ankyrin repeat protein [Ajellomyces capsulatus H143]
  misc_feature (20)..(455): NCBI GI: 225560936 Blast Desc: ankyrin repeat protein [Ajellomyces capsulatus G186AR]
  misc_feature (31)..(522): NCBI GI: 67902894 Blast Desc: AN8434.2 [Aspergillus nidulans FGSC A4] gi|40747900|gb|EAA67056.1| AN8434.2 [Aspergillus nidulans FGSC A4] gi|259484375|tpe|CBF80541.1| TPA: ankyrin repeat protein FGSC
  misc_feature (13)..(500): NCBI GI: 256725367 Blast Desc: NECHADRAFT_45674 [Nectria haematococca mpVI 77-13-4]
  misc_feature (15)..(521): NCBI GI: 146324866 Blast Desc: ankyrin repeat protein [Aspergillus fumigatus Af293] gi|129556620|gb|EAL86852.2| ankyrin repeat protein [Aspergillus fumigatus Af293]
  misc_feature (15)..(521): NCBI GI: 159123340 Blast Desc: ankyrin repeat protein [Aspergillus fumigatus A1163]
  misc_feature (28)..(454): NCBI GI: 255949776 Blast Desc: Pc22g17420 [Penicillium chrysogenum Wisconsin 54-1255] gi|211592672|emb|CAP99030.1| Pc22g17420 [Penicillium chrysogenum Wisconsin 54-1255]
MSNIWDDAGAIPSVLNATKLAAYLERDKDIINKQDKGGFTPLAKALLAGSATTVKLLLENGANPDQKTQDGTTPLYMAADARSQRARMIQLLLDKKPTTIDEVVEPYVPSNTPLMAAVRRGDAAAVRLLVKFGASKDKTNTNGQTAQDLIDESKPTAADLRTALATTPSMGMGGLMTYIKSWVLPVLAYFRRMRPLSDIFDAASRAFFNIKPDPELEPGQDIIEPKTAADFNKNLDNMISRNGLEKIFPPGNPYTKQVATKAAELINDDKNALKAPAQIDMLSKLALYQPVFYLDDSMSMWEDYKGSPTNRWPPQVGLVKKMSEIATRADPLNRGSHVRFINLDTPSNNNLGSDTIEKTLTAFPKGTGWTPIGTMLRKHVLDQLVYKDLDAGTLIKRPFLIICITDGFPTGEKAMDGTIPAKADSEYRNEDSDRFRKEIRHLVKELEKKGYNNQEDPYTAVRFSISRIGNITDPDDKREADKFWDGLQSDDVVPDVLYMTPDIMDEKYNLKEDQQELETWVIIGFLELYEYQS

SEQ ID NO: 1676 - DNA, 185 bp, Muscodor strobelii
  misc_feature: SGI EST ID NO. CUFF.4390.0
  misc_feature: Variant of the nucleotide sequence at SEQ ID NO 1674
gccgacttcaataagaacttggataacatgatatcgagaaatggcctcgaaaagattttccctcctggtaacccttatacaaagcaagtggcgacgaaagctgctgagctgatcaacgacgataagaatgctttgaaagcgccggctcagatcgatatgctttccaaactagctctttaccaacc

SEQ ID NO: 1677 - DNA, 435 bp, Muscodor strobelii
  misc_feature: SGI cDNA ID NO. 560168
  misc_feature: Encodes the peptide sequence at SEQ ID NO 1678
atgcctgctgagacgcagatctccacgcctctccccgccggcgtcaatgagcagtcagtcatcaatgctcttcacaaccatgatgcctacgtccgggtgacctgcccacaactcatctcgcagaaacacgtctccgggtcgcctaacccaaatgaaccctgcgtttacgaaatcacagacaagcgaccaatgggtcagacaacattcgagctcacgctcaccaacgtgtcggacggagttgatgccatggttaagggcaaagcgccgactggaagcatggtaatcaagtcccagtggcgcgtggttggcggcaaactggatgaaaacgtcgagattgacagtaacatggtaacgaagaagatgatcaagggaaatgttgagagaggacacccagacttccatcaggggttcttaactcaggctactcaggcttaa

SEQ ID NO: 1678 - protein, 144 aa, Muscodor strobelii
  misc_feature: SGI Peptide ID NO. 560168
  misc_feature (1)..(141): NCBI GI: 169613492 Blast Desc: SNOG_09877 [Phaeosphaeria nodorum SN15] gi|111062022|gb|EAT83142.1| SNOG_09877 [Phaeosphaeria nodorum SN15]
  misc_feature (1)..(141): NCBI GI: 189208578 Blast Desc: conserved [Pyrenophora tritici-repentis Pt-1C-BFP] gi|187976715|gb|EDU43341.1| conserved [Pyrenophora tritici-repentis Pt-1C-BFP]
  misc_feature (9)..(138): NCBI GI: 169623122 Blast Desc: SNOG_14790 [Phaeosphaeria nodorum SN15] gi|160704919|gb|EAT77982.2| SNOG_14790 [Phaeosphaeria nodorum SN15]
  misc_feature (9)..(138): NCBI GI: 189188356 Blast Desc: PTRG_00184 [Pyrenophora tritici-repentis Pt-1C-BFP] gi|187972123|gb|EDU39622.1| PTRG_00184 [Pyrenophora tritici-repentis Pt-1C-BFP]
MPAETQISTPLPAGVNEQSVINALHNHDAYVRVTCPQLISQKHVSGSPNPNEPCVYEITDKRPMGQTTFELTLTNVSDGVDAMVKGKAPTGSMVIKSQWRVVGGKLDENVEIDSNMVTKKMIKGNVERGHPDFHQGFLTQATQA

SEQ ID NO: 1679 - DNA, 1249 bp, Muscodor strobelii
  misc_feature: SGI EST ID NO. CUFF.4402.0
  misc_feature: Variant of the nucleotide sequence at SEQ ID NO 1677
acgagatttgcgtgtgtgtgtggagtggacatctccaaggacgtccgaagtactacgtcgcacattatgctcgaactatattccgcgtagatgtgtggcaccttctccctatattggctgacatttgagttcagccttaatttacgccgacatccccctagggccaggaaatgtttctaccgcaccaggcttacagctattacttgaggaagcgtaagttcaggaaatttatgtctcactcagctcggaatcattgaacaattcgtgagtggacataatcagagaagccttcgcagcctccaaaatcaacgcggctgcagctccgagtgcagccaaactattacgacccaagaccatgccctccatccacgcatgattagtttgacgccatcgctgacataagcacccaatttctggcgccgacgtgctttccttctagagcatcaacgtagtggagaaaatttcatgcgagtcccgggcttggcttaacaacgcctcggacccccatggcttcacaaagtttacacaggaacggactgaggctgacctacgagtctcggagcctcagttttggggcagtctagaatggtcgacatgaagctctataagatcccctgagcgcccccttacaagtaggtgaatctttaacatcgctgatcaaacgatcgacacatataagagaatattcaacgatactcatcttcggcatcggcatccaaacgactacagaactcatcaaagattcccaatatgcctgctgagacgcagatctccacgcctctccccgccggcgtcaatgagcagtcagtcatcaatgctcttcacaaccatgatgcctacgtccgggtgacctgcccacaactcatctcgcagaaacacgtctccgggtcgcctaacccaaatgaaccctgcgtttacgaaatcacagacaagcgaccaatgggtcagacaacattcgagctcacgctcaccaacgtgtcggacggagttgatgccatggttaagggcaaagcgccgactggaagcatggtaatcaagtcccagtggcgcgtggttggcggcaaactggatgaaaacgtcgagattgacagtaacatggtaacgaagaagatgatcaagggaaatgttgagagaggacacccagacttccatcaggggttcttaactcaggctactcaggcttaagatggtacgcggggttcaaattaggacgtggttctttttgacatcggattgctagtattatgcg

SEQ ID NO: 1680 - DNA, 612 bp, Muscodor strobelii
  misc_feature: SGI cDNA ID NO. 560169
  misc_feature: Encodes the peptide sequence at SEQ ID NO 1681
atgtcctcgtcgccagcgacgcaatcgattagtagcgaagaatgggaggacatgtgtccggcgcgcagaatccaatcttatctcagtcagggcgacacatcatggggctggatcgtataccggacatgctacaaacccgagtacgacacggcctgggaaaacttgaaaagtgacataacgcgacagtttcgccgtcatatcgcagagtcagatgcaccagatattgcagacaagatggactttgtcttcgtggaagaccgcgagactctggaaggcatgtcacgcacggagttgaggcgccgcttcagggactgggcacgtgcggagtcctcgctgcgtgggttgaatctggacgagccgatgggctgccgtggatctcgctgggagtattttctacaggttgatgaagatgttcttgcgacgggcgtgcatgctgtcaacctcgttcaagggtgggttgaggaggataatagcctagaggcagaggagtggggtgggaactgggattggatgagtgttcctatgtgggaactcaatcttgagctttatgaggatctgggaaatgatgaacagtggtattggtggtacaaaaaattcatgccgaattgttga

SEQ ID NO: 1681 - protein, 203 aa, Muscodor strobelii
  misc_feature: SGI Peptide ID NO. 560169
  misc_feature (8)..(197): NCBI GI: 261357016 Blast Desc: conserved [Verticillium albo-atrum VaMs.102]
  misc_feature (14)..(197): NCBI GI: 116191495 Blast Desc: CHGG_05465 [Chaetomium globosum CBS 148.51] gi|88181378|gb|EAQ88846.1| CHGG_05465 [Chaetomium globosum CBS 148.51]
  misc_feature (18)..(152): NCBI GI: 255940032 Blast Desc: Pc16g04330 [Penicillium chrysogenum Wisconsin 54-1255] gi|211585408|emb|CAP93103.1| Pc16g04330 [Penicillium chrysogenum Wisconsin 54-1255]
  misc_feature (35)..(152): NCBI GI: 255956731 Blast Desc: Pc21g21430 [Penicillium chrysogenum Wisconsin 54-1255] gi|211590829|emb|CAP97040.1| Pc21g21430 [Penicillium chrysogenum Wisconsin 54-1255]
  misc_feature (35)..(152): NCBI GI: 77377684 Blast Desc: [Penicillium chrysogenum] gi|148793081|gb|ABR12612.1| [Penicillium chrysogenum]
  misc_feature (38)..(141): NCBI GI: 67537786 Blast Desc: AN5063.2 [Aspergillus nidulans FGSC A4] gi|40740867|gb|EAA60057.1| [Aspergillus nidulans FGSC A4] gi|259482056|tpe|CBF76169.1| TPA: conserved [Aspergillus nidulans
  misc_feature (35)..(117): NCBI GI: 239610520 Blast Desc: conserved [Ajellomyces dermatitidis ER-3]
  misc_feature (35)..(117): NCBI GI: 261195430 Blast Desc: conserved [Ajellomyces dermatitidis SLH14081] gi|239587991|gb|EEQ70634.1| conserved [Ajellomyces dermatitidis SLH14081]
  misc_feature (34)..(141): NCBI GI: 238841571 Blast Desc: conserved [Microsporum canis CBS 113480]
  misc_feature (24)..(155): NCBI GI: 256723488 Blast Desc: NECHADRAFT_94069 [Nectria haematococca mpVI 77-13-4]
MSSSPATQSISSEEWEDMCPARRIQSYLSQGDTSWGWIVYRTCYKPEYDTAWENLKSDITRQFRRHIAESDAPDIADKMDFVFVEDRETLEGMSRTELRRRFRDWARAESSLRGLNLDEPMGCRGSRWEYFLQVDEDVLATGVHAVNLVQGWVEEDNSLEAEEWGGNWDWMSVPMWELNLELYEDLGNDEQWYWWYKKFMPNC

SEQ ID NO: 1682 - DNA, 2614 bp, Muscodor strobelii
  misc_feature: SGI EST ID NO. CUFF.4411.0
  misc_feature: Variant of the nucleotide sequence at SEQ ID NO 1680
aaaacacccgttgaattacacgcttactgcgtcgctcgtcgatggtattcccctcacttgattcctcacaatgacgcatgtaaggtgcatatctgcgagagaggaccccataatcatgagcctacagacacgtcgacatcacgaacaatgcattcgaaatttatatataatgctggtaaagtctaagctatcatgggattctgtctcaccagattagcaacaattacgaacctacaccaagttacgacctgagttattcactgttcctctatcatgcccaaactcgtcactattctcggtgcaacgggcaaccaaggtgccgcagtcatagacgcactcatcaacgatgccaattatactctccgcgcagtgactcgtgatccctctagcgcgaaatcacaagagctcagatctaagggcatagaagtagtccatggccacacagacgatgttgcatccctcaccacggcattcagaggctcatacgctgtctatgccgtaacgggatttagcgatcttctcggcaccggctccctagacgccattgccaaactcgagggtcaacacgctattaacattgcacaagcggttctcaacgccgatgtcgagcacttcatctggagtacacttcctgcagtcaagaagatatccaacgagaaatacgccatggcaaacttcgtggggaagaatatggcagatgacttcatcatcgcgcatccagagctaaacgcaaagacgacatttctcctcatcgcacagtaccacaagaactatgctcttccacctttgtcgatgtatccgatcccgtcggctcagaagtgggttcacttcgctactcatccagccgagacaccgatctactggattggtgacgtgcagaagaatctcgtgccgttcatcaagcctattctcgagcagccggagaagactcgtggtcaggctgtgtttgcgcatgcggaagttcatagttctgaagagtcgttggagatttgggcgaaagctaagaatactactgcagtgcatgtctctgtatcgcaggatacgctgaatgcgctttggggcgactatgcggtgttcctcggtgagatgtggagattctggggggagtataagagggaggcttggagttatccgggtaggaaggtgtatgatagagatgaattgggaatcactagtgagggctttgtgagcttggagggatcgctgaagcatttggagattccagggagttagagagagctggataggacattgctgggtggaagtgtgccgaagagtagtctcatgatagactcagccaattccttatatgattatagagaagattattatctcaaaaattgcgcgatgattctcattcatgctgatattgagtttccttggtggtttctgaatgcttggtgtgatatcctgggtgtgaggcaccccttgtaagacatgccgaccgcgcaccactcccaggctgagcttgcttgtggcacatgtacactcttgaaatatgcaaacttttctcctttcgtttgacatttcttccagatcgcgaggtgagcttgtcggagatgtctctttcactcacacttccattgtaacaagttcaagctatttgcatcatagccttcatttcctccgatggcccctgtccgaccccctgtaggcaggttcgtcccgaacctcacaagcagaagcgaaccgtggaagcgttttatcgcctctatcgcccacaagcgcgttcgtctaaatccgcgcattgttacatattcatcgtcccacattcgactagaaccatgctcataccaacgccgcatcaatcaagcctggatgtcttcctcaacgcggccggatcaacagaacaacatgtcctcgtcgccagcgacgcaatcgattagtagcgaagaatgggaggacatgtgtccggcgcgcagaatccaatcttatctcagtcagggcgacacatcatggggctggatcgtataccggacatgctacaaacccgagtacgacacggcctgggaaaacttgaaaagtgacataacgcgacagtttcgccgtcatatcgcagagtcagatgcaccagatattgcagacaagatggactttgtcttcgtggaagaccgcgagactctggaaggcatgtcacgcacggagttgaggcgccgcttcagggactgggcacgtgcggagtcctcgctgcgtgggttgaatctggacgagccgatgggctgccgtggatctcgctgggagtattttctacaggttgatgaagatgttcttgcgacgggcgtgcatgctgtcaacctcgttcaagggtgggttgaggaggataatagcctagaggcagaggagtggggtgggaactgggattggatgagtgttcctatgtgggaactcaatcttgagctttatgaggatctgggaaatgatgaacagtggtattggtggtacaaaaaattcatgccgaattgttgaccgctgtaggtacttgatgacttcaattgctttgatggatcgcacgaggatttgcggcctaagacagtatgtgagaagcgacatgtgggttagtcaatattacggaaagagcaagatggagaacggcccaatattcacaaacatcgca

SEQ ID NO: 1683 - DNA, 960 bp, Muscodor strobelii
  misc_feature: SGI cDNA ID NO. 560170
  misc_feature: Encodes the peptide sequence at SEQ ID NO 1684
atgcccaaactcgtcactattctcggtgcaacgggcaaccaaggtgccgcagtcatagacgcactcatcaacgatgccaattatactctccgcgcagtgactcgtgatccctctagcgcgaaatcacaagagctcagatctaagggcatagaagtagtccatggccacacagacgatgttgcatccctcaccacggcattcagaggctcatacgctgtctatgccgtaacgggatttagcgatcttctcggcaccggctccctagacgccattgccaaactcgagggtcaacacgctattaacattgcacaagcggttctcaacgccgatgtcgagcacttcatctggagtacacttcctgcagtcaagaagatatccaacgagaaatacgccatggcaaacttcgtggggaagaatatggcagatgacttcatcatcgcgcatccagagctaaacgcaaagacgacatttctcctcatcgcacagtaccacaagaactatgctcttccacctttgtcgatgtatccgatcccgtcggctcagaagtgggttcacttcgctactcatccagccgagacaccgatctactggattggtgacgtgcagaagaatctcgtgccgttcatcaagcctattctcgagcagccggagaagactcgtggtcaggctgtgtttgcgcatgcggaagttcatagttctgaagagtcgttggagatttgggcgaaagctaagaatactactgcagtgcatgtctctgtatcgcaggatacgctgaatgcgctttggggcgactatgcggtgttcctcggtgagatgtggagattctggggggagtataagagggaggcttggagttatccgggtaggaaggtgtatgatagagatgaattgggaatcactagtgagggctttgtgagcttggagggatcgctgaagcatttggagattccagggagttag

SEQ ID NO: 1684 - protein, 319 aa, Muscodor strobelii
  misc_feature: SGI Peptide ID NO. 560170
  misc_feature (5)..(252): Pfam Id: PF05368 Pfam Desc: NmrA-like family
  misc_feature (5)..(127): Pfam Id: PF05368 Pfam Desc: NmrA-like family
  misc_feature (1)..(316): NCBI GI: 116201209 Blast Desc: CHGG_08489 [Chaetomium globosum CBS 148.51] gi|88177007|gb|EAQ84475.1| CHGG_08489 [Chaetomium globosum CBS 148.51]
  misc_feature (3)..(314): NCBI GI: 121712068 Blast Desc: conserved [Aspergillus clavatus NRRL 1] gi|119401801|gb|EAW12223.1| conserved [Aspergillus clavatus NRRL 1]
  misc_feature (4)..(315): NCBI GI: 238487686 Blast Desc: hscarg dehydrogenase, [Aspergillus flavus NRRL3357] gi|220699960|gb|EED56299.1| hscarg dehydrogenase, [Aspergillus flavus NRRL3357]
  misc_feature (4)..(315): NCBI GI: 169769975 Blast Desc: [Aspergillus oryzae RIB40] gi|83767316|dbj|BAE57455.1| protein product [Aspergillus oryzae]
  misc_feature (1)..(300): NCBI GI: 154324058 Blast Desc: BC1G_00428 [Botryotinia fuckeliana B05.10] gi|150842657|gb|EDN17850.1| BC1G_00428 [Botryotinia fuckeliana B05.10]
  misc_feature (1)..(285): NCBI GI: 256723011 Blast Desc: NECHADRAFT_97421 [Nectria haematococca mpVI 77-13-4]
  misc_feature (1)..(300): NCBI GI: 154315705 Blast Desc: BC1G_04425 [Botryotinia fuckeliana B05.10] gi|150847365|gb|EDN22558.1| BC1G_04425 [Botryotinia fuckeliana B05.10]
  misc_feature (3)..(299): NCBI GI: 67904690 Blast Desc: AN9332.2 [Aspergillus nidulans FGSC A4] gi|40747243|gb|EAA66399.1| AN9332.2 [Aspergillus nidulans FGSC A4] gi|259488169|tpe|CBF87418.1| TPA: conserved [Aspergillus FGSC
  misc_feature (1)..(308): NCBI GI: 145259479 Blast Desc: An04g10360 [Aspergillus niger] gi|134075016|emb|CAK44816.1| protein product [Aspergillus niger]
  misc_feature (3)..(297): NCBI GI: 115390713 Blast Desc: [Aspergillus terreus NIH2624] gi|114193785|gb|EAU35485.1| [Aspergillus terreus NIH2624]
MPKLVTILGATGNQGAAVIDALINDANYTLRAVTRDPSSAKSQELRSKGIEVVHGHTDDVASLTTAFRGSYAVYAVTGFSDLLGTGSLDAIAKLEGQHAINIAQAVLNADVEHFIWSTLPAVKKISNEKYAMANFVGKNMADDFIIAHPELNAKTTFLLIAQYHKNYALPPLSMYPIPSAQKWVHFATHPAETPIYWIGDVQKNLVPFIKPILEQPEKTRGQAVFAHAEVHSSEESLEIWAKAKNTTAVHVSVSQDTLNALWGDYAVFLGEMWRFWGEYKREAWSYPGRKVYDRDELGITSEGFVSLEGSLKHLEIPGS

SEQ ID NO: 1685 - DNA, 2614 bp, Muscodor strobelii; identical to SEQ ID NO: 1682
  misc_feature: SGI EST ID NO. CUFF.4411.0
  misc_feature: Variant of the nucleotide sequence at SEQ ID NO 1683

SEQ ID NO: 1686 - DNA, 669 bp, Muscodor strobelii
  misc_feature: SGI cDNA ID NO. 560171
  misc_feature: Encodes the peptide sequence at SEQ ID NO 1687
atgttcgcgccgtttgttgactccatccgggactgggccagtgcaaatggcctcattagctccccaaaacccattcgtcgactattcgatcgcgtgccagcgcgaatcttgctatcgggactagatgccgcaggcaagacgacgatacttgcgaatcacctatctcgcaacggaggtcaagatattgaaaccgtgataccgttcattgggtttaacatcgaaaaattacattatggatcagtgcatttcgaaaacctagatctaggaggcggtcgcaagtcgtacaagcaagaaaaacaactatttcttacagaagatgccctcgtctgggttattgactcttgcgactatgatcgcattgtcgagtccgtcgaggaattacagctgctgcttaagtatgaccaagaggaaggtggaaagaatgtgccagtcctcttgctggtgaacaagcaaggcgtacaattgagaaatggaacgaaaaacctgacagtggctgaagtgaagagtcaattcatcgaacgtatcaagggttgcaaaggtcggccgtggcatattgaagcgaccgatggcataactgggcttgggctcattgaagcattttgttggcttcgagatcaattggacgcccgacaaaattcggtccagcaagagatggtccaagtgcattga

SEQ ID NO: 1687 - protein, 222 aa, Muscodor strobelii
  misc_feature: SGI Peptide ID NO. 560171
  misc_feature (21)..(207): Pfam Id: PF00025 Pfam Desc: ADP-ribosylation factor family
  misc_feature (106)..(207): Pfam Id: PF00025 Pfam Desc: ADP-ribosylation factor family
  misc_feature (34)..(90): Pfam Id: PF00025 Pfam Desc: ADP-ribosylation factor family
  misc_feature (26)..(210): NCBI GI: 256087483 Blast Desc: ADP-ribosylation factor arf [Schistosoma mansoni] gi|238665392|emb|CAZ36137.1| ADP-ribosylation factor, arf, [Schistosoma mansoni]
  misc_feature (19)..(207): NCBI GI: 115491645 Blast Desc: ADP-ribosylation factor [Aspergillus terreus NIH2624] gi|114197310|gb|EAU39010.1| ADP-ribosylation factor [Aspergillus terreus NIH2624]
  misc_feature (19)..(213): NCBI GI: 70995568 Blast Desc: ADP-ribosylation factor [Aspergillus fumigatus Af293] gi|119495614|ref|XP_001264588.1| ADP-ribosylation factor, [Neosartorya fischeri NRRL 181] gi|41581249|emb|CAE47898.1| NRRL
  misc_feature (25)..(207): NCBI GI: 226484822 Blast Desc: ADP-ribosylation factor 4 [Schistosoma japonicum]
  misc_feature (25)..(207): NCBI GI: 91076676 Blast Desc: : similar to GA10714-PA [Tribolium castaneum] gi|270002649|gb|EEZ99096.1| TcasGA2_TC004981 [Tribolium castaneum]
  misc_feature (25)..(207): NCBI GI: 56758566 Blast Desc: SJCHGC01339 protein [Schistosoma japonicum] gi|226484818|emb|CAX74318.1| ADP-ribosylation factor 4 [Schistosoma japonicum] gi|226484820|emb|CAX74319.1| factor 4
  misc_feature (19)..(207): NCBI GI: 145239679 Blast Desc: An08g03690 [Aspergillus niger] gi|134076997|emb|CAK45406.1| protein product [Aspergillus niger]
  misc_feature (25)..(207): NCBI GI: 67517899 Blast Desc: ARF_AJECA ADP-RIBOSYLATION FACTOR [Aspergillus nidulans FGSC A4] gi|40747088|gb|EAA66244.1| ARF_AJECA ADP-RIBOSYLATION FACTOR [Aspergillus nidulans FGSC A4] TPA: FGSC
  misc_feature (28)..(207): NCBI GI: 50416631 Blast Desc: DEHA0B14399g [Debaryomyces hansenii CBS767] gi|49653232|emb|CAG85578.1| DEHA2B14322p [Debaryomyces hansenii]
  misc_feature (19)..(213): NCBI GI: 121701675 Blast Desc: ADP-ribosylation factor, [Aspergillus clavatus NRRL 1] gi|119397245|gb|EAW07676.1| ADP-ribosylation factor, [Aspergillus clavatus NRRL 1]
MFAPFVDSIRDWASANGLISSPKPIRRLFDRVPARILLSGLDAAGKTTILANHLSRNGGQDIETVIPFIGFNIEKLHYGSVHFENLDLGGGRKSYKQEKQLFLTEDALVWVIDSCDYDRIVESVEELQLLLKYDQEEGGKNVPVLLLVNKQGVQLRNGTKNLTVAEVKSQFIERIKGCKGRPWHIEATDGITGLGLIEAFCWLRDQLDARQNSVQQEMVQVH

SEQ ID NO: 1688 - DNA, 1426 bp, Muscodor strobelii
  misc_feature: SGI EST ID NO. CUFF.4492.0
  misc_feature: Variant of the nucleotide sequence at SEQ ID NO 1686
cagtcaaccgcgactaaattgaaaagctggtgataattacgggttcgacattacaatgttcgcgccgtttgttgactccatccgggactgggccagtgcaaatggcctcattagctccccaaaacccattcgtcgactattcgatcgcgtgccagcgcgaatcttgctatcgggactagatgccgcaggcaagacgacgatacttgcgaatcacctatctcgcaacggaggtcaagatattgaaaccgtgataccgttcattgggtttaacatcgaaaaattacattatggatcagtgcatttcgaaaacctagatctaggaggcggtcgcaagtcgtacaagcaagaaaaacaactatttcttacagaagatgccctcgtctgggttattgactcttgcgactatgatcgcattgtcgagtccgtcgaggaattacagctgctgcttaagtatgaccaagaggaaggtggaaagaatgtgccagtcctcttgctggtgaacaagcaaggcgtacaattgagaaatggaacgaaaaacctgacagtggctgaagtgaagagtcaattcatcgaacgtatcaagggttgcaaaggtcggccgtggcatattgaagcgaccgatggcataactgggcttgggctcattgaagcattttgttggcttcgagatcaattggacgcccgacaaaattcggtccagcaagagatggtccaagtgcattgaaagatgcatgtctaagaatactgtcgtattgtcttcctgggtataattcgaggcctactcggttccttgggctggattgcctacatttacgtggcctttcagacttcgactcgtacttaagtccgaattaggcaatgttctggaaggttaagcaattgggcggcgttcctgtcatcgtcgatcgcgtggtctatccttgtgcgatctaaaccaactgctgccgaagccaatgacagaaccaggattataatctcgggtgctgcaggtcactcatgcgagacatctcgaatgaggcacagacaggccacggttggaggcacgggtgcgggacgaaaatgccgcagagtgttcgcttctgacgagctgataacaggctaatattaatgaaggcagtcaagtagaagtcgatctcatatgaatgcaagaatttgaaaagcgatgggaattaagttgcgagacactcgagcacacctcggaattgtccggttgtcgcatgcttggaaaacgaggggcgccaggttcaggtcaacaacctctaagttgcggtcagagaagatcaagatatgaatcaacaacaaaagcgtcgaggctacctaacttctgggaacttggtgtctaaaagaacaaaagccaatgattaaataatttcgctcttttttatataaaaaccacagcctcccgagctacgcgacaggatgtctc

SEQ ID NO: 1689 - DNA, 1338 bp, Muscodor strobelii
  misc_feature: SGI cDNA ID NO. 560172
  misc_feature: Reduced expression when VOC is produced
  misc_feature: Encodes the peptide sequence at SEQ ID NO 1690
atggttatggcaactaccatcgtcgaacatccaatcccagctgtctttgagaatcatctgaatctcaaaaatctgattgtcgaccgcaaccatggcgctgttaccgcaaagcaaatgattggcgatgcgctccgccaacgcgtgaccagcatcgaccatgaatcctgcgaccccggagatgaagatacctttttcgtgggcgatcttggcgaggtttatcgccagcacatgcgctggaagaagaaccttcctcgcgtcaagcccttctacgccatcaagtgcaacccagacccaaaggtcatccagcttctggctggtctgggcaccggcttcgactgtgcctccaaggccgaaatcgagcaagtcttgtccatcggcgtagacccttcccgaatcatctatgctcagccttgcaagaccaactcctacgttcgatacgtagccaaccagggcgtcaagcagatgacctttgataatgccgatgagctgcgcaagattgctaagctctaccccggcgctgagctgttcctacgcatcttgaccgacgactcatccagcctttgccgcttgagcttgaagtttggtgcctccatggacgccaccgacgaccttctccgcttggcaaaggatcttggactcaatgttgttggcgttagcttccatgtgggatccggtgcttccgatcccttggccttcctcaaggctgttcaggacgccaacactgtgttcaagcaaggtgcggcctatggcttcagcatgcatacccttgatgttggtggcggattttccggcgacaccttcgaggccatggctgaagttcttcgagctgccttggatgagtactttccgccccatatcaacatcattgcggaacctggccgttactatgtgtcgtctgcgttcaccattgcttgcaacatcatcgctcgccgcaccatcgacaacccggtcagcggcgagactagctacatgttgtatgtgaacgacggcctctatggcaacttcagcagcatcatgtttgaccaccagcaccccgaggccaaggttttgcgttgcggccatcgtgctcagtacgatgaacctagcgccaacgcggtacccgaaggcattcatgctggtaccgaatactcggtttggggcccgacttgtgatggcattgatcgcatcaccgaatccattcgtttcgaacaggagcttgacgttggtgactggctctattttgaggacatgggagcttacaccaagtgttcggctaccaagttcaacggcttcagcgatgctcacgacgtcatctacgtctgcagtgagccgggtgcgcgagctatcatgcaactctag

SEQ ID NO: 1690 - protein, 445 aa, Muscodor strobelii
  misc_feature: SGI Peptide ID NO. 560172
  misc_feature (68)..(299): Pfam Id: PF02784 Pfam Desc: Pyridoxal-dependent decarboxylase, pyridoxal binding domain
  misc_feature (302)..(432): Pfam Id: PF00278 Pfam Desc: Pyridoxal-dependent decarboxylase, C-terminal sheet domain
  misc_feature (1)..(443): NCBI GI: 145606246 Blast Desc: ornithine decarboxylase [Magnaporthe grisea 70-15] gi|145013956|gb|EDJ98597.1| ornithine decarboxylase [Magnaporthe grisea 70-15]
  misc_feature (1)..(445): NCBI GI: 46123051 Blast Desc: FG05903.1 [Gibberella zeae PH-1]
  misc_feature (1)..(445): NCBI GI: 256731139 Blast Desc: [Nectria haematococca mpVI 77-13-4]
  misc_feature (35)..(445): NCBI GI: 171692171 Blast Desc: protein product [Podospora anserina] gi|170946034|emb|CAP72835.1| protein product [Podospora anserina]
  misc_feature (35)..(445): NCBI GI: 116206602 Blast Desc: CHGG_02594 [Chaetomium globosum CBS 148.51] gi|88183191|gb|EAQ90659.1| CHGG_02594 [Chaetomium globosum CBS 148.51]
  misc_feature (31)..(445): NCBI GI: 85099297 Blast Desc: ornithine decarboxylase [Neurospora crassa OR74A] gi|118381|sp|P27121.1|DCOR_NEUCR RecName: Full=Ornithine decarboxylase; Short=ODC gi|168854|gb|AAA33604.1| ornithine
  misc_feature (9)..(445): NCBI GI: 13774332 Blast Desc: ornithine decarboxylase [Oculimacula yallundae]
  misc_feature (3)..(445): NCBI GI: 121551083 Blast Desc: ornithine decarboxylase [Epichloe festucae]
  misc_feature (23)..(445): NCBI GI: 156040381 Blast Desc: SS1G_12207 [Sclerotinia sclerotiorum 1980] gi|154696263|gb|EDN96001.1| SS1G_12207 [Sclerotinia sclerotiorum 1980]
  misc_feature (31)..(445): NCBI GI: 154320654 Blast Desc: BC1G_01799 [Botryotinia fuckeliana B05.10] gi|150853488|gb|EDN28680.1| BC1G_01799 [Botryotinia fuckeliana B05.10]
  misc_feature (31)..(445): SWISSPROT Homolog: EC 4.1.1.17 Ornithine decarboxylase
  misc_feature: Useful for introducing or modulating the production of volatile compounds
MVMATTIVEHPIPAVFENHLNLKNLIVDRNHGAVTAKQMIGDALRQRVTSIDHESCDPGDEDTFFVGDLGEVYRQHMRWKKNLPRVKPFYAIKCNPDPKVIQLLAGLGTGFDCASKAEIEQVLSIGVDPSRIIYAQPCKTNSYVRYVANQGVKQMTFDNADELRKIAKLYPGAELFLRILTDDSSSLCRLSLKFGASMDATDDLLRLAKDLGLNVVGVSFHVGSGASDPLAFLKAVQDANTVFKQGAAYGFSMHTLDVGGGFSGDTFEAMAEVLRAALDEYFPPHINIIAEPGRYYVSSAFTIACNIIARRTIDNPVSGETSYMLYVNDGLYGNFSSIMFDHQHPEAKVLRCGHRAQYDEPSANAVPEGIHAGTEYSVWGPTCDGIDRITESIRFEQELDVGDWLYFEDMGAYTKCSATKFNGFSDAHDVIYVCSEPGARAIMQL

SEQ ID NO: 1691 - DNA, 2319 bp, Muscodor strobelii
  misc_feature: SGI EST ID NO. CUFF.4495.0
  misc_feature: Variant of the nucleotide sequence at SEQ ID NO 1689
ccgacaggttcagaccttgccccgccacccaccacaagtctgggctggagaaaaaaaagctaacgccggcgtaccttttataagaaacccgcccggtctctcaacgccgtcttctttccagctccctcttcaccgcaacattccaacctagctgaggcaattgtcaagcacaacctcctgctctcatacaactgcgcgtgtccgcatgcaaacaataccgcatcgcccgatttcgcccatgatctgtctttaatcggttcagaccccccaaaactcgactcgcctttggtctcctcaaaggcaccgctgtcacaacggcttcctgggccgtgagcttcgtttctgaccaagatttcagcctgcgcaagaccttccacatcatcaactcccgtccaccaccctctgctgaagtcgcctaacttctaccgcgtgcccgtcatcctcgacatcgaccctccacccgcgcccgacgtccccccaccccatcagctgccgcataggacgagttctaaggttcttcctctgaacgaggaggagtcgaggagacctcgtcagatcgcttcgggtccaggatctttcctattccgacccccctaacaccagagactgccgtctagtcaaacatcatccacctagctttccccggcatactgtcagtcttgtcttcttgcctcagccaagtagacaacccagagaagtccctaggagattactgcatctctgcccaatacacggaaaagaacacttcgcacccatctcatctcgatcctctgcaagcttcagtgctacaaatcggaggatatggttatggcaactaccatcgtcgaacatccaatcccagctgtctttgagaatcatctgaatctcaaaaatctgattgtcgaccgcaaccatggcgctgttaccgcaaagcaaatgattggcgatgcgctccgccaacgcgtgaccagcatcgaccatgaatcctgcgaccccggagatgaagatacctttttcgtgggcgatcttggcgaggtttatcgccagcacatgcgctggaagaagaaccttcctcgcgtcaagcccttctacgccatcaagtgcaacccagacccaaaggtcatccagcttctggctggtctgggcaccggcttcgactgtgcctccaaggccgaaatcgagcaagtcttgtccatcggcgtagacccttcccgaatcatctatgctcagccttgcaagaccaactcctacgttcgatacgtagccaaccagggcgtcaagcagatgacctttgataatgccgatgagctgcgcaagattgctaagctctaccccggcgctgagctgttcctacgcatcttgaccgacgactcatccagcctttgccgcttgagcttgaagtttggtgcctccatggacgccaccgacgaccttctccgcttggcaaaggatcttggactcaatgttgttggcgttagcttccatgtgggatccggtgcttccgatcccttggccttcctcaaggctgttcaggacgccaacactgtgttcaagcaaggtgcggcctatggcttcagcatgcatacccttgatgttggtggcggattttccggcgacaccttcgaggccatggctgaagttcttcgagctgccttggatgagtactttccgccccatatcaacatcattgcggaacctggccgttactatgtgtcgtctgcgttcaccattgcttgcaacatcatcgctcgccgcaccatcgacaacccggtcagcggcgagactagctacatgttgtatgtgaacgacggcctctatggcaacttcagcagcatcatgtttgaccaccagcaccccgaggccaaggttttgcgttgcggccatcgtgctcagtacgatgaacctagcgccaacgcggtacccgaaggcattcatgctggtaccgaatactcggtttggggcccgacttgtgatggcattgatcgcatcaccgaatccattcgtttcgaacaggagcttgacgttggtgactggctctattttgaggacatgggagcttacaccaagtgttcggctaccaagttcaacggcttcagcgatgctcacgacgtcatctacgtctgcagtgagccgggtgcgcgagctatcatgcaactctagttcagacttgcacatactcattttacttcttttcttgaggtaacgattcgtggtagcgtacgttatctggatagactcttatatagactagagcgcggcattgtggctgctttgacgtgaaaggctcgtcggcatttgttgtcattgagaaaattaagttcataactataataaaaaagg

SEQ ID NO: 1692 - DNA, 375 bp, Muscodor strobelii
  misc_feature: SGI cDNA ID NO. 560173
  misc_feature: Elevated expression when VOC is produced
  misc_feature: Encodes the peptide sequence at SEQ ID NO 1693
atgcgcttgactacagtgtcgcttctatcactgggcctcattaggactacatctgcccttcctggatgtagtcttgctctggctccaaccttagcccagcctcagaatgcggcagaagtcattatcacaagtgcattgagtaaatgggccaagagcactggatcttcatatatctcttcgaattgggtagacgccagtcacaccttccaagccccatactctatcatgttcaaggccggcatcatcgacggatacctgaccaacattgaactgagctccatcctcgatggatggctagggtcttacttggtcggtggtggtgatgcatcagataatgacttcaaggtcatgggtatcacttgcactatcctctga

SEQ ID NO: 1693 - protein, 124 aa, Muscodor strobelii
  misc_feature: SGI Peptide ID NO. 560173
  misc_feature: Useful for introducing or modulating the production of volatile compounds
MRLTTVSLLSLGLIRTTSALPGCSLALAPTLAQPQNAAEVIITSALSKWAKSTGSSYISSNWVDASHTFQAPYSIMFKAGIIDGYLTNIELSSILDGWLGSYLVGGGDASDNDFKVMGITCTIL

SEQ ID NO: 1694 - DNA, 1275 bp, Muscodor strobelii
  misc_feature: SGI EST ID NO. CUFF.4426.0
  misc_feature: Variant of the nucleotide sequence at SEQ ID NO 1692
aacagggttgcatgaagcatcaccaatcgagcgatgcgagatgggatgccggctcccgttgtggtaatcttgatcccccgcaaccatggttgagcaatattagtgccaagttgagatctaagtacaactgtggtcatgttccgcgactcgacgttaaggatctagactccgcacggtcgcggttcgcctagcaggtatttggtatttcgcacatgtgctcataggatcttgatatggcatgattgatagaaggactattttaattcaaaaactccgtcgttgaaaaatggcgatccttgactattcgccatcatctacataggctcaaagagaagccaggcggatactgactatttgagactcttcgcgcttccgcgtagtccacgctgtcctagtcagacttttcaaagtcaccatgcgcttgactacagtgtcgcttctatcactgggcctcattaggactacatctgcccttcctggatgtagtcttgctctggctccaaccttagcccagcctcagaatgcggcagaagtcattatcacaagtgcattgagtaaatgggccaagagcactggatcttcatatatctcttcgaattgggtagacgccagtcacaccttccaagccccatactctatcatgttcaaggccggcatcatcgacggatacctgaccaacattgaactgagctccatcctcgatggatggctagggtcttacttggtcggtggtggtgatgcatcagataatgacttcaaggtcatgggtatcacttgcactatcctctgagatagctgtgctaggaaagaggctcttgatttcgcgattattcttgacggttagttaaggtgccagctgtacgatgttatgataatatttcttttattctctagattagcttcaagcaatgcctgtttgaagatgcttctggagctgggtgctgaattggacgctatattttttcaattgcagtcgaccatgtgcgaagggactaggactcgtattgagctataagggataacaagaacaccaacaaaagtttctgtacttacagacgaaatcatacgtgatttcgaagtaggttctagccgattcgattctgagagaagttgatatcattgtcgaacatgcacgtgtattgctcactcggaggggactcggaccgttgcgaacgtatgtgcaaccgtcgaaacactagcgccacatcatgcgattcccactgctcagccttcacctaaaattgacattctctgttggctgtctgagtggctcga

SEQ ID NO: 1695 - DNA, 879 bp, Muscodor strobelii
  misc_feature: SGI cDNA ID NO. 560174
  misc_feature: Elevated expression when VOC is produced
  misc_feature: Encodes the peptide sequence at SEQ ID NO 1696
atgtcagggacagggacctcgaagacttggttcattaccggttgctcaagcgggttcggcgagctctttgttcgtagacttcgggacgatggacaaaacgtgattgcaacaggtcgtaatgcgaaagagaggctttctcatctgtccgatacgggcgccgtcattttggatcttgatgtgacagccccagcatctgatattgaagtgaagatagcagctgcgtggaatttgtttcctggtggaattgatgttgtcgtcaacaatgcaggatatatcctgagtggagctgttgaggagttgacagaaggggaaatggagcatgccttccgcacaaacttctacggccctttcaacattacaaaggcagttcttccacgtcttcgcgctaaaggttctggcacattactctacatgagttcccaagctggcctacatgccgaccctggtgcatctggatattgtgccaccaagtttgctcttgagggatttgtcgaatgccttgcaaaggaattggcaatctttgctccaaatatcagagtactcatagttgagcttgggtacttcaatactcaagcttttgcgaacatcaatcatgtgccggcaagggcaccggattatgctgaatttaactccaccgtgcgagccgtggaagcaggcgtggtcggcaatgagcctggtgatgctgctaaagcagttgacatcatgattgacctcgtaaacgggactggagtcgcggcagataggacagttcccttgagaatcccgctgggaacggatggatggcagagaattcgcgataaaggggttagtgtagtcaacgtatgcgacgaatgggaggttgttgcaaagagcactgacataggatctgagtctcactaa

SEQ ID NO: 1696 - protein, 292 aa, Muscodor strobelii
  misc_feature: SGI Peptide ID NO. 560174
  misc_feature (8)..(172): Pfam Id: PF00106 Pfam Desc: short chain dehydrogenase
  misc_feature (9)..(181): Pfam Id: PF08659 Pfam Desc: KR domain
  misc_feature (9)..(286): NCBI GI: 256722682 Blast Desc: NECHADRAFT_53052 [Nectria haematococca mpVI 77-13-4]
  misc_feature (9)..(291): NCBI GI: 46115898 Blast Desc: FG03791.1 [Gibberella zeae PH-1]
  misc_feature (4)..(277): NCBI GI: 145250873 Blast Desc: An15g04150 [Aspergillus niger] gi|134082474|emb|CAK97282.1| protein product [Aspergillus niger]
  misc_feature (8)..(292): NCBI GI: 242801488 Blast Desc: hydroxybutyrate dehydrogenase, [Talaromyces stipitatus ATCC 10500] gi|218717123|gb|EED16544.1| hydroxybutyrate dehydrogenase, [Talaromyces stipitatus ATCC 10500]
  misc_feature (10)..(287): NCBI GI: 256731864 Blast Desc: NECHADRAFT_41660 [Nectria haematococca mpVI 77-13-4]
  misc_feature (8)..(287): NCBI GI: 159130409 Blast Desc: short chain oxidoreductase/dehydrogenase, [Aspergillus fumigatus A1163]
  misc_feature (9)..(287): NCBI GI: 145243658 Blast Desc: An11g03490 [Aspergillus niger] gi|134079029|emb|CAK48338.1| protein product [Aspergillus niger]
  misc_feature (8)..(287): NCBI GI: 70990156 Blast Desc: short chain oxidoreductase/dehydrogenase [Aspergillus fumigatus Af293] gi|66847559|gb|EAL87889.1| short chain oxidoreductase/dehydrogenase, [Aspergillus fumigatus Af293]
  misc_feature (8)..(287): NCBI GI: 119497429 Blast Desc: short chain oxidoreductase/dehydrogenase, [Neosartorya fischeri NRRL 181] gi|119413635|gb|EAW23576.1| short chain oxidoreductase/dehydrogenase, [Neosartorya fischeri NRRL 181]
  misc_feature (6)..(286): NCBI GI: 121703399 Blast Desc: short chain oxidoreductase/dehydrogenase, [Aspergillus clavatus NRRL 1] gi|119398107|gb|EAW08538.1| short chain oxidoreductase/dehydrogenase, [Aspergillus clavatus NRRL 1]
  misc_feature (8)..(190): SWISSPROT Homolog: EC 1.1.1.100 3-oxoacyl-[acyl-carrier-protein] reductase
  misc_feature: Useful for introducing or modulating the production of volatile compounds
MSGTGTSKTWFITGCSSGFGELFVRRLRDDGQNVIATGRNAKERLSHLSDTGAVILDLDVTAPASDIEVKIAAAWNLFPGGIDVVVNNAGYILSGAVEELTEGEMEHAFRTNFYGPFNITKAVLPRLRAKGSGTLLYMSSQAGLHADPGASGYCATKFALEGFVECLAKELAIFAPNIRVLIVELGYFNTQAFANINHVPARAPDYAEFNSTVRAVEAGVVGNEPGDAAKAVDIMIDLVNGTGVAADRTVPLRIPLGTDGWQRIRDKGVSVVNVCDEWEVVAKSTDIGSESH

SEQ ID NO: 1697 - DNA, 1780 bp, Muscodor strobelii
  misc_feature: SGI EST ID NO. CUFF.4435.0
  misc_feature: Variant of the nucleotide sequence at SEQ ID NO 1695
ccgacaatgcccaacgttgtctattttacttctaccagcatgaaattctatccatctagtcacacacagtacgtctgtacaaaactccattcttgaactgcttagggatcttccttcattcattcacatcttcaagtccaatctgtgttacacttttgcattgtattacctcgcttaacacttccatatcgtcgaatcgaacatgtcagggacagggacctcgaagacttggttcattaccggttgctcaagcgggttcggcgagctctttgttcgtagacttcgggacgatggacaaaacgtgattgcaacaggtcgtaatgcgaaagagaggctttctcatctgtccgatacgggcgccgtcattttggatcttgatgtgacagccccagcatctgatattgaagtgaagatagcagctgcgtggaatttgtttcctggtggaattgatgttgtcgtcaacaatgcaggatatatcctgagtggagctgttgaggagttgacagaaggggaaatggagcatgccttccgcacaaacttctacggccctttcaacattacaaaggcagttcttccacgtcttcgcgctaaaggttctggcacattactctacatgagttcccaagctggcctacatgccgaccctggtgcatctggatattgtgccaccaagtttgctcttgagggatttgtcgaatgccttgcaaaggaattggcaatctttgctccaaatatcagagtactcatagttgagcttgggtacttcaatactcaagcttttgcgaacatcaatcatgtgccggcaagggcaccggattatgctgaatttaactccaccgtgcgagccgtggaagcaggcgtggtcggcaatgagcctggtgatgctgctaaagcagttgacatcatgattgacctcgtaaacgggactggagtcgcggcagataggacagttcccttgagaatcccgctgggaacggatggatggcagagaattcgcgataaaggggttagtgtagtcaacgtatgcgacgaatgggaggttgttgcaaagagcactgacataggatctgagtctcactaattccggtaagcttggacgaaccatggtcagtaagcgaggcgcagagagatttaaacagatgtattcaaaatcacacgagacgcaatgtttgacaacagccattctattctgcggtcgggcccctgcattggagttcgctatatagactctgagctcttgcgcgtcgttcccatcactcaagtcaggtgctacacgacggtatggatgatctgtctagttattagtgttcacgggccattaaaattttgaagccaatcaaacccaagctgccgagcgccactagcaatttggattcatagtagggaaggtcaaagctagcgtgaaccgatagatttgttcgataacgcaagagctaggagagaatgacgatccgcatcatcttgccacagatagtgcgagttcagtatgcaacgcatgctggtttcccgaatgagataacagatggtgtcctgaaagacgcacatttaatcattcgcctttcgccttgcacccgctaagaagttcttcgataaccaaatccaaaacaccagccacgaatgacttcccatagaagctcgagttaaacgaagccgccagattcagagtatccatccaactccacatatgaaattgtacgctcttgttcaacatttcagttcctatcgatacttcggtaacccgtattgcttcttttccgccctctgaaggatatagggtctt

SEQ ID NO: 1698 - DNA, 1323 bp, Muscodor strobelii
  misc_feature: SGI cDNA ID NO. 560175
  misc_feature: Encodes the peptide sequence at SEQ ID NO 1699
atgcaagaaactaggagctattcgtccagcagtgctggtcgccctttgggtaacctggagttattcttcaagattctcgctgatcagggcaaacaactcaaacgagagcactggactattcacttttctatgactttgaacttccccagatcgcttcgagatcctgtgcctaatctcaaatgtgcttggcaagtgatgagactccagcatccagaactaggagcctacgtcagctccgataaagagagcaatgatgccgtgtcgcgtcccttactagtacccaccgatattaatcttgaggcttgggcaacaaacacttttgttgtgctagaagatgtcgcgtctggggacgaagtcttttctagtcaccatgacatgacctaccctacctgtgcctggttaccagcatcatctcagctcatcatcttctcttcacattggcgagttgatggagtggggatatgtcttctcgcaaaccatttcatgacggcattagcggctacaattggcaaagaagcacacccgttgacgattgcgcaacgcttagggatcaatgatcaaggcgttgatacagctgaacttcccaaaagccttgaggacctcgcacgagcttcgactcgccacccgaccttacatcgcgagagagataaccatgtattagcggcgggagccgatgtccttgtatccgagttcctccagggtatgccaagcattggcttgccaacgatcgcagggccggaagccattttaccgtcctcaaacttacgccccatgcttggaggctctgcagaacagcaaattggcctctacttttcaggactgcctgtatatgttgaatccagcgttttgcagaagggagagcaatcttttgaacttatcgcacaaaaattaggaagcgtttatagccgtgaccaggcgcgcttctggaaatcgtccgaaggcattacccaggacggataccttagcttgttggacctggtagaaccatatgtccagcgaactacagtactcttcaatacacccgcccccgaaggcttcccacctaaccaaacgcccgatctcagtagcgttggaaagatggaaaaatacattaagaccctatatccttcagagggcggaaaagaagcaatacgggttaccgaagtatcgataggaactgaaatgttgaacaagagcgtacaatttcatatgtggagttggatggatactctgaatctggcggcttcgtttaactcgagcttctatgggaagtcattcgtggctggtgttttggatttggttatcgaagaacttcttagcgggtgcaaggcgaaaggcgaatga

SEQ ID NO: 1699 - protein, 440 aa, Muscodor strobelii
  misc_feature: SGI Peptide ID NO. 560175
  misc_feature (14)..(434): NCBI GI: 256722744 Blast Desc: NECHADRAFT_87220 [Nectria haematococca mpVI 77-13-4]
  misc_feature (35)..(432): NCBI GI: 55978169 Blast Desc: LolU-1 [Neotyphodium uncinatum]
  misc_feature (35)..(432): NCBI GI: 148285658 Blast Desc: LolU [Neotyphodium sp. PauTG-1]
  misc_feature (35)..(432): NCBI GI: 55978178 Blast Desc: LolU-2 [Neotyphodium uncinatum] gi|148285649|gb|ABQ57516.1| LolU [Neotyphodium coenophialum]
  misc_feature (35)..(432): NCBI GI: 148285640 Blast Desc: LolU [Epichloe festucae]
  misc_feature (14)..(432): NCBI GI: 169619082 Blast Desc: SNOG_12734 [Phaeosphaeria nodorum SN15] gi|111058912|gb|EAT80032.1| SNOG_12734 [Phaeosphaeria nodorum SN15]
  misc_feature (14)..(249): NCBI GI: 242797779 Blast Desc: conserved [Talaromyces stipitatus ATCC 10500] gi|218716377|gb|EED15798.1| conserved [Talaromyces stipitatus ATCC 10500]
  misc_feature (14)..(415): NCBI GI: 115390216 Blast Desc: [Aspergillus terreus NIH2624] gi|114195009|gb|EAU36709.1| [Aspergillus terreus NIH2624]
  misc_feature (4)..(167): NCBI GI: 145230698 Blast Desc: An01g12050 [Aspergillus niger] gi|134055732|emb|CAK44105.1| protein product [Aspergillus niger]
  misc_feature (13)..(169): NCBI GI: 145250867 Blast Desc: An15g04120 [Aspergillus niger] gi|134082471|emb|CAK97279.1| protein product [Aspergillus niger]
MQETRSYSSSSAGRPLGNLELFFKILADQGKQLKREHWTIHFSMTLNFPRSLRDPVPNLKCAWQVMRLQHPELGAYVSSDKESNDAVSRPLLVPTDINLEAWATNTFVVLEDVASGDEVFSSHHDMTYPTCAWLPASSQLIIFSSHWRVDGVGICLLANHFMTALAATIGKEAHPLTIAQRLGINDQGVDTAELPKSLEDLARASTRHPTLHRERDNHVLAAGADVLVSEFLQGMPSIGLPTIAGPEAILPSSNLRPMLGGSAEQQIGLYFSGLPVYVESSVLQKGEQSFELIAQKLGSVYSRDQARFWKSSEGITQDGYLSLLDLVEPYVQRTTVLFNTPAPEGFPPNQTPDLSSVGKMEKYIKTLYPSEGGKEAIRVTEVSIGTEMLNKSVQFHMWSWMDTLNLAASFNSSFYGKSFVAGVLDLVIEELLSGCKAKGE

SEQ ID NO: 1700 - DNA, 1719 bp, Muscodor strobelii
  misc_feature: SGI cDNA ID NO. 560176
  misc_feature: Encodes the peptide sequence at SEQ ID NO 1701
atgtccaaaagcatgctgctgctcatggtttctcttgcgctctttgcagctcttgctgctagattgattcgcaagatttatcctcagccgtatccaggtataccatataacaagatagccgccgtgcgcatcaccggcgacgttcctgaccttattcccattattcagaattctggcgaatttgctaattcgctcttcgaggtcaccacgcagaagctagggacaccaatcgcacagttcctcttccctaacacccgtagaccattggtcatcctagacgatccgaacgatgtcgaagacattctactgcgtcgcggcaaagagttcgacaagggcccaaccaccatagacttattctcccccatgtatcccaaatcatctattagtcaatatacgactccggagcttcgtatacaaaagcgaatatgggcagatgttatgggcctcgagtttcttcgaaagactgcggcaccaaatattcacaaggcaactatggatctagtgcgactatggaagctcagatcatcagcagcggagacagacaacccattcatcgccctcgaggacttcaagaacgccgctctcgatgccatatgggtctccattattggaaatgaactagagatgactaagcacgagatccagaaactccaagatcagatcaacggtgacacagccaattacaatagtcgcgagcttccacgcggggctttcatcagagaacagattagctacatatcagccacgatcgctcgtaactcgaacagtccttctcctaagtacactcaaaagctcgagacttatacgccgcgttatcggaaatttcgtactacagtaaccgcggaaattgctaaggcaatgagaacgtcggttgcccgtttccaacgcttggaggctggcgatctagaagctagcgacattgatacatgcatgatggaccttgttctacgacgccaaataattgaagccaaaagagcaggaagggagccgactgatcctgtcaaagatgagaaaatgctggacgaagtgttcatcatgctagtaggaggacatgattctgtagcaaatacccttgcttggttcgcccaattcatggaggcatatccaggagtccaagtctctttacgttctgcattgcttgccgcctttcccgctcccaatcttccaaccgcccaacagatcattgatcataatatcccttatctcgacagcgtagtcgaagagacctttcgcttagcgggcaccgcgaaagccaacatacgtcaagctatcgttgacacagaggtcttaggatgcaaaattcctaaaggcgctgaaatattcatgaactatcacatcaatcgtccaccgccgtatttagacgaatcaaaatacagcaagacgtctcagtcagttgcgaacggtcggggtagagggtttcactgcgcttctggacggaatcttgatcagtttgatccaacacgctggctggtaagcaccgaggatggggagggtgaactaaaatttaacgcatatgccctgccacaacttgcattcggcggtggataccggggctgtccgggtcgcaaactcgccaagatggaatttcgcatcatccttgtcattctagtcttgcattttgacttcctagagttagaggcagagttcaaaagcacgcgcacgattgaaagaatctttcgcgagcccgagaagtcgtatgtcaagatacgacctctctaa

SEQ ID NO: 1701 - protein, 572 aa, Muscodor strobelii
  misc_feature: SGI Peptide ID NO. 560176
  misc_feature (48)..(569): Pfam Id: PF00067 Pfam Desc: Cytochrome P450
  misc_feature (342)..(443): Pfam Id: PF00067 Pfam Desc: Cytochrome P450
  misc_feature (482)..(569): Pfam Id: PF00067 Pfam Desc: Cytochrome P450
  misc_feature (11)..(572): NCBI GI: 171683027 Blast Desc: protein product [Podospora anserina] gi|170941473|emb|CAP67124.1| protein product [Podospora anserina]
  misc_feature (22)..(496): NCBI GI: 116201423 Blast Desc: CHGG_08596 [Chaetomium globosum CBS 148.51] gi|88177114|gb|EAQ84582.1| CHGG_08596 [Chaetomium globosum CBS 148.51]
  misc_feature (11)..(569): NCBI GI: 145606867 Blast Desc: MGG_03811 [Magnaporthe grisea 70-15] gi|145014497|gb|EDJ99065.1| MGG_03811 [Magnaporthe grisea 70-15]
  misc_feature (22)..(572): NCBI GI: 121711960 Blast Desc: Cytochrome P450 oxidoreductase, [Aspergillus clavatus NRRL 1] gi|119401747|gb|EAW12169.1| Cytochrome P450 oxidoreductase, [Aspergillus clavatus NRRL 1]
  misc_feature (24)..(569): NCBI GI: 169610165 Blast Desc: SNOG_08178 [Phaeosphaeria nodorum SN15] gi|111063334|gb|EAT84454.1| SNOG_08178 [Phaeosphaeria nodorum SN15]
  misc_feature (8)..(572): NCBI GI: 238845007 Blast Desc: cytochrome P450 monooxygenase [Microsporum canis CBS 113480]
  misc_feature (2)..(570): NCBI GI: 115390260 Blast Desc: [Aspergillus terreus NIH2624] gi|114195031|gb|EAU36731.1| [Aspergillus terreus NIH2624]
  misc_feature (8)..(569): NCBI GI: 18026284 Blast Desc: cytochrome P450 [Gibberella zeae]
  misc_feature (8)..(569): NCBI GI: 18026282 Blast Desc: cytochrome P450 [Gibberella zeae]
  misc_feature (8)..(569): NCBI GI: 20475383 Blast Desc: cytochrome p450 monooxygenase [Gibberella zeae]
MSKSMLLLMVSLALFAALAARLIRKIYPQPYPGIPYNKIAAVRITGDVPDLIPIIQNSGEFANSLFEVTTQKLGTPIAQFLFPNTRRPLVILDDPNDVEDILLRRGKEFDKGPTTIDLFSPMYPKSSISQYTTPELRIQKRIWADVMGLEFLRKTAAPNIHKATMDLVRLWKLRSSAAETDNPFIALEDFKNAALDAIWVSIIGNELEMTKHEIQKLQDQINGDTANYNSRELPRGAFIREQISYISATIARNSNSPSPKYTQKLETYTPRYRKFRTTVTAEIAKAMRTSVARFQRLEAGDLEASDIDTCMMDLVLRRQIIEAKRAGREPTDPVKDEKMLDEVFIMLVGGHDSVANTLAWFAQFMEAYPGVQVSLRSALLAAFPAPNLPTAQQIIDHNIPYLDSVVEETFRLAGTAKANIRQAIVDTEVLGCKIPKGAEIFMNYHINRPPPYLDESKYSKTSQSVANGRGRGFHCASGRNLDQFDPTRWLVSTEDGEGELKFNAYALPQLAFGGGYRGCPGRKLAKMEFRIILVILVLHFDFLELEAEFKSTRTIERIFREPEKSYVKIRPL

SEQ ID NO: 1702 - DNA, 258 bp, Muscodor strobelii
  misc_feature: SGI cDNA ID NO. 560177
  misc_feature: Elevated expression when VOC is produced
  misc_feature: Encodes the peptide sequence at SEQ ID NO 1703
atgtcaggacaatctgcagtgccgaataacctaggtcatcgatatgaggactcagatgccctccgtagtttcctcatatcgaataaatggttcgaggatgaacaaatcgatattgacgaatccgatggtcgtggactcattgctaaattgccacgtgcgctgacagagaaggagattgaggatatctttgaacactttgtaaaggagaacgatcgcaagagagagctcgttggttcaaacggtgactccgatgactag

SEQ ID NO: 1703 - protein, 85 aa, Muscodor strobelii
  misc_feature: SGI Peptide ID NO. 560177
  misc_feature: Useful for introducing or modulating the production of volatile compounds
MSGQSAVPNNLGHRYEDSDALRSFLISNKWFEDEQIDIDESDGRGLIAKLPRALTEKEIEDIFEHFVKENDRKRELVGSNGDSDD

SEQ ID NO: 1704 - DNA, 1031 bp, Muscodor strobelii
  misc_feature: SGI EST ID NO. CUFF.4465.0
  misc_feature: Variant of the nucleotide sequence at SEQ ID NO 1702
atttaatattgctacgcagcaggctgcacagactagttgcatatcggtgcccaacttctacaagaatatggataaggctcttcttatcactccttggctggatatgcaggtgcaggtgatgacgcagctcccatgcagtcctcacaagccacaatggcggacttggctccctgcactaccgtgatcaggcgagaccacctcacattacattttactcccagattgtccgatcactttgtttaccgaaactgccctggtcatattgaggctctgctgaaagtggaattactcagcccacggtaggcaaacaattaggctttcgagttccttcgaaacattgtttaaagggcgatcccctcgtttctaagaagctcgaggccaggaccatgtcttccgccatcaaagcaacgttatacaaagtcatttctcttattccgggattacgactgtcctcagacaagatgtcaggacaatctgcagtgccgaataacctaggtcatcgatatgaggactcagatgccctccgtagtttcctcatatcgaataaatggttcgaggatgaacaaatcgatattgacgaatccgatggtcgtggactcattgctaaattgccacgtgcgctgacagagaaggagattgaggatatctttgaacactttgtaaaggagaacgatcgcaagagagagctcgttggttcaaacggtgactccgatgactaggaaggtcacccgatcgacggaccttcagcaaggcacgtgctagacagcgaccattttattcattcactctgtacctctattgactggcatataatctggtgaccaataatgtacctatagatgtactgctgactgtctaattgagaacaacgtcctttcggtaggagcaccgccctagagatgatcaactatttggtaactacttgctcgctcttgtgtgtctacaaccaacatttcattctcgattatgcgtaatatttttggaaactcggagttatcctgactatctttttcgagttcggcgatatgcta

SEQ ID NO: 1705 - DNA, 1017 bp, Muscodor strobelii
  misc_feature: SGI cDNA ID NO. 560178
  misc_feature: Encodes the peptide sequence at SEQ ID NO 1706
atgactctagacgatggagcgtgtcttcctctcctggacacggaggcttacgacgacgcgatcaagaagcaatcaactcaaacacccacgattacgcaaatcacggtccttcacaaccaccatcagctaagtagtagttctaacaaattcatcttaaagactttctgcaattcgcgtcgccctaagatcgcccaggatgagtttgaagcagagttaaaggcaattcgagaagcaccacaacatgatcggatagtccctcttcttagtgctttcaaatttcgagatggatttcatcttatatttcctcatgctccacaacgggatctcaggagcatgtggaaggccaatagaaagagcgacgaagcgccttggtattcaccacaatggctcctaggggagtgccgaggaattgccgaggctcttgcagaactccatcgaccaaattctcaacttgtgcacttggacataaagccgcccaacatactttgcttcccgactgacgtggatggacaacagtcggtcaagcttaaactgtcagactttgggatctcacagaagcttgataagatcaatggaaatagcaaagcccacactaatacctatcgtccccccgagcttagccttggagagtcgatttcgattaaatacgacgtttggagccttggttgcgtctatctcgaattcatcacctgggctttaaagggcatcaaaggagtcgatgatttctctgtattacggaagggtgaagctgacgataaaaaaacgtctgagttcaagggtcggactacgagagacactttcttcaagaaagtagcccttgcgccaaaatggcgtgatttcacggttcggaacatccaaggcccaagacagaacactgaaagcttagacaaaaaaactacaaaaaactggcacactcccctctccattagtcggggcgagattcagattcacagcaaggttaaaaactgtgttaaggaggtaagtttccgaccggctcaacctatcgattctgtgtaa

SEQ ID NO: 1706 - protein, 338 aa, Muscodor strobelii
  misc_feature: SGI Peptide ID NO. 560178
  misc_feature (46)..(230): Pfam Id: PF00069 Pfam Desc: Protein kinase domain
  misc_feature (1)..(250): NCBI GI: 154300072 Blast Desc: BC1G_11225 [Botryotinia fuckeliana B05.10] gi|150856838|gb|EDN32030.1| BC1G_11225 [Botryotinia fuckeliana B05.10]
  misc_feature (42)..(250): NCBI GI: 116202875 Blast Desc: CHGG_09322 [Chaetomium globosum CBS 148.51] gi|88177840|gb|EAQ85308.1| CHGG_09322 [Chaetomium globosum CBS 148.51]
  misc_feature (30)..(268): NCBI GI: 171682622 Blast Desc: protein product [Podospora anserina] gi|170941270|emb|CAP66920.1| protein product [Podospora anserina]
  misc_feature (80)..(271): NCBI GI: 46110543 Blast Desc: FG02153.1 [Gibberella zeae PH-1]
  misc_feature (37)..(285): NCBI GI: 46126729 Blast Desc: FG07742.1 [Gibberella zeae PH-1]
  misc_feature (2)..(276): NCBI GI: 170940330 Blast Desc: protein product [Podospora anserina]
  misc_feature (67)..(247): NCBI GI: 171685536 Blast Desc: protein product [Podospora anserina] gi|170942729|emb|CAP68382.1| protein product [Podospora anserina]
  misc_feature (78)..(239): NCBI GI: 116200846 Blast Desc: CHGG_10968 [Chaetomium globosum CBS 148.51] gi|88175682|gb|EAQ83150.1| CHGG_10968 [Chaetomium globosum CBS 148.51]
  misc_feature (17)..(273): NCBI GI: 256733840 Blast Desc: NECHADRAFT_99495 [Nectria haematococca mpVI 77-13-4]
  misc_feature (81)..(242): NCBI GI: 256723898 Blast Desc: NECHADRAFT_78374 [Nectria haematococca mpVI 77-13-4]
  misc_feature (62)..(245): SWISSPROT Homolog: EC 2.7.11.25 Mitogen-activated protein kinase kinase kinase
MTLDDGACLPLLDTEAYDDAIKKQSTQTPTITQITVLHNHHQLSSSSNKFILKTFCNSRRPKIAQDEFEAELKAIREAPQHDRIVPLLSAFKFRDGFHLIFPHAPQRDLRSMWKANRKSDEAPWYSPQWLLGECRGIAEALAELHRPNSQLVHLDIKPPNILCFPTDVDGQQSVKLKLSDFGISQKLDKINGNSKAHTNTYRPPELSLGESISIKYDVWSLGCVYLEFITWALKGIKGVDDFSVLRKGEADDKKTSEFKGRTTRDTFFKKVALAPKWRDFTVRNIQGPRQNTESLDKKTTKNWHTPLSISRGEIQIHSKVKNCVKEVSFRPAQPIDSV

SEQ ID NO: 1707 - DNA, 1992 bp, Muscodor strobelii
  misc_feature: SGI cDNA ID NO. 560179
  misc_feature: Encodes the peptide sequence at SEQ ID NO 1708
atgagtcataacgatgctctggatcgggtatcatccggaggcgctcaagatcaacatatacctataatgttccatggcagcgcacaatacctccctcagttttctggaaacactgctgtcagctcaagtaaacctaaaagggccctgaatgcggttgagatcgagggaggtggatcaaacgaccatgactatccccgggaagaaaacagagaggtcttgcaatcaccacttttgctttggaaaatcgagttgggcttatgtctcctcagcttggcttcgctcattgttatcgttgcagttttgcgagctcttgacggccttcccttggcatcaatacccctgattgtatcgccgaatacctttcttgcctttttcactacaatcacacgcgctacatttatggcttcagtggtagaagcaattagccaatccaagtggaacttgatcaagaatcgaaagcggcctcttcgggatttcgtagtcatggattcggcgacgcgaaaactcttcggttcgttgtcactaatttggcactttggcatacgcaatattgctgtgcttggggctgtagtctcgatccttggtattctctcatctccatttactcaacaaatgattgcttatccttcataccttgctcctactgatggaactgctacgacgccaatcacaaatcactataaaattgacttttctaagcgcggatctggtgaaagcgtagaacgtccatcggttgaagcagcaatgagctctttcagcaaaccgcagatggcggtgagcgccgaatgtagtacagccaactgtacctttccccaatataaatctctgggtatatgttctcgtgtcgcagacatcacacacttgttggacgtgtccacgatcttaaactcatcgtccgatgattggtcaacgccgaagatcgacggttacatagccgacaatggttccactgcgtggaatgtgtcgttgccaaacggagtcacttttgttacgccggatatctatggatataagtctcagccactgaattcgacaatatcatggtacgacgacgaagatctctggaagactacgctactcaataccttcatcatatggacaaatcctgctaacgggtcttacgcctcccgctcgttctcttctgatagcaatcagaccgagaggcgccaggtaaacagacgcaaaacgccggaatttggagcagttgaaatatcactaggtctttgcatcatcacttacaaaactaatgtcttacaaccaagctcatttaccaaggtcgtcaatacatcacatgtacctgctaagacgtccagaaatacgctcaacttggcgccggattgtgaaccgcaggacaagctgtgcttggtgtcagacatcactatggactggaacgacgagaatataacacttacggaccctgatgactctaagcattatgatgcgcatgcaatctctttggtagaccttttcggcaatgtcgcgtttttgtttaacgagttttactacactgccgacgacacaggttcctacgagtctagggagggcgactggttcaacgcaaatgcgctttggggagatcgttggcaagtccctcgcaattttacgagcgacaaggcaacacaactcaggaacctcgactcgtactacagtagcgttgcaatgaccctgactaattccatgcgcacaatctcgggagacttcgttaccggaacagcatggaccgagacgacattcgtacacatacgatgggcctggcttgcactgttggctgctcagctggtactatctgttctcttcctcacaatcaccattatatcgacatgggtattgagagtgcctgtactgaagagtaaagtattgggccctatcctggcgtctactgaagaagtccgaatggcaattggtgacgtgaggcagttcactactgccgagaggatgggacgcagtgtaatcgtgacaatgggagaaaagggtgtgatcgagctggcatga

SEQ ID NO: 1708 - protein, 663 aa, Muscodor strobelii
  misc_feature: SGI Peptide ID NO. 560179
  misc_feature (24)..(635): NCBI GI: 170940326 Blast Desc: protein product [Podospora anserina]
  misc_feature (79)..(604): NCBI GI: 256724865 Blast Desc: NECHADRAFT_76998 [Nectria haematococca mpVI 77-13-4]
  misc_feature (38)..(607): NCBI GI: 159125812 Blast Desc: conserved [Aspergillus fumigatus A1163]
  misc_feature (38)..(607): NCBI GI: 70985502 Blast Desc: conserved [Aspergillus fumigatus Af293] gi|66845885|gb|EAL86219.1| conserved [Aspergillus fumigatus Af293]
  misc_feature (80)..(607): NCBI GI: 115400213 Blast Desc: [Aspergillus terreus NIH2624] gi|114191361|gb|EAU33061.1| [Aspergillus terreus NIH2624]
  misc_feature (77)..(297): NCBI GI: 242787121 Blast Desc: conserved [Talaromyces stipitatus ATCC 10500] gi|218721087|gb|EED20506.1| conserved [Talaromyces stipitatus ATCC 10500]
  misc_feature (134)..(374): NCBI GI: 171681700 Blast Desc: protein product [Podospora anserina] gi|170940809|emb|CAP66458.1| protein product [Podospora anserina]
  misc_feature (53)..(607): NCBI GI: 145236391 Blast Desc: An06g00150 [Aspergillus niger] gi|134075297|emb|CAK44931.1| protein product [Aspergillus niger]
  misc_feature (35)..(658): NCBI GI: 169785503 Blast Desc: [Aspergillus oryzae RIB40] gi|83775960|dbj|BAE66079.1| protein product [Aspergillus oryzae]
  misc_feature (80)..(607): NCBI GI: 169782207 Blast Desc: [Aspergillus oryzae RIB40] gi|83774309|dbj|BAE64433.1| protein product [Aspergillus oryzae]
MSHNDALDRVSSGGAQDQHIPIMFHGSAQYLPQFSGNTAVSSSKPKRALNAVEIEGGGSNDHDYPREENREVLQSPLLLWKIELGLCLLSLASLIVIVAVLRALDGLPLASIPLIVSPNTFLAFFTTITRATFMASVVEAISQSKWNLIKNRKRPLRDFVVMDSATRKLFGSLSLIWHFGIRNIAVLGAVVSILGILSSPFTQQMIAYPSYLAPTDGTATTPITNHYKIDFSKRGSGESVERPSVEAAMSSFSKPQMAVSAECSTANCTFPQYKSLGICSRVADITHLLDVSTILNSSSDDWSTPKIDGYIADNGSTAWNVSLPNGVTFVTPDIYGYKSQPLNSTISWYDDEDLWKTTLLNTFIIWTNPANGSYASRSFSSDSNQTERRQVNRRKTPEFGAVEISLGLCIITYKTNVLQPSSFTKVVNTSHVPAKTSRNTLNLAPDCEPQDKLCLVSDITMDWNDENITLTDPDDSKHYDAHAISLVDLFGNVAFLFNEFYYTADDTGSYESREGDWFNANALWGDRWQVPRNFTSDKATQLRNLDSYYSSVAMTLTNSMRTISGDFVTGTAWTETTFVHIRWAWLALLAAQLVLSVLFLTITIISTWVLRVPVLKSKVLGPILASTEEVRMAIGDVRQFTTAERMGRSVIVTMGEKGVIELA

SEQ ID NO: 1709 - DNA, 543 bp, Muscodor strobelii
  misc_feature: SGI EST ID NO. CUFF.4487.0
  misc_feature: Variant of the nucleotide sequence at SEQ ID NO 1707
gcgctcaagatcaacatatacctataatgttccatggcagcgcacaatacctccctcagttttctggaaacactgctgtcagctcaagtaaacctaaaagggccctgaatgcggttgagatcgagggaggtggatcaaacgaccatgactatccccgggaagaaaacagagaggtcttgcaatcaccacttttgctttggaaaatcgagttgggcttatgtctcctcagcttggcttcgctcattgttatcgttgcagttttgcgagctcttgacggccttcccttggcatcaatacccctgattgtatcgccgaatacctttcttgcctttttcactacaatcacacgcgctacatttatggcttcagtggtagaagcaattagccaatccaagtggaacttgatcaagaatcgaaagcggcctcttcgggatttcgtagtcatggattcggcgacgcgaaaactcttcggttcgttgtcactaatttggcactttggcatacgcaatattgctgtgcttggggctgtagtctcgatccttg

SEQ ID NO: 1710 - DNA, 1647 bp, Muscodor strobelii
  misc_feature: SGI cDNA ID NO. 560180
  misc_feature: Encodes the peptide sequence at SEQ ID NO 1711
atggcaccgtattttggactacgaggaggatggctcaccttctgggtgaccgtcgcgtgcgcaaccgacatgaccttattcggatatgatcaaggtgttttcgggggtgttatcgtcacgcccgactttcttgatttgatgggcatcgccaatgacccgaaactccagagtaccgtcacggcaatttacgacatcggatgcttcttaggcgcgatcacaacaatttggattggcgaaagactcggcagaaagaacactatcctgactggaacgacgatcatgagtatcggagctatcctccagatcgccgcattcggactaccgcagatgtttgtcggtcgcattgtcgctgggattggcaatggcattaatacatccacggcccctgtgtggcagggtgagacgtcgaaggcaagctggagaggcaagctcatcgtcattgagatgatcatgaatatctttggattttcgcttagtaattgggtgacctttggactgtcatatgtttctggctcagtcgcttggcgattgcctcttgctctgcagtttctcttcatcattatcctcttcgcaacggttccttggttgcctgaaagtcctcgatggctgatcgccaatggtcgtatcgaggaagcggatgttatcttggccgaccttgagggcatggatgttgcagactcgtatatcatcactcagtcgaaagagatccaatgggccgtcaactatgaacgtgagaatacgattccttggtcccagctcctgcgtggtaaaactggcgctagcggcggtacatctactgttcgacgccttctcctaggaatggggactcaagctatgcagcaattttccggcatcaatgtcacatcttactacttaccacttgtccttattcagtctgtgggactggataacaagttcgctcgcctactagcggctatcaattcggtcagctacctgctgtttagtctgatcggaattcccaatgtcgaacgatggggacgaagaaagatgatgatgtatgctgctgccggccaagctttctgctacgctatcattactatttgcatccgctacaatgaaaacgcatctatcggcgctgtagcgaatgagaaatgggccaaagcttcaatcgctttcttcttcctgtactacgtcttttttggaattggctggcaaggcgtaccgtggctctatcccactgagataaactctctcagtatgcgaactaaaggtgccgcactcggcactgcgaccaattggatcgtcaatttcctcgttgttgaaattacgccgatcggcataagctctattcattggcagttctacatcatttggactgtcttcaatgcctcttttgttccaattgtatacttcttttatcccgaaacagctgaccgcactctcgaggatattgatcgttacttcatcgagaatccacaagtcctgattcaccgcactgacgacgccaaatcttctaaacgcccactacaatatctcgaacatgagcagtcggaaatcagacgcaatagctctgtcgttcctgctgacatccaagctattttgaataggcgaagtgtcgctgaacaaggcggcaaatccggtttgaaggatatcgagaaaggtggagcgagccatgttgaggcttga

SEQ ID NO: 1711 - protein, 548 aa, Muscodor strobelii
  misc_feature: SGI Peptide ID NO. 560180
  misc_feature (13)..(427): Pfam Id: PF07690 Pfam Desc: Major Facilitator Superfamily
  misc_feature (15)..(475): Pfam Id: PF00083 Pfam Desc: Sugar (and other) transporter
  misc_feature (52)..(427): Pfam Id: PF07690 Pfam Desc: Major Facilitator Superfamily
  misc_feature (3)..(533): NCBI GI: 169615735 Blast Desc: SNOG_11031 [Phaeosphaeria nodorum SN15] gi|160703033|gb|EAT81530.2| SNOG_11031 [Phaeosphaeria nodorum SN15]
  misc_feature (1)..(508): NCBI GI: 156055628 Blast Desc: SS1G_05166 [Sclerotinia sclerotiorum 1980] gi|154702950|gb|EDO02689.1| SS1G_05166 [Sclerotinia sclerotiorum 1980]
  misc_feature (1)..(543): NCBI GI: 154305818 Blast Desc: BC1G_08140 [Botryotinia fuckeliana B05.10] gi|150853025|gb|EDN28217.1| BC1G_08140 [Botryotinia fuckeliana B05.10]
  misc_feature (3)..(511): NCBI GI: 115401508 Blast Desc: conserved [Aspergillus terreus NIH2624] gi|114190283|gb|EAU31983.1| conserved [Aspergillus terreus NIH2624]
  misc_feature (3)..(527): NCBI GI: 67902960 Blast Desc: AN8467.2 [Aspergillus nidulans FGSC A4] gi|40747933|gb|EAA67089.1| AN8467.2 [Aspergillus nidulans FGSC A4]
  misc_feature (3)..(522): NCBI GI: 259484413 Blast Desc: TPA: MFS sugar transporter, (AFU_orthologue; AFUA_1G11050) [Aspergillus nidulans FGSC A4]
  misc_feature (3)..(516): NCBI GI: 169780920 Blast Desc: [Aspergillus oryzae RIB40] gi|83773664|dbj|BAE63791.1| protein product [Aspergillus oryzae]
  misc_feature (3)..(516): NCBI GI: 238504868 Blast Desc: sugar transporter, [Aspergillus flavus NRRL3357] gi|220689777|gb|EED46127.1| sugar transporter, [Aspergillus flavus NRRL3357]
  misc_feature (3)..(526): NCBI GI: 145236242 Blast Desc: protein product [Aspergillus niger] gi|134075221|emb|CAK44862.1| protein product [Aspergillus niger]
  misc_feature (3)..(509): NCBI GI: 46126945 Blast Desc: FG07850.1 [Gibberella zeae PH-1]
MAPYFGLRGGWLTFWVTVACATDMTLFGYDQGVFGGVIVTPDFLDLMGIANDPKLQSTVTAIYDIGCFLGAITTIWIGERLGRKNTILTGTTIMSIGAILQIAAFGLPQMFVGRIVAGIGNGINTSTAPVWQGETSKASWRGKLIVIEMIMNIFGFSLSNWVTFGLSYVSGSVAWRLPLALQFLFIIILFATVPWLPESPRWLIANGRIEEADVILADLEGMDVADSYIITQSKEIQWAVNYERENTIPWSQLLRGKTGASGGTSTVRRLLLGMGTQAMQQFSGINVTSYYLPLVLIQSVGLDNKFARLLAAINSVSYLLFSLIGIPNVERWGRRKMMMYAAAGQAFCYAIITICIRYNENASIGAVANEKWAKASIAFFFLYYVFFGIGWQGVPWLYPTEINSLSMRTKGAALGTATNWIVNFLVVEITPIGISSIHWQFYIIWTVFNASFVPIVYFFYPETADRTLEDIDRYFIENPQVLIHRTDDAKSSKRPLQYLEHEQSEIRRNSSVVPADIQAILNRRSVAEQGGKSGLKDIEKGGASHVEA

SEQ ID NO: 1712 - DNA, 3625 bp, Muscodor strobelii
  misc_feature: SGI EST ID NO. CUFF.4490.0
  misc_feature: Variant of the nucleotide sequence at SEQ ID NO 1710
ctgcattcgaggttgttttcgtcaaacttatattcttcatcgcggatgtctgtaagctgaagtcattgcaaatatccaccggtataattcaatgtcagctctctaatcttgtgctgtactgaaatgcggcttgtcgtcgggcagcttcacgatgctagactctgagtttcagccatcacgcgaagcgacatgttttacagggtatggctgactgcataaatattttccctttcaaccctatcaataaatgagatcgaaggtacgtggtatttgatcttctgtagaaacagacgataaatcagatacaatgatgcagcactttgggtcttggctttaccagcaccaaagtcaagccaagatgcaagacaatgccatctcatgaagccgttgcggttttcaactgttgactgtgagtcatcatgattatcaagataaccgagacccttgcatgatcggtccgcgctttcctctcatctggttccttcgggaattttgagttcggccatctcctttgacctaccccatggcttatccgcgacgttggaaccacaatcccgggagagcgttgcattcaacagtttgccatacctaatgtgctttcctgcatcttgaaagattgagagtgaggttgttcttgtcgtcttttccgtcaatgggtggttgtgccagctcaacaccatcaccatgcatccccagttccatctgctcgcggaccccgagattcagtatcaattataccactatcggaagcttcagagtgaattacttcacgcataatatacagcccggcatttgcaacacaaggaggattatgttcttgcagaccatctcatatcatggctcctctagtttgcacgacatcagccgtttgtaataaagttgctagataggaaaatggcgctcccgtatcaagctgaacgatgattactaggaatagttacgtgtagagaaaagcatcgccaatagcaggccgcgtctcggggaagaggacatcaaatctagagccaacagttgaggtgatgcacccatattgtatccatgcttgccattgaagaacaaaagaccgcagtacggccatctggttgatgctcctgagctcagtttcggttcgggattgccgcccagtgctgatcgcatccaagtagcgttcgctcatcgacgagctcgagacgaagacaatggtccgtgcaacaaccggcgctcaagcgtggtggagcttgtagacgctctgccgcagagctgccggtaggttttgcgggatgttgaggtcatcgagcattggacttcattctcactggatgcttggttgcgctactttcgagattctaacgtaaacgtgcggggatatccttggtcacacaacccaagatcgcaatagtgcgaaactcaccattaccccaatacttcaattgccaagatagagacgtgacgcgactcggtggacggtagatctggggttctttcggcagcgcataccgtattgcggcctcatattgccactgaagcgaaccgtatgaaatgttcgacgtagacacggtataccatctccataaagtagcgcattcaagtccttaggcatgatgggttcttgcagtggtagactcagaactgcatgtgcgctttcacttaaaagctcacgatgcctccctcgtcggcagactttctcagttgttgcgcatcctatgcattaagtctggggttgagagtatactccgcataattatggcaccgtattttggactacgaggaggatggctcaccttctgggtgaccgtcgcgtgcgcaaccgacatgaccttattcggatatgatcaaggtgttttcgggggtgttatcgtcacgcccgactttcttgatttgatgggcatcgccaatgacccgaaactccagagtaccgtcacggcaatttacgacatcggatgcttcttaggcgcgatcacaacaatttggattggcgaaagactcggcagaaagaacactatcctgactggaacgacgatcatgagtatcggagctatcctccagatcgccgcattcggactaccgcagatgtttgtcggtcgcattgtcgctgggattggcaatggcattaatacatccacggcccctgtgtggcagggtgagacgtcgaaggcaagctggagaggcaagctcatcgtcattgagatgatcatgaatatctttggattttcgcttagtaattgggtgacctttggactgtcatatgtttctggctcagtcgcttggcgattgcctcttgctctgcagtttctcttcatcattatcctcttcgcaacggttccttggttgcctgaaagtcctcgatggctgatcgccaatggtcgtatcgaggaagcggatgttatcttggccgaccttgagggcatggatgttgcagactcgtatatcatcactcagtcgaaagagatccaatgggccgtcaactatgaacgtgagaatacgattccttggtcccagctcctgcgtggtaaaactggcgctagcggcggtacatctactgttcgacgccttctcctaggaatggggactcaagctatgcagcaattttccggcatcaatgtcacatcttactacttaccacttgtccttattcagtctgtgggactggataacaagttcgctcgcctactagcggctatcaattcggtcagctacctgctgtttagtctgatcggaattcccaatgtcgaacgatggggacgaagaaagatgatgatgtatgctgctgccggccaagctttctgctacgctatcattactatttgcatccgctacaatgaaaacgcatctatcggcgctgtagcgaatgagaaatgggccaaagcttcaatcgctttcttcttcctgtactacgtcttttttggaattggctggcaaggcgtaccgtggctctatcccactgagataaactctctcagtatgcgaactaaaggtgccgcactcggcactgcgaccaattggatcgtcaatttcctcgttgttgaaattacgccgatcggcataagctctattcattggcagttctacatcatttggactgtcttcaatgcctcttttgttccaattgtatacttcttttatcccgaaacagctgaccgcactctcgaggatattgatcgttacttcatcgagaatccacaagtcctgattcaccgcactgacgacgccaaatcttctaaacgcccactacaatatctcgaacatgagcagtcggaaatcagacgcaatagctctgtcgttcctgctgacatccaagctattttgaataggcgaagtgtcgctgaacaaggcggcaaatccggtttgaaggatatcgagaaaggtggagcgagccatgttgaggcttgaatgttattcacaagtttgatggggatagatcacttatctgtaaaaactgttaaagtacgttattactgtgctgtgaaatcaaactattgataccgcgtgtgaggatttattggattcagtcatttgtctttcgctcttgcgaacgcgacacttcagttcgattgattggcccgactgagtctattccgacaggacaaagaacagagggtaacacttcaacacaggcagatgttatctgagatggctcgcatgctca

SEQ ID NO: 1713 - DNA, 1116 bp, Muscodor strobelii
  misc_feature: SGI cDNA ID NO. 560181
  misc_feature: Encodes the peptide sequence at SEQ ID NO 1714
atggtgaacattacggagaagatcaaggagatcgaggatgagatgcggaggactcagaaaaacaaggcaactgaatatcatctcggccttttaaaaggaaaactcgccagactccgagcacaactcctcgaacccggcccaggcgcaggaggaggtggtggtgcaggcttcgatgtgagcaagagtggagatgcgagaatagcacttgtcgggtttccttcagtaggaaaatcgacattcctatcaaaggtcaccaagacgcggtcggaggtagcatcatatgctttcacaacactaacggcaattcccggtgtgctggagtatggcggtgcagaaatccaactacttgatttaccaggtattatcgaaggtgctgcggaaggcaagggacgtggacgacaagttatctcggcggctaagacgagcgatctcatcctaatggtcctggatgcaacgaagaaagcagagcagagagcgttactggaggccgagttggaagctgttggtatcaggctaaacagagaaccaccgaacatctacctaaaagccaagaaagcaggtggaatgaaaatcacattccaatccccaccaaaacgccttgacgaaaagatggtcttcaacatcctaaaagactataagatgttaaattgcgaagttctagtccgagacgacgaagcaacagtagacgacttgatcgatgttatcatgaaggaccatcgaaaatatatcaaatgcctctacgtatacaacaagatcgacagcgtatccctcgacttcctcgaccgattagcccgcgagccacagacagccgtcatgagttgtgaactggatctgggagtacaggatgtggtggatagatgttgggaggaattgaagctcattcgtatctacacaaagcgcaagggtgtcgagccaagcttcgatgaagcacttattgttcgcagtgggagcacgatcgaggatgtgtgcgatcggattcacaggaccatgaaggatacatacaaatatgcactggtctggggagcgagtgcacgccacgtcccgcagagggtgggattaggccatccagtggcagacgaagatgtagtctatatagtcagtggcttcaaggcttag

SEQ ID NO: 1714 - protein, 371 aa, Muscodor strobelii
  misc_feature: SGI Peptide ID NO. 560181
  misc_feature (65)..(187): Pfam Id: PF01926 Pfam Desc: GTPase of function
  misc_feature (294)..(367): Pfam Id: PF02824 Pfam Desc: TGS domain
  misc_feature (1)..(371): NCBI GI: 145601751 Blast Desc: conserved [Magnaporthe grisea 70-15] gi|145010263|gb|EDJ94919.1| conserved [Magnaporthe grisea 70-15]
  misc_feature (1)..(371): NCBI GI: 238914586 Blast Desc: GTPase [Beauveria bassiana]
  misc_feature (1)..(371): NCBI GI: 171693883 Blast Desc: protein product [Podospora anserina] gi|170946890|emb|CAP73694.1| protein product [Podospora anserina]
  misc_feature (1)..(367): NCBI GI: 212535618 Blast Desc: GTP binding protein (Gtp1), [Penicillium marneffei ATCC 18224] gi|210070364|gb|EEA24454.1| GTP binding protein (Gtp1), [Penicillium marneffei ATCC 18224]
  misc_feature (1)..(371): NCBI GI: 256731067 Blast Desc: [Nectria haematococca mpVI 77-13-4]
  misc_feature (1)..(371): NCBI GI: 18376285 Blast Desc: GTP-binding protein [Neurospora crassa]
  misc_feature (1)..(367): NCBI GI: 67523577 Blast Desc: AN2244.2 [Aspergillus nidulans FGSC A4] gi|40744773|gb|EAA63929.1| conserved [Aspergillus nidulans FGSC A4] gi|259487632|tpe|CBF86451.1| TPA: GTP binding protein (Gtp1),
  misc_feature (1)..(371): NCBI GI: 46121521 Blast Desc: FG05139.1 [Gibberella zeae PH-1]
  misc_feature (1)..(367): NCBI GI: 115438064 Blast Desc: GTP-binding protein 1 [Aspergillus terreus NIH2624] gi|114188785|gb|EAU30485.1| GTP-binding protein 1 [Aspergillus terreus NIH2624]
  misc_feature (1)..(367): NCBI GI: 242793565 Blast Desc: GTP binding protein (Gtp1), [Talaromyces stipitatus ATCC 10500] gi|218718778|gb|EED18198.1| GTP binding protein (Gtp1), [Talaromyces stipitatus ATCC 10500]
MVNITEKIKEIEDEMRRTQKNKATEYHLGLLKGKLARLRAQLLEPGPGAGGGGGAGFDVSKSGDARIALVGFPSVGKSTFLSKVTKTRSEVASYAFTTLTAIPGVLEYGGAEIQLLDLPGIIEGAAEGKGRGRQVISAAKTSDLILMVLDATKKAEQRALLEAELEAVGIRLNREPPNIYLKAKKAGGMKITFQSPPKRLDEKMVFNILKDYKMLNCEVLVRDDEATVDDLIDVIMKDHRKYIKCLYVYNKIDSVSLDFLDRLAREPQTAVMSCELDLGVQDVVDRCWEELKLIRIYTKRKGVEPSFDEALIVRSGSTIEDVCDRIHRTMKDTYKYALVWGASARHVPQRVGLGHPVADEDVVYIVSGFKA

SEQ ID NO: 1715 - DNA, 1943 bp, Muscodor strobelii
  misc_feature: SGI EST ID NO. CUFF.4669.0
  misc_feature: Variant of the nucleotide sequence at SEQ ID NO 1713
gtgaggcggaaatagaaagcggtgataacaaatggtctgtgctttaccccacgatgaaattctgccgcaatagcggggctatcaaatcggcatctcgcagaagttcgtagcgacatcgaataattagagcatgacacataacgcgcactcacattggcagaggttgctcaagactaatcttaaagccatacacacttggcagacacgatacctgaccattttattaccgaaaattcgcgacttgattcaaccagaattaccacgactagtgtggggttgatttgttgaccctaggatctttttagatcaagcactcaaaatccatcaagatggtgaacattacggagaagatcaaggagatcgaggatgagatgcggaggactcagaaaaacaaggcaactgaatatcatctcggccttttaaaaggaaaactcgccagactccgagcacaactcctcgaacccggcccaggcgcaggaggaggtggtggtgcaggcttcgatgtgagcaagagtggagatgcgagaatagcacttgtcgggtttccttcagtaggaaaatcgacattcctatcaaaggtcaccaagacgcggtcggaggtagcatcatatgctttcacaacactaacggcaattcccggtgtgctggagtatggcggtgcagaaatccaactacttgatttaccaggtattatcgaaggtgctgcggaaggcaagggacgtggacgacaagttatctcggcggctaagacgagcgatctcatcctaatggtcctggatgcaacgaagaaagcagagcagagagcgttactggaggccgagttggaagctgttggtatcaggctaaacagagaaccaccgaacatctacctaaaagccaagaaagcaggtggaatgaaaatcacattccaatccccaccaaaacgccttgacgaaaagatggtcttcaacatcctaaaagactataagatgttaaattgcgaagttctagtccgagacgacgaagcaacagtagacgacttgatcgatgttatcatgaaggaccatcgaaaatatatcaaatgcctctacgtatacaacaagatcgacagcgtatccctcgacttcctcgaccgattagcccgcgagccacagacagccgtcatgagttgtgaactggatctgggagtacaggatgtggtggatagatgttgggaggaattgaagctcattcgtatctacacaaagcgcaagggtgtcgagccaagcttcgatgaagcacttattgttcgcagtgggagcacgatcgaggatgtgtgcgatcggattcacaggaccatgaaggatacatacaaatatgcactggtctggggagcgagtgcacgccacgtcccgcagagggtgggattaggccatccagtggcagacgaagatgtagtctatatagtcagtggcttcaaggcttagcttcacagctatagattagtaatggcatgtacaagacaaacaagcagtgacatgttctgtgaattatgcataaggtctgtattcattcgtttcagtcatcaagcaccgtcaatcctccgaggacgagagggtgtgtaatagtatcctgcagcgcaggtttgtacaaagaaccaagccattcaccagttacagttcttttctcgtgaaccctggttgactcccaaacgccatccgttcgttcatgatcatgatttgctccccgcatatgtacaatcgagcctttccgccaaaatcccctaccagttgccatgagaccaagccggcataaaaatcaaatactggtattggtacagttccgagattgtccgcagctactggtcgtcgaggaaaggcgttcagggattggtatccgaggaatcgtcgccggcacttctagcaccaaacacgttctcgccatcaaacttcttggcggaagcttgggcaaagagggacttgggc

SEQ ID NO: 1716 - DNA, 489 bp, Muscodor strobelii
  misc_feature: SGI cDNA ID NO. 560182
  misc_feature: Encodes the peptide sequence at SEQ ID NO 1717
atgtccggcctcgtcaacaagcccaccgccctcgcggagaaggacgctaacaacagcctccaaaccgtcggcgcatctggcaacaccaaggtcggaggacccaagagcatggagtatcaccgccaggtcctgcagaagaagatggagcaagagaagtacggccaccaagataccaacaccactcacatcccccgcagcgacggcccctcctcgggagacggcaccaggatgcccgcagtcaaggacgcgcacctcacctcccttctcgatgctgacccgggccaacacaacaggagcacccagtacatctcgccctcggataccatcatgagtccctgcaccgccaagctgaatgctctcaagagccgtcaggctggaaaggccaagcccaagtccctctttgcccaagcttccgccaagaagtttgatggcgagaacgtgtttggtgctagaagtgccggcgacgattcctcggataccaatccctga

SEQ ID NO: 1717 - protein, 162 aa, Muscodor strobelii
  misc_feature: SGI Peptide ID NO. 560182
  misc_feature (104)..(137): Pfam Id: PF05032 Pfam Desc: Spo12 family
  misc_feature (5)..(152): NCBI GI: 261351645 Blast Desc: conserved [Verticillium albo-atrum VaMs.102]
  misc_feature (11)..(153): NCBI GI: 256731462 Blast Desc: NECHADRAFT_101680 [Nectria haematococca mpVI 77-13-4]
  misc_feature (10)..(156): NCBI GI: 238914585 Blast Desc: [Beauveria bassiana]
  misc_feature (11)..(150): NCBI GI: 39947928 Blast Desc: [Magnaporthe grisea 70-15] gi|145010262|gb|EDJ94918.1| [Magnaporthe grisea 70-15]
  misc_feature (7)..(143): NCBI GI: 85103576 Blast Desc: NCU01182 [Neurospora crassa OR74A] gi|18376286|emb|CAD21399.1| related to BNS1 protein [Neurospora crassa] gi|28923095|gb|EAA32312.1| [Neurospora crassa OR74A]
  misc_feature (10)..(142): NCBI GI: 116199141 Blast Desc: CHGG_07726 [Chaetomium globosum CBS 148.51] gi|88179005|gb|EAQ86473.1| CHGG_07726 [Chaetomium globosum CBS 148.51]
  misc_feature (10)..(144): NCBI GI: 171693881 Blast Desc: protein product [Podospora anserina] gi|170946889|emb|CAP73693.1| protein product [Podospora anserina]
  misc_feature (8)..(149): NCBI GI: 156048178 Blast Desc: SS1G_08820 [Sclerotinia sclerotiorum 1980] gi|154693217|gb|EDN92955.1| SS1G_08820 [Sclerotinia sclerotiorum 1980]
  misc_feature (8)..(142): NCBI GI: 154302979 Blast Desc: [Botryotinia fuckeliana B05.10] gi|150855157|gb|EDN30349.1| [Botryotinia fuckeliana B05.10]
  misc_feature (6)..(141): NCBI GI: 119181927 Blast Desc: CIMG_06026 [Coccidioides immitis RS]
MSGLVNKPTALAEKDANNSLQTVGASGNTKVGGPKSMEYHRQVLQKKMEQEKYGHQDTNTTHIPRSDGPSSGDGTRMPAVKDAHLTSLLDADPGQHNRSTQYISPSDTIMSPCTAKLNALKSRQAGKAKPKSLFAQASAKKFDGENVFGARSAGDDSSDTNP

SEQ ID NO: 1718 - DNA, 2227 bp, Muscodor strobelii
  misc_feature: SGI EST ID NO. CUFF.4670.3
  misc_feature: Variant of the nucleotide sequence at SEQ ID NO 1716
tcggcctgtctaccacaccactttgaggtattggtttcaagaaacaaaaccgcatcttcaaattccaccttcaagcctaccaaacttatagccttgatacaagcacatcttgcgcgcactttctttgacatcgccgtccaactttgcaggtgcaataccccgcaagttccttggtccgaagcataacagcaacattccaagccctcttcacaaccggcgatccttgccaaccacaaacctcactaccacacaattaccgacacaatgtccggcctcgtcaacaagcccaccgccctcgcggagaaggacgctaacaacagcctccaaaccgtcggcgcatctggcaacaccaaggtcggaggacccaagagcatggagtatcaccgccaggtcctgcagaagaagatggagcaagagaagtacggccaccaagataccaacaccactcacatcccccgcagcgacggcccctcctcgggagacggcaccaggatgcccgcagtcaaggacgcgcacctcacctcccttctcgatgctgacccgggccaacacaacaggagcacccagtacatctcgccctcggataccatcatgagtccctgcaccgccaagctgaatgctctcaagagccgtcaggctggaaaggccaagcccaagtccctctttgcccaagcttccgccaagaagtttgatggcgagaacgtgtttggtgctagaagtgccggcgacgattcctcggataccaatccctgaacgcctttcctcgacgaccagtagctgcggacaatctcggaactgtaccaataccagtatttgatttttatgccggcttggtctcatggcaactggtaggggattttggcggaaaggctcgattgtacatatgcggggagcaaatcatgatcatgaacgaacggatggcgtttgggagtcaaccagggttcacgagaaaagaactgtaactggtgaatggcttggttctttgtacaaacctgcgctgcaggatactattacacaccctctcgtcctcggaggattgacggtgcttgatgactgaaacgaatgaatacagaccttatgcataattcacagaacatgtcactgcttgtttgtcttgtacatgccattactaatctatagctgtgaagctaagccttgaagccactgactatatagactacatcttcgtctgccactggatggcctaatcccaccctctgcgggacgtggcgtgcactcgctccccagaccagtgcatatttgtatgtatccttcatggtcctgtgaatccgatcgcacacatcctcgatcgtgctcccactgcgaacaataagtgcttcatcgaagcttggctcgacacccttgcgctttgtgtagatacgaatgagcttcaattcctcccaacatctatccaccacatcctgtactcccagatccagttcacaactcatgacggctgtctgtggctcgcgggctaatcggtcgaggaagtcgagggatacgctgtcgatcttgttgtatacgtagaggcatttgatatattttcgatggtccttcatgataacatcgatcaagtcgtctactgttgcttcgtcgtctcggactagaacttcgcaatttaacatcttatagtcttttaggatgttgaagaccatcttttcgtcaaggcgttttggtggggattggaatgtgattttcattccacctgctttcttggcttttaggtagatgttcctagtattgtcagtagctagtcgcgaccgaagtaggcaataggagcaacatcgggatctcgtacggtggttctctgtttagcctgataccaacagcttccaactcggcctccagtaacgctctctgctctgctttcttcgttgcatccaggaccattaggatgagatcgctcgtcttagccgccgagataacttgtcgtccacgtcccttgccttccgcagcaccttcgataatacctggtaaatcaagtagttggatttctgcaccgccatactccagcacaccgggaattgccgttagtgttgtgaaagcatatgatgctacctccgaccgcgtcttggtgacctttgataggaatgtcgattttcctactgaaggaaacccgacaagtgctattctcgcatctccactcttgctcacatcgaagcctgcaccaccacctcctcctgcgcctgggccgggttcgaggagttgtgctcggagtctggcgagt

SEQ ID NO: 1719 - DNA, 1353 bp, Muscodor strobelii
  misc_feature: SGI cDNA ID NO. 560183
  misc_feature: Encodes the peptide sequence at SEQ ID NO 1720
atgtcagcccaaataccagctcttgtcgccgaccgcgtcagccctcaggctaagaaggtgcttgacattgtcgcaaagttcgtcgaagaggagtgcataccggcagaccccgtgttcgaagcccagatcggcgaaggttcgaaacgatgggatcaccatccccaggttatcgaggagttgaaagagaaggctaaaaagctcggactatggaacatgttcctgcccaagggacactacaaggagtcgccaggatacaccaacttagaatacggcctgatggcagagtggttgggcaagtcaaggacagcatccgaggccaccaactgcgctgctccagacactggtaacatggaggttctggccaagtacggcaacgaagcccagaaggccgaatggctcaagcccttgatggatggtaaaattcgatccgcattcctcatgaccgagcccgacgttgcttcgtccgatgccaggaatatccagttgaacatcacgaaggagggaaatgaatacgtcctcaacggatccaaatggtggtctagcggtgccggcgacccgcgatgcaagatttacatcgtcatgggcaagtctgatggaaacaacaaagacccttacctccagcaatccgttatcctcgtcccatcaaacaccaagggtatcacgattcaccggatgttgaacgtgtacggctacgatgatgctcctcacggacacggccacatttcattcaacaatgttcgcgtccccgctagcaacctggtcttgggcgagggaaggggctttgaaattattcagggacgtcttggacctggccgtatccaccatgctatgcgaagtatcggtgccgctgagagggctttggagtggatgttaatgagaatcaacgatcccaagaagactccattcggcaagcaactgaaggagcatggtgttatactcgagtgggttgctaagtcacgcattgagatcgactccgcccgtctggtggtgttgaacgctgccgtacggatggacgaccttggcccgaaggcatctcttaaggagatcgccgaggccaaggttatcgttccccagatggccctgacagtcattgaccgagctgtccaggcattcggcggtgctggtgtttcccaagatacccctcttgccaacatgtgggctcagatccgaaccctgagattggcggatggaccggacgaggtccatcttcagcagatgggtcgcaatgaaaacaagagaggcaaggaggtcactgcgaagatcaatgcacaaaggcaaaagaccgagcaattattgaagcaagctggcgttcagagattccaacctggtacaggcatttctcacaagttatag

SEQ ID NO: 1720 - protein, 450 aa, Muscodor strobelii
  misc_feature: SGI Peptide ID NO. 560183
  misc_feature (144)..(198): Pfam Id: PF02770 Pfam Desc: Acyl-CoA dehydrogenase, middle domain
  misc_feature (258)..(411): Pfam Id: PF00441 Pfam Desc: Acyl-CoA dehydrogenase, C-terminal domain
  misc_feature (273)..(400): Pfam Id: PF08028 Pfam Desc: Acyl-CoA dehydrogenase, C-terminal domain
  misc_feature (273)..(382): Pfam Id: PF08028 Pfam Desc: Acyl-CoA dehydrogenase, C-terminal domain
  misc_feature (1)..(448): NCBI GI: 85103572 Blast Desc: NCU01181 [Neurospora crassa OR74A] gi|18376287|emb|CAD21400.1| conserved [Neurospora crassa] gi|28923094|gb|EAA32311.1| NCU01181 [Neurospora crassa OR74A]
  misc_feature (1)..(449): NCBI GI: 39948169 Blast Desc: conserved [Magnaporthe grisea 70-15] gi|145010286|gb|EDJ94942.1| conserved [Magnaporthe grisea 70-15]
  misc_feature (1)..(446): NCBI GI: 116199143 Blast Desc: conserved [Chaetomium globosum CBS 148.51] gi|88179006|gb|EAQ86474.1| conserved [Chaetomium globosum CBS 148.51]
  misc_feature (1)..(449): NCBI GI: 46121523 Blast Desc: FG05140.1 [Gibberella zeae PH-1]
  misc_feature (1)..(446): NCBI GI: 171693879 Blast Desc: protein product [Podospora anserina] gi|170946888|emb|CAP73692.1| protein product [Podospora anserina]
  misc_feature (1)..(447): NCBI GI: 261351644 Blast Desc: acyl-CoA dehydrogenase family member 11 [Verticillium albo-atrum VaMs.102]
  misc_feature (1)..(450): NCBI GI: 256731463 Blast Desc: [Nectria haematococca mpVI 77-13-4]
  misc_feature (1)..(448): NCBI GI: 238914584 Blast Desc: FadE2-like acyl-CoA dehydrogenase [Beauveria bassiana]
  misc_feature (1)..(449): NCBI GI: 154302977 Blast Desc: BC1G_09232 [Botryotinia fuckeliana B05.10] gi|150855156|gb|EDN30348.1| BC1G_09232 [Botryotinia fuckeliana B05.10]
  misc_feature (1)..(449): NCBI GI: 156048180 Blast Desc: SS1G_08821 [Sclerotinia sclerotiorum 1980] gi|154693218|gb|EDN92956.1| SS1G_08821 [Sclerotinia sclerotiorum 1980]
  misc_feature (13)..(402): SWISSPROT Homolog: EC 1.3.99.3 Acyl-CoA dehydrogenase
  misc_feature: Useful for introducing or modulating the production of volatile compounds
  misc_feature: Useful for fungicidal and/or biocontrol applications
MSAQIPALVADRVSPQAKKVLDIVAKFVEEECIPADPVFEAQIGEGSKRWDHHPQVIEELKEKAKKLGLWNMFLPKGHYKESPGYTNLEYGLMAEWLGKSRTASEATNCAAPDTGNMEVLAKYGNEAQKAEWLKPLMDGKIRSAFLMTEPDVASSDARNIQLNITKEGNEYVLNGSKWWSSGAGDPRCKIYIVMGKSDGNNKDPYLQQSVILVPSNTKGITIHRMLNVYGYDDAPHGHGHISFNNVRVPASNLVLGEGRGFEIIQGRLGPGRIHHAMRSIGAAERALEWMLMRINDPKKTPFGKQLKEHGVILEWVAKSRIEIDSARLVVLNAAVRMDDLGPKASLKEIAEAKVIVPQMALTVIDRAVQAFGGAGVSQDTPLANMWAQIRTLRLADGPDEVHLQQMGRNENKRGKEVTAKINAQRQKTEQLLKQAGVQRFQPGTGISHKL

SEQ ID NO: 1721 - DNA, 1589 bp, Muscodor strobelii
  misc_feature: SGI EST ID NO. CUFF.4499.0
  misc_feature: Variant of the nucleotide sequence at SEQ ID NO 1719
gcagcaactcataaagcaaacgtctccgtttcaattctaaatgctcttatccttcttgcgtgtcaattgcttccttatatattgaattgaacaaaatgtcagcccaaataccagctcttgtcgccgaccgcgtcagccctcaggctaagaaggtgcttgacattgtcgcaaagttcgtcgaagaggagtgcataccggcagaccccgtgttcgaagcccagatcggcgaaggttcgaaacgatgggatcaccatccccaggttatcgaggagttgaaagagaaggctaaaaagctcggactatggaacatgttcctgcccaagggacactacaaggagtcgccaggatacaccaacttagaatacggcctgatggcagagtggttgggcaagtcaaggacagcatccgaggccaccaactgcgctgctccagacactggtaacatggaggttctggccaagtacggcaacgaagcccagaaggccgaatggctcaagcccttgatggatggtaaaattcgatccgcattcctcatgaccgagcccgacgttgcttcgtccgatgccaggaatatccagttgaacatcacgaaggagggaaatgaatacgtcctcaacggatccaaatggtggtctagcggtgccggcgacccgcgatgcaagatttacatcgtcatgggcaagtctgatggaaacaacaaagacccttacctccagcaatccgttatcctcgtcccatcaaacaccaagggtatcacgattcaccggatgttgaacgtgtacggctacgatgatgctcctcacggacacggccacatttcattcaacaatgttcgcgtccccgctagcaacctggtcttgggcgagggaaggggctttgaaattattcagggacgtcttggacctggccgtatccaccatgctatgcgaagtatcggtgccgctgagagggctttggagtggatgttaatgagaatcaacgatcccaagaagactccattcggcaagcaactgaaggagcatggtgttatactcgagtgggttgctaagtcacgcattgagatcgactccgcccgtctggtggtgttgaacgctgccgtacggatggacgaccttggcccgaaggcatctcttaaggagatcgccgaggccaaggttatcgttccccagatggccctgacagtcattgaccgagctgtccaggcattcggcggtgctggtgtttcccaagatacccctcttgccaacatgtgggctcagatccgaaccctgagattggcggatggaccggacgaggtccatcttcagcagatgggtcgcaatgaaaacaagagaggcaaggaggtcactgcgaagatcaatgcacaaaggcaaaagaccgagcaattattgaagcaagctggcgttcagagattccaacctggtacaggcatttctcacaagttatagtcatatcaacatcttgcatataggtctttagcgcatcgtagtgtacaatactgatgacattggaaattgcactggatatgattgattaatgctgttacgggtatatgtgtctgtgatatatcatatggttctcaactgtca

SEQ ID NO: 1722 - DNA, 681 bp, Muscodor strobelii
  misc_feature: SGI cDNA ID NO. 560184
  misc_feature: Encodes the peptide sequence at SEQ ID NO 1723
atgttgaacgtgtacggctacgatgatgctcctcacggacacggccacatttcattcaacaatgttcgcgtccccgctagcaacctggtcttgggcgagggaaggggctttgaaattattcagggacgtcttggacctggccgtatccaccatgctatgcgaagtatcggtgccgctgagagggctttggagtggatgttaatgagaatcaacgatcccaagaagactccattcggcaagcaactgaaggagcatggtgttatactcgagtgggttgctaagtcacgcattgagatcgactccgcccgtctggtggtgttgaacgctgccgtacggatggacgaccttggcccgaaggcatctcttaaggagatcgccgaggccaaggttatcgttccccagatggccctgacagtcattgaccgagctgtccaggcattcggcggtgctggtgtttcccaagatacccctcttgccaacatgtgggctcagatccgaaccctgagattggcggatggaccggacgaggtccatcttcagcagatgggtcgcaatgaaaacaagagaggcaaggaggtcactgcgaagatcaatgcacaaaggcaaaagaccgagcaattattgaagcaagctggcgttcagagattccaacctggtacaggcatttctcacaagttatag

SEQ ID NO: 1723 - protein, 226 aa, Muscodor strobelii
  misc_feature: SGI Peptide ID NO. 560184
  misc_feature (34)..(187): Pfam Id: PF00441 Pfam Desc: Acyl-CoA dehydrogenase, C-terminal domain
  misc_feature (49)..(176): Pfam Id: PF08028 Pfam Desc: Acyl-CoA dehydrogenase, C-terminal domain
  misc_feature (49)..(158): Pfam Id: PF08028 Pfam Desc: Acyl-CoA dehydrogenase, C-terminal domain
  misc_feature (1)..(225): NCBI GI: 39948169 Blast Desc: conserved [Magnaporthe grisea 70-15] gi|145010286|gb|EDJ94942.1| conserved [Magnaporthe grisea 70-15]
  misc_feature (1)..(224): NCBI GI: 85103572 Blast Desc: NCU01181 [Neurospora crassa OR74A] gi|18376287|emb|CAD21400.1| conserved [Neurospora crassa] gi|28923094|gb|EAA32311.1| NCU01181 [Neurospora crassa OR74A]
  misc_feature (1)..(222): NCBI GI: 116199143 Blast Desc: conserved [Chaetomium globosum CBS 148.51] gi|88179006|gb|EAQ86474.1| conserved [Chaetomium globosum CBS 148.51]
  misc_feature (1)..(225): NCBI GI: 46121523 Blast Desc: FG05140.1 [Gibberella zeae PH-1]
  misc_feature (1)..(226): NCBI GI: 256731463 Blast Desc: [Nectria haematococca mpVI 77-13-4]
  misc_feature (1)..(222): NCBI GI: 171693879 Blast Desc: protein product [Podospora anserina] gi|170946888|emb|CAP73692.1| protein product [Podospora anserina]
  misc_feature (1)..(223): NCBI GI: 261351644 Blast Desc: acyl-CoA dehydrogenase family member 11 [Verticillium albo-atrum VaMs.102]
  misc_feature (1)..(225): NCBI GI: 154302977 Blast Desc: BC1G_09232 [Botryotinia fuckeliana B05.10] gi|150855156|gb|EDN30348.1| BC1G_09232 [Botryotinia fuckeliana B05.10]
  misc_feature (1)..(224): NCBI GI: 238914584 Blast Desc: FadE2-like acyl-CoA dehydrogenase [Beauveria bassiana]
  misc_feature (1)..(225): NCBI GI: 156048180 Blast Desc: SS1G_08821 [Sclerotinia sclerotiorum 1980] gi|154693218|gb|EDN92956.1| SS1G_08821 [Sclerotinia sclerotiorum 1980]
  misc_feature (16)..(183): SWISSPROT Homolog: EC 1.3.99.2 Butyryl-CoA dehydrogenase
  misc_feature: Useful for introducing or modulating the production of volatile compounds
  misc_feature: Useful for fungicidal and/or biocontrol applications
MLNVYGYDDAPHGHGHISFNNVRVPASNLVLGEGRGFEIIQGRLGPGRIHHAMRSIGAAERALEWMLMRINDPKKTPFGKQLKEHGVILEWVAKSRIEIDSARLVVLNAAVRMDDLGPKASLKEIAEAKVIVPQMALTVIDRAVQAFGGAGVSQDTPLANMWAQIRTLRLADGPDEVHLQQMGRNENKRGKEVTAKINAQRQKTEQLLKQAGVQRFQPGTGISHKL

SEQ ID NO: 1724 - DNA, 1589 bp, Muscodor strobelii; identical to SEQ ID NO: 1721
  misc_feature: SGI EST ID NO. CUFF.4499.0
  misc_feature: Variant of the nucleotide sequence at SEQ ID NO 1722

SEQ ID NO: 1725 - DNA, 1146 bp, Muscodor strobelii
  misc_feature: SGI cDNA ID NO. 560185
  misc_feature: Encodes the peptide sequence at SEQ ID NO 1726
atggaatccaccgaagtcgccgcgccggcgcctaaaaaagtgaagaagatcatccgcaagaagcgaccagcccgccctcaagtcgactccgacttcatcacatccaacccccctccgcaaacgggcacaatcttcaacatctggtacaataaatggagcggaggcgatcgcgaagacaagtacactaacaccgccgcgaaagggcgctgcaacatcgccaaagacagcggcttcacccgcgccgataagatcaccggctcctacttctgtctattcttcgcccgcggtatctgccctaagggtcaagattgcgagtaccttcaccgactgcccggcatccacgacatatttaaccccaacgtcgattgtttcggtcgcgacaaacactcggattaccgcgatgatatgggtggtgtgggtagtttcatgcgacagaacagaacgatctacgtcggaagaatacacgtcacagacgacatagaggagattgtcgccagacactttgcagaatggggtcaggtcgagcggatacgggtcctcaacacgcgaggcgtggggttcatcacatattcaaacgaagccaatgcacagttcgctaaagaagccatggcccatcagtcgctcgatcacgaagagattttaaacgtgcggtgggcgactgctgaccctaatccgatggcgcaggcgagggaggccaggaggatcgaggaacaggctgctgaggctatcaggagagctctacccgctgagttcgtcgcggagatagagggcagggatcctgaggccaggaaacggaggaggatcgagagtggatttggtcttgaggggtatgaggctcccgatgatgtctactttgcgcgcggtgcgcaggctgtcaatccggctgggagagagggctacgaacttgagcatgagcagcggttgatgattgagagtggtgaagctgatggtggtggtaatggtgctgcactggagagtgttctgggacatgagacgccggctcaggataatggcatattgtctagcagcacattagcagccctgaagacagccaaggtcacggctgcacccaaggcaaaggcaacggcttctgctggtccgttggtggcgtatggtagtgatagtgaggacgacgaggatgaataa

SEQ ID NO: 1726 - protein, 381 aa, Muscodor strobelii
  misc_feature: SGI Peptide ID NO. 560185
  misc_feature (149)..(215): Pfam Id: PF00076 Pfam Desc: RNA recognition motif. (a.k.a. RRM, RBD, or RNP domain)
  misc_feature (161)..(215): Pfam Id: PF00076 Pfam Desc: RNA recognition motif. (a.k.a. RRM, RBD, or RNP domain)
  misc_feature (23)..(376): NCBI GI: 154311423 Blast Desc: BC1G_06564 [Botryotinia fuckeliana B05.10] gi|150850961|gb|EDN26154.1| BC1G_06564 [Botryotinia fuckeliana B05.10]
  misc_feature (3)..(378): NCBI GI: 85103583 Blast Desc: pre-mRNA splicing factor cwc2 [Neurospora crassa OR74A] gi|18376284|emb|CAD21397.1| conserved [Neurospora crassa] gi|28923097|gb|EAA32314.1| pre-mRNA splicing factor cwc2 crassa
  misc_feature (23)..(376): NCBI GI: 156065189 Blast Desc: SS1G_00605 [Sclerotinia sclerotiorum 1980] gi|154691464|gb|EDN91202.1| SS1G_00605 [Sclerotinia sclerotiorum 1980]
  misc_feature (3)..(378): NCBI GI: 256731461 Blast Desc: [Nectria haematococca mpVI 77-13-4]
  misc_feature (23)..(378): NCBI GI: 148887365 Blast Desc: [Nectria haematococca mpVI 77-13-4]
  misc_feature (3)..(378): NCBI GI: 46121519 Blast Desc: FG05138.1 [Gibberella zeae PH-1]
  misc_feature (23)..(378): NCBI GI: 212535620 Blast Desc: cell cycle control protein (Cwf2), [Penicillium marneffei ATCC 18224] gi|210070365|gb|EEA24455.1| cell cycle control protein (Cwf2), [Penicillium marneffei ATCC 18224]
  misc_feature (23)..(378): NCBI GI: 67523579 Blast Desc: AN2245.2 [Aspergillus nidulans FGSC A4] gi|73918956|sp|Q5BB35.1|CWC2_EMENI RecName: Full=Pre-mRNA-splicing factor cwc2 gi|40744774|gb|EAA63930.1| A4]
  misc_feature (23)..(378): NCBI GI: 242793570 Blast Desc: cell cycle control protein (Cwf2), [Talaromyces stipitatus ATCC 10500] gi|218718779|gb|EED18199.1| cell cycle control protein (Cwf2), [Talaromyces stipitatus ATCC 10500]
  misc_feature (12)..(378): NCBI GI: 238844390 Blast Desc: pre-mRNA-splicing factor cwc2 [Microsporum canis CBS 113480]
MESTEVAAPAPKKVKKIIRKKRPARPQVDSDFITSNPPPQTGTIFNIWYNKWSGGDREDKYTNTAAKGRCNIAKDSGFTRADKITGSYFCLFFARGICPKGQDCEYLHRLPGIHDIFNPNVDCFGRDKHSDYRDDMGGVGSFMRQNRTIYVGRIHVTDDIEEIVARHFAEWGQVERIRVLNTRGVGFITYSNEANAQFAKEAMAHQSLDHEEILNVRWATADPNPMAQAREARRIEEQAAEAIRRALPAEFVAEIEGRDPEARKRRRIESGFGLEGYEAPDDVYFARGAQAVNPAGREGYELEHEQRLMIESGEADGGGNGAALESVLGHETPAQDNGILSSSTLAALKTAKVTAAPKAKATASAGPLVAYGSDSEDDEDE

SEQ ID NO: 1727 - DNA, 5277 bp, Muscodor strobelii
  misc_feature: SGI EST ID NO. CUFF.4504.0
  misc_feature: Variant of the nucleotide sequence at SEQ ID NO 1725
gcaacttgcgcctggagtctaggcgcattctgaaaattggtacttcaaatgcttcatcacccgcaagctcccgttcattactctcaccgcagttgataccccacggccgcagcttcatatacgatctcgtctaataacacgagtggcatatcgatcaccgcaatggaatccaccgaagtcgccgcgccggcgcctaaaaaagtgaagaagatcatccgcaagaagcgaccagcccgccctcaagtcgactccgacttcatcacatccaacccccctccgcaaacgggcacaatcttcaacatctggtacaataaatggagcggaggcgatcgcgaagacaagtacactaacaccgccgcgaaagggcgctgcaacatcgccaaagacagcggcttcacccgcgccgataagatcaccggctcctacttctgtctattcttcgcccgcggtatctgccctaagggtcaagattgcgagtaccttcaccgactgcccggcatccacgacatatttaaccccaacgtcgattgtttcggtcgcgacaaacactcggattaccgcgatgatatgggtggtgtgggtagtttcatgcgacagaacagaacgatctacgtcggaagaatacacgtcacagacgacatagaggagattgtcgccagacactttgcagaatggggtcaggtcgagcggatacgggtcctcaacacgcgaggcgtggggttcatcacatattcaaacgaagccaatgcacagttcgctaaagaagccatggcccatcagtcgctcgatcacgaagagattttaaacgtgcggtgggcgactgctgaccctaatccgatggcgcaggcgagggaggccaggaggatcgaggaacaggctgctgaggctatcaggagagctctacccgctgagttcgtcgcggagatagagggcagggatcctgaggccaggaaacggaggaggatcgagagtggatttggtcttgaggggtatgaggctcccgatgatgtctactttgcgcgcggtgcgcaggctgtcaatccggctgggagagagggctacgaacttgagcatgagcagcggttgatgattgagagtggtgaagctgatggtggtggtaatggtgctgcactggagagtgttctgggacatgagacgccggctcaggataatggcatattgtctagcagcacattagcagccctgaagacagccaaggtcacggctgcacccaaggcaaaggcaacggcttctgctggtccgttggtggcgtatggtagtgatagtgaggacgacgaggatgaataagaagccttgtactttgtgatgagaatacataatagagtattacttatcacctgtaccgaatatctacttgccaagccttacgtcttcgtgaacgcgaactaatgatttacacgaggttgtagtatcccagacaccgcatcccgcaaaccctcaacccatccctcaactcccatccccataccttttccctatccctcaactattgaaaatcctagaataaagcatctcatgcctcccaatccaaagatccataacaggcacactctgcccagcatcctcaaccctagtatcccactccctcctcaccatatcacttatcaaaccctgtacctcaccaccagcaagcaccttctgcgcctggtaaggcccaaacatactcgcccgtaccgcagcactgaccagcgctttcgcgtgcgagagcaggaatatgtaagcagtctgatgcagcgtgagtcctagaatcgcgcacaccgcgccgaagagcggcgctagatgtgctgagacttgaggcgggagatcatctcctcctgctgatttggattgtgtggaggagcgaaggagggacgagtaggctgatagtgcgccccgagaagatggtgagattgcggtggattgagagaggctcttttcccatatacttagtaatgccctaccctgcgctatcgaagcccgtcgtcctacggcgcagattatcgatgcgtctaattggtcatctaactctggtattgaatccggggatcgatgagcagcgagaacaaacggaagcgtcgtgctggcgtatgatgagagggagagtggcaggaatgaggggaatgagggtttgtagcgaaacggtggatggatattggaggttgagtgtgcgatgtaagattctagaccggaggagaatgcgaatgaacctagtggcaaggcggaatctgagagcaggaggaggtagtggtgggatgtgtcttggacttgtggtggtaatgatggtgatggtggtgatggggcctcccgtttggcgttgaggcgtgatttggcggcctggagttgagattctagggttgcgatttcgttctctaggtctgttccctgtgaacttgttggaggcattttacgttatgggttgaaagtgtattaattatgagacacggtgatgggatgtgagagttgtgtttttcaggatgtcaattgctacctagtagtctgtctccgatctcatgcaagtctgaaggctccgttccccacacacaatgctttgctttcctgtccatagttcaacacaacgccaatttgctttccgtaccctttatcaacaatgctagtttatgcttatgctatgacagtaaaccggctccaacaattttcaagtccaacagttctatcccgtatccagggatctgattctacatgaaaagctctcgattttatccactcacaatccgtgttgaaaacgcatcgtgaagtccaagtgcacatacaaatttcgggatcttaaggtctcaagttctccttctccagtggacgggcggtaaccttctgcctgtccgccttcttctgctcaagacgagcacgagctgcggcggcacggtctgcgggaatagcgcatcgtgatttcttcgtagctgtgttacgatctccacctggggtggctccgacacgagcgaaatggtcgttcgcaaggtcgaaaactggtccttcaagggccggagatacggcaccctgttcggttggtcggtgggctctgcgatgggatggtcgctctagagctccgtgcatcatctgttcctcgccggtgataggagccattcggtctctagctggctcaagtctctcctcttctctgtgaacacgtgacagacgatcctttgccactgactcttgcgtgtttcgtggctgatttgggcgagattcattaactctggtggatagtacatctgacgtgactggatggctgccgggtagcggtcgatggactctgctcctagccggtctgggcgacttgttttcaggctgctcccctagtcctttgccctgctcatactgcttgaccacggtatctttgtttccacgctggatcttgaagtcgagtagatcagtagtcaaatcggcaaggaatcctttgcgctgcttctttgcatcaacaggctcttgcatcttggttctggcctccagtttggaatcaacgacatcggtggtcaactcggtaaggaaacgcctcgtctctacagggtcatatttgaccttcaccggcgacatgagactaatgatatcggcagttggatcagggaggaacagtgctcgctccggcttctcacgccgcggaacgacggccgtgccttgttctttcttgcccaacaaagaacgttgcgtcatgtcgaggctcatgtcatcaacagatgatcttcttgtgagatttgtcctgggtgcagcaggcatgatattccgttgatccctgcgtctcttgatgtcatcattcacctcctgagtgatctcatgatgcatggcaatagcaccatccagaccatccagctggtaatctgcatacggcctaagctggagtctcttcacctgtgcatccaacttgtggatctgtttgtccttctcctggacagcctggctcgcctctccagcacgggccttggcgtcattcttcagggtttcgtagtctctcttgagcttcctgatgtcggcatccttcttgcgggactcctctttcgtctcgcacaagcgatcctccaactcatgaactctcgagttaccaaattccattacggcttcgagcgtggtaactcgctcttgggacttggtcagatcggacttcagacttttgacttcgtctcgaagtcgttccatctctctgagctcagatcgggcccttctcagctctcgattgacttcgagcaggttctcttcggtacgaggggaagtgttggcgcgatcctggcttgctcgaagaatcttggcttcttgctgggcttcatgtacctgttcctccagttcctcaattcgctggcggtattcggagacctgtgcagtctttttcgccagagtattctccattatcgccatttctcgctcgccctcgtatgttcgcctactctcgaccctggtggccatccttttgatttgctcctcaagcttggccactttcacctgctcttccttcagccttcggttcaactcattggcttcggcatctttcttcgcagcaaaggacttagcatttgctttgtacgtgacaagctgtgtcatgtctaattttgccgcgtcacgatagctggagtattgttccttccaatactttcccgattccgagtggggatcattcagatccacggtcatgtcatgatcacagcaagcatcgtcttccctttcgtcttctgaatcatcagtgcccttagcagcagactccattatgacggggaggtcaggtcctctggatcttgtgcccctccttttcgtctttgtcgagcgcgagtcttccattacctgctgcagtgcagtcttctttcgctgtcggtcgttcgttggtgagtccgatgcaagagtgccagagtcaacaacattgccggctttcacatcccgcccgaatgaaaccttcttccgcctggaggtaccggtaccaggtgtcaacaagatactgttgggcttgcttggagacatgtttgaagcataggctgtgctggcggcattgctgacaggctctatgcgctccgtctctgcagttgtcttggtagctttcgggtcaactggagctggagtttccgacttgttgggctgcccgaatatggcgttcttcaaggcacgggctgcaaaaacgggagctggtgtgtcaggggcatcgaggcgcgttgtgtcctctacatctcaaatcagcaacccaaggagaaacatgtgcagattggaggccggcaataccatcagcttcgggcgcgttgtcacggcccgtgacaccactcgcgttctttgcgaaagcccacccga

SEQ ID NO: 1728 - DNA, 900 bp, Muscodor strobelii
  misc_feature: SGI cDNA ID NO. 560186
  misc_feature: Encodes the peptide sequence at SEQ ID NO 1729
atgcctccaacaagttcacagggaacagacctagagaacgaaatcgcaaccctagaatctcaactccaggccgccaaatcacgcctcaacgccaaacgggaggccccatcaccaccatcaccatcattaccaccacaagtccaagacacatcccaccactacctcctcctgctctcagattccgccttgccactaggttcattcgcattctcctccggtctagaatcttacatcgcacactcaacctccaatatccatccaccgtttcgctacaaaccctcattcccctcattcctgccactctccctctcatcatacgccagcacgacgcttccgtttgttctcgctgctcatcgatccccggattcaataccagagttagatgaccaattagacgcatcgataatctgcgccgtaggacgacgggcttcgatagcgcagggtagggcattactaagtatatgggaaaagagcctctctcaatccaccgcaatctcaccatcttctcggggcgcactatcagcctactcgtccctccttcgctcctccacacaatccaaatcagcaggaggagatgatctcccgcctcaagtctcagcacatctagcgccgctcttcggcgcggtgtgcgcgattctaggactcacgctgcatcagactgcttacatattcctgctctcgcacgcgaaagcgctggtcagtgctgcggtacgggcgagtatgtttgggccttaccaggcgcagaaggtgcttgctggtggtgaggtacagggtttgataagtgatatggtgaggagggagtgggatactagggttgaggatgctgggcagagtgtgcctgttatggatctttggattgggaggcatgagatgctttattctaggattttcaatagttga

SEQ ID NO: 1729 - protein, 299 aa, Muscodor strobelii
  misc_feature: SGI Peptide ID NO. 560186
  misc_feature (11)..(299): NCBI GI: 46121517 Blast Desc: FG05137.1 [Gibberella zeae PH-1]
  misc_feature (1)..(299): NCBI GI: 256731066 Blast Desc: [Nectria haematococca mpVI 77-13-4]
  misc_feature (47)..(299): NCBI GI: 171693887 Blast Desc: protein product [Podospora anserina] gi|170946892|emb|CAP73696.1| protein product [Podospora anserina]
  misc_feature (5)..(299): NCBI GI: 85103587 Blast Desc: NCU01185 [Neurospora crassa OR74A] gi|18376283|emb|CAD21396.1| conserved [Neurospora crassa] gi|28923098|gb|EAA32315.1| conserved [Neurospora crassa OR74A]
  misc_feature (63)..(299): NCBI GI: 261351648 Blast Desc: conserved [Verticillium albo-atrum VaMs.102]
  misc_feature (4)..(299): NCBI GI: 238494126 Blast Desc: conserved [Aspergillus flavus NRRL3357] gi|220694949|gb|EED51292.1| conserved [Aspergillus flavus NRRL3357]
  misc_feature (11)..(299): NCBI GI: 145601755 Blast Desc: MGG_14268 [Magnaporthe grisea 70-15] gi|145010265|gb|EDJ94921.1| MGG_14268 [Magnaporthe grisea 70-15]
  misc_feature (4)..(299): NCBI GI: 169777043 Blast Desc: [Aspergillus oryzae RIB40] gi|83771724|dbj|BAE61854.1| protein product [Aspergillus oryzae]
  misc_feature (8)..(286): NCBI GI: 116199135 Blast Desc: CHGG_07723 [Chaetomium globosum CBS 148.51] gi|88179002|gb|EAQ86470.1| CHGG_07723 [Chaetomium globosum CBS 148.51]
  misc_feature (10)..(299): NCBI GI: 121703678 Blast Desc: conserved [Aspergillus clavatus NRRL 1] gi|119398247|gb|EAW08677.1| conserved [Aspergillus clavatus NRRL 1]
MPPTSSQGTDLENEIATLESQLQAAKSRLNAKREAPSPPSPSLPPQVQDTSHHYLLLLSDSALPLGSFAFSSGLESYIAHSTSNIHPPFRYKPSFPSFLPLSLSSYASTTLPFVLAAHRSPDSIPELDDQLDASIICAVGRRASIAQGRALLSIWEKSLSQSTAISPSSRGALSAYSSLLRSSTQSKSAGGDDLPPQVSAHLAPLFGAVCAILGLTLHQTAYIFLLSHAKALVSAAVRASMFGPYQAQKVLAGGEVQGLISDMVRREWDTRVEDAGQSVPVMDLWIGRHEMLYSRIFNS

SEQ ID NO: 1730 - DNA, 5277 bp, Muscodor strobelii
  misc_feature: SGI EST ID NO. CUFF.4504.0
  misc_feature: Variant of the nucleotide sequence at SEQ ID NO 1728
tcgggtgggctttcgcaaagaacgcgagtggtgtcacgggccgtgacaacgcgcccgaagctgatggtattgccggcctccaatctgcacatgtttctccttgggttgctgatttgagatgtagaggacacaacgcgcctcgatgcccctgacacaccagctcccgtttttgcagcccgtgccttgaagaacgccatattcgggcagcccaacaagtcggaaactccagctccagttgacccgaaagctaccaagacaactgcagagacggagcgcatagagcctgtcagcaatgccgccagcacagcctatgcttcaaacatgtctccaagcaagcccaacagtatcttgttgacacctggtaccggtacctccaggcggaagaaggtttcattcgggcgggatgtgaaagccggcaatgttgttgactctggcactcttgcatcggactcaccaacgaacgaccgacagcgaaagaagactgcactgcagcaggtaatggaagactcgcgctcgacaaagacgaaaaggaggggcacaagatccagaggacctgacctccccgtcataatggagtctgctgctaagggcactgatgattcagaagacgaaagggaagacgatgcttgctgtgatcatgacatgaccgtggatctgaatgatccccactcggaatcgggaaagtattggaaggaacaatactccagctatcgtgacgcggcaaaattagacatgacacagcttgtcacgtacaaagcaaatgctaagtcctttgctgcgaagaaagatgccgaagccaatgagttgaaccgaaggctgaaggaagagcaggtgaaagtggccaagcttgaggagcaaatcaaaaggatggccaccagggtcgagagtaggcgaacatacgagggcgagcgagaaatggcgataatggagaatactctggcgaaaaagactgcacaggtctccgaataccgccagcgaattgaggaactggaggaacaggtacatgaagcccagcaagaagccaagattcttcgagcaagccaggatcgcgccaacacttcccctcgtaccgaagagaacctgctcgaagtcaatcgagagctgagaagggcccgatctgagctcagagagatggaacgacttcgagacgaagtcaaaagtctgaagtccgatctgaccaagtcccaagagcgagttaccacgctcgaagccgtaatggaatttggtaactcgagagttcatgagttggaggatcgcttgtgcgagacgaaagaggagtcccgcaagaaggatgccgacatcaggaagctcaagagagactacgaaaccctgaagaatgacgccaaggcccgtgctggagaggcgagccaggctgtccaggagaaggacaaacagatccacaagttggatgcacaggtgaagagactccagcttaggccgtatgcagattaccagctggatggtctggatggtgctattgccatgcatcatgagatcactcaggaggtgaatgatgacatcaagagacgcagggatcaacggaatatcatgcctgctgcacccaggacaaatctcacaagaagatcatctgttgatgacatgagcctcgacatgacgcaacgttctttgttgggcaagaaagaacaaggcacggccgtcgttccgcggcgtgagaagccggagcgagcactgttcctccctgatccaactgccgatatcattagtctcatgtcgccggtgaaggtcaaatatgaccctgtagagacgaggcgtttccttaccgagttgaccaccgatgtcgttgattccaaactggaggccagaaccaagatgcaagagcctgttgatgcaaagaagcagcgcaaaggattccttgccgatttgactactgatctactcgacttcaagatccagcgtggaaacaaagataccgtggtcaagcagtatgagcagggcaaaggactaggggagcagcctgaaaacaagtcgcccagaccggctaggagcagagtccatcgaccgctacccggcagccatccagtcacgtcagatgtactatccaccagagttaatgaatctcgcccaaatcagccacgaaacacgcaagagtcagtggcaaaggatcgtctgtcacgtgttcacagagaagaggagagacttgagccagctagagaccgaatggctcctatcaccggcgaggaacagatgatgcacggagctctagagcgaccatcccatcgcagagcccaccgaccaaccgaacagggtgccgtatctccggcccttgaaggaccagttttcgaccttgcgaacgaccatttcgctcgtgtcggagccaccccaggtggagatcgtaacacagctacgaagaaatcacgatgcgctattcccgcagaccgtgccgccgcagctcgtgctcgtcttgagcagaagaaggcggacaggcagaaggttaccgcccgtccactggagaaggagaacttgagaccttaagatcccgaaatttgtatgtgcacttggacttcacgatgcgttttcaacacggattgtgagtggataaaatcgagagcttttcatgtagaatcagatccctggatacgggatagaactgttggacttgaaaattgttggagccggtttactgtcatagcataagcataaactagcattgttgataaagggtacggaaagcaaattggcgttgtgttgaactatggacaggaaagcaaagcattgtgtgtggggaacggagccttcagacttgcatgagatcggagacagactactaggtagcaattgacatcctgaaaaacacaactctcacatcccatcaccgtgtctcataattaatacactttcaacccataacgtaaaatgcctccaacaagttcacagggaacagacctagagaacgaaatcgcaaccctagaatctcaactccaggccgccaaatcacgcctcaacgccaaacgggaggccccatcaccaccatcaccatcattaccaccacaagtccaagacacatcccaccactacctcctcctgctctcagattccgccttgccactaggttcattcgcattctcctccggtctagaatcttacatcgcacactcaacctccaatatccatccaccgtttcgctacaaaccctcattcccctcattcctgccactctccctctcatcatacgccagcacgacgcttccgtttgttctcgctgctcatcgatccccggattcaataccagagttagatgaccaattagacgcatcgataatctgcgccgtaggacgacgggcttcgatagcgcagggtagggcattactaagtatatgggaaaagagcctctctcaatccaccgcaatctcaccatcttctcggggcgcactatcagcctactcgtccctccttcgctcctccacacaatccaaatcagcaggaggagatgatctcccgcctcaagtctcagcacatctagcgccgctcttcggcgcggtgtgcgcgattctaggactcacgctgcatcagactgcttacatattcctgctctcgcacgcgaaagcgctggtcagtgctgcggtacgggcgagtatgtttgggccttaccaggcgcagaaggtgcttgctggtggtgaggtacagggtttgataagtgatatggtgaggagggagtgggatactagggttgaggatgctgggcagagtgtgcctgttatggatctttggattgggaggcatgagatgctttattctaggattttcaatagttgagggatagggaaaaggtatggggatgggagttgagggatgggttgagggtttgcgggatgcggtgtctgggatactacaacctcgtgtaaatcattagttcgcgttcacgaagacgtaaggcttggcaagtagatattcggtacaggtgataagtaatactctattatgtattctcatcacaaagtacaaggcttcttattcatcctcgtcgtcctcactatcactaccatacgccaccaacggaccagcagaagccgttgcctttgccttgggtgcagccgtgaccttggctgtcttcagggctgctaatgtgctgctagacaatatgccattatcctgagccggcgtctcatgtcccagaacactctccagtgcagcaccattaccaccaccatcagcttcaccactctcaatcatcaaccgctgctcatgctcaagttcgtagccctctctcccagccggattgacagcctgcgcaccgcgcgcaaagtagacatcatcgggagcctcatacccctcaagaccaaatccactctcgatcctcctccgtttcctggcctcaggatccctgccctctatctccgcgacgaactcagcgggtagagctctcctgatagcctcagcagcctgttcctcgatcctcctggcctccctcgcctgcgccatcggattagggtcagcagtcgcccaccgcacgtttaaaatctcttcgtgatcgagcgactgatgggccatggcttctttagcgaactgtgcattggcttcgtttgaatatgtgatgaaccccacgcctcgcgtgttgaggacccgtatccgctcgacctgaccccattctgcaaagtgtctggcgacaatctcctctatgtcgtctgtgacgtgtattcttccgacgtagatcgttctgttctgtcgcatgaaactacccacaccacccatatcatcgcggtaatccgagtgtttgtcgcgaccgaaacaatcgacgttggggttaaatatgtcgtggatgccgggcagtcggtgaaggtactcgcaatcttgacccttagggcagataccgcgggcgaagaatagacagaagtaggagccggtgatcttatcggcgcgggtgaagccgctgtctttggcgatgttgcagcgccctttcgcggcggtgttagtgtacttgtcttcgcgatcgcctccgctccatttattgtaccagatgttgaagattgtgcccgtttgcggaggggggttggatgtgatgaagtcggagtcgacttgagggcgggctggtcgcttcttgcggatgatcttcttcacttttttaggcgccggcgcggcgacttcggtggattccattgcggtgatcgatatgccactcgtgttattagacgagatcgtatatgaagctgcggccgtggggtatcaactgcggtgagagtaatgaacgggagcttgcgggtgatgaagcatttgaagtaccaattttcagaatgcgcctagactccaggcgcaagttgc

SEQ ID NO: 1731 - DNA, 2439 bp, Muscodor strobelii
  misc_feature: SGI cDNA ID NO. 560187
  misc_feature: Encodes the peptide sequence at SEQ ID NO 1732
atgctcgggtgggctttcgcaaagaacgcgagtggtgtcacgggccgtgacaacgcgcccgaagctgatgaggacacaacgcgcctcgatgcccctgacacaccagctcccgtttttgcagcccgtgccttgaagaacgccatattcgggcagcccaacaagtcggaaactccagctccagttgacccgaaagctaccaagacaactgcagagacggagcgcatagagcctgtcagcaatgccgccagcacagcctatgcttcaaacatgtctccaagcaagcccaacagtatcttgttgacacctggtaccggtacctccaggcggaagaaggtttcattcgggcgggatgtgaaagccggcaatgttgttgactctggcactcttgcatcggactcaccaacgaacgaccgacagcgaaagaagactgcactgcagcaggtaatggaagactcgcgctcgacaaagacgaaaaggaggggcacaagatccagaggacctgacctccccgtcataatggagtctgctgctaagggcactgatgattcagaagacgaaagggaagacgatgcttgctgtgatcatgacatgaccgtggatctgaatgatccccactcggaatcgggaaagtattggaaggaacaatactccagctatcgtgacgcggcaaaattagacatgacacagcttgtcacgtacaaagcaaatgctaagtcctttgctgcgaagaaagatgccgaagccaatgagttgaaccgaaggctgaaggaagagcaggtgaaagtggccaagcttgaggagcaaatcaaaaggatggccaccagggtcgagagtaggcgaacatacgagggcgagcgagaaatggcgataatggagaatactctggcgaaaaagactgcacaggtctccgaataccgccagcgaattgaggaactggaggaacaggtacatgaagcccagcaagaagccaagattcttcgagcaagccaggatcgcgccaacacttcccctcgtaccgaagagaacctgctcgaagtcaatcgagagctgagaagggcccgatctgagctcagagagatggaacgacttcgagacgaagtcaaaagtctgaagtccgatctgaccaagtcccaagagcgagttaccacgctcgaagccgtaatggaatttggtaactcgagagttcatgagttggaggatcgcttgtgcgagacgaaagaggagtcccgcaagaaggatgccgacatcaggaagctcaagagagactacgaaaccctgaagaatgacgccaaggcccgtgctggagaggcgagccaggctgtccaggagaaggacaaacagatccacaagttggatgcacaggtgaagagactccagcttaggccgtatgcagattaccagctggatggtctggatggtgctattgccatgcatcatgagatcactcaggaggtgaatgatgacatcaagagacgcagggatcaacggaatatcatgcctgctgcacccaggacaaatctcacaagaagatcatctgttgatgacatgagcctcgacatgacgcaacgttctttgttgggcaagaaagaacaaggcacggccgtcgttccgcggcgtgagaagccggagcgagcactgttcctccctgatccaactgccgatatcattagtctcatgtcgccggtgaaggtcaaatatgaccctgtagagacgaggcgtttccttaccgagttgaccaccgatgtcgttgattccaaactggaggccagaaccaagatgcaagagcctgttgatgcaaagaagcagcgcaaaggattccttgccgatttgactactgatctactcgacttcaagatccagcgtggaaacaaagataccgtggtcaagcagtatgagcagggcaaaggactaggggagcagcctgaaaacaagtcgcccagaccggctaggagcagagtccatcgaccgctacccggcagccatccagtcacgtcagatgtactatccaccagagttaatgaatctcgcccaaatcagccacgaaacacgcaagagtcagtggcaaaggatcgtctgtcacgtgttcacagagaagaggagagacttgagccagctagagaccgaatggctcctatcaccggcgaggaacagatgatgcacggagctctagagcgaccatcccatcgcagagcccaccgaccaaccgaacagggtgccgtatctccggcccttgaaggaccagttttcgaccttgcgaacgaccatttcgctcgtgtcggagccaccccaggtggagatcgtaacacagctacgaagaaatcacgatgcgctattcccgcagaccgtgccgccgcagctcgtgctcgtcttgagcagaagaaggcggacaggcagaaggttaccgcccgtccactggagaaggagaacttgagaccttaa

SEQ ID NO: 1732 - protein, 812 aa, Muscodor strobelii
  misc_feature: SGI Peptide ID NO. 560187
  misc_feature (1)..(459): NCBI GI: 46121515 Blast Desc: FG05136.1 [Gibberella zeae PH-1]
  misc_feature (1)..(459): NCBI GI: 256731065 Blast Desc: NECHADRAFT_48571 [Nectria haematococca mpVI 77-13-4]
  misc_feature (29)..(487): NCBI GI: 85103591 Blast Desc: NCU01186 [Neurospora crassa OR74A] gi|18376282|emb|CAD21395.1| [Neurospora crassa] gi|28923099|gb|EAA32316.1| [Neurospora crassa OR74A]
  misc_feature (1)..(459): NCBI GI: 261351666 Blast Desc: conserved [Verticillium albo-atrum VaMs.102]
  misc_feature (24)..(462): NCBI GI: 171693875 Blast Desc: protein product [Podospora anserina] gi|170946886|emb|CAP73690.1| protein product [Podospora anserina]
  misc_feature (1)..(451): NCBI GI: 116199133 Blast Desc: CHGG_07722 [Chaetomium globosum CBS 148.51] gi|88179001|gb|EAQ86469.1| CHGG_07722 [Chaetomium globosum CBS 148.51]
  misc_feature (91)..(451): NCBI GI: 39947962 Blast Desc: MGG_08642 [Magnaporthe grisea 70-15] gi|145010266|gb|EDJ94922.1| MGG_08642 [Magnaporthe grisea 70-15]
  misc_feature (1)..(451): NCBI GI: 156065241 Blast Desc: SS1G_00631 [Sclerotinia sclerotiorum 1980] gi|154691490|gb|EDN91228.1| SS1G_00631 [Sclerotinia sclerotiorum 1980]
  misc_feature (1)..(459): NCBI GI: 154311353 Blast Desc: BC1G_06529 [Botryotinia fuckeliana B05.10] gi|150850926|gb|EDN26119.1| BC1G_06529 [Botryotinia fuckeliana B05.10]
  misc_feature (1)..(385): NCBI GI: 169777231 Blast Desc: [Aspergillus oryzae RIB40] gi|83771818|dbj|BAE61948.1| protein product [Aspergillus oryzae]
MLGWAFAKNASGVTGRDNAPEADEDTTRLDAPDTPAPVFAARALKNAIFGQPNKSETPAPVDPKATKTTAETERIEPVSNAASTAYASNMSPSKPNSILLTPGTGTSRRKKVSFGRDVKAGNVVDSGTLASDSPTNDRQRKKTALQQVMEDSRSTKTKRRGTRSRGPDLPVIMESAAKGTDDSEDEREDDACCDHDMTVDLNDPHSESGKYWKEQYSSYRDAAKLDMTQLVTYKANAKSFAAKKDAEANELNRRLKEEQVKVAKLEEQIKRMATRVESRRTYEGEREMAIMENTLAKKTAQVSEYRQRIEELEEQVHEAQQEAKILRASQDRANTSPRTEENLLEVNRELRRARSELREMERLRDEVKSLKSDLTKSQERVTTLEAVMEFGNSRVHELEDRLCETKEESRKKDADIRKLKRDYETLKNDAKARAGEASQAVQEKDKQIHKLDAQVKRLQLRPYADYQLDGLDGAIAMHHEITQEVNDDIKRRRDQRNIMPAAPRTNLTRRSSVDDMSLDMTQRSLLGKKEQGTAVVPRREKPERALFLPDPTADIISLMSPVKVKYDPVETRRFLTELTTDVVDSKLEARTKMQEPVDAKKQRKGFLADLTTDLLDFKIQRGNKDTVVKQYEQGKGLGEQPENKSPRPARSRVHRPLPGSHPVTSDVLSTRVNESRPNQPRNTQESVAKDRLSRVHREEERLEPARDRMAPITGEEQMMHGALERPSHRRAHRPTEQGAVSPALEGPVFDLANDHFARVGATPGGDRNTATKKSRCAIPADRAAAARARLEQKKADRQKVTARPLEKENLRP

SEQ ID NO: 1733 - DNA, 4935 bp, Muscodor strobelii
  misc_feature: SGI cDNA ID NO. 560188
  misc_feature: Encodes the peptide sequence at SEQ ID NO 1734
atggcgtcgagaaactggaaaagccccattctacacacaccaaaaaaagttgctgctgctagcccggatactggcccaaaaactcaatatgaagacacacagaaagacgaacttctcgtattgcaagcaatctggggagacgactttgttgaacacaaatctgcaaacacagcttggaagaagtcggagcctacgtttgatatccacattaaagccttgtccaatgatgacttctctatcactctcagtgtggttctcactgccacttaccccaagtccgcaccgttactcagcctcaaaaatgagggctcactaagtgagtcgactgttttcaagcttcagaaatatatcgagagcaagcccaaggctcttgcggcagaaggacaagcggagcctatgatacatgatcttgcaacagggcttcaagagatcctcgatgatgctgcaagcatcaaggcccagggcctcgagctcccctcgctggagcaggaacgagctgcctacgaagcagagcttgcaaagcaggctttggaaattcaacaagcagaggaacagaaaaagttggatgctgctatgaaagaagagaagaatatgcaagaactcctaaaccaagaaattgagcgccaacgtctcaaggcgaaagacacccctcggaaacgtcaaaagcccatcacatcaaactctcaatctgaagtagccactgtctcttccgctcgcacggttgagttcgatattccctgcaggattaccgacaccactggaagggtcatccattttaccgcagtggcggacaaacgagaatatcgacagggccccacgtcgaccattttcactgtgcggccaaatgttcctggtgccgaggactgtagagacttggccatggaagagtttgagcttcgctcttcgtcacaggactctgtgcaactcaagctgaaggtccaggcagtggagagattacttgactctattaaggaaataagtcatcggaatattctcacacttctaaactatcgtatcgatcctatctacacggcgccaggatgggttgcgagaattttgacccctctagctgagaaagatacgctgagtgaattgattgagcttgctggtcatcttgatatcggtaaagtccggtcttggactgctgatcttcttggtgccctgggcttcttgcacagccgtggtattgtgcatcaggacatacatcctggcaatattctgttgtttcgtgaatccgcaggggaaatcgtcccaaagctctcggatgttgcctatggcagagaaatgcgtgatatctgtcgcaagtctagctcaatttcccatgtcaattctgcgaggtcttcctactggttacctcctgagattgctgagaagtcaaacccaagttttactccaaagactgatgtctgggaatttggtattgtcttcctacagatgatattcggtcttgatgtgttgcgatatcaccagtctccccaggccttggtggactcgctatccctgtccattacatgcgaagagctagtaacccgcttcttcaaaatcgatcccaagaaacgaccacgagcaatcgagcttagttcgagcgagtttcttgcaacagatgcaccagttgtggtcgaacattctcctatggatttgcctcgctcgcaatcacaaagctctgtccctctgctcacgcctgtgcgaccaaggcgtgactctgcggcaccctttaccaatctctcacgatatcgagaagactatgttgaagaggctcgcttgggcaagggcggattcggcgaagttgtaaaggcgaggcagaaactcgacggcaacatatatgccatcaagaagatcattcaaccatcgcaacaaaccttgtcaaacatcttgaaagaagttcgacttttatcgcagctgagtcatcctgcagtagtaagatactacagcacttggttggagcctttgagcgacttcaacgatggcgacaaagatagcgaggcttctagtgatgttctaggatcgcttggtaaccataatggggaacaatccgctagaacagctgttctggagatggaggatcagctaacaacagatactggtgatctggactttgtatcttcagatcatcccaactacgatccatatgacgatatcgtattcgggtatgacgatgattccaatggtggaaaggtggaccgctctcttggtgacaatattgtgtttgaaaacgactctgagcatggcgaagcagacgaggaggatgatgaagaggatgatgacgatcagattggcgacgaggaagaatcatctgaagccgagagtgatgagtcgtcagaagatatcccacgtggaatggtatctcctttcagagtccgcagccaaagtgactcgaagaaacctcgtgtgataatgtacatctcgatggaatactgcgacaaaaggacgctgcgggacttgatacagaacaagctatgtgacgatgcggaagagatctggcgcctatttcggcaaatagtcgagggcttggttcacatacacgggttaaacattgtgcatcgcgatctcaaaccggcgaacatctttatcgggctcggcccggacggtgtgggcaatgtcaagattggtgacttcggtttggcaacaactggtaattttgccgtcgatagagtcgattcagcgcatgttgatacaggcgagctcacgagtggcgttggcacatcattctatgttgcacctgaggttcgcagaggatctggcggatcatatacctccaaagtggatatgtactctcttggggttattttcttcgagatgggttattacccagttatgggcatggagagagccgacaaattagggaaactgagtaaggaatcccgtttacccgacgactttcgacctgagaataagaatcacacggagattgtgaagatgttgatagcacatgatcctgcggagcggccctccagtttcgagcttctccgtagcggaaagttacccatccagatggaaaacgaaagcaaccaaagggcctttgcgagagttctctcgagtttggaagacagggactctgcagactaccccagagtgatttcggcccttttcgcggcccgcaggccactggcgctcccgaaagattacacttgggacatgtcggcccctgatatcactgccgccgagttgctatacaaaggcatagtcaaagaagagttgactgcgattttccgtcgtcacggtgcagttgaggcgcctagaagctccctctacccgcgttcaactcaatattcgactaaccaaaaggttgtggagctcctggacccaaatgggactgttgtccaattgccgtttgacctcatgctaggaaacgctcgcttccttgctaagctatcgaaatcattagagcttcgtcgatcatttacattcggacaagtatatcgagtcaacaagagtggaggtcaacctcagatgctaggtgaggtagactttgacatcgcctctgcagattcattcgacttagctttgaaagaggctgaggttatcaaggttttggatgagatatgtcagacgtttccaagcacctctcacatgtgttttcatctcggccactctgatcttttacagctcatcttcgagttttgcaagatcgagcagggcgcgagacaaatgacggctgaggctcttagcaaactgaacatactctctcacacttttcagactattcgcgccgagctacgatcgcctctgataggcgtttcctcgaccagcatagaggatttgcgccggtttgatttccgagacaccccgatgaaagcttttgctaaacttaagagtattttcgagggcagtccgttgaacgaacggctacaacccatcattgcgcatctgaagggggtgatcgagtatactaagcgattcggcactcactgcaagatctatgtcaatccgttgaacagtctaaaagccaattttttctctggaggtgttctattccaatgcctatacgacaagaagttcaaagacgtgtttgctgctggcggtcgatatgacaatctcatcaaatctcatcgccctggaacgggcctgcacagtgaacagcttcgtgctgtcgggttctccttagcttgggagaaactcgtgaagttcccaaaatccggtggcaaagcttttttgaagaaggctgaagaggaacaaacaagaatgtttgacaccaagagatgcgacgtacttgtcgctagtttcgattctcatacattgcgtactacgggcattgagatcgtgtcacaattgtggaaccattacattagtgccgagattgctcgagatgctaaatcacctgacgaactagtgctacgaaatcgcgatgaatcctattcgtggatcatcatcgtgaaaaacgacatgctgaaagtcaaaacgatggaccgaaaggacgtaccagacgcagaattgtcaattaccaattacttgtcctggtttcgaacggcccttcgtgatcgccgttcctctcgacttcacattgcgaccaaacaaatcgaaactataggaacttcatcatcattaccgcaaggcccgaacgttgctacaaattctggacaggaggtccacgtactcattgctggaacaaagtcaaagaagttcaatcgacagactgtaatcgagcaagcccaagttaatgctgcgggccttgtgcagaatttcttaggcgggccaatcgccgcggttgagacgagtgaccgtgtgcttgatctcatccgcgaaacggcattatctgaccccgaaagttggcgcaaagctgaacaatccgttgataagatcgaacggaagtatatgcgcgagatacacgatatgttgtccgactggagatcgacacgagtaccgaagggcaatcgcgatgcatttgtctacaatttccgcactactaaatgcatttactacgacttgggtgcttga

SEQ ID NO: 1734 - protein, 1644 aa, Muscodor strobelii
  misc_feature: SGI Peptide ID NO. 560188
  misc_feature (29)..(145): Pfam Id: PF05773 Pfam Desc: RWD domain
  misc_feature (582)..(992): Pfam Id: PF00069 Pfam Desc: Protein kinase domain
  misc_feature (799)..(992): Pfam Id: PF00069 Pfam Desc: Protein kinase domain
  misc_feature (582)..(649): Pfam Id: PF00069 Pfam Desc: Protein kinase domain
  misc_feature (324)..(408): Pfam Id: PF00069 Pfam Desc: Protein kinase domain
  misc_feature (582)..(643): Pfam Id: PF07714 Pfam Desc: Protein tyrosine kinase
  misc_feature (2)..(1644): NCBI GI: 261351667 Blast Desc: serine/threonine-protein kinase gcn2 [Verticillium albo-atrum VaMs.102]
  misc_feature (21)..(1644): NCBI GI: 116199131 Blast Desc: CHGG_07721 [Chaetomium globosum CBS 148.51] gi|88179000|gb|EAQ86468.1| CHGG_07721 [Chaetomium globosum CBS 148.51]
  misc_feature (9)..(1606): NCBI GI: 145601757 Blast Desc: MGG_08643 [Magnaporthe grisea 70-15] gi|145010267|gb|EDJ94923.1| MGG_08643 [Magnaporthe grisea 70-15]
  misc_feature (13)..(1643): NCBI GI: 242793574 Blast Desc: protein kinase (Gcn2), [Talaromyces stipitatus ATCC 10500] gi|218718780|gb|EED18200.1| protein kinase (Gcn2), [Talaromyces stipitatus ATCC 10500]
  misc_feature (14)..(1643): NCBI GI: 169777233 Blast Desc: [Aspergillus oryzae RIB40] gi|83771819|dbj|BAE61949.1| protein product [Aspergillus oryzae]
  misc_feature (13)..(1643): NCBI GI: 212535622 Blast Desc: protein kinase (Gcn2), [Penicillium marneffei ATCC 18224] gi|210070366|gb|EEA24456.1| protein kinase (Gcn2), [Penicillium marneffei ATCC 18224]
  misc_feature (14)..(1643): NCBI GI: 238494360 Blast Desc: protein kinase (Gcn2), [Aspergillus flavus NRRL3357] gi|220695066|gb|EED51409.1| protein kinase (Gcn2), [Aspergillus flavus NRRL3357]
  misc_feature (28)..(1643): NCBI GI: 159126309 Blast Desc: protein kinase (Gcn2), [Aspergillus fumigatus A1163]
  misc_feature (21)..(1644): NCBI GI: 145253605 Blast Desc: An17g00860 [Aspergillus niger] gi|134083883|emb|CAK43014.1| protein product [Aspergillus niger]
  misc_feature (28)..(1643): NCBI GI: 70998472 Blast Desc: protein kinase (Gcn2) [Aspergillus fumigatus Af293] gi|66851594|gb|EAL91920.1| protein kinase (Gcn2), [Aspergillus fumigatus Af293]
  misc_feature (29)..(1642): SWISSPROT Homolog: EC 2.7.11.1 Non-specific serine/threonine protein kinase
MASRNWKSPILHTPKKVAAASPDTGPKTQYEDTQKDELLVLQAIWGDDFVEHKSANTAWKKSEPTFDIHIKALSNDDFSITLSVVLTATYPKSAPLLSLKNEGSLSESTVFKLQKYIESKPKALAAEGQAEPMIHDLATGLQEILDDAASIKAQGLELPSLEQERAAYEAELAKQALEIQQAEEQKKLDAAMKEEKNMQELLNQEIERQRLKAKDTPRKRQKPITSNSQSEVATVSSARTVEFDIPCRITDTTGRVIHFTAVADKREYRQGPTSTIFTVRPNVPGAEDCRDLAMEEFELRSSSQDSVQLKLKVQAVERLLDSIKEISHRNILTLLNYRIDPIYTAPGWVARILTPLAEKDTLSELIELAGHLDIGKVRSWTADLLGALGFLHSRGIVHQDIHPGNILLFRESAGEIVPKLSDVAYGREMRDICRKSSSISHVNSARSSYWLPPEIAEKSNPSFTPKTDVWEFGIVFLQMIFGLDVLRYHQSPQALVDSLSLSITCEELVTRFFKIDPKKRPRAIELSSSEFLATDAPVVVEHSPMDLPRSQSQSSVPLLTPVRPRRDSAAPFTNLSRYREDYVEEARLGKGGFGEVVKARQKLDGNIYAIKKIIQPSQQTLSNILKEVRLLSQLSHPAVVRYYSTWLEPLSDFNDGDKDSEASSDVLGSLGNHNGEQSARTAVLEMEDQLTTDTGDLDFVSSDHPNYDPYDDIVFGYDDDSNGGKVDRSLGDNIVFENDSEHGEADEEDDEEDDDDQIGDEEESSEAESDESSEDIPRGMVSPFRVRSQSDSKKPRVIMYISMEYCDKRTLRDLIQNKLCDDAEEIWRLFRQIVEGLVHIHGLNIVHRDLKPANIFIGLGPDGVGNVKIGDFGLATTGNFAVDRVDSAHVDTGELTSGVGTSFYVAPEVRRGSGGSYTSKVDMYSLGVIFFEMGYYPVMGMERADKLGKLSKESRLPDDFRPENKNHTEIVKMLIAHDPAERPSSFELLRSGKLPIQMENESNQRAFARVLSSLEDRDSADYPRVISALFAARRPLALPKDYTWDMSAPDITAAELLYKGIVKEELTAIFRRHGAVEAPRSSLYPRSTQYSTNQKVVELLDPNGTVVQLPFDLMLGNARFLAKLSKSLELRRSFTFGQVYRVNKSGGQPQMLGEVDFDIASADSFDLALKEAEVIKVLDEICQTFPSTSHMCFHLGHSDLLQLIFEFCKIEQGARQMTAEALSKLNILSHTFQTIRAELRSPLIGVSSTSIEDLRRFDFRDTPMKAFAKLKSIFEGSPLNERLQPIIAHLKGVIEYTKRFGTHCKIYVNPLNSLKANFFSGGVLFQCLYDKKFKDVFAAGGRYDNLIKSHRPGTGLHSEQLRAVGFSLAWEKLVKFPKSGGKAFLKKAEEEQTRMFDTKRCDVLVASFDSHTLRTTGIEIVSQLWNHYISAEIARDAKSPDELVLRNRDESYSWIIIVKNDMLKVKTMDRKDVPDAELSITNYLSWFRTALRDRRSSRLHIATKQIETIGTSSSLPQGPNVATNSGQEVHVLIAGTKSKKFNRQTVIEQAQVNAAGLVQNFLGGPIAAVETSDRVLDLIRETALSDPESWRKAEQSVDKIERKYMREIHDMLSDWRSTRVPKGNRDAFVYNFRTTKCIYYDLGA

SEQ ID NO: 1735 - DNA, 2400 bp, Muscodor strobelii
  misc_feature: SGI EST ID NO. CUFF.4606.0
  misc_feature: Variant of the nucleotide sequence at SEQ ID NO 1733
tcttggggttattttcttcgagatgggttattacccagttatgggcatggagagagccgacaaattagggaaactgagtaaggaatcccgtttacccgacgactttcgacctgagaataagaatcacacggagattgtgaagatgttgatagcacatgatcctgcggagcggccctccagtttcgagcttctccgtagcggaaagttacccatccagatggaaaacgaaagcaaccaaagggcctttgcgagagttctctcgagtttggaagacagggactctgcagactaccccagagtgatttcggcccttttcgcggcccgcaggccactggcgctcccgaaagattacacttgggacatgtcggcccctgatatcactgccgccgagttgctatacaaaggcatagtcaaagaagagttgactgcgattttccgtcgtcacggtgcagttgaggcgcctagaagctccctctacccgcgttcaactcaatattcgactaaccaaaaggttgtggagctcctggacccaaatgggactgttgtccaattgccgtttgacctcatgctaggaaacgctcgcttccttgctaagctatcgaaatcattagagcttcgtcgatcatttacattcggacaagtatatcgagtcaacaagagtggaggtcaacctcagatgctaggtgaggtagactttgacatcgcctctgcagattcattcgacttagctttgaaagaggctgaggttatcaaggttttggatgagatatgtcagacgtttccaagcacctctcacatgtgttttcatctcggccactctgatcttttacagctcatcttcgagttttgcaagatcgagcagggcgcgagacaaatgacggctgaggctcttagcaaactgaacatactctctcacacttttcagactattcgcgccgagctacgatcgcctctgataggcgtttcctcgaccagcatagaggatttgcgccggtttgatttccgagacaccccgatgaaagcttttgctaaacttaagagtattttcgagggcagtccgttgaacgaacggctacaacccatcattgcgcatctgaagggggtgatcgagtatactaagcgattcggcactcactgcaagatctatgtcaatccgttgaacagtctaaaagccaattttttctctggaggtgttctattccaatgcctatacgacaagaagttcaaagacgtgtttgctgctggcggtcgatatgacaatctcatcaaatctcatcgccctggaacgggcctgcacagtgaacagcttcgtgctgtcgggttctccttagcttgggagaaactcgtgaagttcccaaaatccggtggcaaagcttttttgaagaaggctgaagaggaacaaacaagaatgtttgacaccaagagatgcgacgtacttgtcgctagtttcgattctcatacattgcgtactacgggcattgagatcgtgtcacaattgtggaaccattacattagtgccgagattgctcgagatgctaaatcacctgacgaactagtgctacgaaatcgcgatgaatcctattcgtggatcatcatcgtgaaaaacgacatgctgaaagtcaaaacgatggaccgaaaggacgtaccagacgcagaattgtcaattaccaattacttgtcctggtttcgaacggcccttcgtgatcgccgttcctctcgacttcacattgcgaccaaacaaatcgaaactataggaacttcatcatcattaccgcaaggcccgaacgttgctacaaattctggacaggaggtccacgtactcattgctggaacaaagtcaaagaagttcaatcgacagactgtaatcgagcaagcccaagttaatgctgcgggccttgtgcagaatttcttaggcgggccaatcgccgcggttgagacgagtgaccgtgtgcttgatctcatccgcgaaacggcattatctgaccccgaaagttggcgcaaagctgaacaatccgttgataagatcgaacggaagtatatgcgcgagatacacgatatgttgtccgactggagatcgacacgagtaccgaagggcaatcgcgatgcatttgtctacaatttccgcactactaaatgcatttactacgacttgggtgcttgaatactcttgcttgcttgttagagttcacatgtagaaaatttgttgcgaaactcacacatccttatcacactcaccactcttatcttgggagagaatcttgcttgtctgtcggcatggcgttttaaaatgttgtcatatgtgtgagaactttgcttcgctgctcatgaaaacggcgcatgcgcaggatagatacccatgtcatatagcattgcttccgacaataaaaaagctgactgatc

SEQ ID NO: 1736 - DNA, 1656 bp, Muscodor strobelii
  misc_feature: SGI cDNA ID NO. 560189
  misc_feature: Encodes the peptide sequence at SEQ ID NO 1737
atgccattccccaatccgcactttccctacggggatgagatccgtctgtcggaagaccagcaagagcgacgcaagcgagatattgctgcggaatgggaagacctcgagaggcgaaaccagattcccaagtttcataaattctccagcacaggtaggaagggagtaccagttaagaaagaggtattctctaaagcagcaagtccgaaaacatggatgaaggcgctggtctgccaatatccttacccggctggtgtaccgttgaaggatgtcttagatcagctggcaaacattgcccctctggtttcaacatcagagtcggtgctatataggaacacccgtggtctcctctctcagatcatccaagaaggagatcgtcttggctggaacgacgatggcagcatgaacaacattacggctccatctgaagcagagttgtttgcactgtggacatatggggattcgagcgacggattcggttcttggccacagaaacttatggccatgcttcgacaatcgggactcgcctggctggcaatggatcctgccacgcgtaacataccaatatgctggcagagatgggccgattacagcgagatgcgctacaagatcgcccttccgtcagacacagtagcagagcacaaaccagacctcgcgaatgatcactcgacagaggatatggcgcaacattctgatcaagacttcgataaagacgaattgattcttaaagacggtaaaactaaaacccaagacgacagttcacaagaactagacgaccttcgagagagttatgagagaaccaaagcgagaattaacgggatggccaatcattgggcagctttcacgcatcacgtggagactttcgacgaccgactggatactgagtggacaacaagattaaagatgaaacacaatattacgcttcttgcccatggcattgagggcctcgcgaagtacacagaggatctcattgacgtcatgcacgaaggctcggttcaacatgcgatcctaggcaagccttttaagggtcgcgtccgtgagattctgcagactgacatggagctcattgcgggtagtgtgaaaacatatctcgataaagactgggagatgaataagccctcagtcgatactataggaaaacagcgtccaaagctcagcaactcagcataccattctcaagtcaaagagttggatacaaaacgcgaacgtcaactcaatctcctctctaaggaagttgacgacctaagaggagagcaagaacaattcgtaacacaaaatgcgcttataagcttacagaatctcacgacagctggaatatctgctctagaagaagatttttcgatgcaatcagcgtctgcgacacaaaaccatttagacttagagcagagagttattgagcttgagaatgacaaggtttctcttcaagagcagctcgatagcgcaatgacccggattcttgccctcgagaaactacacaagggcgcagccagtggattcgaacgcgatcgcaaattggcctcgaggccccactctcagactctgcactcagccaaaagagagagggtcggctcggagtccagttccaacatgagccaacttgaggaacaggagggcactccggctggaaagaaacccaagcttgcatcacgatttgaatag

SEQ ID NO: 1737 - protein, 551 aa, Muscodor strobelii
  misc_feature: SGI Peptide ID NO. 560189
MPFPNPHFPYGDEIRLSEDQQERRKRDIAAEWEDLERRNQIPKFHKFSSTGRKGVPVKKEVFSKAASPKTWMKALVCQYPYPAGVPLKDVLDQLANIAPLVSTSESVLYRNTRGLLSQIIQEGDRLGWNDDGSMNNITAPSEAELFALWTYGDSSDGFGSWPQKLMAMLRQSGLAWLAMDPATRNIPICWQRWADYSEMRYKIALPSDTVAEHKPDLANDHSTEDMAQHSDQDFDKDELILKDGKTKTQDDSSQELDDLRESYERTKARINGMANHWAAFTHHVETFDDRLDTEWTTRLKMKHNITLLAHGIEGLAKYTEDLIDVMHEGSVQHAILGKPFKGRVREILQTDMELIAGSVKTYLDKDWEMNKPSVDTIGKQRPKLSNSAYHSQVKELDTKRERQLNLLSKEVDDLRGEQEQFVTQNALISLQNLTTAGISALEEDFSMQSASATQNHLDLEQRVIELENDKVSLQEQLDSAMTRILALEKLHKGAASGFERDRKLASRPHSQTLHSAKRERVGSESSSNMSQLEEQEGTPAGKKPKLASRFE

SEQ ID NO: 1738 - DNA, 213 bp, Muscodor strobelii
  misc_feature: SGI EST ID NO. CUFF.4519.0
  misc_feature: Variant of the nucleotide sequence at SEQ ID NO 1736
cgaaaacatggatgaaggcgctggtctgccaatatccttacccggctggtgtaccgttgaaggatgtcttagatcagctggcaaacattgcccctctggtttcaacatcagagtcggtgctatataggaacacccgtggtctcctctctcagatcatccaagaaggagatcgtcttggctggaacgacgatggcagcatgaacaacattacgg

SEQ ID NO: 1739 - DNA, 1623 bp, Muscodor strobelii
  misc_feature: SGI cDNA ID NO. 560190
  misc_feature: Encodes the peptide sequence at SEQ ID NO 1740
atgcctgcacttggcatttttcgccaaccatattatggccttggcttaataatatttctaagtgtaggttatcttgtgtcggtcatagtctacagattatactttcatcccctcgctcaatatcccggaccagtgctctcacggatctctggccttccatctctctaccacacgatcaagcaagaccgccatgtgtggttatggtctctacagatgagatacgggcctaattttcgggtcagtcccaacaatgttgttctgaacacaccagcaagcttagacgccatttacaatggcaagttgccagtaaagaaggccacgtactataagctattcccgtcggtcggggagccttcaacatggagttgcacagacagatctgtgcatgctcggaaaagacgtgtattaaataatgcgttttctgacaaagcattacgatctgccgagcccttcgtacatagaaacttcgacagaggctgcgaaatactagaagaggcgacggaacatgagatatggtccaagtcgttgaatttcgccccctggatcaactatatcatatttgacatactaggtgatctttgttttggtaagagcttcgacatgaaagaaccagggagtgatctgcgtggtatacctgatcttatggttgcgtttctacgtatcaatcatccactcgcgttttctcccatcgcacgattgtgggcttggctcaagccgcgaggattagatgcagttgtcgctgctatcacgccattggcagtcaggaactgggaagatttcgtccggatatcttttgaaaaacgtttacagaaggagcaagacatcaaagccttgaaaagcgagcagcctagtgaaaaggacttctttcattacatcttcgaagccagcgacgaagagacggggactcaaggttatacaagggccgaactattgggcgagagtgagttgttaataattgccggctcggatacgacttctactgcactggccgcggcaatgttctaccttgtccgcatcccaggcgtgcaaggaaagatcgtggacgaaatccaatctgccttctcaagctatgcagatattcaaggtagcccggcactttatgcatgcaagtacttgcgtgcattcattcgggaaacccttcggatgagtcctcccgtcccttccgacctctcacgagaggtcttgcaaccaggcatcatgatagacgatcattttatcccagctggcgtagatattggaacgtcagcttactgcattcatcatgacgagtctatctatcctgagccattcaagtttcggcccgaacgctggattatcgatgaaaacgatacaacaggaagctcagctgatcgcgttgctttagcggagaattgcttttgtccattctcagttgggccccgtggatgtgttggcaagaacttggcatatctagagatgtatctcatcgtggcaaaactcctctatcgattcgaaattcgagaggacccatctacccgtttaggtggcggcggtcctgatcttagggaaggccggaactacattaaccagtaccaattgtatgacatatttgtagcagagagaaacgggccgcaagtccagtttaaaaggagagattggacctag

SEQ ID NO: 1740 - protein, 540 aa, Muscodor strobelii
  misc_feature: SGI Peptide ID NO. 560190
  misc_feature (41)..(516): Pfam Id: PF00067 Pfam Desc: Cytochrome P450
  misc_feature (278)..(496): Pfam Id: PF00067 Pfam Desc: Cytochrome P450
  misc_feature (30)..(540): NCBI GI: 256727731 Blast Desc: NECHADRAFT_76848 [Nectria haematococca mpVI 77-13-4]
  misc_feature (9)..(538): NCBI GI: 189189070 Blast Desc: cytochrome P450 67 [Pyrenophora tritici-repentis Pt-1C-BFP] gi|187972480|gb|EDU39979.1| cytochrome P450 67 [Pyrenophora tritici-repentis Pt-1C-BFP]
  misc_feature (75)..(537): NCBI GI: 189204718 Blast Desc: cytochrome P450 67 [Pyrenophora tritici-repentis Pt-1C-BFP] gi|187985793|gb|EDU51281.1| cytochrome P450 67 [Pyrenophora tritici-repentis Pt-1C-BFP]
  misc_feature (6)..(538): NCBI GI: 169603764 Blast Desc: SNOG_04890 [Phaeosphaeria nodorum SN15] gi|111066161|gb|EAT87281.1| SNOG_04890 [Phaeosphaeria nodorum SN15]
  misc_feature (15)..(537): NCBI GI: 119483816 Blast Desc: benzoate 4-monooxygenase cytochrome P450 [Neosartorya fischeri NRRL 181] gi|119409967|gb|EAW19914.1| benzoate 4-monooxygenase cytochrome P450 [Neosartorya fischeri NRRL 181]
  misc_feature (20)..(537): NCBI GI: 154313085 Blast Desc: BC1G_05544 [Botryotinia fuckeliana B05.10] gi|150849629|gb|EDN24822.1| BC1G_05544 [Botryotinia fuckeliana B05.10]
  misc_feature (24)..(538): NCBI GI: 171678814 Blast Desc: protein product [Podospora anserina] gi|170937477|emb|CAP62135.1| protein product [Podospora anserina]
  misc_feature (14)..(538): NCBI GI: 145608110 Blast Desc: MGG_03375 [Magnaporthe grisea 70-15] gi|145015610|gb|EDK00100.1| MGG_03375 [Magnaporthe grisea 70-15]
  misc_feature (24)..(538): NCBI GI: 46123381 Blast Desc: FG06068.1 [Gibberella zeae PH-1]
  misc_feature (25)..(537): NCBI GI: 156062766 Blast Desc: SS1G_01499 [Sclerotinia sclerotiorum 1980] gi|154696835|gb|EDN96573.1| SS1G_01499 [Sclerotinia sclerotiorum 1980]
  misc_feature (38)..(537): SWISSPROT Homolog: EC 1.14.13.12 Benzoate 4-monooxygenase
MPALGIFRQPYYGLGLIIFLSVGYLVSVIVYRLYFHPLAQYPGPVLSRISGLPSLYHTIKQDRHVWLWSLQMRYGPNFRVSPNNVVLNTPASLDAIYNGKLPVKKATYYKLFPSVGEPSTWSCTDRSVHARKRRVLNNAFSDKALRSAEPFVHRNFDRGCEILEEATEHEIWSKSLNFAPWINYIIFDILGDLCFGKSFDMKEPGSDLRGIPDLMVAFLRINHPLAFSPIARLWAWLKPRGLDAVVAAITPLAVRNWEDFVRISFEKRLQKEQDIKALKSEQPSEKDFFHYIFEASDEETGTQGYTRAELLGESELLIIAGSDTTSTALAAAMFYLVRIPGVQGKIVDEIQSAFSSYADIQGSPALYACKYLRAFIRETLRMSPPVPSDLSREVLQPGIMIDDHFIPAGVDIGTSAYCIHHDESIYPEPFKFRPERWIIDENDTTGSSADRVALAENCFCPFSVGPRGCVGKNLAYLEMYLIVAKLLYRFEIREDPSTRLGGGGPDLREGRNYINQYQLYDIFVAERNGPQVQFKRRDWT

SEQ ID NO: 1741 - DNA, 684 bp, Muscodor strobelii
  misc_feature: SGI cDNA ID NO. 560191
  misc_feature: Encodes the peptide sequence at SEQ ID NO 1742
atgcagatcatccatttttcaatatggcttgcaagcatggctgccactttgaacgccgcaatgcttggagagcgagctacacagcagagtcaagaacaattcgatcaggagacaacagcattcaaagagaacgggatatgccgagactacattgttgccaagcaaaagactttcagcacctacgaatcactatgcgaaaagacttgtggcagcagtcctaagccctggggttgcgagggttcgactgagctcaagggcgtccctactgtcatcgatcctgatggggacgaatttgtcggtgcagcgtgcaaatgcgaggtgcccctagccaacgagatagcagacttggttatggaggcgcttcctatcattggtgacgctctagaagcggtcttcggcacggcctgcgccattattcttaacatcattgcggaggtggttcaggacgttgcacttcccgaaggaaaggcactcacagttggttggcgcgttcttattcaaggcgcgaagaccttcaaagacaatgaactaagttcgctcgactaccagacttggatctcagatgcatgtggagaaggcgattgggtcgaggacgtgaatcaggcattcgattttctaggtggtgtaagtgatgatgttcaagagggcttaggagacctgcgtgggaaaaggaaagggcattag

SEQ ID NO: 1742 - protein, 227 aa, Muscodor strobelii
  misc_feature: SGI Peptide ID NO. 560191
MQIIHFSIWLASMAATLNAAMLGERATQQSQEQFDQETTAFKENGICRDYIVAKQKTFSTYESLCEKTCGSSPKPWGCEGSTELKGVPTVIDPDGDEFVGAACKCEVPLANEIADLVMEALPIIGDALEAVFGTACAIILNIIAEVVQDVALPEGKALTVGWRVLIQGAKTFKDNELSSLDYQTWISDACGEGDWVEDVNQAFDFLGGVSDDVQEGLGDLRGKRKGH

SEQ ID NO: 1743 - DNA, 626 bp, Muscodor strobelii
  misc_feature: SGI EST ID NO. CUFF.4537.0
  misc_feature: Variant of the nucleotide sequence at SEQ ID NO 1741
aaggataacacattttatatataatagacgcaacaaacgtacaggaacccccatatccttcacagagagtcgtatgatattgcagcactctaagtcgatagttgcgagagccactccatttcttttcattctcaatatcatagttagggcagtggccaacaggattcacttcattgtgcacaggaagtcaatcgtctttgacttgattgcctcacagatattctacaacatgcagatcatccatttttcaatatggcttgcaagcatggctgccactttgaacgccgcaatgcttggagagcgagctacacagcagagtcaagaacaattcgatcaggagacaacagcattcaaagagaacgggatatgccgagactacattgttgccaagcaaaagactttcagcacctacgaatcactatgcgaaaagacttgtggcagcagtcctaagccctggggttgcgagggttcgactgagctcaagggcgtccctactgtcatcgatcctgatggggacgaatttgtcggtgcagcgtgcaaatgcgaggtgcccctagccaacgagatagcagacttggttatggaggcgcttcctatcattggtgacgctctagaagcggtcttcg

SEQ ID NO: 1744 - DNA, 513 bp, Muscodor strobelii
  misc_feature: SGI cDNA ID NO. 560192
  misc_feature: Encodes the peptide sequence at SEQ ID NO 1745
atgaacgctgcttaccacacgctcgagtttgcagcaacacattcttggcaagctttaatcagtgttgcttcgcagtcgggggaggatgaggatgagccatcagctgctgttgagagcgaagaagacttcgctcaatgccaccaactttttgagctaacctactggttacggacactcactgcagagtggttttacgaagacagagaagactatctgcataggcgtcatgtcgcagaagtgggccggagcctccagttcgttcagcaggccgtttggcatcggctcaataaaggaactagacgtattgtaagcggcggatacgttgagcgcatccttctcccactcttcgagggatctgaagactttgatcagaacgacatcctcgcattattggagccagtccgcactgtggacattgtcgacaaggagaccccaggagcagagtatcaacctccaattgaaacttttgaagacatggagaagttgccacccccttcagcagatgtctggtag

SEQ ID NO: 1745 - protein, 170 aa, Muscodor strobelii
  misc_feature: SGI Peptide ID NO. 560192
MNAAYHTLEFAATHSWQALISVASQSGEDEDEPSAAVESEEDFAQCHQLFELTYWLRTLTAEWFYEDREDYLHRRHVAEVGRSLQFVQQAVWHRLNKGTRRIVSGGYVERILLPLFEGSEDFDQNDILALLEPVRTVDIVDKETPGAEYQPPIETFEDMEKLPPPSADVW

SEQ ID NO: 1746 - DNA, 864 bp, Muscodor strobelii
  misc_feature: SGI cDNA ID NO. 560193
  misc_feature: Encodes the peptide sequence at SEQ ID NO 1747
atggcggattcaaaaggcgatgttgcatcgctaaacgcatctaatttgttcagtgtcaacggcctcgtcgccgttgtcactggtggtggtacaggaattggtctcatgatcacaaaggctttagcagcaaacggagcgaaagtctatgtgctcggtcgtcgccttgaagttctgaaagaagcagtcaagactatcggcagccccaatgttgtgccagttacttgcgatgtcacttcagttgaatctttggcagcggctgcatcgtcagtaaaagagcaatctggcttcgtgaacttgctagtctgtaattcaggtatcgcggggccatatgggattaagcctacggcgaagacaaccctggacgaattcatcgatgccaacatggctattccatttgacgagtaccgtgatactttcgccgttaacaccgccgcggtttggtatacaaccatgtcgtttttgaagttgctcgatgctggtaatatcgctggtaatttggagcaaaagtctcaagtagtcgctgtgagctccattggcggtttcaacaagactaacactggaggatatgcttgtaaagcggcgtgcacacacctcgccaagcaactcagtgtcgccctgccgcaatgggacattcgatcaaacattatatgccccggattatatcccagtcaaatgtcagctactgtcctgtctcgtggcaccggtccaataaccaaaagcgccgtgccacttgagcgagcgggagatgagcaagatatgggtggtgccatactttatctcgccagtcgtgcaggcgcctatttaaacggaaatgtaatagtcacagatggtgggaggcttacaacattcccctcaacgttttag

SEQ ID NO: 1747 - protein, 287 aa, Muscodor strobelii
  misc_feature: SGI Peptide ID NO. 560193
  misc_feature (22)..(207): Pfam Id: PF00106 Pfam Desc: short chain dehydrogenase
  misc_feature (22)..(86): Pfam Id: PF00106 Pfam Desc: short chain dehydrogenase
  misc_feature (1)..(285): NCBI GI: 256724230 Blast Desc: NECHADRAFT_64691 [Nectria haematococca mpVI 77-13-4]
  misc_feature (9)..(286): NCBI GI: 46114952 Blast Desc: FG03318.1 [Gibberella zeae PH-1]
  misc_feature (9)..(287): NCBI GI: 154312001 Blast Desc: BC1G_06034 [Botryotinia fuckeliana B05.10] gi|150850684|gb|EDN25877.1| BC1G_06034 [Botryotinia fuckeliana B05.10]
  misc_feature (9)..(287): NCBI GI: 256722810 Blast Desc: NECHADRAFT_97506 [Nectria haematococca mpVI 77-13-4]
  misc_feature (1)..(286): NCBI GI: 85097297 Blast Desc: NCU04791 [Neurospora crassa OR74A] gi|28921908|gb|EAA31181.1| conserved [Neurospora crassa OR74A]
  misc_feature (8)..(287): NCBI GI: 189205264 Blast Desc: short chain dehydrogenase/reductase [Pyrenophora tritici-repentis Pt-1C-BFP] gi|187986066|gb|EDU51554.1| short chain dehydrogenase/reductase [Pyrenophora tritici-repentis
  misc_feature (15)..(286): NCBI GI: 145611348 Blast Desc: MGG_00460 [Magnaporthe grisea 70-15] gi|145018647|gb|EDK02926.1| MGG_00460 [Magnaporthe grisea 70-15]
  misc_feature (10)..(287): NCBI GI: 169765484 Blast Desc: [Aspergillus oryzae RIB40] gi|83765068|dbj|BAE55211.1| protein product [Aspergillus oryzae]
  misc_feature (10)..(287): NCBI GI: 256729314 Blast Desc: NECHADRAFT_95809 [Nectria haematococca mpVI 77-13-4]
  misc_feature (8)..(287): NCBI GI: 169614674 Blast Desc: SNOG_10483 [Phaeosphaeria nodorum SN15] gi|111060757|gb|EAT81877.1| SNOG_10483 [Phaeosphaeria nodorum SN15]
  misc_feature (39)..(278): SWISSPROT Homolog: EC 1.1.1.100 3-oxoacyl-[acyl-carrier-protein] reductase
MADSKGDVASLNASNLFSVNGLVAVVTGGGTGIGLMITKALAANGAKVYVLGRRLEVLKEAVKTIGSPNVVPVTCDVTSVESLAAAASSVKEQSGFVNLLVCNSGIAGPYGIKPTAKTTLDEFIDANMAIPFDEYRDTFAVNTAAVWYTTMSFLKLLDAGNIAGNLEQKSQVVAVSSIGGFNKTNTGGYACKAACTHLAKQLSVALPQWDIRSNIICPGLYPSQMSATVLSRGTGPITKSAVPLERAGDEQDMGGAILYLASRAGAYLNGNVIVTDGGRLTTFPSTF

SEQ ID NO: 1748 - DNA, 582 bp, Muscodor strobelii
  misc_feature: SGI EST ID NO. CUFF.4555.0
  misc_feature: Variant of the nucleotide sequence at SEQ ID NO 1746
caaattttcacgatggcggattcaaaaggcgatgttgcatcgctaaacgcatctaatttgttcagtgtcaacggcctcgtcgccgttgtcactggtggtggtacaggaattggtctcatgatcacaaaggctttagcagcaaacggagcgaaagtctatgtgctcggtcgtcgccttgaagttctgaaagaagcagtcaagactatcggcagccccaatgttgtgccagttacttgcgatgtcacttcagttgaatctttggcagcggctgcatcgtcagtaaaagagcaatctggcttcgtgaacttgctagtctgtaattcaggtatcgcggggccatatgggattaagcctacggcgaagacaaccctggacgaattcatcgatgccaacatggctattccatttgacgagtaccgtgatactttcgccgttaacaccgccgcggtttggtatacaaccatgtcgtttttgaagttgctcgatgctggtaatatcgctggtaatttggagcaaaagtctcaagtagtcgctgtgagctccattggcggtttcaacaagactaacactggaggatatgct

SEQ ID NO: 1749 - DNA, 978 bp, Muscodor strobelii
  misc_feature: SGI cDNA ID NO. 560194
  misc_feature: Encodes the peptide sequence at SEQ ID NO 1750
atgagattcttccatagcaatggcatcgcgtgcctcgcgactgccacaattgtcacagcgcagacatgcacactgtcgtcgacgtacagatggaactcgaccggggcgctcgcaacaccaaagtccggctgggtatcactcaaagacttcacgcatgtaccatacaacgggaaacatctagtgtacggcacgacacacgactcgggatcatcgtggggttcaatgaacttcggattgttttctgactggtctgcgatgacttcggcgagtcaaaacgcgatgagtcaaggcaccgttgccccgactctcttctatttcgcgcccaagagcatttggatcttgtcataccaatggggaccgacctccttcagctacaaaacgtccagtgatcctagcaatgcgaacgggtggagctcggcacagacacttttcacgggaacgatctcaggatccagcacgggcgtcattgaccaaacgttgatagcagacgacacgaacatgtatctcttcttcgccggagacaatggcaaaatttatcgcgccagcgctcctatcggcaactttcccggcagccttggcagctcatcaacaaccgtcctaagtgatacgtcaaataatcttttcgaagctgtccaggtatacacggtaccaggacaaagtggttggaagtacctaatgatcgttgaggcgattggatccaatggtcgctactttcgttccttcacagcgagcagtctgagcggatcttggacggcacaggctacgagcgaaagcgcaccgtttgcgggtaaagcgaatagcggcgcaacatggacaaatgatattagccacggagacattatccgcagtaaccctgatcagactatgactatcgatccatgcaacctacaattgctgtatcaagggaaagctcccagctccggcggagactatggcaagcttccctaccgaccaggcctactcacgctccagcgctag

SEQ ID NO: 1750 - protein, 325 aa, Muscodor strobelii
  misc_feature: SGI Peptide ID NO. 560194
  misc_feature (23)..(295): Pfam Id: PF03664 Pfam Desc: Glycosyl hydrolase family 62
  misc_feature (1)..(325): NCBI GI: 39956518 Blast Desc: MGG_09095 [Magnaporthe grisea 70-15] gi|145016490|gb|EDK00920.1| MGG_09095 [Magnaporthe grisea 70-15]
  misc_feature (23)..(325): NCBI GI: 270503170 Blast Desc: Alpha-N-arabinofuranosidase [Micromonospora aurantiaca ATCC 27029] gi|270319961|gb|EFA30921.1| Alpha-N-arabinofuranosidase [Micromonospora aurantiaca ATCC
  misc_feature (10)..(325): NCBI GI: 31747156 Blast Desc: Abf2 [Hypocrea jecorina]
  misc_feature (23)..(325): NCBI GI: 270503502 Blast Desc: glycoside hydrolase family 62 [Micromonospora aurantiaca ATCC 27029] gi|270319669|gb|EFA30639.1| glycoside hydrolase family 62 [Micromonospora aurantiaca ATCC 27029]
  misc_feature (23)..(325): NCBI GI: 154299653 Blast Desc: BC1G_10789 [Botryotinia fuckeliana B05.10] gi|150857281|gb|EDN32473.1| BC1G_10789 [Botryotinia fuckeliana B05.10]
  misc_feature (23)..(325): NCBI GI: 256800061 Blast Desc: Alpha-N-arabinofuranosidase [Streptomyces viridochromogenes DSM 40736]
  misc_feature (12)..(325): NCBI GI: 169605901 Blast Desc: SNOG_05983 [Phaeosphaeria nodorum SN15] gi|111065927|gb|EAT87047.1| SNOG_05983 [Phaeosphaeria nodorum SN15]
  misc_feature (9)..(324): NCBI GI: 169778401 Blast Desc: [Aspergillus oryzae RIB40] gi|83772403|dbj|BAE62533.1| protein product [Aspergillus oryzae]
  misc_feature (19)..(325): NCBI GI: 256780943 Blast Desc: Alpha-N-arabinofuranosidase [Streptomyces hygroscopicus ATCC 53653]
  misc_feature (9)..(324): NCBI GI: 6045042 Blast Desc: alpha-L-arabinofuranosidase [Aspergillus sojae]
  misc_feature (6)..(325): SWISSPROT Homolog: EC 3.2.1.55 Alpha-N-arabinofuranosidase
MRFFHSNGIACLATATIVTAQTCTLSSTYRWNSTGALATPKSGWVSLKDFTHVPYNGKHLVYGTTHDSGSSWGSMNFGLFSDWSAMTSASQNAMSQGTVAPTLFYFAPKSIWILSYQWGPTSFSYKTSSDPSNANGWSSAQTLFTGTISGSSTGVIDQTLIADDTNMYLFFAGDNGKIYRASAPIGNFPGSLGSSSTTVLSDTSNNLFEAVQVYTVPGQSGWKYLMIVEAIGSNGRYFRSFTASSLSGSWTAQATSESAPFAGKANSGATWTNDISHGDIIRSNPDQTMTIDPCNLQLLYQGKAPSSGGDYGKLPYRPGLLTLQR

SEQ ID NO: 1751 - DNA, 220 bp, Muscodor strobelii
  misc_feature: SGI EST ID NO. CUFF.4567.0
  misc_feature: Variant of the nucleotide sequence at SEQ ID NO 1749
cagctacaaaacgtccagtgatcctagcaatgcgaacgggtggagctcggcacagacacttttcacgggaacgatctcaggatccagcacgggcgtcattgaccaaacgttgatagcagacgacacgaacatgtatctcttcttcgccggagacaatggcaaaatttatcgcgccagcgctcctatcggcaactttcccggcagccttggcagctcatca

SEQ ID NO: 1752 - DNA, 1563 bp, Muscodor strobelii
  misc_feature: SGI cDNA ID NO. 560195
  misc_feature: Reduced expression when VOC is produced
  misc_feature: Encodes the peptide sequence at SEQ ID NO 1753
atgaaattgacgaggaactttcctgttaccataggaaaggtctcggtctatcgcgatggaagatcaagtagcatagcgatgggcttgcgaatggctagcaccatgtcgacagacaaaactttgaccgatcgaaaagaaagagtcgtcatccttggttcaggctgggcaggctatgcattcgcgcgtactttagaccccaaaaaattcgagcgcataatgatatctccgcgctcttacttcgtctttactcccctagtggccggcactgccgtaggcacgcttgagtttcgcgctgtcatggagtcagttaggagactaggcctagatcattaccaccagggatgggcggacgacatcgacttcggccgcaagatcatccgcgtagaagccaacacatcggatgacatggcggcgaagacaaaggcaacaggtgccgaaaaaaaaggcacacagtttgatgtgccctacgacaaactcgttattgccgttggcgcatacagtcagacattcggaatcgagggcgtgcgagaacatgcaaacttcttgcgcgatgtctccgatgcgcgcaagatacgaatgaaagtcctacagcgctttgaaagagccgcattaccgacgacaagtgatgaggagcggaggaaactactgcactttgctattgtaggcggcggaccaacaggcatcgagttcgctgccgaattacacgatctcgtgcacgaggacttgtcaaggacgtatcctgacctcgtgaagcagaaggacctagttcaaatcacagtctatgacgttgcggataaggttttaccgatgtttgatcgcaagcttgcgcagtatgctaccgacacctttaagcgcgaacgtatcgctgttaagacagaacatcatcttacgaggatacgcgcagatccggaactcgaggactgtttgagactgaagattacggagcatggcgatgaagaggtttcagctggtcttgttgtttggagtacgggattgatgcagaatccacttgttgcgaagattgggacgaaaattttgcttagggagaagagtagctcgattggcgatgctccttcttcggtggaattgcagagggatgcgaagtcgggtagtctggtcgttgataagcatttgcgcgtcacgacagctacttcatctccttccgcgacgtctgcaagtgacggatcagctggggcagcaaatagaaacatcgatattcttcccgacatctttagcatcggcgactgcgcaacggtacagggggagcacttcccagcgacagcgcaagtggcaagccagcaggcagtataccttgccaagcgattgaacaagggcgacgtggattccaagaccttcaagtatcgtgactggggtgtcatgacatacctgggaagttggacagcaattcatcaaagcagtgccgacgagctcacgggttgggcagcttgggtcctctggcgcacggcgtaccttactaagagcatgtcaatccgcaacaagatcatggtaccggtgtactggtttatgtcttggctttttggacgcgatatttcgaggttctag

SEQ ID NO: 1753 - protein, 520 aa, Muscodor strobelii
  misc_feature: SGI Peptide ID NO. 560195
  misc_feature (217)..(331): Pfam Id: PF00070 Pfam Desc: Pyridine nucleotide-disulphide oxidoreductase
  misc_feature (47)..(421): Pfam Id: PF07992 Pfam Desc: Pyridine nucleotide-disulphide oxidoreductase
  misc_feature (23)..(520): NCBI GI: 145602326 Blast Desc: pyridine nucleotide-disulphide oxidoreductase, [Magnaporthe grisea 70-15] gi|145010758|gb|EDJ95414.1| pyridine nucleotide-disulphide oxidoreductase, [Magnaporthe grisea 70-15]
  misc_feature (43)..(520): NCBI GI: 164428890 Blast Desc: NCU00153 [Neurospora crassa OR74A] gi|157072325|gb|EAA27430.2| conserved [Neurospora crassa OR74A]
  misc_feature (41)..(520): NCBI GI: 116207256 Blast Desc: CHGG_02921 [Chaetomium globosum CBS 148.51] gi|88183518|gb|EAQ90986.1| CHGG_02921 [Chaetomium globosum CBS 148.51]
  misc_feature (52)..(520): NCBI GI: 46125771 Blast Desc: FG07263.1 [Gibberella zeae PH-1]
  misc_feature (3)..(520): NCBI GI: 171685800 Blast Desc: protein product [Podospora anserina] gi|170942861|emb|CAP68514.1| protein product [Podospora anserina]
  misc_feature (14)..(520): NCBI GI: 154312447 Blast Desc: BC1G_05826 [Botryotinia fuckeliana B05.10] gi|150849927|gb|EDN25120.1| BC1G_05826 [Botryotinia fuckeliana B05.10]
  misc_feature (20)..(520): NCBI GI: 156035569 Blast Desc: SS1G_12988 [Sclerotinia sclerotiorum 1980] gi|154698393|gb|EDN98131.1| SS1G_12988 [Sclerotinia sclerotiorum 1980]
  misc_feature (38)..(471): NCBI GI: 189211237 Blast Desc: external NADH-ubiquinone oxidoreductase 2, mitochondrial precursor [Pyrenophora tritici-repentis Pt-1C-BFP] gi|187978042|gb|EDU44668.1| external NADH-ubiquinone 2, precursor
  misc_feature (45)..(520): NCBI GI: 169862271 Blast Desc: CC1G_06972 [Coprinopsis cinerea okayama7#130] gi|116501215|gb|EAU84110.1| CC1G_06972 [Coprinopsis cinerea okayama7#130]
  misc_feature (34)..(520): NCBI GI: 170091510 Blast Desc: [Laccaria bicolor S238N-H82] gi|164648470|gb|EDR12713.1| [Laccaria bicolor S238N-H82]
  misc_feature (45)..(515): SWISSPROT Homolog: EC 1.6.5.3 NADH dehydrogenase (ubiquinone)
  misc_feature: Useful for introducing or modulating the production of volatile compounds
MKLTRNFPVTIGKVSVYRDGRSSSIAMGLRMASTMSTDKTLTDRKERVVILGSGWAGYAFARTLDPKKFERIMISPRSYFVFTPLVAGTAVGTLEFRAVMESVRRLGLDHYHQGWADDIDFGRKIIRVEANTSDDMAAKTKATGAEKKGTQFDVPYDKLVIAVGAYSQTFGIEGVREHANFLRDVSDARKIRMKVLQRFERAALPTTSDEERRKLLHFAIVGGGPTGIEFAAELHDLVHEDLSRTYPDLVKQKDLVQITVYDVADKVLPMFDRKLAQYATDTFKRERIAVKTEHHLTRIRADPELEDCLRLKITEHGDEEVSAGLVVWSTGLMQNPLVAKIGTKILLREKSSSIGDAPSSVELQRDAKSGSLVVDKHLRVTTATSSPSATSASDGSAGAANRNIDILPDIFSIGDCATVQGEHFPATAQVASQQAVYLAKRLNKGDVDSKTFKYRDWGVMTYLGSWTAIHQSSADELTGWAAWVLWRTAYLTKSMSIRNKIMVPVYWFMSWLFGRDISRF

SEQ ID NO: 1754 - DNA, 2453 bp, Muscodor strobelii
  misc_feature: SGI EST ID NO. CUFF.4571.0
  misc_feature: Variant of the nucleotide sequence at SEQ ID NO 1752
ataatattaagatagtcattacaaacccgattgactgtgtccatgccatttttatagctcaactggaagtcttcgaggcctctcgacaacattgggcactgacatttactctggcgtactaatagttttcactgaagctagcgactaattggtgaagaagacatgaaggcacctcgcctcgccgaggcgatgaaattgacgaggaactttcctgttaccataggaaaggtctcggtctatcgcgatggaagatcaagtagcatagcgatgggcttgcgaatggctagcaccatgtcgacagacaaaactttgaccgatcgaaaagaaagagtcgtcatccttggttcaggctgggcaggctatgcattcgcgcgtactttagaccccaaaaaattcgagcgcataatgatatctccgcgctcttacttcgtctttactcccctagtggccggcactgccgtaggcacgcttgagtttcgcgctgtcatggagtcagttaggagactaggcctagatcattaccaccagggatgggcggacgacatcgacttcggccgcaagatcatccgcgtagaagccaacacatcggatgacatggcggcgaagacaaaggcaacaggtgccgaaaaaaaaggcacacagtttgatgtgccctacgacaaactcgttattgccgttggcgcatacagtcagacattcggaatcgagggcgtgcgagaacatgcaaacttcttgcgcgatgtctccgatgcgcgcaagatacgaatgaaagtcctacagcgctttgaaagagccgcattaccgacgacaagtgatgaggagcggaggaaactactgcactttgctattgtaggcggcggaccaacaggcatcgagttcgctgccgaattacacgatctcgtgcacgaggacttgtcaaggacgtatcctgacctcgtgaagcagaaggacctagttcaaatcacagtctatgacgttgcggataaggttttaccgatgtttgatcgcaagcttgcgcagtatgctaccgacacctttaagcgcgaacgtatcgctgttaagacagaacatcatcttacgaggatacgcgcagatccggaactcgaggactgtttgagactgaagattacggagcatggcgatgaagaggtttcagctggtcttgttgtttggagtacgggattgatgcagaatccacttgttgcgaagattgggacgaaaattttgcttagggagaagagtagctcgattggcgatgctccttcttcggtggaattgcagagggatgcgaagtcgggtagtctggtcgttgataagcatttgcgcgtcacgacagctacttcatctccttccgcgacgtctgcaagtgacggatcagctggggcagcaaatagaaacatcgatattcttcccgacatctttagcatcggcgactgcgcaacggtacagggggagcacttcccagcgacagcgcaagtggcaagccagcaggcagtataccttgccaagcgattgaacaagggcgacgtggattccaagaccttcaagtatcgtgactggggtgtcatgacatacctgggaagttggacagcaattcatcaaagcagtgccgacgagctcacgggttgggcagcttgggtcctctggcgcacggcgtaccttactaagagcatgtcaatccgcaacaagatcatggtaccggtgtactggtttatgtcttggctttttggacgcgatatttcgaggttctagatgatgacaaagtagacggatagattcttaggcttggattcgttgctctcgtgaatgtatttagacttagacatagaggtatagaattgggtctgtaggttgcctgtacaatattaatagcaattccatttcgaggcagtaccagacactaaaatcatcgttgtaagtctacatcttcgccagaccttaatacacacctctgttcaagaacacttaagcatgttgcatgtgctatatacatcacttgaatagatagagggcggtagaggtctgaatatttgtgagagctacctaaatattggtcccgtatcttcaacgctcgttgacgcggaatattgttgtagactttcgcattctgccgttccaatatgccaaattgcccatatctgtcctgcatcttgcgacccagtagactagcgctggagcgtgagtaggcctggtcggtagggaagcttgccatagtctccgccggagctgggagctttcccttgatacagcaattgtaggttgcatggatcgatagtcatagtctgatcagggttactgcggataatgtctccgtggctaatatcatttgtccatgttgcgccgctattcgctttacccgcaaacggtgcgctttcgctcgtagcctgtgccgtccaagatccgctcagactgctcgctgtgaaggaacgaaagtagcgaccattggatccaat

SEQ ID NO: 1755 - DNA, 4596 bp, Muscodor strobelii
  misc_feature: SGI cDNA ID NO. 560196
  misc_feature: Encodes the peptide sequence at SEQ ID NO 1756
atggcaagcaaactcggtttccatcaactccagacatatcgtcacgatgctaagttggagttggaatttccaatagacatcatcgctgtccatggtttcacggataaggagcctttcgacgcttgggcaagtcgtagcaaaaagggtacatactggctgcgagatttcttgccgcgcatagtcccaaacgcaaggatcttcacgtttggctacaagataaagagcctttctatagacagttttgcggtttccatcgataaatatgcattagaggtgcttcagagtattcatgagaagacgctcggggagcatcaggttcgacggaatctgatcttcatcagtcatagctttggaggcctcatcgtgaagcgcagcctttccattgcatattatcatcaactgggacagtatcgatacattgccttgtcaaccattggattggtcttcttggggacgcctcattcaatcagtatcccactcttggaacgagtacagtcgtccttttcaaccaaatcagagtcgcaaaagtccaacggcactagcctcaggtcttcatccactcttgaactgctcttggcgtccaaccatatcggctggctgcgaccgtggttccaagtcgtgtcgttttacgaggagagagacatctctaacgcgtcatttcgaattgttgggcctgatgaggccaaactcgaacattaccaggctgttgggctatatgccgatcatttcaaactctgtcgtttcgagtcacctcggagtccaggatttctcaaggttgttttgccacttcaaagtctcagtcaagtttataatccagctcggacttggcagcatttaagactggcaagatctctatcgtttccgtccagctttgggcacacgaccctagattttaaaaataaagggttcaacgtcaatgctctcatcgagatcgttgagagtactatccccttgaagaagtggctatatagtccctcaggcttcctttggctgacagggaagccggcaaccggaaaatctgttctcaccgagttcctcgcacgagagctgagcggtgaatcgaacgacctcgaattaaggactggttccataacatttttcttttcttttgagcctcagaggcaacggctgtcgctgagtgatcttttaaaagtctttcaaaccaggctctctaacttgatgacctggcacactccttatgatgctcctcgggccgcaattgaaagtcgagtctttcacagggaagggaaggaagaaacagacacccaaatcgcagactttctcatgccattgactgctttgatggaggcacgtatacgacccatcgtcataattgttgatgcggttgacgcatctgaagatccagacaccgtccaagtcttcttatcaaatcatcttcttcacttcactgaaacattctctttccgggttttggtgtcctcacgaaaaagccctgagttagaaagcttttaccttgagcaggtccggctcgaagagttcaatggagctgcaattcaggattatgtcttagagaaactggagaatcaggatcgcggtctcccactttctactgctcaagagatcaccagcaagtcagacggtgtgtttctctgggcgtcgttagctttatcgcatcttgatcagtttggacgcaccttattgccgacaggtctgaataaggcttatgagacaattctagttggcaagccgcgcgcatcgtcaaagattatgtcatgtgttgcgtatgggaagcaatctttccaagcgggcgagctagccgacattctgctccagctcaacgtggatgttaatcgtcctccgcctcgggggggctacctccagcatcacgcattcaaatatgatgctagcaatgattttgatctcagtcggactatctatgatctcacaggaggcctgcttaaggtggaagaacaaaaagttagcttccttcaccgttcagtggaggaattcattgtccgaatcacctcccaccaggaggcccatctggatctggctatggtatgcttggactatctagatggccggttcacagatacagaaaagacccttcagttcgagacaccggaaatcgactcgcgtacactacttcgatacgccgcagattattgtatggatcacctccgcgagagtgggatgagcttaaagcccggacaggaatccattctaaacagattcctgtcttataacttcgtaaattcatggatggatctatttaactccatcaataggacgtcgaagatttttcaagcgaaccgcagcacaactcttcacgttgctgcttattatgggctttcggtactttaccttcgtttgtgggaccgcctgtcatccgatatagactctttagatcacgttgggagaagcccaatttctagagccgcagaaagagggcatttggacattgttcgtttcttgctgcaaaatggagccgacatagagtcaaaggattcagactatggggaaactccactaggatgggcagtagcccaaggcagagctgacatagctcgattgcttgtagagaacggagctgacgtccaaaatcttgacggtggaagtaccccactacatatagctgcgcagagccgccacgagtacctcgtcaaacttttggttgaggctggcgcagatatcatggtccttgaccgttacacaggccaatcggttctgggtacttcagcagcacaaggtgacttcgcaatagtaaaactattgatcgataatggcgctcaggcacttcagacagatattaatggaatgacagcgcttcatcatgcaatctctaaaggacagctatccgttacccatcttcttctcgaagccgcaaatttcgctgactacaggctcagtgatatcgacagacacgaaggtgcacttacatgggttgacaaagttctgcatttcgaagccagcctcttgagactagaaaatgagtacttgcacgtagcattgccttgcgatggggaagtaagagacactactagcaacactacttcgtcgtcgaactcattgaagccgcctgccaaaaagcgacaacggcaaaaattggtggtcaataggcttgaagacagcaatggaacagggagtaatgatgacgatgatgaaaatgatgatggacgaaaagggtcaaagagaccagctagccactgcagggacggcccggatgaacgcttcgcttgcccatttcaacgagtcaaccctaaccgttacaactgcactaaagtgggatttcgagatttctaccgagtgaaagctcatgtgctaaaaaagcaccaggtttacgagtgtaaaacctgcagacagcggtttcaaacggtccatgaactgaaccatcacacgaccccaggctgtacgctacaggggcgacaattgagagccgaagactacgaaaacggcttttctcaagacgtgactcccttggttcgacaagttcacccgagaaatcataatcatgaagaggacgcggcttggtgcaagctcttccgtgaattgttcccagatcgagatgtaccttcgccgtggttcgacataaccagacagctttgggagctggctcaacgacgcgatggcgatgcatttgcgatgttcgaagccgcgttgcgtggatatggaatgggtaccagcagaacttgccaccgtcgtccgtctagggcctctgtcgagggcggtctagatgcatcaccagcagtacctattgagccatccccggatgcgaataagcctccaataacgccagcccccaacggagatgtgaatgatgaacaacatgatcctgtgccagcctattcgcggacccagcagagcaatttggttcctactcggggtgtaaatccgctgcaaggtcctgttcagctatacggaatgccgacgcccccaccaacggttcattcagccgcccctaaccccagagaaggaatatcgagacaatttgccccaataccagttcggtcacaacatagcgcagaggccagctctggaagctggcaaatgatcaacatatcagaagcatcaaatacatcattcgacgccttgtccatcgacacttccagccccgttctaacacgcgaagatagtccgcagaactcacttttacaggataattcgtacgatttcccgttttcacccgttgcgtcagcacagccattgttcgatgatcctcaatgcacactttcatataacgagcgtgcgagtatcatgtccaggtcttccaatagctttggaccaagttcactgcaacctgaggctttgcagctgcctccaccaagatacactagatctaatcagcttcccagaggcgcatatcttggtaatacaggtttcgatgacatacagtcaaactcctcatacggggctgctgctgagcctcatattggcaggaatgtctttgccaatcagcgagctcatcagcaatatttaaatgcgttcaatttccctttgcctgcaaacagtcagaccttcaacctaacccaggatatcagcttcgaggatgcaccatctcccagctacaatatgaaccagataatcaataattcagctgcaccagatggatcgaactcaactcgagaccgatcgtga

SEQ ID NO: 1756 - protein, 1531 aa, Muscodor strobelii
  misc_feature: SGI Peptide ID NO. 560196
  misc_feature (792)..(824): Pfam Id: PF00023 Pfam Desc: Ankyrin repeat
  misc_feature (826)..(858): Pfam Id: PF00023 Pfam Desc: Ankyrin repeat
  misc_feature (859)..(890): Pfam Id: PF00023 Pfam Desc: Ankyrin repeat
  misc_feature (858)..(890): Pfam Id: PF00023 Pfam Desc: Ankyrin repeat
  misc_feature (826)..(857): Pfam Id: PF00023 Pfam Desc: Ankyrin repeat
  misc_feature (925)..(948): Pfam Id: PF00023 Pfam Desc: Ankyrin repeat
  misc_feature (185)..(1181): NCBI GI: 46120376 Blast Desc: FG04835.1 [Gibberella zeae PH-1]
  misc_feature (318)..(947): NCBI GI: 154310142 Blast Desc: BC1G_06991 [Botryotinia fuckeliana B05.10] gi|150851552|gb|EDN26745.1| BC1G_06991 [Botryotinia fuckeliana B05.10]
  misc_feature (319)..(974): NCBI GI: 115390338 Blast Desc: conserved [Aspergillus terreus NIH2624] gi|114195070|gb|EAU36770.1| conserved [Aspergillus terreus NIH2624]
  misc_feature (45)..(919): NCBI GI: 116204449 Blast Desc: CHGG_10108 [Chaetomium globosum CBS 148.51] gi|88176236|gb|EAQ83704.1| CHGG_10108 [Chaetomium globosum CBS 148.51]
  misc_feature (528)..(947): NCBI GI: 154292370 Blast Desc: BC1G_14674 [Botryotinia fuckeliana B05.10] gi|150846153|gb|EDN21346.1| BC1G_14674 [Botryotinia fuckeliana B05.10]
  misc_feature (301)..(946): NCBI GI: 159123616 Blast Desc: NACHT and Ankyrin domain protein [Aspergillus fumigatus A1163]
  misc_feature (301)..(947): NCBI GI: 70983704 Blast Desc: NACHT and Ankyrin domain protein [Aspergillus fumigatus Af293] gi|66845005|gb|EAL85341.1| NACHT and Ankyrin domain protein [Aspergillus fumigatus Af293]
  misc_feature (327)..(947): NCBI GI: 171689444 Blast Desc: protein product [Podospora anserina] gi|170944684|emb|CAP70795.1| protein product [Podospora anserina]
  misc_feature (25)..(681): NCBI GI: 146323333 Blast Desc: NACHT and WD domain protein [Aspergillus fumigatus Af293] gi|129558342|gb|EAL92825.2| NACHT and WD domain protein [Aspergillus fumigatus Af293]
  misc_feature (318)..(983): NCBI GI: 242760147 Blast Desc: Pfs, NACHT and Ankyrin domain protein [Talaromyces stipitatus ATCC 10500] gi|218723125|gb|EED22542.1| Pfs, NACHT and Ankyrin domain protein [Talaromyces stipitatus ATCC 10500]
MASKLGFHQLQTYRHDAKLELEFPIDIIAVHGFTDKEPFDAWASRSKKGTYWLRDFLPRIVPNARIFTFGYKIKSLSIDSFAVSIDKYALEVLQSIHEKTLGEHQVRRNLIFISHSFGGLIVKRSLSIAYYHQLGQYRYIALSTIGLVFLGTPHSISIPLLERVQSSFSTKSESQKSNGTSLRSSSTLELLLASNHIGWLRPWFQVVSFYEERDISNASFRIVGPDEAKLEHYQAVGLYADHFKLCRFESPRSPGFLKVVLPLQSLSQVYNPARTWQHLRLARSLSFPSSFGHTTLDFKNKGFNVNALIEIVESTIPLKKWLYSPSGFLWLTGKPATGKSVLTEFLARELSGESNDLELRTGSITFFFSFEPQRQRLSLSDLLKVFQTRLSNLMTWHTPYDAPRAAIESRVFHREGKEETDTQIADFLMPLTALMEARIRPIVIIVDAVDASEDPDTVQVFLSNHLLHFTETFSFRVLVSSRKSPELESFYLEQVRLEEFNGAAIQDYVLEKLENQDRGLPLSTAQEITSKSDGVFLWASLALSHLDQFGRTLLPTGLNKAYETILVGKPRASSKIMSCVAYGKQSFQAGELADILLQLNVDVNRPPPRGGYLQHHAFKYDASNDFDLSRTIYDLTGGLLKVEEQKVSFLHRSVEEFIVRITSHQEAHLDLAMVCLDYLDGRFTDTEKTLQFETPEIDSRTLLRYAADYCMDHLRESGMSLKPGQESILNRFLSYNFVNSWMDLFNSINRTSKIFQANRSTTLHVAAYYGLSVLYLRLWDRLSSDIDSLDHVGRSPISRAAERGHLDIVRFLLQNGADIESKDSDYGETPLGWAVAQGRADIARLLVENGADVQNLDGGSTPLHIAAQSRHEYLVKLLVEAGADIMVLDRYTGQSVLGTSAAQGDFAIVKLLIDNGAQALQTDINGMTALHHAISKGQLSVTHLLLEAANFADYRLSDIDRHEGALTWVDKVLHFEASLLRLENEYLHVALPCDGEVRDTTSNTTSSSNSLKPPAKKRQRQKLVVNRLEDSNGTGSNDDDDENDDGRKGSKRPASHCRDGPDERFACPFQRVNPNRYNCTKVGFRDFYRVKAHVLKKHQVYECKTCRQRFQTVHELNHHTTPGCTLQGRQLRAEDYENGFSQDVTPLVRQVHPRNHNHEEDAAWCKLFRELFPDRDVPSPWFDITRQLWELAQRRDGDAFAMFEAALRGYGMGTSRTCHRRPSRASVEGGLDASPAVPIEPSPDANKPPITPAPNGDVNDEQHDPVPAYSRTQQSNLVPTRGVNPLQGPVQLYGMPTPPPTVHSAAPNPREGISRQFAPIPVRSQHSAEASSGSWQMINISEASNTSFDALSIDTSSPVLTREDSPQNSLLQDNSYDFPFSPVASAQPLFDDPQCTLSYNERASIMSRSSNSFGPSSLQPEALQLPPPRYTRSNQLPRGAYLGNTGFDDIQSNSSYGAAAEPHIGRNVFANQRAHQQYLNAFNFPLPANSQTFNLTQDISFEDAPSPSYNMNQIINNSAAPDGSNSTRDRS

SEQ ID NO: 1757 - DNA, 1530 bp, Muscodor strobelii
  misc_feature: SGI cDNA ID NO. 560197
  misc_feature: Encodes the peptide sequence at SEQ ID NO 1758
atgtcgtcttttctcgaacgagcgacctccaacacgcgcctacagctcgccgcgacagccatcgcatctggcgtcgtggtcgcaggtacgatattcggactccagcgtctacgtcgcgaagagcgcatctatgacctaaagagttcgataccgtcacctgccgatgaaggggatgccttaagaaaactcaacagctttggcggcgcttccacaaccgacaaagaagacatccgaaacgagatcctcgcgcgccgcgcccaggccggcgactacgacgatgagctcatcctcgagcagctcgcgcgaaaccgcgtcttcctcacccccgacggcctcgagaaactacgtggcgcattcgttatagtggtcggatgcggaggggtcggctcacactgtacggcggcattggcacggtcaggcgtctcgcgcatacggttgattgacttcgaccaagtgacgctgagctctctgaaccgtcacgccgtcgcgacgctcgccgatgtcggtatacccaaggtctcgtgtcttcagcggcgtatgcttgctattacgccgtgggtacatttcgatctgcgacaggaaaaattctgggatcaggctgcggcgcgcttgctcgagccatggaaagagacgggacagaagccggattttgtcgttgatgccattgacaacattgacaccaaagtcgcactgctgaaacattgccacgacaacgacttacctgtcatttccgccatgggcgcagggtgtaagagcgatcccacgcgcatcatagtaggggatatcagccaaggcacagacgacagattatccagagccacgcgaagacgtttaaaattacaaggtgtcgtatcgggaataccaaccgtctactcgactgaaaagacaggcgagggcaaagccgagctccttcctttaccagaggatgaatttaaaaagggaaatgtgggagacttgggtgccttgcctgattttagagtcaggatattaccagtgctaggcacgatgcccgctgtgtttggatacacggtagcgaaccacattattctatctataacaggctacccaacagactatctcccagcaaagggccgcgaaaagctatacgacactctcctagcaactgtccaaggcggggaagaaaaagtcctcagacgcctcgtaggaggcgacgcatcaataggcgttggcttcaaaacgcccataacgataggcgacatcgctttcctaaccgaagatatatatcgcggccgcagtgtaatcacgggactccccacacgtctgattctcacaagatggcgaaggccgacgagttcaacgttgatcaaaatcggggaaggagcggacgagcaaaagtcatcgaatttgaagttacatgatctggtgttgatgaccaaggaagaagggaaggaacatgatagacttgttcttgctggagataagcagcctgaggaggtatatgatgaagaagttgtgaagagggcagagaaagctttaaaggagattgcggagtttgagaggttcaggtag

SEQ ID NO: 1758 - protein, 509 aa, Muscodor strobelii
  misc_feature: SGI Peptide ID NO. 560197
  misc_feature (116)..(257): Pfam Id: PF00899 Pfam Desc: ThiF family
  misc_feature (1)..(509): NCBI GI: 261353302 Blast Desc: ubiquitin-protein ligase molybdopterin-converting factor [Verticillium albo-atrum VaMs.102]
  misc_feature (1)..(509): NCBI GI: 46135795 Blast Desc: FG09413.1 [Gibberella zeae PH-1]
  misc_feature (1)..(509): NCBI GI: 256727645 Blast Desc: [Nectria haematococca mpVI 77-13-4]
  misc_feature (1)..(509): NCBI GI: 171683919 Blast Desc: protein product [Podospora anserina] gi|170941920|emb|CAP67572.1| protein product [Podospora anserina]
  misc_feature (1)..(509): NCBI GI: 85074755 Blast Desc: NCU00605 [Neurospora crassa OR74A] gi|28927558|gb|EAA36509.1| conserved [Neurospora crassa OR74A] gi|38567303|emb|CAE76591.1| conserved [Neurospora crassa]
  misc_feature (2)..(509): NCBI GI: 39970779 Blast Desc: MGG_02856 [Magnaporthe grisea 70-15] gi|149210273|ref|XP_001522511.1| MGCH7_ch7g614 [Magnaporthe grisea 70-15] gi|86196569|gb|EAQ71207.1| MGCH7_ch7g614 grisea
  misc_feature (1)..(509): NCBI GI: 225683381 Blast Desc: moeb/ThiF domain-containing protein [Paracoccidioides brasiliensis Pb03]
  misc_feature (1)..(509): NCBI GI: 169767900 Blast Desc: [Aspergillus oryzae RIB40] gi|238484821|ref|XP_002373649.1| ThiF domain protein, [Aspergillus flavus NRRL3357] gi|83766276|dbj|BAE56419.1| protein
  misc_feature (1)..(509): NCBI GI: 119479591 Blast Desc: ThiF domain protein, [Neosartorya fischeri NRRL 181] gi|119407978|gb|EAW17927.1| ThiF domain protein, [Neosartorya fischeri NRRL 181]
  misc_feature (1)..(506): NCBI GI: 115398744 Blast Desc: conserved [Aspergillus terreus NIH2624] gi|114191844|gb|EAU33544.1| conserved [Aspergillus terreus NIH2624]
MSSFLERATSNTRLQLAATAIASGVVVAGTIFGLQRLRREERIYDLKSSIPSPADEGDALRKLNSFGGASTTDKEDIRNEILARRAQAGDYDDELILEQLARNRVFLTPDGLEKLRGAFVIVVGCGGVGSHCTAALARSGVSRIRLIDFDQVTLSSLNRHAVATLADVGIPKVSCLQRRMLAITPWVHFDLRQEKFWDQAAARLLEPWKETGQKPDFVVDAIDNIDTKVALLKHCHDNDLPVISAMGAGCKSDPTRIIVGDISQGTDDRLSRATRRRLKLQGVVSGIPTVYSTEKTGEGKAELLPLPEDEFKKGNVGDLGALPDFRVRILPVLGTMPAVFGYTVANHIILSITGYPTDYLPAKGREKLYDTLLATVQGGEEKVLRRLVGGDASIGVGFKTPITIGDIAFLTEDIYRGRSVITGLPTRLILTRWRRPTSSTLIKIGEGADEQKSSNLKLHDLVLMTKEEGKEHDRLVLAGDKQPEEVYDEEVVKRAEKALKEIAEFERFR

SEQ ID NO: 1759 - DNA, 3334 bp, Muscodor strobelii
  misc_feature: SGI EST ID NO. CUFF.4734.0
  misc_feature: Variant of the nucleotide sequence at SEQ ID NO 1757
gcaatttcgcatcccgccgaacgctgtgcacggcaaacaaatactatgtcggatagactcgagtgagctggaggagacgcaaaacactgattagggcaattgcttagatgaaggccgaaaaacgatgtcgtcttttctcgaacgagcgacctccaacacgcgcctacagctcgccgcgacagccatcgcatctggcgtcgtggtcgcaggtacgatattcggactccagcgtctacgtcgcgaagagcgcatctatgacctaaagagttcgataccgtcacctgccgatgaaggggatgccttaagaaaactcaacagctttggcggcgcttccacaaccgacaaagaagacatccgaaacgagatcctcgcgcgccgcgcccaggccggcgactacgacgatgagctcatcctcgagcagctcgcgcgaaaccgcgtcttcctcacccccgacggcctcgagaaactacgtggcgcattcgttatagtggtcggatgcggaggggtcggctcacactgtacggcggcattggcacggtcaggcgtctcgcgcatacggttgattgacttcgaccaagtgacgctgagctctctgaaccgtcacgccgtcgcgacgctcgccgatgtcggtatacccaaggtctcgtgtcttcagcggcgtatgcttgctattacgccgtgggtacatttcgatctgcgacaggaaaaattctgggatcaggctgcggcgcgcttgctcgagccatggaaagagacgggacagaagccggattttgtcgttgatgccattgacaacattgacaccaaagtcgcactgctgaaacattgccacgacaacgacttacctgtcatttccgccatgggcgcagggtgtaagagcgatcccacgcgcatcatagtaggggatatcagccaaggcacagacgacagattatccagagccacgcgaagacgtttaaaattacaaggtgtcgtatcgggaataccaaccgtctactcgactgaaaagacaggcgagggcaaagccgagctccttcctttaccagaggatgaatttaaaaagggaaatgtgggagacttgggtgccttgcctgattttagagtcaggatattaccagtgctaggcacgatgcccgctgtgtttggatacacggtagcgaaccacattattctatctataacaggctacccaacagactatctcccagcaaagggccgcgaaaagctatacgacactctcctagcaactgtccaaggcggggaagaaaaagtcctcagacgcctcgtaggaggcgacgcatcaataggcgttggcttcaaaacgcccataacgataggcgacatcgctttcctaaccgaagatatatatcgcggccgcagtgtaatcacgggactccccacacgtctgattctcacaagatggcgaaggccgacgagttcaacgttgatcaaaatcggggaaggagcggacgagcaaaagtcatcgaatttgaagttacatgatctggtgttgatgaccaaggaagaagggaaggaacatgatagacttgttcttgctggagataagcagcctgaggaggtatatgatgaagaagttgtgaagagggcagagaaagctttaaaggagattgcggagtttgagaggttcaggtagaattgatcaactacctctcaacgtctttttggtcgtgctcgtgcaagatgacttgctgtattagcatcgcccttagtatcaactctcagtctcaactccatcgcacctcgaagatatcatccatgtcagttaacatcagcctcgtactctctcattttccttgcccccctttacaatttcaacctaccctccctcctagcaccctcccaaagcgcagaagcagccaacgccttcgagtctcttcgtccctcccaccacagatcctgcaatcttacgagcttcagcgtgattttctcgccgtgatccataagccccgtaagcttccccgtccactccttcagcgtatcgcgaggcacgcgccgctcatgcatgtaaatgggtatgaactcgtcgcagccgcctgctgatggatgcattgcctgcgatagaccttctccttccgtgttgcttgctgaggatgatgatgatgatgatgatggaggcgtggcaagatcagaaagacacgtaagttcgcttgctttgatctctatacccagctcttcgtatatctccttagctgctgcgcccgcaaatttcccctccttctctccttccccgtctttatcatcaggtccatcatcgaccatcccagcaggtaattcaacaaactccagacttccagcggggatccgtgcctgcacagtcaataccacgtatcgctcatcggtgtccttgggcgcatcatctgggatgagaatgacgagcatgccgacgctgggaccgcggaggaatacaccgcctggtagtttctcgccggcattgtttgagatttgcgcttggagcttgagaaatccgacacgtggaccgaagaggtcgaagctttggatggttatagagttgagcttgtaagggtctttgtggaagggatgttgggggttggagtgttgaagggacagggatttggatagttgagacagccagttctgtgtgcttgttagtcactggttgcgggtacgtgtttggttgatggttcaggaggcgctagatagtttaggtaggagataggcaatactcacattgaagggttggaatgagagaagttgagactctgagaagccttccggtagagacacgctcacagaggacgatttgagagttatcgtcgtcatggtgggtgagtgtcctctgcttgaattgagagtggtgcgtgtagtggtgagaggtcgtgtcgaagctgtgtaaagatggggtatggttggctgtcgtcggtattttctggtgcgtgacgcgagcactctactagatgcaaatgacttcgatataattggtatggcaaacattacatcgcgacccataccttacgatgtgttttcccatagagcgagagtggtgtcctcagcaatgccgatttacttcaatgacgtcgcaaagcgccgtccctaggcgctcaattgtggggctatcaggtgcctagtacagcttcattttggtttgcgaccgtcaatgcctacctcatgcactcatagctgcaatttcgggagaaaaggttcagactttggctaagtctgatatcttgacaattaataagtagattttattgattgtgggttgactctttatatctggagattggtctggggtttggattgtcattcgtgctcctttctgtatatcatcacctacctagtaactaatatgctc

SEQ ID NO: 1760 - DNA, 1536 bp, Muscodor strobelii
  misc_feature: SGI cDNA ID NO. 560198
  misc_feature: Encodes the peptide sequence at SEQ ID NO 1761
atgtcgtcttttctcgaacgagcgacctccaacacgcgcctacagctcgccgcgacagccatcgcatctggcgtcgtggtcgcaggtacgatattcggactccagcgtctacgtcgcgaagagcgcatctatgacctaaagagttcgataccgtcacctgccgatgaaggggatgccttaagaaaagtacgtctcaacagctttggcggcgcttccacaaccgacaaagaagacatccgaaacgagatcctcgcgcgccgcgcccaggccggcgactacgacgatgagctcatcctcgagcagctcgcgcgaaaccgcgtcttcctcacccccgacggcctcgagaaactacgtggcgcattcgttatagtggtcggatgcggaggggtcggctcacactgtacggcggcattggcacggtcaggcgtctcgcgcatacggttgattgacttcgaccaagtgacgctgagctctctgaaccgtcacgccgtcgcgacgctcgccgatgtcggtatacccaaggtctcgtgtcttcagcggcgtatgcttgctattacgccgtgggtacatttcgatctgcgacaggaaaaattctgggatcaggctgcggcgcgcttgctcgagccatggaaagagacgggacagaagccggattttgtcgttgatgccattgacaacattgacaccaaagtcgcactgctgaaacattgccacgacaacgacttacctgtcatttccgccatgggcgcagggtgtaagagcgatcccacgcgcatcatagtaggggatatcagccaaggcacagacgacagattatccagagccacgcgaagacgtttaaaattacaaggtgtcgtatcgggaataccaaccgtctactcgactgaaaagacaggcgagggcaaagccgagctccttcctttaccagaggatgaatttaaaaagggaaatgtgggagacttgggtgccttgcctgattttagagtcaggatattaccagtgctaggcacgatgcccgctgtgtttggatacacggtagcgaaccacattattctatctataacaggctacccaacagactatctcccagcaaagggccgcgaaaagctatacgacactctcctagcaactgtccaaggcggggaagaaaaagtcctcagacgcctcgtaggaggcgacgcatcaataggcgttggcttcaaaacgcccataacgataggcgacatcgctttcctaaccgaagatatatatcgcggccgcagtgtaatcacgggactccccacacgtctgattctcacaagatggcgaaggccgacgagttcaacgttgatcaaaatcggggaaggagcggacgagcaaaagtcatcgaatttgaagttacatgatctggtgttgatgaccaaggaagaagggaaggaacatgatagacttgttcttgctggagataagcagcctgaggaggtatatgatgaagaagttgtgaagagggcagagaaagctttaaaggagattgcggagtttgagaggttcaggtag

SEQ ID NO: 1761 - protein, 511 aa, Muscodor strobelii
  misc_feature: SGI Peptide ID NO. 560198
  misc_feature (118)..(259): Pfam Id: PF00899 Pfam Desc: ThiF family
  misc_feature (1)..(511): NCBI GI: 261353302 Blast Desc: ubiquitin-protein ligase molybdopterin-converting factor [Verticillium albo-atrum VaMs.102]
  misc_feature (1)..(511): NCBI GI: 46135795 Blast Desc: FG09413.1 [Gibberella zeae PH-1]
  misc_feature (1)..(511): NCBI GI: 256727645 Blast Desc: [Nectria haematococca mpVI 77-13-4]
  misc_feature (1)..(511): NCBI GI: 171683919 Blast Desc: protein product [Podospora anserina] gi|170941920|emb|CAP67572.1| protein product [Podospora anserina]
  misc_feature (1)..(511): NCBI GI: 85074755 Blast Desc: NCU00605 [Neurospora crassa OR74A] gi|28927558|gb|EAA36509.1| conserved [Neurospora crassa OR74A] gi|38567303|emb|CAE76591.1| conserved [Neurospora crassa]
  misc_feature (2)..(511): NCBI GI: 39970779 Blast Desc: MGG_02856 [Magnaporthe grisea 70-15] gi|149210273|ref|XP_001522511.1| MGCH7_ch7g614 [Magnaporthe grisea 70-15] gi|86196569|gb|EAQ71207.1| MGCH7_ch7g614 grisea
  misc_feature (1)..(508): NCBI GI: 115398744 Blast Desc: conserved [Aspergillus terreus NIH2624] gi|114191844|gb|EAU33544.1| conserved [Aspergillus terreus NIH2624]
  misc_feature (1)..(511): NCBI GI: 226286997 Blast Desc: ubiquitin-protein ligase molybdopterin-converting factor [Paracoccidioides brasiliensis Pb18]
  misc_feature (1)..(511): NCBI GI: 154285738 Blast Desc: conserved [Ajellomyces capsulatus NAm1] gi|150407305|gb|EDN02846.1| conserved [Ajellomyces capsulatus NAm1]
  misc_feature (1)..(511): NCBI GI: 225683381 Blast Desc: moeb/ThiF domain-containing protein [Paracoccidioides brasiliensis Pb03]
MSSFLERATSNTRLQLAATAIASGVVVAGTIFGLQRLRREERIYDLKSSIPSPADEGDALRKVRLNSFGGASTTDKEDIRNEILARRAQAGDYDDELILEQLARNRVFLTPDGLEKLRGAFVIVVGCGGVGSHCTAALARSGVSRIRLIDFDQVTLSSLNRHAVATLADVGIPKVSCLQRRMLAITPWVHFDLRQEKFWDQAAARLLEPWKETGQKPDFVVDAIDNIDTKVALLKHCHDNDLPVISAMGAGCKSDPTRIIVGDISQGTDDRLSRATRRRLKLQGVVSGIPTVYSTEKTGEGKAELLPLPEDEFKKGNVGDLGALPDFRVRILPVLGTMPAVFGYTVANHIILSITGYPTDYLPAKGREKLYDTLLATVQGGEEKVLRRLVGGDASIGVGFKTPITIGDIAFLTEDIYRGRSVITGLPTRLILTRWRRPTSSTLIKIGEGADEQKSSNLKLHDLVLMTKEEGKEHDRLVLAGDKQPEEVYDEEVVKRAEKALKEIAEFERFR

SEQ ID NO: 1762 - DNA, 3334 bp, Muscodor strobelii; identical to SEQ ID NO: 1759
  misc_feature: SGI EST ID NO. CUFF.4734.0
  misc_feature: Variant of the nucleotide sequence at SEQ ID NO 1760

SEQ ID NO: 1763 - DNA, 885 bp, Muscodor strobelii
  misc_feature: SGI cDNA ID NO. 560199
  misc_feature: Encodes the peptide sequence at SEQ ID NO 1764
atgacgacgataactctcaaatcgtcctctgtgagcgtgtctctaccggaaggcttctcagagtctcaacttctctcattccaacccttcaataactggctgtctcaactatccaaatccctgtcccttcaacactccaacccccaacatcccttccacaaagacccttacaagctcaactctataaccatccaaagcttcgacctcttcggtccacgtgtcggatttctcaagctccaagcgcaaatctcaaacaatgccggcgagaaactaccaggcggtgtattcctccgcggtcccagcgtcggcatgctcgtcattctcatcccagatgatgcgcccaaggacaccgatgagcgatacgtggtattgactgtgcaggcacggatccccgctggaagtctggagtttgttgaattacctgctgggatggtcgatgatggacctgatgataaagacggggaaggagagaaggaggggaaatttgcgggcgcagcagctaaggagatatacgaagagctgggtatagagatcaaagcaagcgaacttacgtgtctttctgatcttgccacgcctccatcatcatcatcatcatcatcctcagcaagcaacacggaaggagaaggtctatcgcaggcaatgcatccatcagcaggcggctgcgacgagttcatacccatttacatgcatgagcggcgcgtgcctcgcgatacgctgaaggagtggacggggaagcttacggggcttatggatcacggcgagaaaatcacgctgaagctcgtaagattgcaggatctgtggtgggagggacgaagagactcgaaggcgttggctgcttctgcgctttgggagggtgctaggagggagggtaggttgaaattgtaa

SEQ ID NO: 1764 - protein, 294 aa, Muscodor strobelii
  misc_feature: SGI Peptide ID NO. 560199
  misc_feature (98)..(191): Pfam Id: PF00293 Pfam Desc: NUDIX domain
  misc_feature (1)..(292): NCBI GI: 164428419 Blast Desc: NCU11186 [Neurospora crassa OR74A] gi|157072141|gb|EDO65364.1| conserved [Neurospora crassa OR74A]
  misc_feature (33)..(292): NCBI GI: 256731959 Blast Desc: NECHADRAFT_40647 [Nectria haematococca mpVI 77-13-4]
  misc_feature (30)..(292): NCBI GI: 154308213 Blast Desc: BC1G_07852 [Botryotinia fuckeliana B05.10] gi|150852937|gb|EDN28129.1| BC1G_07852 [Botryotinia fuckeliana B05.10]
  misc_feature (1)..(292): NCBI GI: 238844368 Blast Desc: nudix hydrolase 14 [Microsporum canis CBS 113480]
  misc_feature (8)..(292): NCBI GI: 212535450 Blast Desc: NUDIX family hydrolase, [Penicillium marneffei ATCC 18224] gi|210070280|gb|EEA24370.1| NUDIX family hydrolase, [Penicillium marneffei ATCC 18224]
  misc_feature (1)..(293): NCBI GI: 225557911 Blast Desc: NUDIX hydrolase [Ajellomyces capsulatus G186AR]
  misc_feature (8)..(292): NCBI GI: 145235365 Blast Desc: An03g04500 [Aspergillus niger] gi|134058013|emb|CAK38242.1| protein product [Aspergillus niger]
  misc_feature (1)..(292): NCBI GI: 169778157 Blast Desc: [Aspergillus oryzae RIB40] gi|83772281|dbj|BAE62411.1| protein product [Aspergillus oryzae]
  misc_feature (1)..(292): NCBI GI: 238495432 Blast Desc: NUDIX family hydrolase, [Aspergillus flavus NRRL3357] gi|220695602|gb|EED51945.1| NUDIX family hydrolase, [Aspergillus flavus NRRL3357]
  misc_feature (8)..(292): NCBI GI: 119479667 Blast Desc: NUDIX family hydrolase, [Neosartorya fischeri NRRL 181] gi|119408016|gb|EAW17965.1| NUDIX family hydrolase, [Neosartorya fischeri NRRL 181]
  misc_feature (59)..(290): SWISSPROT Homolog: EC 3.6.1.21 ADP-sugar diphosphatase
MTTITLKSSSVSVSLPEGFSESQLLSFQPFNNWLSQLSKSLSLQHSNPQHPFHKDPYKLNSITIQSFDLFGPRVGFLKLQAQISNNAGEKLPGGVFLRGPSVGMLVILIPDDAPKDTDERYVVLTVQARIPAGSLEFVELPAGMVDDGPDDKDGEGEKEGKFAGAAAKEIYEELGIEIKASELTCLSDLATPPSSSSSSSSASNTEGEGLSQAMHPSAGGCDEFIPIYMHERRVPRDTLKEWTGKLTGLMDHGEKITLKLVRLQDLWWEGRRDSKALAASALWEGARREGRLKL

SEQ ID NO: 1765 - DNA, 3361 bp, Muscodor strobelii
  misc_feature: SGI EST ID NO. CUFF.4735.1
  misc_feature: Variant of the nucleotide sequence at SEQ ID NO 1763
gagcatattagttactaggtaggtgatgatatacagaaaggagcacgaatgacaatccaaaccccagaccaatctccagatataaagagtcaacccacaatcaataaaatctacttattaattgtcaagatatcagacttagccaaagtctgaaccttttctcccgaaattgcagctatgagtgcatgaggtaggcattgacggtcgcaaaccaaaatgaagctgtactaggcacctgatagccccacaattgagcgcctagggacggcgctttgcgacgtcattgaagtaaatcggcattgctgaggacaccactctcgctctatgggaaaacacatcgtaaggtatgggtcgcgatgtaatgtttgccataccaattatatcgaagtcatttgcatctagtagagtgctcgcgtcacgcaccagaaaataccgacgacagccaaccataccccatctttacacagcttcgacacgacctctcaccactacacgcaccactctcaattcaagcagaggacactcacccaccatgacgacgataactctcaaatcgtcctctgtgagcgtgtctctaccggaaggcttctcagagtctcaacttctctcattccaacccttcaataactggctgtctcaactatccaaatccctgtcccttcaacactccaacccccaacatcccttccacaaagacccttacaagctcaactctataaccatccaaagcttcgacctcttcggtccacgtgtcggatttctcaagctccaagcgcaaatctcaaacaatgccggcgagaaactaccaggcggtgtattcctccgcggtcccagcgtcggcatgctcgtcattctcatcccagatgatgcgcccaaggacaccgatgagcgatacgtggtattgactgtgcaggcacggatccccgctggaagtctggagtttgttgaattacctgctgggatggtcgatgatggacctgatgataaagacggggaaggagagaaggaggggaaatttgcgggcgcagcagctaaggagatatacgaagagctgggtatagagatcaaagcaagcgaacttacgtgtctttctgatcttgccacgcctccatcatcatcatcatcatcatcctcagcaagcaacacggaaggagaaggtctatcgcaggcaatgcatccatcagcaggcggctgcgacgagttcatacccatttacatgcatgagcggcgcgtgcctcgcgatacgctgaaggagtggacggggaagcttacggggcttatggatcacggcgagaaaatcacgctgaagctcgtaagattgcaggatctgtggtgggagggacgaagagactcgaaggcgttggctgcttctgcgctttgggagggtgctaggagggagggtaggttgaaattgtaaaggggggcaaggaaaatgagagagtacgaggctgatgttaactgacatggatgatatcttcgaggtgcgatggagttgagactgagagttgatactaagggcgatgctaatacagcaagtcatcttgcacgagcacgaccaaaaagacgttgagaggtagttgatcaattctacctgaacctctcaaactccgcaatctcctttaaagctttctctgccctcttcacaacttcttcatcatatacctcctcaggctgcttatctccagcaagaacaagtctatcatgttccttcccttcttccttggtcatcaacaccagatcatgtaacttcaaattcgatgacttttgctcgtccgctccttccccgattttgatcaacgttgaactcgtcggccttcgccatcttgtgagaatcagacgtgtggggagtcccgtgattacactgcggccgcgatatatatcttcggttaggaaagcgatgtcgcctatcgttatgggcgttttgaagccaacgcctattgatgcgtcgcctcctacgaggcgtctgaggactttttcttccccgccttggacagttgctaggagagtgtcgtatagcttttcgcggccctttgctgggagatagtctgttgggtagcctgactgttggttagcaggaagtagggcgtaaaagagagacgtggagcgaagtacctgttatagatagaataatgtggttcgctaccgtgtatccaaacacagcgggcatcgtgcctagcactggtaatatcctgactctaaaatcaggcaaggcacccaagtctcccacatttccctttttaaattcatcctctggtaaaggaaggagctcggctttgccctcgcctgtcttttcagtcgagtagacggttggtattcccgatacgacaccttgtaattttaaacgtcttcgcgtggctctggataatctgtcgtctgtgccttggctgatatcccctactatgatgcgcgtgggatcgctcttacaccctgcgcccatggcggaaatgacaggtaagtcgttgtcgtggcaatgtttcagcagtgcgactttggtgtcaatgttgtcaatggcatcaacgacaaaatccggcttctgtcccgtctctttccatggctcgagcaagcgcgccgcagcctgatcccagaatttttcctgtcgcagatcgaaatgtacccacggcgtaatagcaagcatacgccgctgaagacacgagaccttgggtataccgacatcggcgagcgtcgcgacggcgtgacggttcagagagctcagcgtcacttggtcgaagtcaatcaaccgtatgcgcgagacgcctgaccgtgccaatgccgccgtacagtgtgagccgacccctccgcatccgaccactataacgaatgcgccacgtagtttctcgaggccgtcgggggtgaggaagacgcggtttcgcgcgagctgctcgaggatgagctcatcgtcgtagtcgccggcctgggcgcggcgcgcgaggatctcgtttcggatgtcttctttgtcggttgtggaagcgccgccaaagctgttgagctacaatgcgcccgttagcaaaggcattttgattgtaaagctggaggatatgggggtacacgtacttttcttaaggcatccccttcatcggcaggtgacggtatcgaactctttaggtcatagatgcgctcttcgcgacgtagacgctggagtccgaatatcgtacctgcgaccacgacgccagatgcgatggctgtcgcggcgagctgtaggcgcgtgttggaggtcgctcgttcgagaaaagacgacatcgtttttcggccttcatctaagcaattgccctaatcagtgttttgcgtctcctccagctcactcgagtctatccgacatagtatttgtttgccgtgcacagcgttcggcgggatgcgaaattgc

SEQ ID NO: 1766 - DNA, 1128 bp, Muscodor strobelii
  misc_feature: SGI cDNA ID NO. 560200
  misc_feature: Encodes the peptide sequence at SEQ ID NO 1767
atggagccagacagtattgtccctcgtgggatgagacctgagcgaagttttaccaccactgggctttacaatggcaatttgtctctagaagttattttcgagcatcgtcaaatcgcaaggccctctgtgtggccaactccgatccctaaagcggaagacttcgaattccaagactgtgactgggagcgattcgacagcaataaccctttgcacaggtgcttgatgtcagactatgaagccaagtggaagactctgaagcaactggggatctcttgtccggtgtctatcgctaccgatgatcatgcgctggccatcgacacgccgggtctgactggttatttgggatttgggtctggatcacccgatcagcatcttcaaaagctcctatatttcctagactgcacgggtgcgcctgtgctcggacgtggaagaaaataccttgccaaccaggcacgggctgcgtttgatcaagaaattgaggacaagaagggggccccgaaaaaacctcccattgactgctgcaacccggcttcggcgctcatcgtgttgctcagctacgatgacacctcggtaaaagagcttaaggcttggattgagaccatcttgaaagatgtcaaagaacatggcccacccccggatgttgacgtgaaaggagccgaagtgcgagccagctgggtcatggttgctgttgcggtgcaaatgttccaggaattccccaaactgttcgtagaaatagaaccgaaagaagctgaagcagccgcaggacttcgcaaatacagcgagatgcgttactgccttggacattcgacagacgattggtaccgagctttcctcatgttccactggttcgtacaacgacggaagacgcctatgaatgacttagtctcgaagaaggccagattcaaggtacctaaatacaatcttgtcctgtggtgccgtccaggtaccggcgcaacgacgtccgtacgcagaagaccagagtgggaatatgccaccagcaagaagaagccgtccgcgccggtaactcctccgagcaagaccacgaacgtgaaaagaaagctttctacggcgtccgacgaccttgcatataatcaacgcaagagaactaaaactgatgcgaagatgtag

SEQ ID NO: 1767 - protein, 375 aa, Muscodor strobelii
  misc_feature: SGI Peptide ID NO. 560200
MEPDSIVPRGMRPERSFTTTGLYNGNLSLEVIFEHRQIARPSVWPTPIPKAEDFEFQDCDWERFDSNNPLHRCLMSDYEAKWKTLKQLGISCPVSIATDDHALAIDTPGLTGYLGFGSGSPDQHLQKLLYFLDCTGAPVLGRGRKYLANQARAAFDQEIEDKKGAPKKPPIDCCNPASALIVLLSYDDTSVKELKAWIETILKDVKEHGPPPDVDVKGAEVRASWVMVAVAVQMFQEFPKLFVEIEPKEAEAAAGLRKYSEMRYCLGHSTDDWYRAFLMFHWFVQRRKTPMNDLVSKKARFKVPKYNLVLWCRPGTGATTSVRRRPEWEYATSKKKPSAPVTPPSKTTNVKRKLSTASDDLAYNQRKRTKTDAKM

SEQ ID NO: 1768 - DNA, 2283 bp, Muscodor strobelii
  misc_feature: SGI cDNA ID NO. 560201
  misc_feature: Reduced expression when VOC is produced
  misc_feature: Encodes the peptide sequence at SEQ ID NO 1769
atggcggactttagccgcgcctctctcgaccaaacatctccccagaacccagactacgaccgcaccatgtctctcaccaacgctcctagcccagggcccgagaatggtgccgcctccgccgccacccaccagccagagaccgccccgggaaaccctgctgatgatgccatgcccgactccagcccgacggcgcccgtccccggcgcaaagacggagctctctcagcgtgctcaggaggttctaggctctgatattggtgttttgaccatgctcaaccgcttaaagcagagtattgcatccgcaaaggagttcgcggggtttctaaaagaacggtccaagctggaggaagtccacgcaagagggttgaagaagatgtgcagccccattcaccaccaagatcatcgacaaggcacctttgccagggcctacgacgagatgctacagatccacgagcgcatggctgagaacggaacccaatttgccttatcgctacaccacatgcaggaggaccttctcgaggtggccaacgtggctgagaagcatcgaaaggggtggaagcagaacggtctcgaggctgagcggcggcttgccgacatcgaaacggccatgcggaaatccaagaccaagtacgactcgctggcagaggaatacgacagagtgaagacgggagaggccaaacagggaccccgcgtgtttggcattaaaggccccaagtcggccgctcagcaggaggaagacctgttgcgcaagacgcaggccgctgacacagactatatgggcaaagtacagacctacctatccgaaaaagccacgatggaagcgacgacccggcccgaagcgatcagggctctgcaggacacgataagagagtgtgacgctgggactacgctgcagttgcagaagtttgcgtcgttcaacgagaaattactgcttagcaacggcttggtcatcagccccctcaagaatgccactggtcctggccaattttctaggagtctgaaggaggtcatccatggcatagacaatagaaaggatctggaggattacgtaacaagctgttacaccaaattgccgccaaagcaaccggaaccaaagtatgagcgcaatccagttcttaatccccaaccaaatatgtcactcaatcaggcaacacagatgggcagaccgccgtctcagcaacaggctcccagccaaatgctacccccgatacagacccaaatgcaaccccctggaactctaggaaggacaggtacaggcacttttgacacggcatctcctatgggccaaaatagtcctggtcagactttcaatcccccggctatgtctgctgggcagcgaacaaactcaaacctcggacagggtcatgagagaagccaaagtcatggtgccatgctgactcaggcttcgggtgcgcctgggccatccaatcagccctacagcgtgagaaactcatcacacggtttgccaccacagcaatcacgcttcaacggaggcggcgtcagcagtcccatgggcccggccagccaaggtggcccaccacaattaggagccttgtctttccagactcagcagtcaaggaaccagtctcctcctcaaggagggccaagcccttacggtgcccccgcacaactgcaagatccccgccccagttctcccgcgagaatgccacccagtggaggaaacagacaagtcttcggtatcaccctcggccgcttatatgagcgcgatcaatttgccgtgcccatggtggtacaccaatgcattcaagcagtcaatctgtacggtctagccgtcgaaggcatctatcgtctgtccggctcagcagtacatgtaaacaagctgaagaacttgtttgattccaatcaagaatcacacgtcttggacttccgcaacccagagaacttcttccatgacgtcaatagtgttgccggcctgttgaagcagttcctccgcgacttaccagatccccttttaacgtcagagaattactcagcattcatcgaagccgctaagcacgacgacgatatcgtacggagagacagtatgcatgctattatcaacggactgcctgaccccaactacgccacgttgcgtgccctcgcactgcatctacacagagtcatggagaatagctctgtcaaccggatgagctcacagaacttggccatcgtcttcggcccgacgctcatgggtactggagccaacattggagatgcagcttggcacgttagggtcgtggacacaattttgcagaacacttaccagatctttgatgaggactag

SEQ ID NO: 1769 - protein, 760 aa, Muscodor strobelii
  misc_feature: SGI Peptide ID NO. 560201
  misc_feature (581)..(738): Pfam Id: PF00620 Pfam Desc: RhoGAP domain
  misc_feature (78)..(171): Pfam Id: PF00611 Pfam Desc: Fes/CIP4 homology domain
  misc_feature (50)..(760): NCBI GI: 171683989 Blast Desc: protein product [Podospora anserina] gi|170941955|emb|CAP67607.1| protein product [Podospora anserina]
  misc_feature (72)..(760): NCBI GI: 85114553 Blast Desc: NCU00553 [Neurospora crassa OR74A] gi|28926506|gb|EAA35478.1| NCU00553 [Neurospora crassa OR74A]
  misc_feature (1)..(760): NCBI GI: 256733652 Blast Desc: [Nectria haematococca mpVI 77-13-4]
  misc_feature (1)..(760): NCBI GI: 46128521 Blast Desc: FG08638.1 [Gibberella zeae PH-1]
  misc_feature (74)..(760): NCBI GI: 154291685 Blast Desc: BC1G_15133 [Botryotinia fuckeliana B05.10] gi|150846633|gb|EDN21826.1| BC1G_15133 [Botryotinia fuckeliana B05.10]
  misc_feature (102)..(760): NCBI GI: 145609704 Blast Desc: MGG_03048 [Magnaporthe grisea 70-15] gi|145017103|gb|EDK01466.1| MGG_03048 [Magnaporthe grisea 70-15]
  misc_feature (90)..(732): NCBI GI: 261353473 Blast Desc: beta-chimaerin [Verticillium albo-atrum VaMs.102]
  misc_feature (99)..(760): NCBI GI: 156056519 Blast Desc: SS1G_03990 [Sclerotinia sclerotiorum 1980] gi|154701776|gb|EDO01515.1| SS1G_03990 [Sclerotinia sclerotiorum 1980]
  misc_feature (63)..(760): NCBI GI: 149210741 Blast Desc: MGCH7_ch7g843 [Magnaporthe grisea 70-15] gi|86196798|gb|EAQ71436.1| MGCH7_ch7g843 [Magnaporthe grisea 70-15]
  misc_feature (71)..(760): NCBI GI: 238845605 Blast Desc: beta-chimaerin [Microsporum canis CBS 113480]
  misc_feature: Useful for introducing or modulating the production of volatile compounds
MADFSRASLDQTSPQNPDYDRTMSLTNAPSPGPENGAASAATHQPETAPGNPADDAMPDSSPTAPVPGAKTELSQRAQEVLGSDIGVLTMLNRLKQSIASAKEFAGFLKERSKLEEVHARGLKKMCSPIHHQDHRQGTFARAYDEMLQIHERMAENGTQFALSLHHMQEDLLEVANVAEKHRKGWKQNGLEAERRLADIETAMRKSKTKYDSLAEEYDRVKTGEAKQGPRVFGIKGPKSAAQQEEDLLRKTQAADTDYMGKVQTYLSEKATMEATTRPEAIRALQDTIRECDAGTTLQLQKFASFNEKLLLSNGLVISPLKNATGPGQFSRSLKEVIHGIDNRKDLEDYVTSCYTKLPPKQPEPKYERNPVLNPQPNMSLNQATQMGRPPSQQQAPSQMLPPIQTQMQPPGTLGRTGTGTFDTASPMGQNSPGQTFNPPAMSAGQRTNSNLGQGHERSQSHGAMLTQASGAPGPSNQPYSVRNSSHGLPPQQSRFNGGGVSSPMGPASQGGPPQLGALSFQTQQSRNQSPPQGGPSPYGAPAQLQDPRPSSPARMPPSGGNRQVFGITLGRLYERDQFAVPMVVHQCIQAVNLYGLAVEGIYRLSGSAVHVNKLKNLFDSNQESHVLDFRNPENFFHDVNSVAGLLKQFLRDLPDPLLTSENYSAFIEAAKHDDDIVRRDSMHAIINGLPDPNYATLRALALHLHRVMENSSVNRMSSQNLAIVFGPTLMGTGANIGDAAWHVRVVDTILQNTYQIFDED

SEQ ID NO: 1770 - DNA, 3437 bp, Muscodor strobelii
  misc_feature: SGI EST ID NO. CUFF.4639.0
  misc_feature: Variant of the nucleotide sequence at SEQ ID NO 1768
cgatattgaaatagaaattccaattctccccgggttgacagacaactggaggaggacaggggcaggccagactgcggggactaggtaggagccggggtggctgctagagggtgaattgggggtggaacacgattttagcagtggctgcattgcgcaagcttcaacggctgaccccatcccccagaccctgaggggagagctgcaattggcgtgtgggagaggacaccagggaccgcagcaagcagtattacgtcggcgggtgctagcaaagggctaagaaaggcccgtgcttcaattcgattggtgccagtcgaagctgtaggtgtaacttgtcgttgcctcatcgccgcatttccgcagtgattgtctgcccaagcacatttgtacagagtatcatcgtcaaattcgtcacaggtgcgtcgggctggaggttttgtcgcctgtcaccatattctcatttgtccaccgtcgcatattatttgcactcttaattgctcacccaccttctaatgggcaacagcatctcttaataaagtcgcaaacggacccgacaggttgcactactgccattgacagcttccggcataaaccgcttgtctttgcgccgccttgttctgtcccgcgtgctgcgaatatccgacgcactccctcgtttcacccacgccatatcgacctcgactgtcagcctttgccgatcacaggctgatcacaagctctgccttttctgtgccgcgcgacacacatactcctcccatctaatcccgtgtgcaaatacccagcccgggccagtcttcaccatggcggactttagccgcgcctctctcgaccaaacatctccccagaacccagactacgaccgcaccatgtctctcaccaacgctcctagcccagggcccgagaatggtgccgcctccgccgccacccaccagccagagaccgccccgggaaaccctgctgatgatgccatgcccgactccagcccgacggcgcccgtccccggcgcaaagacggagctctctcagcgtgctcaggaggttctaggctctgatattggtgttttgaccatgctcaaccgcttaaagcagagtattgcatccgcaaaggagttcgcggggtttctaaaagaacggtccaagctggaggaagtccacgcaagagggttgaagaagatgtgcagccccattcaccaccaagatcatcgacaaggcacctttgccagggcctacgacgagatgctacagatccacgagcgcatggctgagaacggaacccaatttgccttatcgctacaccacatgcaggaggaccttctcgaggtggccaacgtggctgagaagcatcgaaaggggtggaagcagaacggtctcgaggctgagcggcggcttgccgacatcgaaacggccatgcggaaatccaagaccaagtacgactcgctggcagaggaatacgacagagtgaagacgggagaggccaaacagggaccccgcgtgtttggcattaaaggccccaagtcggccgctcagcaggaggaagacctgttgcgcaagacgcaggccgctgacacagactatatgggcaaagtacagacctacctatccgaaaaagccacgatggaagcgacgacccggcccgaagcgatcagggctctgcaggacacgataagagagtgtgacgctgggactacgctgcagttgcagaagtttgcgtcgttcaacgagaaattactgcttagcaacggcttggtcatcagccccctcaagaatgccactggtcctggccaattttctaggagtctgaaggaggtcatccatggcatagacaatagaaaggatctggaggattacgtaacaagctgttacaccaaattgccgccaaagcaaccggaaccaaagtatgagcgcaatccagttcttaatccccaaccaaatatgtcactcaatcaggcaacacagatgggcagaccgccgtctcagcaacaggctcccagccaaatgctacccccgatacagacccaaatgcaaccccctggaactctaggaaggacaggtacaggcacttttgacacggcatctcctatgggccaaaatagtcctggtcagactttcaatcccccggctatgtctgctgggcagcgaacaaactcaaacctcggacagggtcatgagagaagccaaagtcatggtgccatgctgactcaggcttcgggtgcgcctgggccatccaatcagccctacagcgtgagaaactcatcacacggtttgccaccacagcaatcacgcttcaacggaggcggcgtcagcagtcccatgggcccggccagccaaggtggcccaccacaattaggagccttgtctttccagactcagcagtcaaggaaccagtctcctcctcaaggagggccaagcccttacggtgcccccgcacaactgcaagatccccgccccagttctcccgcgagaatgccacccagtggaggaaacagacaagtcttcggtatcaccctcggccgcttatatgagcgcgatcaatttgccgtgcccatggtggtacaccaatgcattcaagcagtcaatctgtacggtctagccgtcgaaggcatctatcgtctgtccggctcagcagtacatgtaaacaagctgaagaacttgtttgattccaatcaagaatcacacgtcttggacttccgcaacccagagaacttcttccatgacgtcaatagtgttgccggcctgttgaagcagttcctccgcgacttaccagatccccttttaacgtcagagaattactcagcattcatcgaagccgctaagcacgacgacgatatcgtacggagagacagtatgcatgctattatcaacggactgcctgaccccaactacgccacgttgcgtgccctcgcactgcatctacacagagtcatggagaatagctctgtcaaccggatgagctcacagaacttggccatcgtcttcggcccgacgctcatgggtactggagccaacattggagatgcagcttggcacgttagggtcgtggacacaattttgcagaacacttaccagatctttgatgaggactagcctagttcctctttgtaacactattgcggacgggtcatgacgagcaaaaagcgtatgacgcatcgagacgagtttcggggctttacgatccatgatgagatatatatcatgggaaatgaaaaatgttggtgtgactggtcttagaaaagagtgagattggcgactgtgtaagatagtatcgacataatatcgttgcattaaatgtttgctaggacgggtcaatgagatgagcgaaaagcgaacttttcacgctacgttatttccaattttcagattgtgacgcattgtgacgcattgtgacgcggatcatctttactgcactacatggtgattgatttcctacggtatcaatttctg

SEQ ID NO: 1771 - DNA, 2286 bp, Muscodor strobelii
  misc_feature: SGI cDNA ID NO. 560202
  misc_feature: Reduced expression when VOC is produced
  misc_feature: Encodes the peptide sequence at SEQ ID NO 1772
atggcggactttagccgcgcctctctcgaccaaacatctccccagaacccagactacgaccgcaccatgtctctcaccaacgctcctagcccagggcccgagaatggtgccgcctccgccgccacccaccagccagagaccgccccgggaaaccctgctgatgatgccatgcccgactccagcccgacggcgcccgtccccggcgcaaagacggagctctctcagcgtgctcaggaggttctaggctctgatattggtgttttgaccatgctcaaccgcttaaagcagagtattgcatccgcaaaggagttcgcggggtttctaaaagaacggtccaagctggaggaagtccacgcaagagggttgaagaagatgtgcagccccattcaccaccaagatcatcgacaaggcacctttgccagggcctacgacgagatgctacagatccacgagcgcatggctgagaacggaacccaatttgccttatcgctacaccacatgcaggaggaccttctcgaggtggccaacgtggctgagaagcatcgaaaggggtggaagcagaacggtctcgaggctgagcggcggcttgccgacatcgaaacggccatgcggaaatccaagaccaagtacgactcgctggcagaggaatacgacagagtgaagacgggagaggccaaacagggaccccgcgtgtttggcattaaaggccccaagtcggccgctcagcaggaggaagacctgttgcgcaagacgcaggccgctgacacagactatatgggcaaagtacagacctacctatccgaaaaagccacgatggaagcgacgacccggcccgaagcgatcagggctctgcaggacacgataagagagtgtgacgctgggactacgctgcagttgcagaagtttgcagcgtcgttcaacgagaaattactgcttagcaacggcttggtcatcagccccctcaagaatgccactggtcctggccaattttctaggagtctgaaggaggtcatccatggcatagacaatagaaaggatctggaggattacgtaacaagctgttacaccaaattgccgccaaagcaaccggaaccaaagtatgagcgcaatccagttcttaatccccaaccaaatatgtcactcaatcaggcaacacagatgggcagaccgccgtctcagcaacaggctcccagccaaatgctacccccgatacagacccaaatgcaaccccctggaactctaggaaggacaggtacaggcacttttgacacggcatctcctatgggccaaaatagtcctggtcagactttcaatcccccggctatgtctgctgggcagcgaacaaactcaaacctcggacagggtcatgagagaagccaaagtcatggtgccatgctgactcaggcttcgggtgcgcctgggccatccaatcagccctacagcgtgagaaactcatcacacggtttgccaccacagcaatcacgcttcaacggaggcggcgtcagcagtcccatgggcccggccagccaaggtggcccaccacaattaggagccttgtctttccagactcagcagtcaaggaaccagtctcctcctcaaggagggccaagcccttacggtgcccccgcacaactgcaagatccccgccccagttctcccgcgagaatgccacccagtggaggaaacagacaagtcttcggtatcaccctcggccgcttatatgagcgcgatcaatttgccgtgcccatggtggtacaccaatgcattcaagcagtcaatctgtacggtctagccgtcgaaggcatctatcgtctgtccggctcagcagtacatgtaaacaagctgaagaacttgtttgattccaatcaagaatcacacgtcttggacttccgcaacccagagaacttcttccatgacgtcaatagtgttgccggcctgttgaagcagttcctccgcgacttaccagatccccttttaacgtcagagaattactcagcattcatcgaagccgctaagcacgacgacgatatcgtacggagagacagtatgcatgctattatcaacggactgcctgaccccaactacgccacgttgcgtgccctcgcactgcatctacacagagtcatggagaatagctctgtcaaccggatgagctcacagaacttggccatcgtcttcggcccgacgctcatgggtactggagccaacattggagatgcagcttggcacgttagggtcgtggacacaattttgcagaacacttaccagatctttgatgaggactag

SEQ ID NO: 1772 - protein, 761 aa, Muscodor strobelii
  misc_feature: SGI Peptide ID NO. 560202
  misc_feature (582)..(739): Pfam Id: PF00620 Pfam Desc: RhoGAP domain
  misc_feature (78)..(171): Pfam Id: PF00611 Pfam Desc: Fes/CIP4 homology domain
  misc_feature (50)..(761): NCBI GI: 171683989 Blast Desc: protein product [Podospora anserina] gi|170941955|emb|CAP67607.1| protein product [Podospora anserina]
  misc_feature (72)..(761): NCBI GI: 85114553 Blast Desc: NCU00553 [Neurospora crassa OR74A] gi|28926506|gb|EAA35478.1| NCU00553 [Neurospora crassa OR74A]
  misc_feature (1)..(761): NCBI GI: 256733652 Blast Desc: [Nectria haematococca mpVI 77-13-4]
  misc_feature (1)..(761): NCBI GI: 46128521 Blast Desc: FG08638.1 [Gibberella zeae PH-1]
  misc_feature (74)..(761): NCBI GI: 154291685 Blast Desc: BC1G_15133 [Botryotinia fuckeliana B05.10] gi|150846633|gb|EDN21826.1| BC1G_15133 [Botryotinia fuckeliana B05.10]
  misc_feature (102)..(761): NCBI GI: 145609704 Blast Desc: MGG_03048 [Magnaporthe grisea 70-15] gi|145017103|gb|EDK01466.1| MGG_03048 [Magnaporthe grisea 70-15]
  misc_feature (90)..(733): NCBI GI: 261353473 Blast Desc: beta-chimaerin [Verticillium albo-atrum VaMs.102]
  misc_feature (99)..(761): NCBI GI: 156056519 Blast Desc: SS1G_03990 [Sclerotinia sclerotiorum 1980] gi|154701776|gb|EDO01515.1| SS1G_03990 [Sclerotinia sclerotiorum 1980]
  misc_feature (63)..(761): NCBI GI: 149210741 Blast Desc: MGCH7_ch7g843 [Magnaporthe grisea 70-15] gi|86196798|gb|EAQ71436.1| MGCH7_ch7g843 [Magnaporthe grisea 70-15]
  misc_feature (71)..(761): NCBI GI: 238845605 Blast Desc: beta-chimaerin [Microsporum canis CBS 113480]
  misc_feature: Useful for introducing or modulating the production of volatile compounds
MADFSRASLDQTSPQNPDYDRTMSLTNAPSPGPENGAASAATHQPETAPGNPADDAMPDSSPTAPVPGAKTELSQRAQEVLGSDIGVLTMLNRLKQSIASAKEFAGFLKERSKLEEVHARGLKKMCSPIHHQDHRQGTFARAYDEMLQIHERMAENGTQFALSLHHMQEDLLEVANVAEKHRKGWKQNGLEAERRLADIETAMRKSKTKYDSLAEEYDRVKTGEAKQGPRVFGIKGPKSAAQQEEDLLRKTQAADTDYMGKVQTYLSEKATMEATTRPEAIRALQDTIRECDAGTTLQLQKFAASFNEKLLLSNGLVISPLKNATGPGQFSRSLKEVIHGIDNRKDLEDYVTSCYTKLPPKQPEPKYERNPVLNPQPNMSLNQATQMGRPPSQQQAPSQMLPPIQTQMQPPGTLGRTGTGTFDTASPMGQNSPGQTFNPPAMSAGQRTNSNLGQGHERSQSHGAMLTQASGAPGPSNQPYSVRNSSHGLPPQQSRFNGGGVSSPMGPASQGGPPQLGALSFQTQQSRNQSPPQGGPSPYGAPAQLQDPRPSSPARMPPSGGNRQVFGITLGRLYERDQFAVPMVVHQCIQAVNLYGLAVEGIYRLSGSAVHVNKLKNLFDSNQESHVLDFRNPENFFHDVNSVAGLLKQFLRDLPDPLLTSENYSAFIEAAKHDDDIVRRDSMHAIINGLPDPNYATLRALALHLHRVMENSSVNRMSSQNLAIVFGPTLMGTGANIGDAAWHVRVVDTILQNTYQIFDED

SEQ ID NO: 1773 - DNA, 3437 bp, Muscodor strobelii; identical to SEQ ID NO: 1770
  misc_feature: SGI EST ID NO. CUFF.4639.0
  misc_feature: Variant of the nucleotide sequence at SEQ ID NO 1771

SEQ ID NO: 1774 - DNA, 996 bp, Muscodor strobelii
  misc_feature: SGI cDNA ID NO. 560203
  misc_feature: Elevated expression when VOC is produced
  misc_feature: Encodes the peptide sequence at SEQ ID NO 1775
atgactagcacgacagcctctaccgcagagtatctagccgaggatcgacgtccactagtcaatactttctatgctcttcccatacctctcgagatcatcagcactctctttcggcttcgggtcaagacaagccggcgatcggaagggactcttggatctgacgactttttgatcgtatgggcaactgttactggcgtggctgaatgtattgctggtcttgtttatggtgcgccgcatggcctcggtcgtcatgtcgagacacttaaaccggaagatgtgtcaacatatcttcagggcgattatatcttcagtcacttttacgattttgcgatcgtcagtacgaagctttctgtacttgcgctttactaccgcatttttatcacaacaaagacaagagttgtaatttcacttaccgctgccctcgtgtttacttggcttatcgcaatggaaattgtgctcggtctcggctgtcagcccatacaaggctggtgggatccttcgcaggctgctaccgccagatgtgtcgacaaagttgcattcacctactcaacaaatatactaaatctcattttcgatctctggatattctcaatgcctattccaatcatattgagtttgaacatgcacaaggggaggcaagtcgcactctgcctgcttttctccatcggcctcggtgtctgcgctatcagcatcgcccgtctctctgttgtcttctcagccgcatctaatgatgttacttggcaggaggtgccattagattttccatcaacacgacgggaagactcagggactatcgactggatcaggttggatggcgccgacaacaggggttttgatagatttcctactatatctgctagcaggctaagggaactcgacacgatcgatagaatcgatgtcactagcgggtcgaagcgcaatatgggacatatctataacttcgataacgacaagagcgatagtccaactgttgaatctcaaactggctttcgttga

SEQ ID NO: 1775 - protein, 331 aa, Muscodor strobelii
  misc_feature: SGI Peptide ID NO. 560203
  misc_feature (1)..(256): NCBI GI: 145234380 Blast Desc: An02g14300 [Aspergillus niger] gi|134057507|emb|CAK48861.1| protein product [Aspergillus niger]
  misc_feature (6)..(252): NCBI GI: 146324205 Blast Desc: integral membrane protein PTH11-like [Aspergillus fumigatus Af293] gi|129558016|gb|EBA27428.1| integral membrane protein PTH11-like, [Aspergillus fumigatus Af293]
  misc_feature (6)..(252): NCBI GI: 159126992 Blast Desc: conserved [Aspergillus fumigatus A1163]
  misc_feature (1)..(252): NCBI GI: 121717234 Blast Desc: conserved [Aspergillus clavatus NRRL 1] gi|119404205|gb|EAW14622.1| conserved [Aspergillus clavatus NRRL 1]
  misc_feature (14)..(252): NCBI GI: 169597711 Blast Desc: SNOG_01643 [Phaeosphaeria nodorum SN15] gi|160707575|gb|EAT91292.2| SNOG_01643 [Phaeosphaeria nodorum SN15]
  misc_feature (81)..(252): NCBI GI: 67900838 Blast Desc: AN7406.2 [Aspergillus nidulans FGSC A4] gi|40742587|gb|EAA61777.1| AN7406.2 [Aspergillus nidulans FGSC A4] gi|259483231|tpe|CBF78443.1| TPA: integral membrane protein
  misc_feature (6)..(252): NCBI GI: 115402301 Blast Desc: conserved [Aspergillus terreus NIH2624] gi|114189073|gb|EAU30773.1| conserved [Aspergillus terreus NIH2624]
  misc_feature (8)..(252): NCBI GI: 145249278 Blast Desc: An14g03530 [Aspergillus niger] gi|134081656|emb|CAK46590.1| protein product [Aspergillus niger]
  misc_feature (12)..(250): NCBI GI: 145236936 Blast Desc: An07g00220 [Aspergillus niger] gi|134075580|emb|CAK39246.1| protein product [Aspergillus niger]
  misc_feature (50)..(250): NCBI GI: 116198753 Blast Desc: CHGG_07532 [Chaetomium globosum CBS 148.51] gi|88178811|gb|EAQ86279.1| CHGG_07532 [Chaetomium globosum CBS 148.51]
  misc_feature: Useful for introducing or modulating the production of volatile compounds
MTSTTASTAEYLAEDRRPLVNTFYALPIPLEIISTLFRLRVKTSRRSEGTLGSDDFLIVWATVTGVAECIAGLVYGAPHGLGRHVETLKPEDVSTYLQGDYIFSHFYDFAIVSTKLSVLALYYRIFITTKTRVVISLTAALVFTWLIAMEIVLGLGCQPIQGWWDPSQAATARCVDKVAFTYSTNILNLIFDLWIFSMPIPIILSLNMHKGRQVALCLLFSIGLGVCAISIARLSVVFSAASNDVTWQEVPLDFPSTRREDSGTIDWIRLDGADNRGFDRFPTISASRLRELDTIDRIDVTSGSKRNMGHIYNFDNDKSDSPTVESQTGFR

SEQ ID NO: 1776 - DNA, 1481 bp, Muscodor strobelii
  misc_feature: SGI EST ID NO. CUFF.4634.0
  misc_feature: Variant of the nucleotide sequence at SEQ ID NO 1774
caggcttttaattgatctatcagaattcgatcttgcgctctaatcttgcttttcgctttcgagtgtgaacattccagctcctgcttatgtacagactcgcaatgccattaatgactatcaaaatgactagcacgacagcctctaccgcagagtatctagccgaggatcgacgtccactagtcaatactttctatgctcttcccatacctctcgagatcatcagcactctctttcggcttcgggtcaagacaagccggcgatcggaagggactcttggatctgacgactttttgatcgtatgggcaactgttactggcgtggctgaatgtattgctggtcttgtttatggtgcgccgcatggcctcggtcgtcatgtcgagacacttaaaccggaagatgtgtcaacatatcttcagggcgattatatcttcagtcacttttacgattttgcgatcgtcagtacgaagctttctgtacttgcgctttactaccgcatttttatcacaacaaagacaagagttgtaatttcacttaccgctgccctcgtgtttacttggcttatcgcaatggaaattgtgctcggtctcggctgtcagcccatacaaggctggtgggatccttcgcaggctgctaccgccagatgtgtcgacaaagttgcattcacctactcaacaaatatactaaatctcattttcgatctctggatattctcaatgcctattccaatcatattgagtttgaacatgcacaaggggaggcaagtcgcactctgcctgcttttctccatcggcctcggtgtctgcgctatcagcatcgcccgtctctctgttgtcttctcagccgcatctaatgatgttacttggcaggaggtgccattaggtattttatctgcgtgggagccgtgcggcgccattctttgcgccaaccttcctattatttaccgaacactatgcgatgaatattctcgtgtgaaaattagctttttgcgttctgatactactagaaatgacgtagattttccatcaacacgacgggaagactcagggactatcgactggatcaggttggatggcgccgacaacaggggttttgatagatttcctactatatctgctagcaggctaagggaactcgacacgatcgatagaatcgatgtcactagcgggtcgaagcgcaatatgggacatatctataacttcgataacgacaagagcgatagtccaactgttgaatctcaaactggctttcgttgatcagggtaaaggaactttacaacaggccctaatgtgaacctttttgtttcgttctctatgcgttttgaacggcgtttcctcgtatagaatgtgacaacacgcaaggatgtgcctaggtagttgaaagggggcaggttagaggctgactaccaccgccagtgtcatcattgggaatcacaagtgtatctaactcaatgccagtgtcatcctcgagtgtagaagaatgga

SEQ ID NO: 1777 - DNA, 1803 bp, Muscodor strobelii
  misc_feature: SGI cDNA ID NO. 560204
  misc_feature: Elevated expression when VOC is produced
  misc_feature: Encodes the peptide sequence at SEQ ID NO 1778
atgattcgatctgtcacctgtttcgccttgctagtgattgcagtgagatgtcaagcaagtacgcaagccgccaaaaccttaccttcgaacactttgcctgttgtcgatcttgggtatgccacctatgaaggttattataacgataccttccaattgaatatctggaaaagtgtacgttatgccgcgccaccagtagggaaccgtcgatggcaagcaccctcgcccgccctgtacgataacgatcgcatcacatctgctatcgctcagccacccttatgcccccaatccggagcatttggagtccccgaggtatatcagtttaattctgctctcggaaatgaagactgtctattcgtgaatatatatgctgcgccgaacgcgactaagctacctgtattggtatggtttcatggcggtggccattcggtatttggtgcattgtatgacccgagcgcatggatgaacacgaattacaatggatttatcgtcgttgaagtgcagtatagacttggagcctttggcttccttgcatctccagaagtaaaagaacaaggccaactcaacgcgggtttgcttgatcagcgatattctatcgagtggacgcgccggtacatcgaaaaattcggtggcgatcctgaccgcattactatcggcggcgagtcctcaggcgcagcttctacgttgtttcacgctatggcatatggcggagacgacacggggcttttcgaaaacattatagctgccagtccttactttccgacggtctacaactactctgatcactttcccagagtcaggtatgaaaagttcgttgagcttgccggttgcagctcgccaaagaggcactcaacctcattcgactgtcttgtcgcggcggataccaccattttgcaaaatgcgagcgggacggtgtccacgactataggatatttcggcagtttcgcattcttaccggtgattgacgatgactatattcaagaacgtccgtctcttcagctccttcgtggcaaagtcgccgggaagcgtgttcttgtcggaaataacgcgaatgatggagttcctctattcaatcccgatgtctcgaccaagtctcaatatgacaacttcgtagccgagacatttccccttttcactcaatcagatgtttccagactcaatagcatatacggagtgaacgctcaatcgattcccgacaatggcatcgtttttgatacgcttggttcttctggaccaacagcaataaaccagtccggcatcgcaacgggcattcagcaaactgtatttaacattgcagcagaaacaattttcgactgccctgcgcagtggattgcagaagcattcagcaaggattgcaagcaagcttggaagtatcaatactctgtgacgccttcataccatggcgcagatctctcatcatatttctcggtcggccaatcaataccaagcgcggaattccagcacgcgatgcaaaagagttggggaaacttcatcattcacaatactccagttatctcagtctcggatgcgacaggtggttatacgaacgcgtcggttcccgtcgcaggacagagcgccaatatccactggccacaattctcattggaacttccggttcagatgaatctgaataccactggtggagatgtcgatttattgactgtgaccgataaactcgcctactatgttcgatcgggagcagggcaagtgaacaatttcagtctcgctgatgctatattatgggagggtggccgtgggaagcgatgcgacttttggcggagtgtgtcagcgagagtgccacagtag

SEQ ID NO: 1778 - protein, 600 aa, Muscodor strobelii
  misc_feature: SGI Peptide ID NO. 560204
  misc_feature (5)..(561): Pfam Id: PF00135 Pfam Desc: Carboxylesterase
  misc_feature (5)..(352): Pfam Id: PF00135 Pfam Desc: Carboxylesterase
  misc_feature (34)..(598): NCBI GI: 70997057 Blast Desc: carboxylesterase [Aspergillus fumigatus Af293] gi|66850919|gb|EAL91245.1| carboxylesterase, [Aspergillus fumigatus Af293] gi|159126991|gb|EDP52107.1| carboxylesterase,
  misc_feature (33)..(590): NCBI GI: 145234378 Blast Desc: An02g14290 [Aspergillus niger] gi|134057506|emb|CAK48860.1| protein product [Aspergillus niger]
  misc_feature (28)..(599): NCBI GI: 121717237 Blast Desc: carboxylesterase family protein [Aspergillus clavatus NRRL 1] gi|119404206|gb|EAW14623.1| carboxylesterase family protein [Aspergillus clavatus NRRL 1]
  misc_feature (33)..(599): NCBI GI: 169777437 Blast Desc: [Aspergillus oryzae RIB40] gi|83771921|dbj|BAE62051.1| protein product [Aspergillus oryzae]
  misc_feature (33)..(599): NCBI GI: 238494574 Blast Desc: carboxylesterase, [Aspergillus flavus NRRL3357] gi|220695173|gb|EED51516.1| carboxylesterase, [Aspergillus flavus NRRL3357]
  misc_feature (33)..(599): NCBI GI: 115402299 Blast Desc: conserved [Aspergillus terreus NIH2624] gi|114189072|gb|EAU30772.1| conserved [Aspergillus terreus NIH2624]
  misc_feature (58)..(599): NCBI GI: 67900840 Blast Desc: AN7407.2 [Aspergillus nidulans FGSC A4] gi|40742588|gb|EAA61778.1| AN7407.2 [Aspergillus nidulans FGSC A4] gi|259483230|tpe|CBF78441.1| TPA: carboxylesterase, nidulans
  misc_feature (1)..(599): NCBI GI: 169597709 Blast Desc: SNOG_01642 [Phaeosphaeria nodorum SN15] gi|111070171|gb|EAT91291.1| SNOG_01642 [Phaeosphaeria nodorum SN15]
  misc_feature (35)..(599): NCBI GI: 189190722 Blast Desc: acetylcholinesterase precursor [Pyrenophora tritici-repentis Pt-1C-BFP] gi|187973306|gb|EDU40805.1| acetylcholinesterase precursor [Pyrenophora tritici-repentis
  misc_feature (7)..(600): NCBI GI: 242777825 Blast Desc: carboxylesterase, [Talaromyces stipitatus ATCC 10500] gi|218722731|gb|EED22149.1| carboxylesterase, [Talaromyces stipitatus ATCC 10500]
  misc_feature (51)..(476): SWISSPROT Homolog: EC 3.1.1.3 Triacylglycerol lipase
  misc_feature: Useful for introducing or modulating the production of volatile compounds
MIRSVTCFALLVIAVRCQASTQAAKTLPSNTLPVVDLGYATYEGYYNDTFQLNIWKSVRYAAPPVGNRRWQAPSPALYDNDRITSAIAQPPLCPQSGAFGVPEVYQFNSALGNEDCLFVNIYAAPNATKLPVLVWFHGGGHSVFGALYDPSAWMNTNYNGFIVVEVQYRLGAFGFLASPEVKEQGQLNAGLLDQRYSIEWTRRYIEKFGGDPDRITIGGESSGAASTLFHAMAYGGDDTGLFENIIAASPYFPTVYNYSDHFPRVRYEKFVELAGCSSPKRHSTSFDCLVAADTTILQNASGTVSTTIGYFGSFAFLPVIDDDYIQERPSLQLLRGKVAGKRVLVGNNANDGVPLFNPDVSTKSQYDNFVAETFPLFTQSDVSRLNSIYGVNAQSIPDNGIVFDTLGSSGPTAINQSGIATGIQQTVFNIAAETIFDCPAQWIAEAFSKDCKQAWKYQYSVTPSYHGADLSSYFSVGQSIPSAEFQHAMQKSWGNFIIHNTPVISVSDATGGYTNASVPVAGQSANIHWPQFSLELPVQMNLNTTGGDVDLLTVTDKLAYYVRSGAGQVNNFSLADAILWEGGRGKRCDFWRSVSARVPQ

SEQ ID NO: 1779 - DNA, 4020 bp, Muscodor strobelii
  misc_feature: SGI EST ID NO. CUFF.4636.0
  misc_feature: Variant of the nucleotide sequence at SEQ ID NO 1777
cggatatgactacaggaagacatatatgcattgcagtgtttttcctattcctgaccaagctatacccctaagcactcgcaaagatgctccgagaaccagtgttagccgacggccacctgcatgttgctttcaatctcctgcagccatattgctccactcgccgtatcgaaaatgagcgtaccaatacgccgggtccagcttctagaattttattcgcaatcaatttcatcttgcatacaatctcgcatttgccggggtcagttttccaaatcgatctgcatagaaatctcctcattatgtctcccccgcctgcgtcctagcaactagtgattatcttgtctaggcagtgcgttgtcgcgtctcccaccccaacgcgttcataagcgaacggcgacagcaactccctgaccagttgcgcatcattccatatatcgttgacttttgcatactgccgagtcgtttgccaagttgtgtctcgttgtcgcattcttcttttgacgtacttggccagaaccatgattcgatctgtcacctgtttcgccttgctagtgattgcagtgagatgtcaagcaagtacgcaagccgccaaaaccttaccttcgaacactttgcctgttgtcgatcttgggtatgccacctatgaaggttattataacgataccttccaattgaatatctggaaaagtgtacgttatgccgcgccaccagtagggaaccgtcgatggcaagcaccctcgcccgccctgtacgataacgatcgcatcacatctgctatcgctcagccacccttatgcccccaatccggagcatttggagtccccgaggtatatcagtttaattctgctctcggaaatgaagactgtctattcgtgaatatatatgctgcgccgaacgcgactaagctacctgtattggtatggtttcatggcggtggccattcggtatttggtgcattgtatgacccgagcgcatggatgaacacgaattacaatggatttatcgtcgttgaagtgcagtatagacttggagcctttggcttccttgcatctccagaagtaaaagaacaaggccaactcaacgcgggtttgcttgatcagcgatattctatcgagtggacgcgccggtacatcgaaaaattcggtggcgatcctgaccgcattactatcggcggcgagtcctcaggcgcagcttctacgttgtttcacgctatggcatatggcggagacgacacggggcttttcgaaaacattatagctgccagtccttactttccgacggtctacaactactctgatcactttcccagagtcaggtatgaaaagttcgttgagcttgccggttgcagctcgccaaagaggcactcaacctcattcgactgtcttgtcgcggcggataccaccattttgcaaaatgcgagcgggacggtgtccacgactataggatatttcggcagtttcgcattcttaccggtgattgacgatgactatattcaagaacgtccgtctcttcagctccttcgtggcaaagtcgccgggaagcgtgttcttgtcggaaataacgcgaatgatggagttcctctattcaatcccgatgtctcgaccaagtctcaatatgacaacttcgtagccgagacatttccccttttcactcaatcagatgtttccagactcaatagcatatacggagtgaacgctcaatcgattcccgacaatggcatcgtttttgatacgcttggttcttctggaccaacagcaataaaccagtccggcatcgcaacgggcattcagcaaactgtatttaacattgcagcagaaacaattttcgactgccctgcgcagtggattgcagaagcattcagcaaggattgcaagcaagcttggaagtatcaatactctgtgacgccttcataccatggcgcagatctctcatcatatttctcggtcggccaatcaataccaagcgcggaattccagcacgcgatgcaaaagagttggggaaacttcatcattcacaatactccagttatctcagtctcggatgcgacaggtggttatacgaacgcgtcggttcccgtcgcaggacagagcgccaatatccactggccacaattctcattggaacttccggttcagatgaatctgaataccactggtggagatgtcgatttattgactgtgaccgataaactcgcctactatgttcgatcgggagcagggcaagtgaacaatttcagtctcgctgatgctatattatgggagggtggccgtgggaagcgatgcgacttttggcggagtgtgtcagcgagagtgccacagtagatgcaatacgtaacctatataatatgattgaagcagctaatttttagatcacctcaattctgaaggaaatgagttgatgagtttcaggccgtgtttctgtataaacatacggatttatgataagtgggcgaatcagcagtgtttaataactagtcatccaattctgacatcgtatcgtagaagattgtgtcgagtgtatatgtctttcataaacaccaattgatgcctattcatactcctatcattttacacaaagcaccgagaggcctttcaacttcaacggtcttgctctcggcctcccattatgttgtcgcaaggcaaatgccgcttttggtacaacccttgtcaaatttgtggagggacgtaagcagacgcgcatgagcaactaagggacattcgatcatcccttcttgcagccatctcagcattcaagaaaattctacagatcttctcacatcgcgatgagatcaatattattggcatatacattcctcatcttaccaaataccataataccggcttctgggctttgcggcgcgcacacatacctagaccaacgcgatgcaacaacctccaataatcccagttctgttcccctcgcagagtttgggtacttagggcccaaagggccgctgatgtggcatcgccttgatgccgccaattctctatgcgcccacgggcggcaccaatcaccaatcaatctggttcctagcacatatacactgattccagcctcgagcttaaccatctctttgcccgatgacgtgccaaagggggcgactttcgagaacctgggttctaccatcgaagttgtgatggaaggactcggagggtttctgattctagaggatttggagtacgagttgcgccaattccattttcatactccaagcgaacaccttgtcgacggcattaacctgcctatggagatgcacatggtgtttcaaaacgaggacaagaggaaaatagccgtcgtcggcatcttcgtcgatgttattgagaccaagttatcatcaactcaagataaccagcgctatcctcgcgtgtcagatatgctcgagacgatcttccgttcagtagacgatatcgccataccaggcaacataaccacacctcgacctttctgcatgactgagcttaacgccatgttgaacgcgacagattttaggcattattcaggttccttgaccacgccgccatgtgcagagggcttgttctgggtagtgcccgttgaaaaactgtctctcgctcgaagcacctttgagaatgttcgtagaatcattggattcaattctcgtgtgacacaaaacgtccctggaatgccaaatttgctggagatggcgggcgtcatgcctaactttgtgacgtggtatgatacacaaactcctatacagatgtctcgacatgaacgaggttaatatgcacttagtctgtcatacggcaatgctagacatccatctaatctcatgatacttgttggaaagatttcaagttgtctattaatggatttagttcaaataccaacgtattgaggttcgaattatgatattgggtgcttaagcatgggatccgtgctactgacagaattgaatgttgtgcaatgcttttcggcaataataggctctattttgttgatgatggctttacggtcatgcacagttgcgtcctaatttctttgcgccactactattctagattcata

SEQ ID NO: 1780 - DNA, 339 bp, Muscodor strobelii
  misc_feature: SGI cDNA ID NO. 560205
  misc_feature: Elevated expression when VOC is produced
  misc_feature: Encodes the peptide sequence at SEQ ID NO 1781
atgcaaaagagttggggaaacttcatcattcacaatactccagttatctcagtctcggatgcgacaggtggttatacgaacgcgtcggttcccgtcgcaggacagagcgccaatatccactggccacaattctcattggaacttccggttcagatgaatctgaataccactggtggagatgtcgatttattgactgtgaccgataaactcgcctactatgttcgatcgggagcagggcaagtgaacaatttcagtctcgctgatgctatattatgggagggtggccgtgggaagcgatgcgacttttggcggagtgtgtcagcgagagtgccacagtag

SEQ ID NO: 1781 - protein, 112 aa, Muscodor strobelii
  misc_feature: SGI Peptide ID NO. 560205
  misc_feature (1)..(111): NCBI GI: 115402299 Blast Desc: conserved [Aspergillus terreus NIH2624] gi|114189072|gb|EAU30772.1| conserved [Aspergillus terreus NIH2624]
  misc_feature (1)..(111): NCBI GI: 67900840 Blast Desc: AN7407.2 [Aspergillus nidulans FGSC A4] gi|40742588|gb|EAA61778.1| AN7407.2 [Aspergillus nidulans FGSC A4] gi|259483230|tpe|CBF78441.1| TPA: carboxylesterase, nidulans
  misc_feature (1)..(110): NCBI GI: 70997057 Blast Desc: carboxylesterase [Aspergillus fumigatus Af293] gi|66850919|gb|EAL91245.1| carboxylesterase, [Aspergillus fumigatus Af293] gi|159126991|gb|EDP52107.1| carboxylesterase,
  misc_feature (1)..(111): NCBI GI: 121717237 Blast Desc: carboxylesterase family protein [Aspergillus clavatus NRRL 1] gi|119404206|gb|EAW14623.1| carboxylesterase family protein [Aspergillus clavatus NRRL 1]
  misc_feature (1)..(111): NCBI GI: 169777437 Blast Desc: [Aspergillus oryzae RIB40] gi|83771921|dbj|BAE62051.1| protein product [Aspergillus oryzae]
  misc_feature (1)..(111): NCBI GI: 238494574 Blast Desc: carboxylesterase, [Aspergillus flavus NRRL3357] gi|220695173|gb|EED51516.1| carboxylesterase, [Aspergillus flavus NRRL3357]
  misc_feature (5)..(111): NCBI GI: 169597709 Blast Desc: SNOG_01642 [Phaeosphaeria nodorum SN15] gi|111070171|gb|EAT91291.1| SNOG_01642 [Phaeosphaeria nodorum SN15]
  misc_feature (1)..(101): NCBI GI: 145234378 Blast Desc: An02g14290 [Aspergillus niger] gi|134057506|emb|CAK48860.1| protein product [Aspergillus niger]
  misc_feature (5)..(111): NCBI GI: 189190722 Blast Desc: acetylcholinesterase precursor [Pyrenophora tritici-repentis Pt-1C-BFP] gi|187973306|gb|EDU40805.1| acetylcholinesterase precursor [Pyrenophora tritici-repentis
  misc_feature (1)..(111): NCBI GI: 169615693 Blast Desc: SNOG_11009 [Phaeosphaeria nodorum SN15] gi|160703021|gb|EAT81508.2| SNOG_11009 [Phaeosphaeria nodorum SN15]
  misc_feature: Useful for introducing or modulating the production of volatile compounds
MQKSWGNFIIHNTPVISVSDATGGYTNASVPVAGQSANIHWPQFSLELPVQMNLNTTGGDVDLLTVTDKLAYYVRSGAGQVNNFSLADAILWEGGRGKRCDFWRSVSARVPQ

SEQ ID NO: 1782 - DNA, 4020 bp, Muscodor strobelii; identical to SEQ ID NO: 1779
  misc_feature: SGI EST ID NO. CUFF.4636.0
  misc_feature: Variant of the nucleotide sequence at SEQ ID NO 1780

SEQ ID NO: 1783 - DNA, 957 bp, Muscodor strobelii
  misc_feature: SGI cDNA ID NO. 560206
  misc_feature: Encodes the peptide sequence at SEQ ID NO 1784
atgagatcaatattattggcatatacattcctcatcttaccaaataccataataccggcttctgggctttgcggcgcgcacacatacctagaccaacgcgatgcaacaacctccaataatcccagttctgttcccctcgcagagtttgggtacttagggcccaaagggccgctgatgtggcatcgccttgatgccgccaattctctatgcgcccacgggcggcaccaatcaccaatcaatctggttcctagcacatatacactgattccagcctcgagcttaaccatctctttgcccgatgacgtgccaaagggggcgactttcgagaacctgggttctaccatcgaagttgtgatggaaggactcggagggtttctgattctagaggatttggagtacgagttgcgccaattccattttcatactccaagcgaacaccttgtcgacggcattaacctgcctatggagatgcacatggtgtttcaaaacgaggacaagaggaaaatagccgtcgtcggcatcttcgtcgatgttattgagaccaagttatcatcaactcaagataaccagcgctatcctcgcgtgtcagatatgctcgagacgatcttccgttcagtagacgatatcgccataccaggcaacataaccacacctcgacctttctgcatgactgagcttaacgccatgttgaacgcgacagattttaggcattattcaggttccttgaccacgccgccatgtgcagagggcttgttctgggtagtgcccgttgaaaaactgtctctcgctcgaagcacctttgagaatgttcgtagaatcattggattcaattctcgtgtgacacaaaacgtccctggaatgccaaatttgctggagatggcgggcgtcatgcctaactttgtgacgtggtatgatacacaaactcctatacagatgtctcgacatgaacgaggttaa

SEQ ID NO: 1784 - protein, 318 aa, Muscodor strobelii
  misc_feature: SGI Peptide ID NO. 560206
  misc_feature (49)..(300): Pfam Id: PF00194 Pfam Desc: Eukaryotic-type carbonic anhydrase
  misc_feature (238)..(265): Pfam Id: PF00194 Pfam Desc: Eukaryotic-type carbonic anhydrase
  misc_feature (133)..(166): Pfam Id: PF00194 Pfam Desc: Eukaryotic-type carbonic anhydrase
  misc_feature (48)..(295): NCBI GI: 256729568 Blast Desc: NECHADRAFT_63216 [Nectria haematococca mpVI 77-13-4]
  misc_feature (24)..(291): NCBI GI: 171682730 Blast Desc: protein product [Podospora anserina] gi|170941324|emb|CAP66974.1| protein product [Podospora anserina]
  misc_feature (24)..(296): NCBI GI: 116202911 Blast Desc: CHGG_09340 [Chaetomium globosum CBS 148.51] gi|88177858|gb|EAQ85326.1| CHGG_09340 [Chaetomium globosum CBS 148.51]
  misc_feature (43)..(291): NCBI GI: 46139161 Blast Desc: FG11095.1 [Gibberella zeae PH-1]
  misc_feature (8)..(293): NCBI GI: 46117522 Blast Desc: FG04603.1 [Gibberella zeae PH-1]
  misc_feature (3)..(293): NCBI GI: 39952099 Blast Desc: MGG_01692 [Magnaporthe grisea 70-15] gi|145020466|gb|EDK04595.1| MGG_01692 [Magnaporthe grisea 70-15]
  misc_feature (17)..(295): NCBI GI: 238844038 Blast Desc: periplasmic alpha-carbonic anhydrase [Microsporum canis CBS 113480]
  misc_feature (44)..(294): NCBI GI: 261360339 Blast Desc: carbonic anhydrase [Verticillium albo-atrum VaMs.102]
  misc_feature (49)..(295): NCBI GI: 212536242 Blast Desc: carbonic anhydrase, [Penicillium marneffei ATCC 18224] gi|210070676|gb|EEA24766.1| carbonic anhydrase, [Penicillium marneffei ATCC 18224]
  misc_feature (41)..(298): NCBI GI: 170098596 Blast Desc: [Laccaria bicolor S238N-H82] gi|164644955|gb|EDR09204.1| [Laccaria bicolor S238N-H82]
  misc_feature (49)..(280): SWISSPROT Homolog: EC 4.2.1.1 Carbonate dehydratase
MRSILLAYTFLILPNTIIPASGLCGAHTYLDQRDATTSNNPSSVPLAEFGYLGPKGPLMWHRLDAANSLCAHGRHQSPINLVPSTYTLIPASSLTISLPDDVPKGATFENLGSTIEVVMEGLGGFLILEDLEYELRQFHFHTPSEHLVDGINLPMEMHMVFQNEDKRKIAVVGIFVDVIETKLSSTQDNQRYPRVSDMLETIFRSVDDIAIPGNITTPRPFCMTELNAMLNATDFRHYSGSLTTPPCAEGLFWVVPVEKLSLARSTFENVRRIIGFNSRVTQNVPGMPNLLEMAGVMPNFVTWYDTQTPIQMSRHERG

SEQ ID NO: 1785 - DNA, 4020 bp, Muscodor strobelii; identical to SEQ ID NO: 1779
  misc_feature: SGI EST ID NO. CUFF.4636.0
  misc_feature: Variant of the nucleotide sequence at SEQ ID NO 1783

SEQ ID NO: 1786 - DNA, 1842 bp, Muscodor strobelii
  misc_feature: SGI cDNA ID NO. 560207
  misc_feature: Encodes the peptide sequence at SEQ ID NO 1787
atgcgacttctccatgttgaaacgctagctctgcaggagttcttcgattcggatgtgcccaagtacgctgtgctgtctcatacctgggagaaggaagaagtactctttaaggatattcagaaccccgcagaagcaaaggagaaattggggtttgagaaagtcaagatggcatgcgaattagcaagccaccagggctatgagtacatctggatcgatacgtgttgcattgacaaatcaagcagcgcagaactaactgaagcgatcaactctatgtaccgttggtacaaggagtccgatgtctgcctggcttttctaagtgacgtagacgatgccgatctcgacacagaaaacctcatcgctgatgaaggcacaggcttcacgttgcctgagactgcattacactgcagccgctggttcacaagaggctggaccctacaggagttgttagctcccgacaacgtccatttctacaactcaaattggagatcgatcggcaataagaaagacgatcctctgtgttcgattatttccgacatcacgaaaattgatcaggctactctacgaggacatgacatatacgatatcagtattgcaagacggatgtattgggcctcagggagacaaaccactagaattgaggatctcgcttattccttgctgggtctattcgacatcaatatgcctttgatatatggcgagggtcacaaggcgttccgaagactccaggaggaaatattgaagacgacagatgatcaatctattttcgcgtggcatagagataatgcagagggattgccaatggatatcttggcacattccccgtcggattttgcgcagtcaggaacaatatccccttatgccccctttagagccggtcgcaaagcaacgtcaatcaccaatcaaggaatagcagtcgagcttccggttctctctattcctctaccacttcacacagaatacacacctttcgaagaaatagacgctatattggactgccaactaggtagtgctccaggcacgttccccacgatccggttgaaatccgtcgaaacaggagggaataaaactgcaagacactattaccgagttatgacggagggcatgaccaagatcgagtatcacaaccacctcgatttaatcaatggcgatgtaattgggttcgatccgacgaggcttgaccaagatatctacaggcgcaccatagtcccatggtcgctttcactgcttgcccacgattatccgccggacgacactcctttctggctcgcactattctctgcaacttcgtttaccaacctgtatatcgacgcaatgcatccaaaagatagatgggatgcgtctactcgacagcttcgagttgctccccttatgccaaaatctgtgtggaaagggcgcatgtgccagattgaaggtctcttcgatttacgtgttgacacagctttatacagcgcaaattctccaggtttcaaggcgacgttaatcactggtcgtcaatcttttaatagaagagattctcatcttcaaccttggtgccaaatcaaagtcccagcgatcaaagacaaatttacggagtatatggatgtctttaatgacaaagaccatgatttacactcctttatgcgcagtttgcaggattctgactcttgtgaggtcgagttcaacaataggaagatcgagctgggggcaagtgttcgggcagtagatgtctccgggcggttctattatatgatcagtgtttctatacgtgaccttacgcatagtgtggatgacggactagtgctccttaacggcaaacctgatcgaatgcgctttgtcgataggaaggtccatagtcttggctag

SEQ ID NO: 1787 - protein, 613 aa, Muscodor strobelii
  misc_feature: SGI Peptide ID NO. 560207
  misc_feature (22)..(147): Pfam Id: PF06985 Pfam Desc: Heterokaryon incompatibility protein (HET)
  misc_feature (22)..(124): Pfam Id: PF06985 Pfam Desc: Heterokaryon incompatibility protein (HET)
  misc_feature (136)..(147): Pfam Id: PF06985 Pfam Desc: Heterokaryon incompatibility protein (HET)
  misc_feature (1)..(455): NCBI GI: 121715886 Blast Desc: HET domain protein [Aspergillus clavatus NRRL 1] gi|119403709|gb|EAW14126.1| HET domain protein [Aspergillus clavatus NRRL 1]
  misc_feature (1)..(360): NCBI GI: 171683732 Blast Desc: protein product [Podospora anserina] gi|170941826|emb|CAP67479.1| protein product [Podospora anserina]
  misc_feature (1)..(367): NCBI GI: 256720502 Blast Desc: NECHADRAFT_55867 [Nectria haematococca mpVI 77-13-4]
  misc_feature (1)..(506): NCBI GI: 71001840 Blast Desc: HET domain protein [Aspergillus fumigatus Af293] gi|66853239|gb|EAL93563.1| HET domain protein [Aspergillus fumigatus Af293] gi|159129660|gb|EDP54774.1| HET domain protein
  misc_feature (1)..(309): NCBI GI: 169780438 Blast Desc: [Aspergillus oryzae RIB40] gi|83773423|dbj|BAE63550.1| protein product [Aspergillus oryzae]
  misc_feature (1)..(311): NCBI GI: 164425178 Blast Desc: NCU06304 [Neurospora crassa OR74A] gi|157070820|gb|EAA33330.2| conserved [Neurospora crassa OR74A]
  misc_feature (1)..(315): NCBI GI: 238485594 Blast Desc: ankyrin repeat-containing protein, [Aspergillus flavus NRRL3357] gi|220698914|gb|EED55253.1| ankyrin repeat-containing protein, [Aspergillus flavus NRRL3357]
  misc_feature (1)..(324): NCBI GI: 239611724 Blast Desc: HET domain-containing protein [Ajellomyces dermatitidis ER-3]
  misc_feature (1)..(336): NCBI GI: 119481395 Blast Desc: HET domain protein [Neosartorya fischeri NRRL 181] gi|119408880|gb|EAW18829.1| HET domain protein [Neosartorya fischeri NRRL 181]
  misc_feature (1)..(324): NCBI GI: 261201308 Blast Desc: HET domain-containing protein [Ajellomyces dermatitidis SLH14081] gi|239592113|gb|EEQ74694.1| HET domain-containing protein [Ajellomyces dermatitidis SLH14081]
MRLLHVETLALQEFFDSDVPKYAVLSHTWEKEEVLFKDIQNPAEAKEKLGFEKVKMACELASHQGYEYIWIDTCCIDKSSSAELTEAINSMYRWYKESDVCLAFLSDVDDADLDTENLIADEGTGFTLPETALHCSRWFTRGWTLQELLAPDNVHFYNSNWRSIGNKKDDPLCSIISDITKIDQATLRGHDIYDISIARRMYWASGRQTTRIEDLAYSLLGLFDINMPLIYGEGHKAFRRLQEEILKTTDDQSIFAWHRDNAEGLPMDILAHSPSDFAQSGTISPYAPFRAGRKATSITNQGIAVELPVLSIPLPLHTEYTPFEEIDAILDCQLGSAPGTFPTIRLKSVETGGNKTARHYYRVMTEGMTKIEYHNHLDLINGDVIGFDPTRLDQDIYRRTIVPWSLSLLAHDYPPDDTPFWLALFSATSFTNLYIDAMHPKDRWDASTRQLRVAPLMPKSVWKGRMCQIEGLFDLRVDTALYSANSPGFKATLITGRQSFNRRDSHLQPWCQIKVPAIKDKFTEYMDVFNDKDHDLHSFMRSLQDSDSCEVEFNNRKIELGASVRAVDVSGRFYYMISVSIRDLTHSVDDGLVLLNGKPDRMRFVDRKVHSLG

SEQ ID NO: 1788 - DNA, 2308 bp, Muscodor strobelii
  misc_feature: SGI EST ID NO. CUFF.4676.0
  misc_feature: Variant of the nucleotide sequence at SEQ ID NO 1786
ttgggaagttataaacaggactgtcacgcatgggtgtcagctgagcgcttctcagcctttcaattttgagtctcacagaacgcgtgctcgactgggcttgcaccaagcggatacaaaagtgacaatgcgacttctccatgttgaaacgctagctctgcaggagttcttcgattcggatgtgcccaagtacgctgtgctgtctcatacctgggagaaggaagaagtactctttaaggatattcagaaccccgcagaagcaaaggagaaattggggtttgagaaagtcaagatggcatgcgaattagcaagccaccagggctatgagtacatctggatcgatacgtgttgcattgacaaatcaagcagcgcagaactaactgaagcgatcaactctatgtaccgttggtacaaggagtccgatgtctgcctggcttttctaagtgacgtagacgatgccgatctcgacacagaaaacctcatcgctgatgaaggcacaggcttcacgttgcctgagactgcattacactgcagccgctggttcacaagaggctggaccctacaggagttgttagctcccgacaacgtccatttctacaactcaaattggagatcgatcggcaataagaaagacgatcctctgtgttcgattatttccgacatcacgaaaattgatcaggctactctacgaggacatgacatatacgatatcagtattgcaagacggatgtattgggcctcagggagacaaaccactagaattgaggatctcgcttattccttgctgggtctattcgacatcaatatgcctttgatatatggcgagggtcacaaggcgttccgaagactccaggaggaaatattgaagacgacagatgatcaatctattttcgcgtggcatagagataatgcagagggattgccaatggatatcttggcacattccccgtcggattttgcgcagtcaggaacaatatccccttatgccccctttagagccggtcgcaaagcaacgtcaatcaccaatcaaggaatagcagtcgagcttccggttctctctattcctctaccacttcacacagaatacacacctttcgaagaaatagacgctatattggactgccaactaggtagtgctccaggcacgttccccacgatccggttgaaatccgtcgaaacaggagggaataaaactgcaagacactattaccgagttatgacggagggcatgaccaagatcgagtatcacaaccacctcgatttaatcaatggcgatgtaattgggttcgatccgacgaggcttgaccaagatatctacaggcgcaccatagataagcccaactggagttggaaagtcgaaactataatcataacaaggcatgtcccgaaaccgagtcatcaatctgatctgttgccagtcccatggtcgctttcactgcttgcccacgattatccgccggacgacactcctttctggctcgcactattctctgcaacttcgtttaccaacctgtatatcgacgcaatgcatccaaaagatagatgggatgcgtctactcgacagcttcgagttgctccccttatgccaaaatctgtgtggaaagggcgcatgtgccagattgaaggtctcttcgatttacgtgttgacacagctttatacagcgcaaattctccaggtttcaaggcgacgttaatcactggtcgtcaatcttttaatagaagagattctcatcttcaaccttggtgccaaatcaaagtcccagcgatcaaagacaaatttacggagtatatggatgtctttaatgacaaagaccatgatttacactcctttatgcgcagtttgcaggattctgactcttgtgaggtcgagttcaacaataggaagatcgagctgggggcaagtgttcgggcagtagatgtctccgggcggttctattatatgatcagtgtttctatacgtgaccttacgcatagtgtggatgacggactagtgctccttaacggcaaacctgatcgaatgcgctttgtcgataggaaggtccatagtcttggctagtgagacattggcaaatctacatatgccgcctcaagaacactttcccatcagacatgggtcgccggacggtacaagcgaagaaaaagagcaagctccgcagtcaaacagcaatccggccagggaagacagaatagagtatctaacgtattggatagtaaatcccagaaattgcaacgcagcttgccttagctgacaataagacccaatgcatcatccgaatgctgcaagatggtactgatgatagaaaacttacag

SEQ ID NO: 1789 - DNA, 1977 bp, Muscodor strobelii
  misc_feature: SGI cDNA ID NO. 560208
  misc_feature: Reduced expression when VOC is produced
  misc_feature: Encodes the peptide sequence at SEQ ID NO 1790
atggccggagtacaaatttccggcccgctagtcgctagcgatcaaatcggcctacgctgcgagttcaagacataccatacagtgcccaataaggaaggaaagctgagagtgaagcccatcactgacccttttgagtccgagatcagaattgcttccgagaattcatatgctctgatcatcaatagagagttcacggttgaggatcccacgataccaaaagctgtgactctaaaagtaaactctcctcatctgctgactgcgttccgagaggtggtcaaattctatccttccgttggttcggactttaagtcgccgttcgagctaagcagtcctttccaaatgcttgttcactattgggatgagctgaacaactatcgcaacgagatagacgttggtgacgctcgcatgcatctcaatcttttatttgacttcatgaatcacgagattggcccagaacgtcagagactgcttaacatgattggtaacggccagatcacgtacctctctgcttgggttatctatcgacctggcgatcttgtttgtacatctgtcatgggtcatccctggctgatgcgatgtaataagactgtgtatgaagaaaacaataccattggtccctacttcgaagttcattgcacatacacagaccacaatggcaaagtcgcaggtttagcaagccacacgataacttgtgtacaaaagaaacagttcggtggtgatagtccagcgacaattattagcttgccgatctatcctcgtgcattcgtgtgtgacgataagattgaacagacccttcttgcccgtggtaatcgttttcttgagctacgtgggtgttcagtgcaaagctatgacggcctcgctcagtacctgcgcgaaccaccatgggatttttggcattggaatatggacgatttcgatcctatatggctcccttacacggaaacaggcagaatcatactcgacaaggcgacgttcatggatgatttctcatcgaagacccccgcaattacaaaagcaaaccctgaaccgattctgtgcccgccgttcacgattggatattcgcttgcaaaaaaagaatggtgtcgtttcctcgttacaaacgtgggccccgtgaagtggaagcatgacgcatgggacagattgatcttggaagaagaacagaagcttgtcctccaggcgctagtaagctcccatcaatatccagacaatccaagagaccagccagagcaaaaaggaaaaggactggtagtactccttcacgggtctcctggctcggggaagacgttgagtgcggagtcctccgctgaaatgacacgcaaagccctgatttcaacttctacatctggtctgaatcctgagggaaaagcatacatctttgaaaccaacctgcgccgcctccttcaatatgccactctgtggaaagccattgttctgctagacgaagccgatgtctttctcgaaaccagagaagaaaaagcggggcaagtagatcgaaacgccttagtcgcagtctttcttaaagagcttgaatatttttcaggtatcatctttctcacgacgaatcgagttgggactttcgacgttgccatgaaatctcgcatccatcttgctctaggatactcacccccggtagaaacgattcgttatcaattatggattcaaagccttgctgctatcccaatcaatgagcaggggattgatgacatcgatgatgcagcgaacagactcgcagctcgtggtctaaacgggcgagagatatctaacgtagtcagcaccgccaggactatggcgaaatttgagactgccaagcttgaatacagacatatacagcagattctgaaggttcgcgaacgctttgagcagagtctaaaggcggagaagaagaaattggtttcgcagacagacacgaccggtcatcaactagtgagaacagggtcgattctgacggatgaccgcgagggggatgagtcatcttaa

SEQ ID NO: 1790 - protein, 658 aa, Muscodor strobelii
  misc_feature: SGI Peptide ID NO. 560208
  misc_feature (416)..(599): Pfam Id: PF00004 Pfam Desc: ATPase family associated with various cellular activities (AAA)
  misc_feature (18)..(623): NCBI GI: 46138977 Blast Desc: FG11003.1 [Gibberella zeae PH-1]
  misc_feature (10)..(615): NCBI GI: 171693837 Blast Desc: protein product [Podospora anserina] gi|170946867|emb|CAP73671.1| protein product [Podospora anserina]
  misc_feature (17)..(623): NCBI GI: 240110384 Blast Desc: ATPase, AAA family protein [Coccidioides posadasii C735 delta SOWgp]
  misc_feature (54)..(633): NCBI GI: 39940826 Blast Desc: MGG_11021 [Magnaporthe grisea 70-15] gi|145010948|gb|EDJ95604.1| MGG_11021 [Magnaporthe grisea 70-15]
  misc_feature (16)..(615): NCBI GI: 256731079 Blast Desc: NECHADRAFT_48916 [Nectria haematococca mpVI 77-13-4]
  misc_feature (17)..(616): NCBI GI: 115397169 Blast Desc: [Aspergillus terreus NIH2624] gi|114192367|gb|EAU34067.1| [Aspergillus terreus NIH2624]
  misc_feature (56)..(618): NCBI GI: 171684197 Blast Desc: protein product [Podospora anserina] gi|170942059|emb|CAP67711.1| protein product [Podospora anserina]
  misc_feature (17)..(616): NCBI GI: 145243760 Blast Desc: An11g03970 [Aspergillus niger] gi|134079073|emb|CAK48382.1| protein product [Aspergillus niger]
  misc_feature (16)..(615): NCBI GI: 46123125 Blast Desc: FG05940.1 [Gibberella zeae PH-1]
  misc_feature (56)..(617): NCBI GI: 159123389 Blast Desc: AAA family ATPase, [Aspergillus fumigatus A1163]
  misc_feature: Useful for introducing or modulating the production of volatile compounds
MAGVQISGPLVASDQIGLRCEFKTYHTVPNKEGKLRVKPITDPFESEIRIASENSYALIINREFTVEDPTIPKAVTLKVNSPHLLTAFREVVKFYPSVGSDFKSPFELSSPFQMLVHYWDELNNYRNEIDVGDARMHLNLLFDFMNHEIGPERQRLLNMIGNGQITYLSAWVIYRPGDLVCTSVMGHPWLMRCNKTVYEENNTIGPYFEVHCTYTDHNGKVAGLASHTITCVQKKQFGGDSPATIISLPIYPRAFVCDDKIEQTLLARGNRFLELRGCSVQSYDGLAQYLREPPWDFWHWNMDDFDPIWLPYTETGRIILDKATFMDDFSSKTPAITKANPEPILCPPFTIGYSLAKKEWCRFLVTNVGPVKWKHDAWDRLILEEEQKLVLQALVSSHQYPDNPRDQPEQKGKGLVVLLHGSPGSGKTLSAESSAEMTRKALISTSTSGLNPEGKAYIFETNLRRLLQYATLWKAIVLLDEADVFLETREEKAGQVDRNALVAVFLKELEYFSGIIFLTTNRVGTFDVAMKSRIHLALGYSPPVETIRYQLWIQSLAAIPINEQGIDDIDDAANRLAARGLNGREISNVVSTARTMAKFETAKLEYRHIQQILKVRERFEQSLKAEKKKLVSQTDTTGHQLVRTGSILTDDREGDESS

SEQ ID NO: 1791 - DNA, 2188 bp, Muscodor strobelii
  misc_feature: SGI EST ID NO. CUFF.4652.0
  misc_feature: Variant of the nucleotide sequence at SEQ ID NO 1789
cgcaatatgaccatcactgctccatcacacttgacactgaatttctcacgttactattcatttgaaaaagaggacagagaccaatctcttcgtcgaaaacatggccggagtacaaatttccggcccgctagtcgctagcgatcaaatcggcctacgctgcgagttcaagacataccatacagtgcccaataaggaaggaaagctgagagtgaagcccatcactgacccttttgagtccgagatcagaattgcttccgagaattcatatgctctgatcatcaatagagagttcacggttgaggatcccacgataccaaaagctgtgactctaaaagtaaactctcctcatctgctgactgcgttccgagaggtggtcaaattctatccttccgttggttcggactttaagtcgccgttcgagctaagcagtcctttccaaatgcttgttcactattgggatgagctgaacaactatcgcaacgagatagacgttggtgacgctcgcatgcatctcaatcttttatttgacttcatgaatcacgagattggcccagaacgtcagagactgcttaacatgattggtaacggccagatcacgtacctctctgcttgggttatctatcgacctggcgatcttgtttgtacatctgtcatgggtcatccctggctgatgcgatgtaataagactgtgtatgaagaaaacaataccattggtccctacttcgaagttcattgcacatacacagaccacaatggcaaagtcgcaggtttagcaagccacacgataacttgtgtacaaaagaaacagttcggtggtgatagtccagcgacaattattagcttgccgatctatcctcgtgcattcgtgtgtgacgataagattgaacagacccttcttgcccgtggtaatcgttttcttgagctacgtgggtgttcagtgcaaagctatgacggcctcgctcagtacctgcgcgaaccaccatgggatttttggcattggaatatggacgatttcgatcctatatggctcccttacacggaaacaggcagaatcatactcgacaaggcgacgttcatggatgatttctcatcgaagacccccgcaattacaaaagcaaaccctgaaccgattctgtgcccgccgttcacgattggatattcgcttgcaaaaaaagaatggtgtcgtttcctcgttacaaacgtgggccccgtgaagtggaagcatgacgcatgggacagattgatcttggaagaagaacagaagcttgtcctccaggcgctagtaagctcccatcaatatccagacaatccaagagaccagccagagcaaaaaggaaaaggactggtagtactccttcacgggtctcctggctcggggaagacgttgagtgcggagtcctccgctgaaatgacacgcaaagccctgatttcaacttctacatctggtctgaatcctgagggaaaagcatacatctttgaaaccaacctgcgccgcctccttcaatatgccactctgtggaaagccattgttctgctagacgaagccgatgtctttctcgaaaccagagaagaaaaagcggggcaagtagatcgaaacgccttagtcgcagtctttcttaaagagcttgaatatttttcaggtatcatctttctcacgacgaatcgagttgggactttcgacgttgccatgaaatctcgcatccatcttgctctaggatactcacccccggtagaaacgattcgttatcaattatggattcaaagccttgctgctatcccaatcaatgagcaggggattgatgacatcgatgatgcagcgaacagactcgcagctcgtggtctaaacgggcgagagatatctaacgtagtcagcaccgccaggactatggcgaaatttgagactgccaagcttgaatacagacatatacagcagattctgaaggttcgcgaacgctttgagcagagtctaaaggcggagaagaagaaattggtttcgcagacagacacgaccggtcatcaactagtgagaacagggtcgattctgacggatgaccgcgagggggatgagtcatcttaaccagaaactagttcaacccataaacattgcggtagctatctatacacattgacgcattctttctctgagataaggccatcgtcttccaagcccacgaggcctaacactgca

SEQ ID NO: 1792 - DNA, 1095 bp, Muscodor strobelii
  misc_feature: SGI cDNA ID NO. 560209
  misc_feature: Encodes the peptide sequence at SEQ ID NO 1793
atggcggaccagaaagagaatttcttccgccatttccaaggcgaagtcactcgcgtgcaagatgagatcgaaaacctcgccactctctcaaacatagcaggcgagcgccaagacggcataaacctcgttttgggtagcatatcacgactctccaaagaggtcatggatgccggcgactatatcccagggtatgatcaacgggcctactcacaagctatcaaagccctcacacaaaagctcaacgacacgactgggagcttcgctccgaagaagcgatttcaattcaagaaagccgcatccccaatcataggctcgaccccgagtgaggctgttgcaagacccatatcgatgagccgcagaatatggtctagcgacggcgggaacgactcagaccaagataccgtcaactcgctcccaacattctcaaataccaacactacggccatgggaaagaattacaacgaagaactctccaaatcaaccaacagtcacatccgaagccctagcttttcgacagcgaaaaacattgctatcacctcgcacacaggcctccacatcatcctcccctcttccgcctcccacgcgacgtcttcaggatccctcacgaacctctcccggtgtatcgtcgacatgacgatcccgacgcgccgcgatgccggaacgcctttcgcggggctagcactgaagaacatcacagattctctgctagtatgcggagcagtgagcggagcagtgcacatcacgggactgaaaaattgtgtggtggttgtcaaggcgagacaggtccgcattcatgagtgtaaggatgtgaggatctacctttggtgtggtagtcatcctatcatcgaggattgcgagggcatggattttgcgcctttcccggagttttacgccgatgacacatcatcccccgactcaaaccaatgggaccaagtcgacgacttcaaatggctcaaatccgaagcctcgccaaattggcgagccctgcccgaggaggagagactcaaggatgaaatctggcgcgacaaggtctgtggaggtccgagcctgagcacggatgatattctgagagaggtgggcattttgaagtcatga

SEQ ID NO: 1793 - protein, 364 aa, Muscodor strobelii
  misc_feature: SGI Peptide ID NO. 560209
  misc_feature (196)..(315): Pfam Id: PF07986 Pfam Desc: Tubulin binding cofactor C
  misc_feature (226)..(297): Pfam Id: PF07986 Pfam Desc: Tubulin binding cofactor C
  misc_feature (5)..(361): NCBI GI: 164426972 Blast Desc: NCU02254 [Neurospora crassa OR74A] gi|40804635|emb|CAF05895.1| related to tubulin folding cofactor C [Neurospora crassa] gi|157071551|gb|EAA30662.2| conserved crassa
  misc_feature (1)..(363): NCBI GI: 261355083 Blast Desc: tubulin-specific chaperone C [Verticillium albo-atrum VaMs.102]
  misc_feature (3)..(361): NCBI GI: 256733013 Blast Desc: NECHADRAFT_100001 [Nectria haematococca mpVI 77-13-4]
  misc_feature (8)..(362): NCBI GI: 39973909 Blast Desc: MGG_00899 [Magnaporthe grisea 70-15] gi|145018152|gb|EDK02431.1| MGG_00899 [Magnaporthe grisea 70-15]
  misc_feature (5)..(363): NCBI GI: 119492222 Blast Desc: tubulin-specific chaperone c, [Neosartorya fischeri NRRL 181] gi|119411710|gb|EAW21653.1| tubulin-specific chaperone c, [Neosartorya fischeri NRRL 181]
  misc_feature (5)..(364): NCBI GI: 226292727 Blast Desc: conserved [Paracoccidioides brasiliensis Pb18]
  misc_feature (5)..(363): NCBI GI: 159127734 Blast Desc: tubulin-specific chaperone c, [Aspergillus fumigatus A1163]
  misc_feature (3)..(363): NCBI GI: 116203499 Blast Desc: CHGG_09633 [Chaetomium globosum CBS 148.51] gi|88175761|gb|EAQ83229.1| CHGG_09633 [Chaetomium globosum CBS 148.51]
  misc_feature (5)..(363): NCBI GI: 212546447 Blast Desc: tubulin-specific chaperone c, [Penicillium marneffei ATCC 18224] gi|210064897|gb|EEA18992.1| tubulin-specific chaperone c, [Penicillium marneffei ATCC 18224]
  misc_feature (5)..(364): NCBI GI: 226283074 Blast Desc: conserved [Paracoccidioides brasiliensis Pb01]
MADQKENFFRHFQGEVTRVQDEIENLATLSNIAGERQDGINLVLGSISRLSKEVMDAGDYIPGYDQRAYSQAIKALTQKLNDTTGSFAPKKRFQFKKAASPIIGSTPSEAVARPISMSRRIWSSDGGNDSDQDTVNSLPTFSNTNTTAMGKNYNEELSKSTNSHIRSPSFSTAKNIAITSHTGLHIILPSSASHATSSGSLTNLSRCIVDMTIPTRRDAGTPFAGLALKNITDSLLVCGAVSGAVHITGLKNCVVVVKARQVRIHECKDVRIYLWCGSHPIIEDCEGMDFAPFPEFYADDTSSPDSNQWDQVDDFKWLKSEASPNWRALPEEERLKDEIWRDKVCGGPSLSTDDILREVGILKS

SEQ ID NO: 1794 - DNA, 2557 bp, Muscodor strobelii
  misc_feature: SGI EST ID NO. CUFF.4682.0
  misc_feature: Variant of the nucleotide sequence at SEQ ID NO 1792
acgcgcctgccttgagactcacaacattgcgagatacgctgcggcattctatcacaactcatttcgttattcggcggaacagcctactcccaaatgattcagcactcttcatgcgataaatattgatcaaaactcatctccggaatcagcaagcatatcctgcagaaccatttttatattgtcttcccaaatccacctatacgctccccatcactctcatacctccgtacggtctcatgaacgtcacttaaaacacatcctaaccgcacagttctacatcgaggtctgcctcacaatatcgctacgactcactatatttcctcaatcataagcgtcgtcaaaatggcggaccagaaagagaatttcttccgccatttccaaggcgaagtcactcgcgtgcaagatgagatcgaaaacctcgccactctctcaaacatagcaggcgagcgccaagacggcataaacctcgttttgggtagcatatcacgactctccaaagaggtcatggatgccggcgactatatcccagggtatgatcaacgggcctactcacaagctatcaaagccctcacacaaaagctcaacgacacgactgggagcttcgctccgaagaagcgatttcaattcaagaaagccgcatccccaatcataggctcgaccccgagtgaggctgttgcaagacccatatcgatgagccgcagaatatggtctagcgacggcgggaacgactcagaccaagataccgtcaactcgctcccaacattctcaaataccaacactacggccatgggaaagaattacaacgaagaactctccaaatcaaccaacagtcacatccgaagccctagcttttcgacagcgaaaaacattgctatcacctcgcacacaggcctccacatcatcctcccctcttccgcctcccacgcgacgtcttcaggatccctcacgaacctctcccggtgtatcgtcgacatgacgatcccgacgcgccgcgatgccggaacgcctttcgcggggctagcactgaagaacatcacagattctctgctagtatgcggagcagtgagcggagcagtgcacatcacgggactgaaaaattgtgtggtggttgtcaaggcgagacaggtccgcattcatgagtgtaaggatgtgaggatctacctttggtgtggtagtcatcctatcatcgaggattgcgagggcatggattttgcgcctttcccggagttttacgccgatgacacatcatcccccgactcaaaccaatgggaccaagtcgacgacttcaaatggctcaaatccgaagcctcgccaaattggcgagccctgcccgaggaggagagactcaaggatgaaatctggcgcgacaaggtctgtggaggtccgagcctgagcacggatgatattctgagagaggtgggcattttgaagtcatgaccggagattcgctgctgctcaatgagggcaatcgcgcctgtagagcttcctgcacctcagagtcatgcgtagggcggccaatgcaagaaactctcctgctttggaacagggctaaggatgacgtatctgctccctcaccatggacgagagaacggagtttatgggaagtatggaatggagatgcgcgataccctagagagcgaggatagggacaggcgaatgattatggcagcatcgttatcattatcatcattgtagtataccctaacgccgcgcaaatgctattacttgcagcagatatcgctgtcgcccagctatcacattctttcatgctttatcatgctaagcctccgtatgtccttctactctctcttgtagcacgcctagtcgaggccgaatggacgacttttccgcgtcgtcagaccagagcggcgtagtcgagatcgctccgtcgtaatattaggtatcggtgataccgacgggttgtgttttgggtatattcgtgtgtattggtatcatcggtgttcgtcattcttccttcgcctcgttcttcgcccctctcctccaactcaacgaccaccaacatccctcagcgccctaagcacctcgccctgtctccgaatcttgtcctcaagtctctcgatctccgcctcctgttctttcacagtcctatccagatcgggcaactgactcttgaccagtccccgcgtcttctggaactggtgtttcaggcttcccgtcgccactggtatatccttcaacgtcagctccccagtgcctggtttccttgacgaggtgggagtgggagtggcgtgtgctggtgtgttggtctgagagggcgtgccggtgcctgtgccggcgggaagggtgcgcagacgtgtgaggatgtttgcgagctcggagaggacgtcgagcgtgtccgggttcagggaggaaggtagggtgagttggttggttggcgtttgggaggacgacattgtcacgagacgcgccggaggttggtatggatgaactgaggcaaatgaagctgcagtctacgtgttggagacgcgactacatatgagggtgttgttgctagagcggtgttgttggggtcttgagatatgacagtggaatgtga

SEQ ID NO: 1795 - DNA, 408 bp, Muscodor strobelii
  misc_feature: SGI cDNA ID NO. 560210
  misc_feature: Elevated expression when VOC is produced
  misc_feature: Encodes the peptide sequence at SEQ ID NO 1796
atgtcgtcctcccaaacgccaaccaaccaactcaccctaccttcctccctgaacccggacacgctcgacgtcctctccgagctcgcaaacatcctcacacgtctgcgcacccttcccgccggcacaggcaccggcacgccctctcagaccaacacaccagcacacgccactcccactcccacctcgtcaaggaaaccaggcactggggagctgacgttgaaggatataccagtggcgacgggaagcctgaaacaccagttccagaagacgcggggactggtcaagagtcagttgcccgatctggataggactgtgaaagaacaggaggcggagatcgagagacttgaggacaagattcggagacagggcgaggtgcttagggcgctgagggatgttggtggtcgttga

SEQ ID NO: 1796 - protein, 135 aa, Muscodor strobelii
  misc_feature: SGI Peptide ID NO. 560210
  misc_feature (1)..(131): NCBI GI: 256732571 Blast Desc: NECHADRAFT_78890 [Nectria haematococca mpVI 77-13-4]
  misc_feature (11)..(134): NCBI GI: 39973907 Blast Desc: [Magnaporthe grisea 70-15] gi|145018151|gb|EDK02430.1| [Magnaporthe grisea 70-15]
  misc_feature (11)..(131): NCBI GI: 46123357 Blast Desc: FG06056.1 [Gibberella zeae PH-1]
  misc_feature (1)..(133): NCBI GI: 261355086 Blast Desc: [Verticillium albo-atrum VaMs.102]
  misc_feature (4)..(133): NCBI GI: 154300408 Blast Desc: [Botryotinia fuckeliana B05.10] gi|150856716|gb|EDN31908.1| [Botryotinia fuckeliana B05.10]
  misc_feature (1)..(133): NCBI GI: 156042438 Blast Desc: [Sclerotinia sclerotiorum 1980] gi|154695403|gb|EDN95141.1| [Sclerotinia sclerotiorum 1980]
  misc_feature (58)..(133): NCBI GI: 40804636 Blast Desc: related to microtubule-associated protein [Neurospora crassa]
  misc_feature (21)..(129): NCBI GI: 169625019 Blast Desc: SNOG_15776 [Phaeosphaeria nodorum SN15] gi|160705582|gb|EAT76871.2| SNOG_15776 [Phaeosphaeria nodorum SN15]
  misc_feature (18)..(133): NCBI GI: 121705358 Blast Desc: conserved [Aspergillus clavatus NRRL 1] gi|119399088|gb|EAW09516.1| conserved [Aspergillus clavatus NRRL 1]
  misc_feature (18)..(126): NCBI GI: 145252194 Blast Desc: An16g02980 [Aspergillus niger] gi|134083155|emb|CAK48607.1| protein product [Aspergillus niger]
  misc_feature: Useful for introducing or modulating the production of volatile compounds
MSSSQTPTNQLTLPSSLNPDTLDVLSELANILTRLRTLPAGTGTGTPSQTNTPAHATPTPTSSRKPGTGELTLKDIPVATGSLKHQFQKTRGLVKSQLPDLDRTVKEQEAEIERLEDKIRRQGEVLRALRDVGGR

SEQ ID NO: 1797 - DNA, 573 bp, Muscodor strobelii
  misc_feature: SGI cDNA ID NO. 560211
  misc_feature: Encodes the peptide sequence at SEQ ID NO 1798
atgacaattcgcgactggaggcaaactgttgcgcactacggcgaaaatgctcagcacatcctattcgcagaatggcatcttggcatcacggcttttggtgggccaccggtacacttcaagatccttcacgataaattcgttgtgcgattgcgatggatagatgagcagttgtatcaagagcttttcagcatctcgcaagcgttgtcgggcccggcgagcactaagatgctctattgcatcaatctcatccacactggtttgcatggcgctttgctaggatttctgctctggagtctccccggtgcgttggggctatttggtctcgctatcggtatctccaacatcgggtccacgctccctcgtgccgtctacgctctcctttcggggctcaacgccgcaactgttggcatcattgctctcgcggcagtagagctatctggcaatgccatcacagatccaatcacaaggggcttggtgtttctcactggcacggccggtttgttgtacaatgctctctggtatttcccggtcctcttgatatcatcgggaatcgctaccgtagtttttgattaa

SEQ ID NO: 1798 - protein, 190 aa, Muscodor strobelii
  misc_feature: SGI Peptide ID NO. 560211
  misc_feature (15)..(190): Pfam Id: PF02417 Pfam Desc: Chromate transporter
  misc_feature (27)..(190): Pfam Id: PF02417 Pfam Desc: Chromate transporter
  misc_feature (1)..(190): NCBI GI: 256720181 Blast Desc: NECHADRAFT_73264 [Nectria haematococca mpVI 77-13-4]
  misc_feature (5)..(190): NCBI GI: 261353932 Blast Desc: chromate transport protein ChrA [Verticillium albo-atrum VaMs.102]
  misc_feature (19)..(190): NCBI GI: 171692655 Blast Desc: protein product [Podospora anserina] gi|170946276|emb|CAP73077.1| protein product [Podospora anserina]
  misc_feature (24)..(190): NCBI GI: 256734850 Blast Desc: NECHADRAFT_32022 [Nectria haematococca mpVI 77-13-4]
  misc_feature (19)..(190): NCBI GI: 18376174 Blast Desc: conserved [Neurospora crassa]
  misc_feature (24)..(190): NCBI GI: 171687227 Blast Desc: protein product [Podospora anserina] gi|170943575|emb|CAP69227.1| protein product [Podospora anserina]
  misc_feature (1)..(190): NCBI GI: 46116002 Blast Desc: FG03843.1 [Gibberella zeae PH-1]
  misc_feature (1)..(190): NCBI GI: 145616506 Blast Desc: MGG_10634 [Magnaporthe grisea 70-15] gi|145010065|gb|EDJ94721.1| MGG_10634 [Magnaporthe grisea 70-15]
  misc_feature (25)..(190): NCBI GI: 116181516 Blast Desc: CHGG_01386 [Chaetomium globosum CBS 148.51] gi|88185683|gb|EAQ93151.1| CHGG_01386 [Chaetomium globosum CBS 148.51]
  misc_feature (4)..(190): NCBI GI: 261196598 Blast Desc: chromate ion transporter [Ajellomyces dermatitidis SLH14081] gi|239595947|gb|EEQ78528.1| chromate ion transporter [Ajellomyces dermatitidis SLH14081]
MTIRDWRQTVAHYGENAQHILFAEWHLGITAFGGPPVHFKILHDKFVVRLRWIDEQLYQELFSISQALSGPASTKMLYCINLIHTGLHGALLGFLLWSLPGALGLFGLAIGISNIGSTLPRAVYALLSGLNAATVGIIALAAVELSGNAITDPITRGLVFLTGTAGLLYNALWYFPVLLISSGIATVVFD

SEQ ID NO: 1799 - DNA, 1728 bp, Muscodor strobelii
  misc_feature: SGI EST ID NO. CUFF.4700.0
  misc_feature: Variant of the nucleotide sequence at SEQ ID NO 1797
gcgatggatagatgagcagttggtgcgtttgttatcaagagcttttcagcatctcgcaagcgttgtcgggcccggcgagcactaagatgctctattgcatcaatctcatccacactggtttgcatggcgctttgctaggatttctgctctggagtctccccggtgcgttggggctatttggtctcgctatcggtatctccaacatcgggtccacgctccctcgtgccgtctacgctctcctttcggggctcaacgccgcaactgttggcatcattgctctcgcggcagtagagctatctggcaatgccatcacagatccaatcacaaggggcttggtgtttctcactggcacggccggtttgttgtacaatgctctctggtatttcccggtcctcttgatatcatcgggaatcgctaccgtagtttttgattaacgcttgctacatcggccggtgagggcacttttcaaggcggtgagctggagaatgggcgccgcttctggtacaccagaagatgtggatgatatcgttgaagagggtcagcgtagtcctgcgacagaaccagcatctgcttcggcgacgggctctgatatctcccgtcatactaacggaaccatattgaccaatcaagatgacgaagagactgatcctgaaaatgagaccaggccaaggattgttccacaggagtatcaactacccttctcatggaagaccggaactgccatcctagccctcttctttgcttcattcgcaataatcatgactattcgcggcacagtacccgatctaccgatcctctaccggcttttcgccaacctctatctagctggtacaatcatctttggcggcggaccagtggtgattcccctgttgcgagaatacatcgtagccgagggttgggtcggcccacgagacttcctgatcggactcgcggtcgtgcaagcattcccaggaccaaacttcaactttgctgtttttctcggagctctgacggcggcgaataatggcttttcgcctgttgccggcgcagttgtctcgtttctcgggatctacatacctgggcttgttctcgttcacggaactatgggggtctggggttctctaaggagccgtccttgggtaaagtcctgtcttcgcggattgaacgctggggctgtgggtctcatatataccgctgtgtatcgcatttggactgtcggatatcttgatgaagggttccaggcaggccgtagtctgggtgatgacccgtggtgggtcgtggttgcggctacggcttttgtgggcggtcgatactatgccgttcccgccccggctgctatcgttattggggctgcacttggacttgtccggtatgctgtcgtttctagttgatcgaaatcgacgtagattggtttgcaacggccaacagcttacttggcactcttggagctgcaaactgagagaagcaacacatatcaacaatgcggcacatgttgcacaggcggccacatccgagtggtgaatgaatagttattgtgaagccatagctccctccataagtacgaagtcgaagagggagataaacaattgttcgactccaccctattccttggtccttctccggaatgtagagcattcgaatggtctctacttcattagttatcgtcgtgttgccaacactgtgcaacattacgaatagtgcgcagcaattactggaatgtagcaaaataaaaagataggtacgatctca

SEQ ID NO: 1800 - DNA, 885 bp, Muscodor strobelii
  misc_feature: SGI cDNA ID NO. 560212
  misc_feature: Encodes the peptide sequence at SEQ ID NO 1801
atgggcgccgcttctggtacaccagaagatgtggatgatatcgttgaagagggtcagcgtagtcctgcgacagaaccagcatctgcttcggcgacgggctctgatatctcccgtcatactaacggaaccatattgaccaatcaagatgacgaagagactgatcctgaaaatgagaccaggccaaggattgttccacaggagtatcaactacccttctcatggaagaccggaactgccatcctagccctcttctttgcttcattcgcaataatcatgactattcgcggcacagtacccgatctaccgatcctctaccggcttttcgccaacctctatctagctggtacaatcatctttggcggcggaccagtggtgattcccctgttgcgagaatacatcgtagccgagggttgggtcggcccacgagacttcctgatcggactcgcggtcgtgcaagcattcccaggaccaaacttcaactttgctgtttttctcggagctctgacggcggcgaataatggcttttcgcctgttgccggcgcagttgtctcgtttctcgggatctacatacctgggcttgttctcgttcacggaactatgggggtctggggttctctaaggagccgtccttgggtaaagtcctgtcttcgcggattgaacgctggggctgtgggtctcatatataccgctgtgtatcgcatttggactgtcggatatcttgatgaagggttccaggcaggccgtagtctgggtgatgacccgtggtgggtcgtggttgcggctacggcttttgtgggcggtcgatactatgccgttcccgccccggctgctatcgttattggggctgcacttggacttgtccggtatgctgtcgtttctagttga

SEQ ID NO: 1801 - protein, 294 aa, Muscodor strobelii
  misc_feature: SGI Peptide ID NO. 560212
  misc_feature (102)..(290): Pfam Id: PF02417 Pfam Desc: Chromate transporter
  misc_feature (11)..(292): NCBI GI: 256720181 Blast Desc: NECHADRAFT_73264 [Nectria haematococca mpVI 77-13-4]
  misc_feature (8)..(293): NCBI GI: 261353932 Blast Desc: chromate transport protein ChrA [Verticillium albo-atrum VaMs.102]
  misc_feature (3)..(294): NCBI GI: 164426206 Blast Desc: NCU01055 [Neurospora crassa OR74A] gi|157071240|gb|EAA32431.2| NCU01055 [Neurospora crassa OR74A]
  misc_feature (14)..(294): NCBI GI: 171692655 Blast Desc: protein product [Podospora anserina] gi|170946276|emb|CAP73077.1| protein product [Podospora anserina]
  misc_feature (3)..(287): NCBI GI: 18376174 Blast Desc: conserved [Neurospora crassa]
  misc_feature (3)..(294): NCBI GI: 256726655 Blast Desc: NECHADRAFT_33722 [Nectria haematococca mpVI 77-13-4]
  misc_feature (3)..(294): NCBI GI: 256734850 Blast Desc: NECHADRAFT_32022 [Nectria haematococca mpVI 77-13-4]
  misc_feature (5)..(294): NCBI GI: 261358961 Blast Desc: chromate transporter [Verticillium albo-atrum VaMs.102]
  misc_feature (47)..(288): NCBI GI: 46116002 Blast Desc: FG03843.1 [Gibberella zeae PH-1]
  misc_feature (8)..(294): NCBI GI: 145616506 Blast Desc: MGG_10634 [Magnaporthe grisea 70-15] gi|145010065|gb|EDJ94721.1| MGG_10634 [Magnaporthe grisea 70-15]
MGAASGTPEDVDDIVEEGQRSPATEPASASATGSDISRHTNGTILTNQDDEETDPENETRPRIVPQEYQLPFSWKTGTAILALFFASFAIIMTIRGTVPDLPILYRLFANLYLAGTIIFGGGPVVIPLLREYIVAEGWVGPRDFLIGLAVVQAFPGPNFNFAVFLGALTAANNGFSPVAGAVVSFLGIYIPGLVLVHGTMGVWGSLRSRPWVKSCLRGLNAGAVGLIYTAVYRIWTVGYLDEGFQAGRSLGDDPWWVVVAATAFVGGRYYAVPAPAAIVIGAALGLVRYAVVSS

SEQ ID NO: 1802 - DNA, 1728 bp, Muscodor strobelii; identical to SEQ ID NO: 1799
  misc_feature: SGI EST ID NO. CUFF.4700.0
  misc_feature: Variant of the nucleotide sequence at SEQ ID NO 1800

SEQ ID NO: 1803 - DNA, 1557 bp, Muscodor strobelii
  misc_feature: SGI cDNA ID NO. 560213
  misc_feature: Elevated expression when VOC is produced
  misc_feature: Encodes the peptide sequence at SEQ ID NO 1804
atggagcaactgagtgtgcaagaggcgaccacgccgcccgagacagtgtacccgcgagggtttaggctacgaataacagtcctatcgctctgtgtggtgtcatttctgtacggcttggacttgaccattgttgctgccaccgtccccagtctgacagactacttcaattccgtcaaggacattggatggtactcatcggcttatttagttgttctagctggcgtcggcttcttctacggaaagctctacactctgtttcccgctaagcgattatacataatcagtctttgcatctttgaagcagggtctttgctatgtacactggctccgtcttcgactattttcatcattggtcgtgccgtagctgggcttggtgctgctggtatttcgccagggtctattgttattctttctcaatgttttccgaaacaccgccgccctctttggaccacgttggtctcttcatgccagctgaccggtatcgtcagtgcgcccatcatcgggggtgcgctgattgactgggtaggatggcgaggctgttttggaatcaacctgccgatcggcgtggttgcttttctgatcattggatttggacttcgagctgacgactcgattttggatgatggctctgattggaggtccaagctaaggcgcttcgactggataggaacggttcttatcatctcagcacttgtatcgctcctactggctttgcaactgggcggctcctacggctggagtaatactcgcatcattgtcctgctcgtggtagccccggcacttttagcagcttttggatggtgtcagtatcgactgcaagacagggctacattacccccacggatcttgcgtatgcgcacggttctagctggtgcgtggtttagcttgtgtgttgatgggactttggccgtgacggaatacttcatatcgatctatttccagggcgttaaaggatacactgctacacgatcaggtctccttatcctccccttgttggcaggtattattgtcggaaacttattaggaggactgggaacaacatggataggatattacaacccatttatgctggcaactacgattctagcaccgatcgcatcaggtctacttacgacgatcagcttagatgaaggcatccagaaagtagtagggcttctcggacttctcggcttcgctgcaggtcttggactccaagcccccgtgattgccctccaaactgttgtgaagcagtctgatctttctgtggccgtcgcaatcaccgcatttggagcgactcttggaaatgcagtctggatcaccgtatccaccactttgttccagagtcggctaaatgccgagttagcaagtctgagccctttcgtaaacgtcacacaaattgaaactgctggattgtctgagatacgaaatctggtgggtggcgaccgcctgagagatgttttgctaggatacgacgaggctgtcacgcagactctctatcttcctgtcggactagccgtagccaccgtcctgggatcagccttaactgagtggcattccgtgaaggtgaaggagtcatag

SEQ ID NO: 1804 - protein, 518 aa, Muscodor strobelii
  misc_feature: SGI Peptide ID NO. 560213
  misc_feature (30)..(432): Pfam Id: PF07690 Pfam Desc: Major Facilitator Superfamily
  misc_feature (1)..(518): NCBI GI: 256723012 Blast Desc: NECHADRAFT_52599 [Nectria haematococca mpVI 77-13-4]
  misc_feature (1)..(518): NCBI GI: 46116040 Blast Desc: FG03862.1 [Gibberella zeae PH-1]
  misc_feature (4)..(517): NCBI GI: 238496409 Blast Desc: efflux pump antibiotic resistance protein, [Aspergillus flavus NRRL3357] gi|220694320|gb|EED50664.1| efflux pump antibiotic resistance protein, [Aspergillus flavus NRRL3357]
  misc_feature (7)..(517): NCBI GI: 238499375 Blast Desc: efflux pump antibiotic resistance protein, [Aspergillus flavus NRRL3357] gi|220692675|gb|EED49021.1| efflux pump antibiotic resistance protein, [Aspergillus flavus NRRL3357]
  misc_feature (4)..(517): NCBI GI: 169774957 Blast Desc: [Aspergillus oryzae RIB40] gi|83769809|dbj|BAE59944.1| protein product [Aspergillus oryzae]
  misc_feature (5)..(517): NCBI GI: 121704086 Blast Desc: MFS toxin efflux pump, [Aspergillus clavatus NRRL 1] gi|119398451|gb|EAW08881.1| MFS toxin efflux pump, [Aspergillus clavatus NRRL 1]
  misc_feature (2)..(517): NCBI GI: 255950952 Blast Desc: Pc22g23520 [Penicillium chrysogenum Wisconsin 54-1255] gi|211593260|emb|CAP99640.1| Pc22g23520 [Penicillium chrysogenum Wisconsin 54-1255]
  misc_feature (17)..(517): NCBI GI: 169601798 Blast Desc: SNOG_03774 [Phaeosphaeria nodorum SN15] gi|111067859|gb|EAT88979.1| SNOG_03774 [Phaeosphaeria nodorum SN15]
  misc_feature (15)..(517): NCBI GI: 242778085 Blast Desc: efflux pump antibiotic resistance protein, [Talaromyces stipitatus ATCC 10500] gi|218722786|gb|EED22204.1| efflux pump antibiotic resistance protein, [Talaromyces ATCC
  misc_feature (1)..(518): NCBI GI: 242786957 Blast Desc: efflux pump antibiotic resistance protein, [Talaromyces stipitatus ATCC 10500] gi|218721054|gb|EED20473.1| efflux pump antibiotic resistance protein, [Talaromyces ATCC
  misc_feature: Useful for introducing or modulating the production of volatile compounds
MEQLSVQEATTPPETVYPRGFRLRITVLSLCVVSFLYGLDLTIVAATVPSLTDYFNSVKDIGWYSSAYLVVLAGVGFFYGKLYTLFPAKRLYIISLCIFEAGSLLCTLAPSSTIFIIGRAVAGLGAAGISPGSIVILSQCFPKHRRPLWTTLVSSCQLTGIVSAPIIGGALIDWVGWRGCFGINLPIGVVAFLIIGFGLRADDSILDDGSDWRSKLRRFDWIGTVLIISALVSLLLALQLGGSYGWSNTRIIVLLVVAPALLAAFGWCQYRLQDRATLPPRILRMRTVLAGAWFSLCVDGTLAVTEYFISIYFQGVKGYTATRSGLLILPLLAGIIVGNLLGGLGTTWIGYYNPFMLATTILAPIASGLLTTISLDEGIQKVVGLLGLLGFAAGLGLQAPVIALQTVVKQSDLSVAVAITAFGATLGNAVWITVSTTLFQSRLNAELASLSPFVNVTQIETAGLSEIRNLVGGDRLRDVLLGYDEAVTQTLYLPVGLAVATVLGSALTEWHSVKVKES

SEQ ID NO: 1805 - DNA, 2386 bp, Muscodor strobelii
  misc_feature: SGI EST ID NO. CUFF.4703.0
  misc_feature: Variant of the nucleotide sequence at SEQ ID NO 1803
ccgtcatgttggatgcatgctttgactaaaagtacggttggccaatcatgaataaaccactcccggtttgcgtggatgaattacgtgtatctgacatgcggcattggagataattatgttgcctagaacgagcccctcaccgcttagttacctagacacagaggctcgccatactcatgccgatacttagtggcattttctatcccataaaatgaaccgtctcatacgccccgttgtccaggaaccatatctctcagtgcagtttcccacgcaacaacgagactactcgagtcaagcgctgtgatacatggagcaactgagtgtgcaagaggcgaccacgccgcccgagacagtgtacccgcgagggtttaggctacgaataacagtcctatcgctctgtgtggtgtcatttctgtacggcttggacttgaccattgttgctgccaccgtccccagtctgacagactacttcaattccgtcaaggacattggatggtactcatcggcttatttagttgttctagctggcgtcggcttcttctacggaaagctctacactctgtttcccgctaagcgattatacataatcagtctttgcatctttgaagcagggtctttgctatgtacactggctccgtcttcgactattttcatcattggtcgtgccgtagctgggcttggtgctgctggtatttcgccagggtctattgttattctttctcaatgttttccgaaacaccgccgccctctttggaccacgttggtctcttcatgccagctgaccggtatcgtcagtgcgcccatcatcgggggtgcgctgattgactgggtaggatggcgaggctgttttggaatcaacctgccgatcggcgtggttgcttttctgatcattggatttggacttcgagctgacgactcgattttggatgatggctctgattggaggtccaagctaaggcgcttcgactggataggaacggttcttatcatctcagcacttgtatcgctcctactggctttgcaactgggcggctcctacggctggagtaatactcgcatcattgtcctgctcgtggtagccccggcacttttagcagcttttggatggtgtcagtatcgactgcaagacagggctacattacccccacggatcttgcgtatgcgcacggttctagctggtgcgtggtttagcttgtgtgttgatgggactttggccgtgacggaatacttcatatcgatctatttccagggcgttaaaggatacactgctacacgatcaggtctccttatcctccccttgttggcaggtattattgtcggaaacttattaggaggactgggaacaacatggataggatattacaacccatttatgctggcaactacgattctagcaccgatcgcatcaggtctacttacgacgatcagcttagatgaaggcatccagaaagtagtagggcttctcggacttctcggcttcgctgcaggtcttggactccaagcccccgtgattgccctccaaactgttgtgaagcagtctgatctttctgtggccgtcgcaatcaccgcatttggagcgactcttggaaatgcagtctggatcaccgtatccaccactttgttccagagtcggctaaatgccgagttagcaagtctgagccctttcgtaaacgtcacacaaattgaaactgctggattgtctgagatacgaaatctggtgggtggcgaccgcctgagagatgttttgctaggatacgacgaggctgtcacgcagactctctatcttcctgtcggactagccgtagccaccgtcctgggatcagccttaactgagtggcattccgtgaaggtgaaggagtcatagaacttgctggtcgaagagtcaatagacatagactcaagtatcagtaatgtcctctgtgacacggcgctgccgagattctatccacatgtaggtacataaagatcatgtagcaaaacgagacgacaggaacaaaacaaaatatatgttgtgtaataaggacaagaaatgatgatcaaagtcatatgagataaacacgtaaatccaatattatccctagtctcccgtatacacttaacattaaacgcagaaactagcaactattcatctaatggctaaggtagctcgacagtcttggggtagtctgatggctgctgcgtagccgtgcttacgtatgacttcagtagatgtctctcgcatggaatatgtaacgcccatgccaaacgcaatacttaccgagagaactgcgaaccaatgccagtgaggagctgagcttgttcgactttcgaccggcgttcaatgtgtttcttgaagctgtgttcagtgcatcttggtgcgtcttcatgtacggtagcccgagtggag

SEQ ID NO: 1806 - DNA, 309 bp, Muscodor strobelii
  misc_feature: SGI cDNA ID NO. 560214
  misc_feature: Encodes the peptide sequence at SEQ ID NO 1807
atgtcatccccgtcttcatcttcagcttcactgcagattctacgggcgaaacccagaatcatatacgccggcgaagaaaaggactatacggagtgggacaacaagaaatccattctagaacgattgttcatcaccgagaattgcactctgaaaatgctgaagagtcgcatggaacaagaacatgggtttccggtgttctcctgcgtctacctgagaaacgtcctccaagatcctaagaaggttcagaaagagatgcgccgatacacttcaggatttgacattggagtaaaagcaatagatggtgagtga

SEQ ID NO: 1807 - protein, 102 aa, Muscodor strobelii
  misc_feature: SGI Peptide ID NO. 560214
MSSPSSSSASLQILRAKPRIIYAGEEKDYTEWDNKKSILERLFITENCTLKMLKSRMEQEHGFPVFSCVYLRNVLQDPKKVQKEMRRYTSGFDIGVKAIDGE

SEQ ID NO: 1808 - DNA, 2973 bp, Muscodor strobelii
  misc_feature: SGI cDNA ID NO. 560215
  misc_feature: Elevated expression when VOC is produced
  misc_feature: Encodes the peptide sequence at SEQ ID NO 1809
atgtcgcgcgacagtcctggcaccgtgaacaattttcatgggaatggtttgcagaatctcggtaatatcagtgtcggaagagacttggtcatagcagatcctggctgtggcaaatccgtcctagcgagatatctagcagacgatgtcttaccttcgagctctaccgaggccagaacgacttgttatttcttcttcaaagacgattttgaagatcaaagaaccctgacgagtgctctctcctgcctcttgcatcaactcttcgaacaacatcctactctgctgtcgaatgacattctcagcaaattagaaaatgaagaccaacgcgtcgcatctgagttcgaaaacctttgggatgtcctcgtattgatagcgaagctcgtcacaaaatcagcgcacggtgtcctccaaaaaatagtctgcataatcgatgccctcgatgaatgtaagaatgctttccgcctagtaaaagctctgacggagctgtacaggaagcatggagttatcaccgggctgaagttcatcatcactggccgcccgtatcccgaaatttatcaatcgtttcggacccttgaggattctgcactgatggttcacttgaggggggagagtcagcaagaggtggacaaaattgcgctcgaaatctccactgctcttgatcaacgaattgatgaactaagtaaacggcgccagttcagtatagaagagacaagactcctgcgggataagttgaacagcttcagtaaccgcacatatttatgggttcatctagtcttcaccgtcatcgaagccgaacacactgttttcctaacaaaagatgaattacgtcgcgttccggacgacttgccccatacagttgaagaagcctacgacaaacttctttccaaatgtcacgattacaaaaaagccatgaggatattgcattatattgttggagcagaccgtccattgcatctttcggaaatagctataatgctagccttgagaaaagagcaccgaaactatgcgaatctcaagggcgactgcttatcgccggacaggttgcagactgctcttcgacaagcatgtgggctttttgttgttgtcaaagattcgcaagtctttcttctccatcaaacagcgcgagaattcctaatgcggtcctcgaacatgactaggcaagctcgtccggaattgaaatggcagcattccattgacccggaagaatctcattgtctgatttccgaagtgtgtctacggtatctaaaccttgaagatttcgacaccagacccagaaattgtacggacagttttattttcctggaatacgctgcaagtacctgggcagatcattatcgtcaagctcatgctgtgactgacgtggagttggaatctctggccatgcaactttgccacaaaagttcgacccgttgttcaaactggctagaagtgtatagtgaagtacgaggtcgtgatctaaactttcccgaggaatttcccacatccttacatattgcgtcttacttcggtttggttgatttggttgaacttatactccgagaaaatgacgaaaaggccaataacacaaaacgctcaaaaagcgggcgtaccgcactttcctgggcctgcgagaaaggacatgacaccatagtacagcttctcttaagtcaagtatctaaacgacgtatcctattgagccgcctgtcattatcttcctctttggtgaatcagtcagatcaacacggcagaaccccgctctggttcgcagcaacgcatgggcattgcgagattgtccggaccctattggaaaagggcgcacgagcagaaatttgcgacgaattcggcctcaagccgcttgcctgggcgcgttatcaacggcacgatgacatcgtcaaaattctgacgaaaacggttggccgcaagaattctcggatagcatctgaggaccttcaagacgaacagggtgccacattgctcatggaagcggcgaagcgcggcagcgaagatgtcgtgaagttgctcgtagaccgcggtgttcggttggatactgcagatatatttggtgacgctgctttgatattggcagcatggtccggccgcctcggtgtggtcaaagcattgttgcagtgtggcgcaaacgtcaatgtagtagatcgacggggcgagactgcattgatgaaagcggcacatggtggcaatgtaggtgtggtcgaaactttgctggattatggcattgaagtcaatattcgagatgactcaaaatggactgctttgatgcatgcgtgcgcaaggggtcattgtgatgtaataatcaagacgttgttagaccatggcgccgacgatttcaaactcgatatcaacgatgcaaattccaccagtctgtggactgcaacaaaacggggcgatattagcatcgtcaaattattgttagatcatggccccaagatcaatctctcggagccatatggctttgttgctttagatattgctgtggcgtattcccagacggaagccgtcgagctgctcttgaaccactgcagtaatctcgaaaccagaaacgaaaaagggcagacagctttgatcgtagctgcagggactgacgatcaaattgtttatgatatatacaaaatagtcaggctgctactgaaccgtggtgcacatgtagatgcgacagatgacgacgggcagacggctttgatgagtgctgccgatatgtgcaatgagggtattgtaagaatacttttggactacggtgcccaggtcaatacgatggataaacatagccagacggctttgatgagagctgccggcggcttttgctttacccgttgggacgcaaaatgggatgttatagagatgcttctgaataagggcgctgatccagatgctattgatcatactggccggacagccattgcgcacgccgagacatataagcccagcgatgctccaagaattcgaaaaatgattgcagaacacaagaatcgacgaacttag

SEQ ID NO: 1809 - protein, 990 aa, Muscodor strobelii
  misc_feature: SGI Peptide ID NO. 560215
  misc_feature (712)..(744): Pfam Id: PF00023 Pfam Desc: Ankyrin repeat
  misc_feature (886)..(918): Pfam Id: PF00023 Pfam Desc: Ankyrin repeat
  misc_feature (679)..(711): Pfam Id: PF00023 Pfam Desc: Ankyrin repeat
  misc_feature (573)..(605): Pfam Id: PF00023 Pfam Desc: Ankyrin repeat
  misc_feature (646)..(678): Pfam Id: PF00023 Pfam Desc: Ankyrin repeat
  misc_feature (847)..(885): Pfam Id: PF00023 Pfam Desc: Ankyrin repeat
  misc_feature (814)..(846): Pfam Id: PF00023 Pfam Desc: Ankyrin repeat
  misc_feature (745)..(778): Pfam Id: PF00023 Pfam Desc: Ankyrin repeat
  misc_feature (919)..(958): Pfam Id: PF00023 Pfam Desc: Ankyrin repeat
  misc_feature (526)..(549): Pfam Id: PF00023 Pfam Desc: Ankyrin repeat
  misc_feature (6)..(967): NCBI GI: 159123470 Blast Desc: Ankyrin repeat protein [Aspergillus fumigatus A1163]
  misc_feature (30)..(880): NCBI GI: 238500305 Blast Desc: ankyrin repeat-containing protein, [Aspergillus flavus NRRL3357] gi|220693140|gb|EED49486.1| ankyrin repeat-containing protein, [Aspergillus flavus NRRL3357]
  misc_feature (14)..(869): NCBI GI: 145246768 Blast Desc: An12g05680 [Aspergillus niger] gi|134080354|emb|CAK46276.1| protein product [Aspergillus niger]
  misc_feature (30)..(913): NCBI GI: 116201761 Blast Desc: CHGG_08765 [Chaetomium globosum CBS 148.51] gi|88177283|gb|EAQ84751.1| CHGG_08765 [Chaetomium globosum CBS 148.51]
  misc_feature (5)..(734): NCBI GI: 238508602 Blast Desc: WD-repeat protein, [Aspergillus flavus NRRL3357] gi|220688381|gb|EED44734.1| WD-repeat protein, [Aspergillus flavus NRRL3357]
  misc_feature (2)..(801): NCBI GI: 115400003 Blast Desc: conserved [Aspergillus terreus NIH2624] gi|114191256|gb|EAU32956.1| conserved [Aspergillus terreus NIH2624]
  misc_feature (26)..(824): NCBI GI: 154310142 Blast Desc: BC1G_06991 [Botryotinia fuckeliana B05.10] gi|150851552|gb|EDN26745.1| BC1G_06991 [Botryotinia fuckeliana B05.10]
  misc_feature (30)..(908): NCBI GI: 255956295 Blast Desc: Pc21g19090 [Penicillium chrysogenum Wisconsin 54-1255] gi|211590611|emb|CAP96806.1| Pc21g19090 [Penicillium chrysogenum Wisconsin 54-1255]
  misc_feature (30)..(970): NCBI GI: 154310156 Blast Desc: BC1G_06998 [Botryotinia fuckeliana B05.10] gi|150851559|gb|EDN26752.1| BC1G_06998 [Botryotinia fuckeliana B05.10]
  misc_feature (30)..(955): NCBI GI: 242760891 Blast Desc: ankyrin repeat-containing protein, [Talaromyces stipitatus ATCC 10500] gi|218723276|gb|EED22693.1| ankyrin repeat-containing protein, [Talaromyces stipitatus ATCC 10500]
  misc_feature: Useful for introducing or modulating the production of volatile compounds
MSRDSPGTVNNFHGNGLQNLGNISVGRDLVIADPGCGKSVLARYLADDVLPSSSTEARTTCYFFFKDDFEDQRTLTSALSCLLHQLFEQHPTLLSNDILSKLENEDQRVASEFENLWDVLVLIAKLVTKSAHGVLQKIVCIIDALDECKNAFRLVKALTELYRKHGVITGLKFIITGRPYPEIYQSFRTLEDSALMVHLRGESQQEVDKIALEISTALDQRIDELSKRRQFSIEETRLLRDKLNSFSNRTYLWVHLVFTVIEAEHTVFLTKDELRRVPDDLPHTVEEAYDKLLSKCHDYKKAMRILHYIVGADRPLHLSEIAIMLALRKEHRNYANLKGDCLSPDRLQTALRQACGLFVVVKDSQVFLLHQTAREFLMRSSNMTRQARPELKWQHSIDPEESHCLISEVCLRYLNLEDFDTRPRNCTDSFIFLEYAASTWADHYRQAHAVTDVELESLAMQLCHKSSTRCSNWLEVYSEVRGRDLNFPEEFPTSLHIASYFGLVDLVELILRENDEKANNTKRSKSGRTALSWACEKGHDTIVQLLLSQVSKRRILLSRLSLSSSLVNQSDQHGRTPLWFAATHGHCEIVRTLLEKGARAEICDEFGLKPLAWARYQRHDDIVKILTKTVGRKNSRIASEDLQDEQGATLLMEAAKRGSEDVVKLLVDRGVRLDTADIFGDAALILAAWSGRLGVVKALLQCGANVNVVDRRGETALMKAAHGGNVGVVETLLDYGIEVNIRDDSKWTALMHACARGHCDVIIKTLLDHGADDFKLDINDANSTSLWTATKRGDISIVKLLLDHGPKINLSEPYGFVALDIAVAYSQTEAVELLLNHCSNLETRNEKGQTALIVAAGTDDQIVYDIYKIVRLLLNRGAHVDATDDDGQTALMSAADMCNEGIVRILLDYGAQVNTMDKHSQTALMRAAGGFCFTRWDAKWDVIEMLLNKGADPDAIDHTGRTAIAHAETYKPSDAPRIRKMIAEHKNRRT

SEQ ID NO: 1810 - DNA, 5869 bp, Muscodor strobelii
  misc_feature: SGI EST ID NO. CUFF.4698.0
  misc_feature: Variant of the nucleotide sequence at SEQ ID NO 1808
tagcaactgacgtaaatgctcagagcatcttcggtgatgccagtttaaaacgcgctggaacttaccaagaggattaacgcccaattgacctatgtatcggcatactcacgcgaggcttctcatgagagcgctaagatagttttgcttttgcttggacgggcaacatggacgtgggtcatatgcctcttcgcaaaggcgactccagcaaatgtcagtagtcgacatctacccaaatcttacaacagtctggcgctcctactttagacttctctgcagcagtgcaaacaaagtgctggggcatcatactgtccaatgcagtaagacactacattatgcccagccattgggcgaagctccaggctgaaaccgccaccaatgcatcgcctgcctttcaagtcttgaaaggctcagccgtccgactttcaatttcagaacatgagcgtttgaacagagtaagtactgacacaagctggttctactactcccatcccttctctacgggtatactattgcagcataccagcaccgaacgagaatcgggctgtgaactgtgatgacagcaacacactgtcacccatcaacattcgtttcaactacgcaaagaatttgtcaggcgttgctttgagataccgatacgcgaggtgccttacttgcaccggtcatagaatcttgacagtatcacgtttctcgaccgtaggccaaagtcatcttcacctaaatgcacacacagtctcgcctgtgtgtctcaatgaatgcaaatttctacttcaatacgtactacgttcatcgtcgtaatactttcaatttgctcaccgccatgcagcgcacgcatatgctgtctcttactactagcttcttcataactcccattgcggctttctttcactactcccagtggttcccccagtatagttcccatcttcgcaacctattatcaaccgaatgccgagctcaatatcacgcatacatagccacctgcagaacatctctgtcgaacacagacacctgtccttcgtccctagtctcagattgcctgcttgaccatatctcagaaactgacaaagccaacttcggtgctgccggaattgtcttgggcctcttgccagcaacactcagcctcatcggctcaagcacagttgacacagggctcatttcattacgccgacccatactcgcctttctcattggcatgggaacaccagctgtatctcccattcgaacaattgaatatcgtcatcctatcgaaatactccgagtgacagaatgcggccaaagtagttcgctcaatataccaacagctgtgcgtctctcatatagaaacattctgattagtggactcgagtacacgttggcagcagcagcagtgaccaatatattccatgtaagctgggagctgtccatcaagacagtcaatagtttctcctccaacacagtctacctacctatcctctggtccttttccgcaatacttattcacgggcttggtgccaccactatatatcttcgcgtccggttgactgccatccacacctcaaagtcgacaccaaggagtttctgccagtccttgagtcacaagttagctcaggaattacgacccagctactgtgagacgagccaaatatacacccttgaaagcaaaccagagtcctatgcattcatgtgttttgcttggttaacctcaattaccatcgtcttccatatgttgtttgggacagtcgtacttggcagcgtgctttttattggcacacaggacgctgtcgctgttgctgcgaggttttttgcttctgttattatatgtcggacgatcactgtttttgagatacgtgggacgagaagaacggttgcgatcaactgatcgaagtatcattctataagtaacactaggcgccatttagttctaagcaaacttgcaactcctctcttgatatgaaaaataggatttgtgtctatggccaaggtacggagctgtgtgagtatgagattttggatctgtaagcagggcacttgcagcgtgtaggactttcttgcatcttattggacaatacgtgtgagttggctacataggcctaactgcgccacagttgagtatcattgagggcgccgactacccaacagcctgcccgcttctcctcatcacgcactcctcatcacgcactcctcaccgtgggttaacgacagtcattgtcatctaatccacaggactcatcatgtcgcgcgacagtcctggcaccgtgaacaattttcatgggaatggtttgcagaatctcggtaatatcagtgtcggaagagacttggtcatagggacgaacgaaggtagcgatgacacgcatcgacgacgtgcccattgtctacgccggcttcatacttcaccatataaggaacgcaagaacataaatctccgacgcgcacatggtacatgtgaatggtttattgatcatagcctctttcaaagatggcgagataataagtcggcgttgctttgggtctcagcagatcctggctgtggcaaatccgtcctagcgagatatctagcagacgatgtcttaccttcgagctctaccgaggccagaacgacttgttatttcttcttcaaagacgattttgaagatcaaagaaccctgacgagtgctctctcctgcctcttgcatcaactcttcgaacaacatcctactctgctgtcgaatgacattctcagcaaattagaaaatgaagaccaacgcgtcgcatctgagttcgaaaacctttgggatgtcctcgtattgatagcgaagctcgtcacaaaatcagcgcacggtgtcctccaaaaaatagtctgcataatcgatgccctcgatgaatgtaagaatgctttccgcctagtaaaagctctgacggagctgtacaggaagcatggagttatcaccgggctgaagttcatcatcactggccgcccgtatcccgaaatttatcaatcgtttcggacccttgaggattctgcactgatggttcacttgaggggggagagtcagcaagaggtggacaaaattgcgctcgaaatctccactgctcttgatcaacgaattgatgaactaagtaaacggcgccagttcagtatagaagagacaagactcctgcgggataagttgaacagcttcagtaaccgcacatatttatgggttcatctagtcttcaccgtcatcgaagccgaacacactgttttcctaacaaaagatgaattacgtcgcgttccggacgacttgccccatacagttgaagaagcctacgacaaacttctttccaaatgtcacgattacaaaaaagccatgaggatattgcattatattgttggagcagaccgtccattgcatctttcggaaatagctataatgctagccttgagaaaagagcaccgaaactatgcgaatctcaagggcgactgcttatcgccggacaggttgcagactgctcttcgacaagcatgtgggctttttgttgttgtcaaagattcgcaagtctttcttctccatcaaacagcgcgagaattcctaatgcggtcctcgaacatgactaggcaagctcgtccggaattgaaatggcagcattccattgacccggaagaatctcattgtctgatttccgaagtgtgtctacggtatctaaaccttgaagatttcgacaccagacccagaaattgtacggacagttttattttcctggaatacgctgcaagtacctgggcagatcattatcgtcaagctcatgctgtgactgacgtggagttggaatctctggccatgcaactttgccacaaaagttcgacccgttgttcaaactggctagaagtgtatagtgaagtacgaggtcgtgatctaaactttcccgaggaatttcccacatccttacatattgcgtcttacttcggtttggttgatttggttgaacttatactccgagaaaatgacgaaaaggccaataacacaaaacgctcaaaaagcgggcgtaccgcactttcctgggcctgcgagaaaggacatgacaccatagtacagcttctcttaagtcaagtatctaaacgacgtatcctattgagccgcctgtcattatcttcctctttggtgaatcagtcagatcaacacggcagaaccccgctctggttcgcagcaacgcatgggcattgcgagattgtccggaccctattggaaaagggcgcacgagcagaaatttgcgacgaattcggcctcaagccgcttgcctgggcgcgttatcaacggcacgatgacatcgtcaaaattctgacgaaaacggttggccgcaagaattctcggatagcatctgaggaccttcaagacgaacagggtgccacattgctcatggaagcggcgaagcgcggcagcgaagatgtcgtgaagttgctcgtagaccgcggtgttcggttggatactgcagatatatttggtgacgctgctttgatattggcagcatggtccggccgcctcggtgtggtcaaagcattgttgcagtgtggcgcaaacgtcaatgtagtagatcgacggggcgagactgcattgatgaaagcggcacatggtggcaatgtaggtgtggtcgaaactttgctggattatggcattgaagtcaatattcgagatgactcaaaatggactgctttgatgcatgcgtgcgcaaggggtcattgtgatgtaataatcaagacgttgttagaccatggcgccgacgatttcaaactcgatatcaacgatgcaaattccaccagtctgtggactgcaacaaaacggggcgatattagcatcgtcaaattattgttagatcatggccccaagatcaatctctcggagccatatggctttgttgctttagatattgctgtggcgtattcccagacggaagccgtcgagctgctcttgaaccactgcagtaatctcgaaaccagaaacgaaaaagggcagacagctttgatcgtagctgcagggactgacgatcaaattgtttatgatatatacaaaatagtcaggctgctactgaaccgtggtgcacatgtagatgcgacagatgacgacgggcagacggctttgatgagtgctgccgatatgtgcaatgagggtattgtaagaatacttttggactacggtgcccaggtcaatacgatggataaacatagccagacggctttgatgagagctgccggcggcttttgctttacccgttgggacgcaaaatgggatgttatagagatgcttctgaataagggcgctgatccagatgctattgatcatactggccggacagccattgcgcacgccgagacatataagcccagcgatgctccaagaattcgaaaaatgattgcagaacacaagaatcgacgaacttagccacgcagcggcaatagcaacatccccaaaggaaggagaaacccaattcagtatcactctacctgttattttcggcgtggaacggctatgatgggaagggatgttaataaaagggactcactcatgtcaggttaatcaagataaacggcggagccattaggtagatggttgccagtttctgtgtttaatgtgaagggtattacctgagggtcatgctgggtattacgcgaacaatggaccgtactatgcacgagaagataggagttctgacagaaatcattgggaccagaagactttctcaaagtgtggattgtatttgaatcatagttgcaactgaaaacagggcctcccgtctagccgtcggctgttatctttcatagaatggaaaatctaacctgaatgctccgctcaggatacgggccgagtgcaatttggcgattatcggcttgacatgtcttgtcagatgttaagattgtgataaagactccgttcaatttgat

SEQ ID NO: 1811 - DNA, 1563 bp, Muscodor strobelii
  misc_feature: SGI cDNA ID NO. 560216
  misc_feature: Encodes the peptide sequence at SEQ ID NO 1812
atgcccgtcccggaccagaaggcgtgcctcatcgtcatcgacggctggggcatcccgaccaaggacagccatggggacgccatcaccgccgccaacacccccgtcatggacgagctcataaagagtgctacgggctatactgaactcgaggcctcgtctctggctgttggtctgcctgaggggctgatgggcaactcggaagtcggccacttgaacatcggagctggccgtgttgtctggcaggatgttgttcgcatcgaccaaacgatcaagaagggcgagtttgccaagaacgaggtcatcagcaaggtcttacaggccgccaagaatggaaatggacgtcttcacttgtgcggtctcgtctcccacggcggtgtccactccaagcaaacccacctgtacgccctcctcgaggccgccaaggccgccggtgtccccaaggtcttcatccacttcttcggcgacggccgcgataccgaccccaagtccggcgctggctacatggaggagcttctcgggaagatcaaggagataggcgttggccagatcgcgaccgttgtcggccgttactacgccatggaccgtgacaagcgatgggagcgtgtcgagatcgccctcaagggcatgattctcggcgagggagaggagagctccgaccccgtcaagaccatcaaggagcgatacgagaaggatgagaaggatgagtttctcaagcccatcatcgtcagcggtgacgagggccgcatcaaggacggcgacgaggtcttcttcttcaactaccgatccgaccgtgcccgccagatcacccagctccttggagactacgatcgctctccccgtcccgacttcccctaccccaaggacatccacttggtgaccatgactcagtacaagatcggctacccgttcgagatcgccttcgagccccagcgcatgggcaacgtgctggccgaatggctaggcaagcaggaggtcaggcaggtgcacattgccgagacggagaagtatgcccacgtcaccttcttcttcaacggcggcgtagagaaggttttcgcgctggaggagcgtgatgagtcacaggatctggtgccatcgaacaagaacgtgccgacctacgacaaagcccccgagatgtcggccgagggcgtcgggaagcaggtggctaagcgtcttggagagggcaggttcccgttcgtgatgaacaactttgcgcccccggacatggttggccacacgggtgtgtacgaggctgccattattgggtgcgaggccaccgacaaggccattggcgtgatccgcgaggcttgcaagaaggagggctatatcctgttcattacttccgaccacggcaatgcggaggagatgaagttccccgacggcaagcccaagacgtcgcacacgaccaacaaggtgccgttcatcatggacaacgcgcccaagggctggtctctgaagaagggcgatgagggcgtgctgggcgatgttgcccctacggtccttactgccatgggtctccctgtccctgatgagatgacgggaacctcactgcttgttaagtcttag

SEQ ID NO: 1812 - protein, 520 aa, Muscodor strobelii
  misc_feature: SGI Peptide ID NO. 560216
  misc_feature (4)..(366): Pfam Id: PF06415 Pfam Desc: BPG-independent PGAM N-terminus (iPGM_N)
  misc_feature (377)..(496): Pfam Id: PF01676 Pfam Desc: Metalloenzyme superfamily
  misc_feature (377)..(474): Pfam Id: PF01676 Pfam Desc: Metalloenzyme superfamily
  misc_feature (4)..(520): NCBI GI: 116203495 Blast Desc: conserved [Chaetomium globosum CBS 148.51] gi|88175759|gb|EAQ83227.1| conserved [Chaetomium globosum CBS 148.51]
  misc_feature (4)..(520): NCBI GI: 171679573 Blast Desc: protein product [Podospora anserina] gi|170939412|emb|CAP64640.1| protein product [Podospora anserina]
  misc_feature (4)..(520): NCBI GI: 85094513 Blast Desc: NCU02252 [Neurospora crassa OR74A] gi|28921353|gb|EAA30660.1| NCU02252 [Neurospora crassa OR74A] gi|40804637|emb|CAF05897.1| phosphoglyceromutase [Neurospora
  misc_feature (1)..(520): NCBI GI: 46123355 Blast Desc: FG06055.1 [Gibberella zeae PH-1]
  misc_feature (5)..(520): NCBI GI: 156042436 Blast Desc: SS1G_11015 [Sclerotinia sclerotiorum 1980] gi|154695402|gb|EDN95140.1| SS1G_11015 [Sclerotinia sclerotiorum 1980]
  misc_feature (5)..(513): NCBI GI: 145610789 Blast Desc: conserved [Magnaporthe grisea 70-15] gi|145018150|gb|EDK02429.1| conserved [Magnaporthe grisea 70-15]
  misc_feature (1)..(520): NCBI GI: 256733012 Blast Desc: [Nectria haematococca mpVI 77-13-4]
  misc_feature (5)..(520): NCBI GI: 154300406 Blast Desc: BC1G_11392 [Botryotinia fuckeliana B05.10] gi|150856715|gb|EDN31907.1| BC1G_11392 [Botryotinia fuckeliana B05.10]
  misc_feature (5)..(520): NCBI GI: 119492039 Blast Desc: phosphoglycerate mutase, 2,3-bisphosphoglycerate-independent [Neosartorya fischeri NRRL 181] gi|119411674|gb|EAW21617.1| phosphoglycerate mutase, NRRL
  misc_feature (5)..(520): NCBI GI: 70999946 Blast Desc: phosphoglycerate mutase, 2,3-bisphosphoglycerate-independent [Aspergillus fumigatus Af293] gi|66852327|gb|EAL92652.1| phosphoglycerate mutase, [Aspergillus
  misc_feature (10)..(519): SWISSPROT Homolog: EC 5.4.2.1 Phosphoglycerate mutase
MPVPDQKACLIVIDGWGIPTKDSHGDAITAANTPVMDELIKSATGYTELEASSLAVGLPEGLMGNSEVGHLNIGAGRVVWQDVVRIDQTIKKGEFAKNEVISKVLQAAKNGNGRLHLCGLVSHGGVHSKQTHLYALLEAAKAAGVPKVFIHFFGDGRDTDPKSGAGYMEELLGKIKEIGVGQIATVVGRYYAMDRDKRWERVEIALKGMILGEGEESSDPVKTIKERYEKDEKDEFLKPIIVSGDEGRIKDGDEVFFFNYRSDRARQITQLLGDYDRSPRPDFPYPKDIHLVTMTQYKIGYPFEIAFEPQRMGNVLAEWLGKQEVRQVHIAETEKYAHVTFFFNGGVEKVFALEERDESQDLVPSNKNVPTYDKAPEMSAEGVGKQVAKRLGEGRFPFVMNNFAPPDMVGHTGVYEAAIIGCEATDKAIGVIREACKKEGYILFITSDHGNAEEMKFPDGKPKTSHTTNKVPFIMDNAPKGWSLKKGDEGVLGDVAPTVLTAMGLPVPDEMTGTSLLVKS

SEQ ID NO: 1813 - DNA, 1945 bp, Muscodor strobelii
  misc_feature: SGI EST ID NO. CUFF.4989.1
  misc_feature: Variant of the nucleotide sequence at SEQ ID NO 1811
gcttcttctctcatgtttactagattctaataaaatcacgcaaccaccataaacattcacatttgctgcttttcagtctttcggtgatagattgcatcgtgttttaatagacgacatagacgacaatgcccgtcccggaccagaaggcgtgcctcatcgtcatcgacggctggggcatcccgaccaaggacagccatggggacgccatcaccgccgccaacacccccgtcatggacgagctcataaagagtgctacgggctatactgaactcgaggcctcgtctctggctgttggtctgcctgaggggctgatgggcaactcggaagtcggccacttgaacatcggagctggccgtgttgtctggcaggatgttgttcgcatcgaccaaacgatcaagaagggcgagtttgccaagaacgaggtcatcagcaaggtcttacaggccgccaagaatggaaatggacgtcttcacttgtgcggtctcgtctcccacggcggtgtccactccaagcaaacccacctgtacgccctcctcgaggccgccaaggccgccggtgtccccaaggtcttcatccacttcttcggcgacggccgcgataccgaccccaagtccggcgctggctacatggaggagcttctcgggaagatcaaggagataggcgttggccagatcgcgaccgttgtcggccgttactacgccatggaccgtgacaagcgatgggagcgtgtcgagatcgccctcaagggcatgattctcggcgagggagaggagagctccgaccccgtcaagaccatcaaggagcgatacgagaaggatgagaaggatgagtttctcaagcccatcatcgtcagcggtgacgagggccgcatcaaggacggcgacgaggtcttcttcttcaactaccgatccgaccgtgcccgccagatcacccagctccttggagactacgatcgctctccccgtcccgacttcccctaccccaaggacatccacttggtgaccatgactcagtacaagatcggctacccgttcgagatcgccttcgagccccagcgcatgggcaacgtgctggccgaatggctaggcaagcaggaggtcaggcaggtgcacattgccgagacggagaagtatgcccacgtcaccttcttcttcaacggcggcgtagagaaggttttcgcgctggaggagcgtgatgagtcacaggatctggtgccatcgaacaagaacgtgccgacctacgacaaagcccccgagatgtcggccgagggcgtcgggaagcaggtggctaagcgtcttggagagggcaggttcccgttcgtgatgaacaactttgcgcccccggacatggttggccacacgggtgtgtacgaggctgccattattgggtgcgaggccaccgacaaggccattggcgtgatccgcgaggcttgcaagaaggagggctatatcctgttcattacttccgaccacggcaatgcggaggagatgaagttccccgacggcaagcccaagacgtcgcacacgaccaacaaggtgccgttcatcatggacaacgcgcccaagggctggtctctgaagaagggcgatgagggcgtgctgggcgatgttgcccctacggtccttactgccatgggtctccctgtccctgatgagatgacgggaacctcactgcttgttaagtcttagaaacttctcgcataatagaaaaaggagacatagtatagatagatgatgacgatgatgactaagagacacaatagagataccaaataagcaaattcgaaccacccatactaccaataatgatatccagcatatgtgagcggataataattcatctcaacactcgtagaaaaaggccaatcttaatacgaatgattagagaaatggattactaacccaggaaatgacagacacctttcaaagagtagaaatggtctaga

SEQ ID NO: 1814 - DNA, 711 bp, Muscodor strobelii
  misc_feature: SGI cDNA ID NO. 560217
  misc_feature: Reduced expression when VOC is produced
  misc_feature: Encodes the peptide sequence at SEQ ID NO 1815
atggactcggaagacccccaggagcgccccgagggcatcaccgccatcatcaatggcctcgagcgatacaaccccgaggctgtcggcaacttggaggagtacctgcgccaccagtgcgagaaccgatacaccgactgcaacgccaaccgcacccttctcaagctctaccaactgaaccccgaccgcgccaaagacgaagtaataaccaacatcctcgtcaaagccctctgctgttttccttcgccgcaattcagcctcgccctgcacctcatccccccttcgtccctctctcccgccacagcccgcagcgaagagctccccgaggccatcgccaagctgcgcgccctcaacgaccagctgcagggctcccagtacgccaagttctgggccaccctcgacagcgacgatctgtacgccgacctgacgaccgatatcgagggcttcgaggacctggtcagggtcaggatcgctacgctcgttagtcatgcgtatagggagattgagctgggtttgttggagagttggttggggctggatggtgatgaggccgagaagtttctgagtgagacggcgggttggagcgtggatggcgagaaggtgggtattccgcggaatgccgagaatgaggcgaagaaggcggatgtgcgggaggatgttaatgttgatatgttctcgcgtgtcattcggagggcttgggaggagaatgcttga

SEQ ID NO: 1815 - protein, 236 aa, Muscodor strobelii
  misc_feature: SGI Peptide ID NO. 560217
  misc_feature (51)..(178): Pfam Id: PF03399 Pfam Desc: SAC3/GANP/Nin1/mts3/eIF-3 p25 family
  misc_feature (1)..(236): NCBI GI: 85091529 Blast Desc: NCU09707 [Neurospora crassa OR74A] gi|74615175|sp|Q7S2R9.1|EIF3K_NEUCR RecName: Full=Eukaryotic translation initiation factor 3 subunit K; Short=eIF3k; AltName:
  misc_feature (2)..(236): NCBI GI: 39943688 Blast Desc: conserved [Magnaporthe grisea 70-15] gi|74588279|sp|Q5G574.1|EIF3K_MAGGR RecName: Full=Eukaryotic translation initiation factor 3 subunit K; Short=eIF3k; AltName:
  misc_feature (1)..(236): NCBI GI: 261354539 Blast Desc: conserved [Verticillium albo-atrum VaMs.102]
  misc_feature (1)..(236): NCBI GI: 171678603 Blast Desc: protein product [Podospora anserina] gi|170937371|emb|CAP62029.1| protein product [Podospora anserina]
  misc_feature (1)..(236): NCBI GI: 46123875 Blast Desc: FG06315.1 [Gibberella zeae PH-1]
  misc_feature (1)..(234): NCBI GI: 256732921 Blast Desc: NECHADRAFT_59834 [Nectria haematococca mpVI 77-13-4]
  misc_feature (8)..(236): NCBI GI: 156042400 Blast Desc: SS1G_10997 [Sclerotinia sclerotiorum 1980] gi|238686686|sp|A7F080.1|EIF3K_SCLS1 RecName: Full=Eukaryotic translation initiation factor 3 subunit K; Short=eIF3k; AltName:
  misc_feature (8)..(236): NCBI GI: 154300348 Blast Desc: BC1G_11363 [Botryotinia fuckeliana B05.10] gi|229501208|sp|A6SDU6.1|EIF3K_BOTFB RecName: Full=Eukaryotic translation initiation factor 3 subunit K; Short=eIF3k; AltName:
  misc_feature (8)..(236): NCBI GI: 189200573 Blast Desc: conserved [Pyrenophora tritici-repentis Pt-1C-BFP] gi|187983722|gb|EDU49210.1| conserved [Pyrenophora tritici-repentis Pt-1C-BFP]
  misc_feature (8)..(236): NCBI GI: 169624921 Blast Desc: SNOG_15727 [Phaeosphaeria nodorum SN15] gi|121934484|sp|Q0TXH0.1|EIF3K_PHANO RecName: Full=Eukaryotic translation initiation factor 3 subunit K; Short=eIF3k; AltName:
  misc_feature: Useful for introducing or modulating the production of volatile compounds
MDSEDPQERPEGITAIINGLERYNPEAVGNLEEYLRHQCENRYTDCNANRTLLKLYQLNPDRAKDEVITNILVKALCCFPSPQFSLALHLIPPSSLSPATARSEELPEAIAKLRALNDQLQGSQYAKFWATLDSDDLYADLTTDIEGFEDLVRVRIATLVSHAYREIELGLLESWLGLDGDEAEKFLSETAGWSVDGEKVGIPRNAENEAKKADVREDVNVDMFSRVIRRAWEENA

SEQ ID NO: 1816 - DNA, 1303 bp, Muscodor strobelii
  misc_feature: SGI EST ID NO. CUFF.4747.0
  misc_feature: Variant of the nucleotide sequence at SEQ ID NO 1814
gcagcgtatggcgacgacgatagtgaattctgagaatagatagcctgagacaaatcttcgtctctcttgcacctatcactccgcgtgcaacttggcgtcataacgattctgtgacagagtagaccgataactgtatctgataccccacaaccaatttttgagtgtcgaccgccccgcagtagcgacaaaccaccactgccaccagagagcgagagagtctcgcgactacccaccctcacttcacatcaccacatcacaactcacaagatggactcggaagacccccaggagcgccccgagggcatcaccgccatcatcaatggcctcgagcgatacaaccccgaggctgtcggcaacttggaggagtacctgcgccaccagtgcgagaaccgatacaccgactgcaacgccaaccgcacccttctcaagctctaccaactgaaccccgaccgcgccaaagacgaagtaataaccaacatcctcgtcaaagccctctgctgttttccttcgccgcaattcagcctcgccctgcacctcatccccccttcgtccctctctcccgccacagcccgcagcgaagagctccccgaggccatcgccaagctgcgcgccctcaacgaccagctgcagggctcccagtacgccaagttctgggccaccctcgacagcgacgatctgtacgccgacctgacgaccgatatcgagggcttcgaggacctggtcagggtcaggatcgctacgctcgttagtcatgcgtatagggagattgagctgggtttgttggagagttggttggggctggatggtgatgaggccgagaagtttctgagtgagacggcgggttggagcgtggatggcgagaaggtgggtattccgcggaatgccgagaatgaggcgaagaaggcggatgtgcgggaggatgttaatgttgatatgttctcgcgtgtcattcggagggcttgggaggagaatgcttgagcggtcttcgtcaccgtattgcgacactacactacgcaagtgctattacgactcaacctggcatcacttacctacttcatttgggaaactcagcatggctctcagcatgtgtcttgagacaatgcagatagcaagagacgatcatggctgtggatgatagatcgacgaaggagagggtatgcattcagaggcggagggctacaaaaaggaacagtgtttcgggcgttggggaaattccaactcggctcgcagctcgcgcgagtcgaggagctacggctttcatagagtaggcatgaataaattagtatcaacattttctcggcgc

SEQ ID NO: 1817 - DNA, 1362 bp, Muscodor strobelii
  misc_feature: SGI cDNA ID NO. 560218
  misc_feature: Encodes the peptide sequence at SEQ ID NO 1818
atggccccgtacgacagcgattcttccgaaggcgaagaggaagacttcactgagaccaatgtcctccttggttatgcttcaaaagacgcagatggcgaccaaacgagcagattaggaggagagcctgaatggctggacacctcgacaccaccttctgcagcatttgcccgctgtaagatttgcaacgacctcatggtcctcctcctccaactcaacggcgagctccccgatcgctttcccggccacgaacggcgcctctttgtcttcgcctgcaagaagaaatcatgtcgacgccgagaaggcagtatacgcgcactgcggagtctacgtgttgctccgggtagtaaagccacgccgttaaaagaagagaagaagaagcaggagaaagagaaggcaccgcccaaagagacaccaaaaccggctgcaaatttgggcgagacgctcttcggcgcgaagacactgggaggagggttaggaggcgcaaacccattcgctactagcagtacttcgacatccagtaatcccttcgccagcagcaacccattcgcaaccaaacccaccgagccctcaccacccaaagacacacccaccacagccgacgaaacaccaacatcctcacctcccaaacctataaccggcgaactcaaagaatacctaaatatcctccccaaaaccttcgcccaaactctctccctcgacaacaacacgcccaccacaccacccccagctcccgagccctggccatccaccctgcccaagccctacccaatatcctacctctccgaagccgaatacgagaccctcgaccccacgccttcacccatcccgcaagccacgaggctagacgtcgacgcggacgaaaagggcggaccaagcggtgggaaagaagataaagagacctacgagagcacaatggacaccacgtttcaaaagtttgccgatcgtctatcacagaatcctgagcaaagcattcggtatgaattcggtgggacacctctcttatactctaagacggacgctgtcggcaaactcctcgctccctcagaatcttctgcccctgctcattctggaagcataaatgctgccatggctagcagtagcacaggtgtaaaaggcataccgcgctgcgcgaactgtacagggagtagagtattcgaagtccagctttgtcctcacgctatcatagaactggaagctgaggagctgagtctggagggtatggattggggcactgttattgttggggtttgtgagagggattgtcaggctagaggggtggaggagggggatgttgggtatgttgaggagtggtgtggggtgcagtgggaggaggttggtagtagtgctccggggagacgatga

SEQ ID NO: 1818 - protein, 453 aa, Muscodor strobelii
  misc_feature: SGI Peptide ID NO. 560218
  misc_feature (256)..(449): Pfam Id: PF04194 Pfam Desc: Programmed cell death protein 2, C-terminal domain
  misc_feature (373)..(436): Pfam Id: PF04194 Pfam Desc: Programmed cell death protein 2, C-terminal domain
  misc_feature (1)..(445): NCBI GI: 85091531 Blast Desc: NCU09708 [Neurospora crassa OR74A] gi|28920340|gb|EAA29711.1| conserved [Neurospora crassa OR74A]
  misc_feature (1)..(446): NCBI GI: 154300350 Blast Desc: BC1G_11364 [Botryotinia fuckeliana B05.10] gi|150856687|gb|EDN31879.1| BC1G_11364 [Botryotinia fuckeliana B05.10]
  misc_feature (1)..(446): NCBI GI: 156042402 Blast Desc: SS1G_10998 [Sclerotinia sclerotiorum 1980] gi|154695385|gb|EDN95123.1| SS1G_10998 [Sclerotinia sclerotiorum 1980]
  misc_feature (1)..(445): NCBI GI: 116204125 Blast Desc: CHGG_09946 [Chaetomium globosum CBS 148.51] gi|88176074|gb|EAQ83542.1| CHGG_09946 [Chaetomium globosum CBS 148.51]
  misc_feature (1)..(445): NCBI GI: 46123873 Blast Desc: FG06314.1 [Gibberella zeae PH-1]
  misc_feature (1)..(445): NCBI GI: 171678605 Blast Desc: protein product [Podospora anserina] gi|170937372|emb|CAP62030.1| protein product [Podospora anserina]
  misc_feature (1)..(445): NCBI GI: 256732468 Blast Desc: NECHADRAFT_38692 [Nectria haematococca mpVI 77-13-4]
  misc_feature (14)..(445): NCBI GI: 261354540 Blast Desc: conserved [Verticillium albo-atrum VaMs.102]
  misc_feature (1)..(445): NCBI GI: 189200575 Blast Desc: conserved [Pyrenophora tritici-repentis Pt-1C-BFP] gi|187983723|gb|EDU49211.1| conserved [Pyrenophora tritici-repentis Pt-1C-BFP]
  misc_feature (1)..(445): NCBI GI: 145606917 Blast Desc: MGG_03856 [Magnaporthe grisea 70-15] gi|145014544|gb|EDJ99112.1| MGG_03856 [Magnaporthe grisea 70-15]
MAPYDSDSSEGEEEDFTETNVLLGYASKDADGDQTSRLGGEPEWLDTSTPPSAAFARCKICNDLMVLLLQLNGELPDRFPGHERRLFVFACKKKSCRRREGSIRALRSLRVAPGSKATPLKEEKKKQEKEKAPPKETPKPAANLGETLFGAKTLGGGLGGANPFATSSTSTSSNPFASSNPFATKPTEPSPPKDTPTTADETPTSSPPKPITGELKEYLNILPKTFAQTLSLDNNTPTTPPPAPEPWPSTLPKPYPISYLSEAEYETLDPTPSPIPQATRLDVDADEKGGPSGGKEDKETYESTMDTTFQKFADRLSQNPEQSIRYEFGGTPLLYSKTDAVGKLLAPSESSAPAHSGSINAAMASSSTGVKGIPRCANCTGSRVFEVQLCPHAIIELEAEELSLEGMDWGTVIVGVCERDCQARGVEEGDVGYVEEWCGVQWEEVGSSAPGRR

SEQ ID NO: 1819 - DNA, 1641 bp, Muscodor strobelii
  misc_feature: SGI EST ID NO. CUFF.4708.0
  misc_feature: Variant of the nucleotide sequence at SEQ ID NO 1817
aaaaaagtccagatcatatcgcgacgacatctccgaaaacaactactacacatcacatccgcaaacatggccccgtacgacagcgattcttccgaaggcgaagaggaagacttcactgagaccaatgtcctccttggttatgcttcaaaagacgcagatggcgaccaaacgagcagattaggaggagagcctgaatggctggacacctcgacaccaccttctgcagcatttgcccgctgtaagatttgcaacgacctcatggtcctcctcctccaactcaacggcgagctccccgatcgctttcccggccacgaacggcgcctctttgtcttcgcctgcaagaagaaatcatgtcgacgccgagaaggcagtatacgcgcactgcggagtctacgtgttgctccgggtagtaaagccacgccgttaaaagaagagaagaagaagcaggagaaagagaaggcaccgcccaaagagacaccaaaaccggctgcaaatttgggcgagacgctcttcggcgcgaagacactgggaggagggttaggaggcgcaaacccattcgctactagcagtacttcgacatccagtaatcccttcgccagcagcaacccattcgcaaccaaacccaccgagccctcaccacccaaagacacacccaccacagccgacgaaacaccaacatcctcacctcccaaacctataaccggcgaactcaaagaatacctaaatatcctccccaaaaccttcgcccaaactctctccctcgacaacaacacgcccaccacaccacccccagctcccgagccctggccatccaccctgcccaagccctacccaatatcctacctctccgaagccgaatacgagaccctcgaccccacgccttcacccatcccgcaagccacgaggctagacgtcgacgcggacgaaaagggcggaccaagcggtgggaaagaagataaagagacctacgagagcacaatggacaccacgtttcaaaagtttgccgatcgtctatcacagaatcctgagcaaagcattcggtatgaattcggtgggacacctctcttatactctaagacggacgctgtcggcaaactcctcgctccctcagaatcttctgcccctgctcattctggaagcataaatgctgccatggctagcagtagcacaggtgtaaaaggcataccgcgctgcgcgaactgtacagggagtagagtattcgaagtccagctttgtcctcacgctatcatagaactggaagctgaggagctgagtctggagggtatggattggggcactgttattgttggggtttgtgagagggattgtcaggctagaggggtggaggagggggatgttgggtatgttgaggagtggtgtggggtgcagtgggaggaggttggtagtagtgctccggggagacgatgagattattagggggatatgggatggtaaagggtacggatgaattcgatgagatgagtagagaggatgagaagcgtggtgaatcaagacgtagataactcaaggcgaggaacaagactttaggtgcaccacgtgagcgattgtcgacataggtaggtccaaaataaaaaccggaacaagatgcattgcggtccccttaaatacaggaagtggcat

SEQ ID NO: 1820 - DNA, 522 bp, Muscodor strobelii
  misc_feature: SGI cDNA ID NO. 560219
  misc_feature: Encodes the peptide sequence at SEQ ID NO 1821
atgaaggtctccttcgttttcacggcgttcatcgtcgtgctcatcaattctatcactgctatgtcacctgcccagacctctcctgttcctggttcaaatgggactctgctcactagtggcatgtactatagctgcaaggacttcagagcaatcggcgatgcgtactgtggtcgtaatggcaatacctggctcacggcttcctgcttgaggtctgaccaatcccgaacgacgtcggttctgaacctcaaccactgcatccagaacaacttcggcaagatctccccaggagccgaaggcaactttggcaagacatgcaacttcgccgttccccgaacacccgtgatgaagggcactgagctccagacacattgctccaagcctggttctaactggcctgagtatacaacacttgacctaaaccctttcattggaaatgataacggccagctaggatgctatgacgcccgtggctgttcggttgacgatccgaactgcaccgataaaccgcctgagaagtgttaa

SEQ ID NO: 1821 - protein, 173 aa, Muscodor strobelii
  misc_feature: SGI Peptide ID NO. 560219
  misc_feature (42)..(152): Pfam Id: PF08881 Pfam Desc: CVNH domain
  misc_feature (58)..(106): Pfam Id: PF08881 Pfam Desc: CVNH domain
MKVSFVFTAFIVVLINSITAMSPAQTSPVPGSNGTLLTSGMYYSCKDFRAIGDAYCGRNGNTWLTASCLRSDQSRTTSVLNLNHCIQNNFGKISPGAEGNFGKTCNFAVPRTPVMKGTELQTHCSKPGSNWPEYTTLDLNPFIGNDNGQLGCYDARGCSVDDPNCTDKPPEKC

SEQ ID NO: 1822 - DNA, 881 bp, Muscodor strobelii
  misc_feature: SGI EST ID NO. CUFF.4731.0
  misc_feature: Variant of the nucleotide sequence at SEQ ID NO 1820
ccattatgaaggtctccttcgttttcacggcgttcatcgtcgtgctcatcaattctatcactgctatgtcacctgcccagacctctcctgttcctggttcaaatgggactctgctcactagtggcatgtactatagctgcaaggacttcagagcaatcggcgatgcgtactgtggtcgtaatggcaatacctggctcacggcttcctgcttgaggtctgaccaatcccgaacgacgtcggttctgaacctcaaccactgcatccagaacaacttcggcaagatctccccaggagccgaaggcaactttggcaagacatgcaacttcgccgttccccgaacacccgtgatgaagggcactgagctccagacacattgctccaagcctggttctaactggcctgagtatacaacacttgacctaagtatgttactttcctctaaatgctcgtatataggtcacaatcaaaattttgcgcatggaaaccagagactgatgccgataacatagaccctttcattggaaatgataacggccagctaggatgctatgacgcccgtggctgttcggttgacgatccgaactgcaccgataaaccgcctgagaagtgttaagtagagtatctcaactctcagcaatctcttatcggagtatccatcagcaaaactacacggagttaaatgtcaatgcggaaaagtctgacgcagacattccgatcgtttttcagatcgactctcagaacctcgttcgtcccccgcgtctgcgggacggcagcattcctcgtatcttgatatagatgcggatagcgaccaattaaaattcgtagccaatacctgtcgagagtttaagtgctattccaagctctagacggatcttcaagtg

SEQ ID NO: 1823 - DNA, 1800 bp, Muscodor strobelii
  misc_feature: SGI cDNA ID NO. 560220
  misc_feature: Encodes the peptide sequence at SEQ ID NO 1824
atggcagaagcagggagactcacaaactctgctgttgctgacaatggtatttttcctcttgcccctaacacgaacgagacatcggagatcaaaacattgtcgagccaaacgcccgatgttaagaagggcaatacaatccagacggtcgacgaaaatgtggacgataccgacaaacacgatgataataacatgaaattatcgaacgacaaagatgatgctacgaaagttgcaaagagtgtagtcagccttgacgatgatgaagaagtggtccaatgtgctgccaccagtcacgagcatttccaaaagaacgatgacccagctatcaatcgtgatagccagggcaatgttgatgtcttggatgctacggccgagtcctcgaacaaacttgagcccatagaacctgccaacgcggacgcaaagggagacaagcgtgatcaactatacgtacataactacatcatggatgaaatggaattagagaatgtccagagatacaacaaaggtggattccatcccgttatcctaggtgatatgttggatgacaggtatcaagtggtcggaaagctaggctccggcggcttcgggacggtatggatgtgtcgagagctgcagctcaagtattggcgagcaatcaaaatcatggcggcagaccactcgattgactcaagagaaatgaagatttttgagattctgcgtgagacgtcatctgcagaggaactggaggcaaacggtattggagttccccttgaaactttttggattgagggtccgaatgggaaacatctgtgcttagtcatgcccatatacggccaatcaataagagattggcgtttgagtcaagataagcgagatcccgatttgaatcaggccgttacagatatttgcggcaagatcacacaggggttgtcgtttcttcatgaaaggggtatatgtcacggagacttccgaccatcgaatatcttgatgaaaatcgaccaagacgctcttgccgaaatcgatgaagaaacgatggacgagataatcggcgacattgaagcatttgcagtcgagaccttgtccggcgagaagcctgattctagggctccagagtatttggttactgtagtatcacctgagtggtgcaaaaagcttacagttcctgaaatcactataacagactttggcgaatcgtttcattcattcaccagtagaaaagcaacgggcatacctctcccttactctgcacccgagaacactctgctgctagggcttagttctgcaatggacttatgggctcttggctgcacattgtttgaaatttataccggatacccccatccattattcagcataccccctctgtcgatggtagagcccgaggaaaaaatgattgagcaacaggaagtcatgctcgggcccctgccagagccattccgatctgagtttgatagaaactacacaaccctgcgacccccagatttcaagtgcgaagcaagtgaacttaccgccacgtggacgctttcagggttggaatggaagaggaatcaggttacgaaagattccggctatgatgacatccttcatgtcaaagtaggaactctgagatcaaatctggctccgccaatttcaagggaaaccgtcattgccgttgcagatacaatctatgctctcctacgatggcatccgaacgaacgaatgtcagctaaagaaattttgaatctggactggctgaaagactctcaagcagctcggtccgaactcgttacctcgcctatttaccacgagaatagtgattgcgatagctattctcttcttatctag

SEQ ID NO: 1824 - protein, 599 aa, Muscodor strobelii
  misc_feature: SGI Peptide ID NO. 560220
  misc_feature (418)..(570): Pfam Id: PF00069 Pfam Desc: Protein kinase domain
  misc_feature (183)..(202): Pfam Id: PF00069 Pfam Desc: Protein kinase domain
  misc_feature (158)..(473): NCBI GI: 116191345 Blast Desc: CHGG_05390 [Chaetomium globosum CBS 148.51] gi|88181303|gb|EAQ88771.1| CHGG_05390 [Chaetomium globosum CBS 148.51]
  misc_feature (135)..(571): NCBI GI: 121709688 Blast Desc: protein kinase, [Aspergillus clavatus NRRL 1] gi|119400639|gb|EAW11064.1| protein kinase, [Aspergillus clavatus NRRL 1]
  misc_feature (154)..(571): NCBI GI: 70982656 Blast Desc: protein kinase [Aspergillus fumigatus Af293] gi|66844480|gb|EAL84818.1| protein kinase, [Aspergillus fumigatus Af293]
  misc_feature (154)..(571): NCBI GI: 159122901 Blast Desc: protein kinase, [Aspergillus fumigatus A1163]
  misc_feature (159)..(593): NCBI GI: 85089807 Blast Desc: NCU10004 [Neurospora crassa OR74A] gi|28919443|gb|EAA28883.1| [Neurospora crassa OR74A]
  misc_feature (159)..(583): NCBI GI: 85109105 Blast Desc: NCU05658 [Neurospora crassa OR74A] gi|28924372|gb|EAA33510.1| [Neurospora crassa OR74A]
  misc_feature (159)..(575): NCBI GI: 85091840 Blast Desc: NCU09189 [Neurospora crassa OR74A] gi|28920497|gb|EAA29863.1| [Neurospora crassa OR74A]
  misc_feature (156)..(574): NCBI GI: 256721211 Blast Desc: NECHADRAFT_82323 [Nectria haematococca mpVI 77-13-4]
  misc_feature (148)..(475): NCBI GI: 85109099 Blast Desc: NCU05655 [Neurospora crassa OR74A] gi|28924369|gb|EAA33507.1| [Neurospora crassa OR74A]
  misc_feature (148)..(571): NCBI GI: 46111213 Blast Desc: FG02488.1 [Gibberella zeae PH-1]
MAEAGRLTNSAVADNGIFPLAPNTNETSEIKTLSSQTPDVKKGNTIQTVDENVDDTDKHDDNNMKLSNDKDDATKVAKSVVSLDDDEEVVQCAATSHEHFQKNDDPAINRDSQGNVDVLDATAESSNKLEPIEPANADAKGDKRDQLYVHNYIMDEMELENVQRYNKGGFHPVILGDMLDDRYQVVGKLGSGGFGTVWMCRELQLKYWRAIKIMAADHSIDSREMKIFEILRETSSAEELEANGIGVPLETFWIEGPNGKHLCLVMPIYGQSIRDWRLSQDKRDPDLNQAVTDICGKITQGLSFLHERGICHGDFRPSNILMKIDQDALAEIDEETMDEIIGDIEAFAVETLSGEKPDSRAPEYLVTVVSPEWCKKLTVPEITITDFGESFHSFTSRKATGIPLPYSAPENTLLLGLSSAMDLWALGCTLFEIYTGYPHPLFSIPPLSMVEPEEKMIEQQEVMLGPLPEPFRSEFDRNYTTLRPPDFKCEASELTATWTLSGLEWKRNQVTKDSGYDDILHVKVGTLRSNLAPPISRETVIAVADTIYALLRWHPNERMSAKEILNLDWLKDSQAARSELVTSPIYHENSDCDSYSLLI

SEQ ID NO: 1825 - DNA, 5955 bp, Muscodor strobelii
  misc_feature: SGI cDNA ID NO. 560221
  misc_feature: Encodes the peptide sequence at SEQ ID NO 1826
atggcaccgcctgacctcatcgtgctccttctcggagacgaagcagaggatgttagtttcaacatcgaggtactgcatcgcaaatctcagagctcggctgctttacgcgatttcttgcaagaggcatctgatgcttgccaagttgcatttggtagtctcccgctgggcgttcgagacgaattcccacggttcatatcactgcttgacatgagcaaggagcattccaaggcaaaaggctcaccagcactcacaggttttgccctggcatactttgccaccctcgcagagttgatctatcggtctgagaatgatccaaatattttcaaatcacaccgtactctgctcattggctcgggcactggcttactacctgccgctgttgtggcggcttctcattcttgtaccgaggtcgcggagaacgccatacagtgctttccttcgtgtttcgacttcatcctacaatgctactaccgcactatatgtattgaaccctcacctgaaagttggtcgtacactattgcagacgaccagagtgagcacgagctgaaggatattcttgatacctttcatgatgagtttgacatcccacgacatagagaggcatgggtagccggaaactgcgcgggccaggtaatcatttccggaccaccatcaaccctgaagaagctcagagttcgattgcctggtctcgaccgtccggtatcacttgctttacacgcccctcacctccctaaagttgcattcgacaaagcggcaatgtccaagagcctgcaggaccggccaatcaagaagggatgcgatattatgtcaccatttctaagcgggccatatgaggcaacgcgactcggagatctgatgaacggcatcgcacaagacatttcgcaaaacacttccaacatggagatgctgctaggatacctacacgtcgatatcatagagtacatgggcgaccgccgcggatgcaatatcatccagcttggtcccttctgcgacaccccgtttttcgctagtgaattttggggaaattttgacttcaagtccgatcttgaatgcaagccaggatcaggtcgaggctctgggtctgcagacgtcgcgatcgtcggcgtctcaatgagaatgcccaaagcggacaacatgaaacaactctgggatctgatgatgaccggtactatcactcgtgaaaagataagcgaagaagcggccctttcaatgactggagaaggatgctttctttctcgtcccggagcgttcgatcctcgcgtgttcaacatgtcttctttcgaagcgacaaaaatcaagtcatgtcaccgacttctattaatgggttgtcttgaagcgctcgaagctgcaggctacagtcaacaaagcacattacccgttgcagaccgagctgctttttacttcgggcaagatggaccggtccgacgaattatgaactcgattcatgaagcagagggatatactattccaggactgctcgacactttctcagccttctccaaagcgcaagagagcggcaaatttgggggctctcgaggcttgtacgacataaacccatacttctcctcaagtgcaaccgcaatccaaacagcttgtgtcgcactgatggaccgagaatgtgatgtggcgctagcaggaggcgcacacatgattgacaatccccctgagcttgtcggatggaacgcatcaatgagccagtgcatttcagatagtcggaggactccgcgtcaggaatattgccctggcgaagcaatgggagttctggttctaaagcgtctcgatgatgcgattgccaatggcgataatattgaagcagtcatcaaaggatggtcatgcaactaccctgctggtcccgccttggatgtgccatcaccgttctactgtgatatacttggcgaggcttttgagaaggccggcatcgcgactgacgacctggggtacgtcgagcatgatggagcaagagcaagcacatattgcgaaaatgagctggagtttctctctttcgtcgccgagtgcagcccggagagaccactgccgattggaacattgaaaggcaatgttggtcatgccggaagtgccgctggagtgtcgtcagtcattaaagcactaatgatatcaaaaacggggatgattccacctcaagccgattctccagaagatcgtgccaaaaagctacgtgctcttgggctcctcgtcaacacagagcctacgctgctagatgatcgcaggaaaacaatacttgttcacgatatggacggagccgtaagtctagtacaatccaaaaagaaattacatgctaataagtcctttttgcagggcgccaacacaagcttggtgattcaagcggcaccgaaatctctccatcgtcgtcgactgtcagaccctagaagatggcacgttgtgacactctcggctgcgtcgcagactgcattacagaacaacgcacgcgagctgcacgagtacttaatcgcgaacccggaagccaaaatctcgaacattgcatacacgagcactgcacggcgcatacaatatcccatcagacaacaaattgtcgccagcacaacatgcgaacttactagccgcctaggacttgtggggataaatgcgacaatacccagaaagcccaaggtcgtgttcgtctttagtggacttggtcaggactactgcggtatcatagaagagttatatcaaagtcatcgagtgttccgcgatatcctcgatcgattagaagcgctctgctacgacatgtccttagccaagaccaagaaaaaaccgtttctcgatatcctcaagacgacttggtcgcgtgtctgtccactgattgagcgcagccttgcagtagtttgtcttgagattgctttagcagagctatggcaatcgtggggagtgaagcctgatcttgtcgtaggtcacgacttgggagaatatacagcactttgcattgcaggtattctgtctcccgctgacactttgtggcttgcatcattacgggcaaagctagcccaaaatctctgccgaaaatacgaatggggtatggtgtcgcttaagggaaaggaatctgatatcaatgataccttgaaagcgaccggggtttccgactcatgcaagatctcatggcacaacagccctctctcgcatgttgtctgcggcccctcggaagagttgtctatgttggtcaattatgggcacctggacaaattcaacccggtaacgttggacgtgccatatgctttccaatcagagcaaatgcaagcagtcgcgaagcacctgaagggccatacgagcagcctccctttcaacccgccacaaatacctgtggcgtcaatgatgaccggagagctgattaccgaaaagggtgtcttgaatgcagaatatctcaggaagtcgatccagagtccgatcaagttctccagtgctttagaagccatcgagacgaagattgagcgagatggaagtccctcgatctgggtgggcatcggactacaagaaacacttgtatatgcacgtgagactcttgagctatctgtatccaagctcctcccttcattggtacttggagaggacaactttaagaccatcgcaacgtctattggccaggcacactccgcaggaatcgatataaactggcccgagtttcatcgacccttccggggcgtactgaagttcacgagtctcccgacgtacgcgtttgacttgatcgactgtgagtctcgcgaccatcaggagtatgaacaagaagcacctgttctcgaagagaatatttctgcaaaagagaggactagacgagcgttcagaccaacagcgactttacaacatatcgagtcgcaggaggtcaacgggactatggcgaaaatctcttttacctcgtcactaaaggatagcagacttcgagatgccattgaaggacataagatccagagccaacccgtgtgtcctgtcagtgtctatattgacatggcgaccacggcagcgacctatgtgcgtaagctgctattacgtcctgagagtcaatatgtcacttggatcaagcatctcgagcttgccacgccctttaaatatgtgaatcccctccaaacaatcagtattacggctagagccgatctcgcagatgattgtatcgcatgcgtttccatctacaccaatgatcatacaggcgccgtccatgagcactgtaattgccgtgttgccctcataagcaaagagaaagcctgggaccagaatgcacttacaccgcaactccatacattgcacgatttgcgtcaatctttcgatgatcgttttgatcagggcaagtttccgaggtccaaagtttctcgggatgaaatttacgagtcgctcagcacaattctggagtacgataaccgctatctgggactagaggaggcaacaatcatcacgaagcatctgagatttggaaatccggacaatgatctcagcgctgttgtcaagctcactcgtatgccggaacacgcgcggcccagtcaccagactgctttcatcatcaacccgtaccatttggagtcactgacacaaattaccagttttatggcactagaataccttgatgaatccgaaagaatggattggacttacgtgtgcactggtcttaagaacctgagacttatcaaatcgcttcttgagggagaagaatatcatctttcactcatcaagatcaaccaaacagaaaccgatatgttgttttcaattctcgtttcacgccagagagaccgaaaagatctcatttgctccgttgaccatattaaagttcaaaagatcaagaagagcgagctgagaaaagccgtggccgatggacgacgttttaacgaccagacactcttcgagtgctcaagcgctaacgtgcgcgagcgttctacgtcgagcgagggtgagagtctggccatgactccggacgggagtgtgggaaatgacggagatggacaggaacgatttcacgacgagctcaatataatccaaggcttagattcaggtgctgtcggtgactttgaggataaaatggacccgagctcaagagatgatggaacagatgatggcgaagacctgtactctgacgacgacgcggccatcatcgaaccaaagatgttgaagtgccaggttgttggtcttagcggatatgaaccgtcacctcataagacattcttcctgattccgggtgcaggcggcacggcagatgtcttccgtgggctaccaactctaccatcccggcggccagttgtggtactcgagtccccgttgcggactgttcgcttcaactcgcagtacaaaccaactgatttggttcgagcctacgtcaacgctattatggactgtcaaccgaaaggtaaatatcatatcggtggctatggagaaggtgcagtctacgcttttgaagtagcgcgtgccttggccattttgtgtggacagaacacagtagagaaactggttctggtggacatgaaagcacgcctcccaggtaaactaggttcggtgaagccgacgatctgggacatcgccaagctcaccgaggagattgacttaggtcctgacagaaagaaggagcagaagctgatcctcatcgacgcactgtgcgcttataactggaagcccgagccctttgagccccaactacgacccgtcagcacgatagttatctgggcgaaagacggcatgtgcgagcgagacgaagacgcagaattcgagacggatttcccatgcaaaggaccggattttgcgccggagaatcagggatacttggcgtggttccatcaacgccgccatgcatacgatgctggtggttgggacacgctggtcggtacgaagatcaagacacatgtcaccgatggtgatcattttagcatgcttgacgagcctgcttctatcaagctcgcggagttgcttgaccggattcttcgagagactacgctgagtaaggctgacgcagagtcgcgccaggcatag

SEQ ID NO: 1826 - protein, 1984 aa, Muscodor strobelii
  misc_feature: SGI Peptide ID NO. 560221
  misc_feature (878)..(1207): Pfam Id: PF00698 Pfam Desc: Acyl transferase domain
  misc_feature (362)..(596): Pfam Id: PF00109 Pfam Desc: Beta-ketoacyl synthase, N-terminal domain
  misc_feature (604)..(718): Pfam Id: PF02801 Pfam Desc: Beta-ketoacyl synthase, C-terminal domain
  misc_feature (1717)..(1972): Pfam Id: PF00975 Pfam Desc: Thioesterase domain
  misc_feature (945)..(1143): Pfam Id: PF00698 Pfam Desc: Acyl transferase domain
  misc_feature (362)..(456): Pfam Id: PF00109 Pfam Desc: Beta-ketoacyl synthase, N-terminal domain
  misc_feature (522)..(554): Pfam Id: PF00109 Pfam Desc: Beta-ketoacyl synthase, N-terminal domain
  misc_feature (673)..(715): Pfam Id: PF02801 Pfam Desc: Beta-ketoacyl synthase, C-terminal domain
  misc_feature (1717)..(1801): Pfam Id: PF00975 Pfam Desc: Thioesterase domain
  misc_feature (9)..(1545): NCBI GI: 212531907 Blast Desc: polyketide synthase, [Penicillium marneffei ATCC 18224] gi|210071474|gb|EEA25563.1| polyketide synthase, [Penicillium marneffei ATCC 18224]
  misc_feature (8)..(1563): NCBI GI: 171693079 Blast Desc: protein product [Podospora anserina] gi|170946488|emb|CAP73289.1| protein product [Podospora anserina]
  misc_feature (8)..(1551): NCBI GI: 242826759 Blast Desc: polyketide synthase, [Talaromyces stipitatus ATCC 10500] gi|218712089|gb|EED11516.1| polyketide synthase, [Talaromyces stipitatus ATCC 10500]
  misc_feature (1)..(1550): NCBI GI: 40787354 Blast Desc: polyketide synthase [Botryotinia fuckeliana]
  misc_feature (6)..(1543): NCBI GI: 145279633 Blast Desc: polyketide synthase [Ophiostoma piceae]
  misc_feature (6)..(1597): NCBI GI: 145612575 Blast Desc: MGG_07219 [Magnaporthe grisea 70-15] gi|145019714|gb|EDK03942.1| MGG_07219 [Magnaporthe grisea 70-15]
  misc_feature (6)..(1568): NCBI GI: 171691741 Blast Desc: protein product [Podospora anserina] gi|170945819|emb|CAP72619.1| protein product [Podospora anserina]
  misc_feature (9)..(1560): NCBI GI: 156039305 Blast Desc: SS1G_11789 [Sclerotinia sclerotiorum 1980] gi|154697526|gb|EDN97264.1| SS1G_11789 [Sclerotinia sclerotiorum 1980]
  misc_feature (1)..(1552): NCBI GI: 5052967 Blast Desc: AF151533_1 polyketide synthase [Nodulisporium sp. ATCC74245]
  misc_feature (9)..(1560): NCBI GI: 154309911 Blast Desc: BC1G_06876 [Botryotinia fuckeliana B05.10] gi|150851664|gb|EDN26857.1| BC1G_06876 [Botryotinia fuckeliana B05.10]
  misc_feature: Useful for fungicidal and/or biocontrol applications
MAPPDLIVLLLGDEAEDVSFNIEVLHRKSQSSAALRDFLQEASDACQVAFGSLPLGVRDEFPRFISLLDMSKEHSKAKGSPALTGFALAYFATLAELIYRSENDPNIFKSHRTLLIGSGTGLLPAAVVAASHSCTEVAENAIQCFPSCFDFILQCYYRTICIEPSPESWSYTIADDQSEHELKDILDTFHDEFDIPRHREAWVAGNCAGQVIISGPPSTLKKLRVRLPGLDRPVSLALHAPHLPKVAFDKAAMSKSLQDRPIKKGCDIMSPFLSGPYEATRLGDLMNGIAQDISQNTSNMEMLLGYLHVDIIEYMGDRRGCNIIQLGPFCDTPFFASEFWGNFDFKSDLECKPGSGRGSGSADVAIVGVSMRMPKADNMKQLWDLMMTGTITREKISEEAALSMTGEGCFLSRPGAFDPRVFNMSSFEATKIKSCHRLLLMGCLEALEAAGYSQQSTLPVADRAAFYFGQDGPVRRIMNSIHEAEGYTIPGLLDTFSAFSKAQESGKFGGSRGLYDINPYFSSSATAIQTACVALMDRECDVALAGGAHMIDNPPELVGWNASMSQCISDSRRTPRQEYCPGEAMGVLVLKRLDDAIANGDNIEAVIKGWSCNYPAGPALDVPSPFYCDILGEAFEKAGIATDDLGYVEHDGARASTYCENELEFLSFVAECSPERPLPIGTLKGNVGHAGSAAGVSSVIKALMISKTGMIPPQADSPEDRAKKLRALGLLVNTEPTLLDDRRKTILVHDMDGAVSLVQSKKKLHANKSFLQGANTSLVIQAAPKSLHRRRLSDPRRWHVVTLSAASQTALQNNARELHEYLIANPEAKISNIAYTSTARRIQYPIRQQIVASTTCELTSRLGLVGINATIPRKPKVVFVFSGLGQDYCGIIEELYQSHRVFRDILDRLEALCYDMSLAKTKKKPFLDILKTTWSRVCPLIERSLAVVCLEIALAELWQSWGVKPDLVVGHDLGEYTALCIAGILSPADTLWLASLRAKLAQNLCRKYEWGMVSLKGKESDINDTLKATGVSDSCKISWHNSPLSHVVCGPSEELSMLVNYGHLDKFNPVTLDVPYAFQSEQMQAVAKHLKGHTSSLPFNPPQIPVASMMTGELITEKGVLNAEYLRKSIQSPIKFSSALEAIETKIERDGSPSIWVGIGLQETLVYARETLELSVSKLLPSLVLGEDNFKTIATSIGQAHSAGIDINWPEFHRPFRGVLKFTSLPTYAFDLIDCESRDHQEYEQEAPVLEENISAKERTRRAFRPTATLQHIESQEVNGTMAKISFTSSLKDSRLRDAIEGHKIQSQPVCPVSVYIDMATTAATYVRKLLLRPESQYVTWIKHLELATPFKYVNPLQTISITARADLADDCIACVSIYTNDHTGAVHEHCNCRVALISKEKAWDQNALTPQLHTLHDLRQSFDDRFDQGKFPRSKVSRDEIYESLSTILEYDNRYLGLEEATIITKHLRFGNPDNDLSAVVKLTRMPEHARPSHQTAFIINPYHLESLTQITSFMALEYLDESERMDWTYVCTGLKNLRLIKSLLEGEEYHLSLIKINQTETDMLFSILVSRQRDRKDLICSVDHIKVQKIKKSELRKAVADGRRFNDQTLFECSSANVRERSTSSEGESLAMTPDGSVGNDGDGQERFHDELNIIQGLDSGAVGDFEDKMDPSSRDDGTDDGEDLYSDDDAAIIEPKMLKCQVVGLSGYEPSPHKTFFLIPGAGGTADVFRGLPTLPSRRPVVVLESPLRTVRFNSQYKPTDLVRAYVNAIMDCQPKGKYHIGGYGEGAVYAFEVARALAILCGQNTVEKLVLVDMKARLPGKLGSVKPTIWDIAKLTEEIDLGPDRKKEQKLILIDALCAYNWKPEPFEPQLRPVSTIVIWAKDGMCERDEDAEFETDFPCKGPDFAPENQGYLAWFHQRRHAYDAGGWDTLVGTKIKTHVTDGDHFSMLDEPASIKLAELLDRILRETTLSKADAESRQA

SEQ ID NO: 1827 - DNA, 1695 bp, Muscodor strobelii
  misc_feature: SGI cDNA ID NO. 560222
  misc_feature: Encodes the peptide sequence at SEQ ID NO 1828
atggactcctcactcgctccgtggtccgatccagtgccctatcccccaaaggtttccgtgctaagtcttagaacaggtagagtccggcccctcggcgggccaaaaatcaaatccgccatcaacaagcaaccctgcgaaggcaaagtatggctgtcgaagattggcttcgtaggcgatgagcggtcgcatccaccgcaccagggccccgacaatgccgtccatcagtatacatcgcatcactacgacacctggaaaacggacctgcccgaccgcagcgaaaaattcaaagtcggtgcgtttggcgaaaatatctcgacccgacacctttctgagcagaatgtctgcgttggcgataagttccgactcggcgatgcgatcattcaagtcaccatgaaccgccagccatgcttcaaactcaatcaccgctttgaacacaagaaaatggcgagcctggtgcaagataccggtcgtacgggctggctataccgggtgctgcgagaaggctgggtcgaggaaggcgacgatatggaattgctcgagcgactcaatcccaaatggtcgctcgcgcgtctcatctacttcctatacaccgaccgcaacaatgccgctgtgctatccgaactcgtgacgctcccgggtttgagcaaagagttctccgagctattccaaaagacccttctgaaaggcgcagccgatatgaatgggcggctcaaaggcggtgccgatgagaagatggtctggaacccgtatacacttatctcgaaaacacgcgtcacaccccgtgtgcagaaattcgtcttcaaagccgatgaccaagacattgacgcagtcgatcttcaattttcccgcttccctcacgtgagggtcaagttcgggcctaacgacaagttcacgcgcgcatactctgtcgtttctggtgacatgaaacgatttgagcttggcgtcgcgaaggacgacaactcacgcggcggatcagtctaccttcacgatgaatttgcagttggtgataagctgcacgtcgcgaaaggtcatacacccatcaagaaggatgccgcggaagaagacgcgcacaagaagaaacatgtctttatcctcggtggtattggtgtgacagcgttcatgaacgagattcgagattttgccaaacaatgcgttgatattgagatccactacgcggttcgaagtcgccaggaagctgcatttcttgaccttctacccgagaaacatactacagtctacgccaaggtggatggtcagaggctctgtgtcaccgatatcattccgtccctcgccaatgcaacggatccggagctcatgatctactgctgtggcccatcggcattgattgacgcagtccggagccgcggaaaagaacttggatacccagcgtccagcatgcatttcgaggaatttggcggagcatcagcagggacgggcgacccattcgaagtcgagatcaagtcgagcagcaagatcctcgccgttccacaggacaaatcgctgttgcaagttctgaatgaagccgggttcgatgtggagtcgtcgtgcttagcagggaattgtggtgcatgtatggtggactattgtaaaggagacgtcgcgcatcagggcgtggcactagatgatgaacagaaggagactatgatgctgtcgtgtgttagccgtgggaaggggaggatcacattggatttttga

SEQ ID NO: 1828 - protein, 564 aa, Muscodor strobelii
  misc_feature: SGI Peptide ID NO. 560222
  misc_feature (484)..(558): Pfam Id: PF00111 Pfam Desc: 2Fe-2S iron-sulfur cluster binding domain
  misc_feature (54)..(178): Pfam Id: PF03473 Pfam Desc: MOSC domain
  misc_feature (362)..(454): Pfam Id: PF00175 Pfam Desc: Oxidoreductase NAD-binding domain
  misc_feature (11)..(563): NCBI GI: 46129272 Blast Desc: FG08821.1 [Gibberella zeae PH-1]
  misc_feature (6)..(563): NCBI GI: 256728353 Blast Desc: NECHADRAFT_53709 [Nectria haematococca mpVI 77-13-4]
  misc_feature (9)..(564): NCBI GI: 169619912 Blast Desc: SNOG_13156 [Phaeosphaeria nodorum SN15] gi|111058363|gb|EAT79483.1| SNOG_13156 [Phaeosphaeria nodorum SN15]
  misc_feature (4)..(564): NCBI GI: 189201397 Blast Desc: 3-chlorobenzoate-3,4-dioxygenase reductase subunit [Pyrenophora tritici-repentis Pt-1C-BFP] gi|187984134|gb|EDU49622.1| 3-chlorobenzoate-3,4-dioxygenase
  misc_feature (19)..(564): NCBI GI: 238489845 Blast Desc: vanillate O-demethylase oxidoreductase, [Aspergillus flavus NRRL3357] gi|220698548|gb|EED54888.1| vanillate O-demethylase oxidoreductase, [Aspergillus flavus NRRL3357]
  misc_feature (19)..(564): NCBI GI: 169763868 Blast Desc: [Aspergillus oryzae RIB40] gi|83770862|dbj|BAE60995.1| protein product [Aspergillus oryzae]
  misc_feature (19)..(564): NCBI GI: 85090971 Blast Desc: NCU04575 [Neurospora crassa OR74A] gi|28920053|gb|EAA29438.1| conserved [Neurospora crassa OR74A] gi|28950015|emb|CAD70770.1| related to PHTHALATE 4, 5-DIOXYGENASE
  misc_feature (13)..(515): NCBI GI: 46103050 Blast Desc: FG00075.1 [Gibberella zeae PH-1]
  misc_feature (23)..(564): NCBI GI: 145230708 Blast Desc: An01g12100 [Aspergillus niger] gi|134055737|emb|CAK44110.1| protein product [Aspergillus niger]
  misc_feature (19)..(564): NCBI GI: 171691781 Blast Desc: protein product [Podospora anserina] gi|170945839|emb|CAP72640.1| protein product [Podospora anserina]
  misc_feature (281)..(562): SWISSPROT Homolog: EC 1.14.12.7 Phthalate 4,5-dioxygenase
MDSSLAPWSDPVPYPPKVSVLSLRTGRVRPLGGPKIKSAINKQPCEGKVWLSKIGFVGDERSHPPHQGPDNAVHQYTSHHYDTWKTDLPDRSEKFKVGAFGENISTRHLSEQNVCVGDKFRLGDAIIQVTMNRQPCFKLNHRFEHKKMASLVQDTGRTGWLYRVLREGWVEEGDDMELLERLNPKWSLARLIYFLYTDRNNAAVLSELVTLPGLSKEFSELFQKTLLKGAADMNGRLKGGADEKMVWNPYTLISKTRVTPRVQKFVFKADDQDIDAVDLQFSRFPHVRVKFGPNDKFTRAYSVVSGDMKRFELGVAKDDNSRGGSVYLHDEFAVGDKLHVAKGHTPIKKDAAEEDAHKKKHVFILGGIGVTAFMNEIRDFAKQCVDIEIHYAVRSRQEAAFLDLLPEKHTTVYAKVDGQRLCVTDIIPSLANATDPELMIYCCGPSALIDAVRSRGKELGYPASSMHFEEFGGASAGTGDPFEVEIKSSSKILAVPQDKSLLQVLNEAGFDVESSCLAGNCGACMVDYCKGDVAHQGVALDDEQKETMMLSCVSRGKGRITLDF

SEQ ID NO: 1829 - DNA, 2154 bp, Muscodor strobelii
  misc_feature: SGI EST ID NO. CUFF.4956.0
  misc_feature: Variant of the nucleotide sequence at SEQ ID NO 1827
caattgtggattggtaggaaaggctctggagcactgaataataatcccctcttcttcccaagaaccatctccaatcgagccgaacatatactcaactcacaacaaaggagccattcatcaagcttgctatcagtccaactcaacaccacctttatcgcgtgatatacgacacaagcttgttagaatggactcctcactcgctccgtggtccgatccagtgccctatcccccaaaggtttccgtgctaagtcttagaacaggtagagtccggcccctcggcgggccaaaaatcaaatccgccatcaacaagcaaccctgcgaaggcaaagtatggctgtcgaagattggcttcgtaggcgatgagcggtcgcatccaccgcaccagggccccgacaatgccgtccatcagtatacatcgcatcactacgacacctggaaaacggacctgcccgaccgcagcgaaaaattcaaagtcggtgcgtttggcgaaaatatctcgacccgacacctttctgagcagaatgtctgcgttggcgataagttccgactcggcgatgcgatcattcaagtcaccatgaaccgccagccatgcttcaaactcaatcaccgctttgaacacaagaaaatggcgagcctggtgcaagataccggtcgtacgggctggctataccgggtgctgcgagaaggctgggtcgaggaaggcgacgatatggaattgctcgagcgactcaatcccaaatggtcgctcgcgcgtctcatctacttcctatacaccgaccgcaacaatgccgctgtgctatccgaactcgtgacgctcccgggtttgagcaaagagttctccgagctattccaaaagacccttctgaaaggcgcagccgatatgaatgggcggctcaaaggcggtgccgatgagaagatggtctggaacccgtatacacttatctcgaaaacacgcgtcacaccccgtgtgcagaaattcgtcttcaaagccgatgaccaagacattgacgcagtcgatcttcaattttcccgcttccctcacgtgagggtcaagttcgggcctaacgacaagttcacgcgcgcatactctgtcgtttctggtgacatgaaacgatttgagcttggcgtcgcgaaggacgacaactcacgcggcggatcagtctaccttcacgatgaatttgcagttggtgataagctgcacgtcgcgaaaggtcatacacccatcaagaaggatgccgcggaagaagacgcgcacaagaagaaacatgtctttatcctcggtggtattggtgtgacagcgttcatgaacgagattcgagattttgccaaacaatgcgttgatattgagatccactacgcggttcgaagtcgccaggaagctgcatttcttgaccttctacccgagaaacatactacagtctacgccaaggtggatggtcagaggctctgtgtcaccgatatcattccgtccctcgccaatgcaacggatccggagctcatgatctactgctgtggcccatcggcattgattgacgcagtccggagccgcggaaaagaacttggatacccagcgtccagcatgcatttcgaggaatttggcggagcatcagcagggacgggcgacccattcgaagtcgagatcaagtcgagcagcaagatcctcgccgttccacaggacaaatcgctgttgcaagttctgaatgaagccgggttcgatgtggagtcgtcgtgcttagcagggaattgtggtgcatgtatggtggactattgtaaaggagacgtcgcgcatcagggcgtggcactagatgatgaacagaaggagactatgatgctgtcgtgtgttagccgtgggaaggggaggatcacattggatttttgaagaatttcttgatactaaacgatcgcattttctgaggtatctaataaatacctaattacaatcttcctgtacctttgggcatgattcgggggaccctggatccgacattccttgtcatcttcccagatggaaaaactcccagctccatgagttctccgtcagcctcatcacgcaaatcaacctatgcctggcgcgactctgcgtcagccttactcagcgtagtctctcgaagaatccggtcaagcaactccgcgagcttgatagactaaaacaat

SEQ ID NO: 1830 - DNA, 1734 bp, Muscodor strobelii
  misc_feature: SGI cDNA ID NO. 560223
  misc_feature: Encodes the peptide sequence at SEQ ID NO 1831
atgggttcgaggtttgccaacggcgtctccagcaacggccctgcgccagggccctacacactcacagcacttaacaagtggtcggtccagtcctcgcagctccccgctaccgactctatcagcgccattcacatctacgacttcgacaacactttgtttcagacgcccttgcccaatcccaagctctggaactccacgaccctcggccggctgggtaacactgacatcttcgtcaatggcggctggtggcacgattcccgcatcctcgcggcaaccggcgatggggtcgagcgagaggaagcccgcgcttggaagggatggtggaatgagaaggttgtggagcttgtgcgcttgagcatgcaacagaaagatgccctctctgtcctgttgacgggccgcagcgtcaagggtttctcagagctggtcccgcgcattctcaaaagcaagggcctccaattcgacatgatcgggctcaagccagagaccggtcccaatggccaattcttcaacagcaccatgcttttcaaacaagctttcctcactgccatcatggagacctatgtcaatgccaaggagatccgcatttacgaagaccgcatcaaacatgtccagggtttcagagacttcatggccgactacaatgacagacagagcggccttagtggccctccgactcgtggacctatcactgctgaggtggtccatgtcgccgacatctctaccaatctggatccggtcgttgaagtggccgagatccagcacctcgtcaacgagcacaatgcgattgtcgggacgaagaagaaacaagaccgtcttgccatcaagaagactgtttacttcacaagctacatgatcagcccagaagataccaaacgactgatcaccctggtcgcacctcacttgccagatacgagtctgaggtatcatgccagcgctatcctcattactgccaagccttgcacacaacagattctcgacaaggttggaggcatgcaagcaaagctacaatggggagtcacaggtataggatcattcgacaacagcatatgggctgtttcagtcgtgcctattccgccctcggccaagtaccacacagaccagcccacacccaacgtggtcatcgccacacgtcaccatgcgcgaccttcagatgtgtccaagattcaaacctggcagcctattccgccagacaaggtgtttgttttcgacacagtggttaatgagaaagtgatgctacgtatcgagccagagtggatgccggacaatgccaatgatggctttgcccaaggcaaaaacaagcgtaaattcggtgacgacgataatcggcgctctaatggtggcaacaacaacaacaacaatcccaacggctcccgaagtttccacacctcgaactaccagggccgaggtgggaatcgcggtggcgccaggggtggtggcgctcacgggcgtggcaaccgtggcacagccagaggccgcggaggtggtcgaggtggtcgcggcggctatcgatcactggacgacgtcggcacccgagagggccagggaggatatggagccagttccgtctcgtacgacgataactttccagctctaggtggccatcaaggtccaactgtacaaccaccgcagttcgcccagcagaattattcgcaacagccgggccagtggcaggctccgaacaactcgcaaggtgggtacggcgctggtggtctagatctgcagaagttctattaa

SEQ ID NO: 1831 - protein, 577 aa, Muscodor strobelii
  misc_feature: SGI Peptide ID NO. 560223
  misc_feature (6)..(462): NCBI GI: 145616166 Blast Desc: MGG_03518 [Magnaporthe grisea 70-15] gi|145009921|gb|EDJ94577.1| MGG_03518 [Magnaporthe grisea 70-15]
  misc_feature (12)..(577): NCBI GI: 256732449 Blast Desc: NECHADRAFT_37691 [Nectria haematococca mpVI 77-13-4]
  misc_feature (19)..(444): NCBI GI: 164427058 Blast Desc: NCU02367 [Neurospora crassa OR74A] gi|157071587|gb|EAA30552.2| conserved [Neurospora crassa OR74A]
  misc_feature (19)..(474): NCBI GI: 154309867 Blast Desc: BC1G_06854 [Botryotinia fuckeliana B05.10] gi|150851642|gb|EDN26835.1| BC1G_06854 [Botryotinia fuckeliana B05.10]
  misc_feature (7)..(459): NCBI GI: 156039345 Blast Desc: SS1G_11809 [Sclerotinia sclerotiorum 1980] gi|154697546|gb|EDN97284.1| SS1G_11809 [Sclerotinia sclerotiorum 1980]
  misc_feature (5)..(442): NCBI GI: 116179574 Blast Desc: CHGG_00415 [Chaetomium globosum CBS 148.51] gi|88184712|gb|EAQ92180.1| CHGG_00415 [Chaetomium globosum CBS 148.51]
  misc_feature (6)..(448): NCBI GI: 189091872 Blast Desc: [Podospora anserina] gi|188219289|emb|CAP49269.1| protein product [Podospora anserina]
  misc_feature (6)..(448): NCBI GI: 27803046 Blast Desc: protein product [Podospora anserina]
  misc_feature (20)..(472): NCBI GI: 259486015 Blast Desc: TPA: conserved [Aspergillus nidulans FGSC A4]
  misc_feature (20)..(472): NCBI GI: 67525161 Blast Desc: AN3038.2 [Aspergillus nidulans FGSC A4] gi|40744433|gb|EAA63609.1| AN3038.2 [Aspergillus nidulans FGSC A4]
MGSRFANGVSSNGPAPGPYTLTALNKWSVQSSQLPATDSISAIHIYDFDNTLFQTPLPNPKLWNSTTLGRLGNTDIFVNGGWWHDSRILAATGDGVEREEARAWKGWWNEKVVELVRLSMQQKDALSVLLTGRSVKGFSELVPRILKSKGLQFDMIGLKPETGPNGQFFNSTMLFKQAFLTAIMETYVNAKEIRIYEDRIKHVQGFRDFMADYNDRQSGLSGPPTRGPITAEVVHVADISTNLDPVVEVAEIQHLVNEHNAIVGTKKKQDRLAIKKTVYFTSYMISPEDTKRLITLVAPHLPDTSLRYHASAILITAKPCTQQILDKVGGMQAKLQWGVTGIGSFDNSIWAVSVVPIPPSAKYHTDQPTPNVVIATRHHARPSDVSKIQTWQPIPPDKVFVFDTVVNEKVMLRIEPEWMPDNANDGFAQGKNKRKFGDDDNRRSNGGNNNNNNPNGSRSFHTSNYQGRGGNRGGARGGGAHGRGNRGTARGRGGGRGGRGGYRSLDDVGTREGQGGYGASSVSYDDNFPALGGHQGPTVQPPQFAQQNYSQQPGQWQAPNNSQGGYGAGGLDLQKFY

SEQ ID NO: 1832 - DNA, 2398 bp, Muscodor strobelii
  misc_feature: SGI EST ID NO. CUFF.4765.0
  misc_feature: Variant of the nucleotide sequence at SEQ ID NO 1830
cagccctgtagcttcctagcatgcaccctgctccccaaagacatctttttaatgcggtcgcgacgtcaagtctgaaccccgacaccgtcctcgatcacctccacggcaggccgcgcgcacaacatggtcttgtaattctagtacatgtttctcgcccgagccttttcaagcacgccacgccagcttctgcgcggcaccatgggttcgaggtttgccaacggcgtctccagcaacggccctgcgccagggccctacacactcacagcacttaacaagtggtcggtccagtcctcgcagctccccgctaccgactctatcagcgccattcacatctacgacttcgacaacactttgtttcagacgcccttgcccaatcccaagctctggaactccacgaccctcggccggctgggtaacactgacatcttcgtcaatggcggctggtggcacgattcccgcatcctcgcggcaaccggcgatggggtcgagcgagaggaagcccgcgcttggaagggatggtggaatgagaaggttgtggagcttgtgcgcttgagcatgcaacagaaagatgccctctctgtcctgttgacgggccgcagcgtcaagggtttctcagagctggtcccgcgcattctcaaaagcaagggcctccaattcgacatgatcgggctcaagccagagaccggtcccaatggccaattcttcaacagcaccatgcttttcaaacaagctttcctcactgccatcatggagacctatgtcaatgccaaggagatccgcatttacgaagaccgcatcaaacatgtccagggtttcagagacttcatggccgactacaatgacagacagagcggccttagtggccctccgactcgtggacctatcactgctgaggtggtccatgtcgccgacatctctaccaatctggatccggtcgttgaagtggccgagatccagcacctcgtcaacgagcacaatgcgattgtcgggacgaagaagaaacaagaccgtcttgccatcaagaagactgtttacttcacaagctacatgatcagcccagaagataccaaacgactgatcaccctggtcgcacctcacttgccagatacgagtctgaggtatcatgccagcgctatcctcattactgccaagccttgcacacaacagattctcgacaaggttggaggcatgcaagcaaagctacaatggggagtcacaggtataggatcattcgacaacagcatatgggctgtttcagtcgtgcctattccgccctcggccaagtaccacacagaccagcccacacccaacgtggtcatcgccacacgtcaccatgcgcgaccttcagatgtgtccaagattcaaacctggcagcctattccgccagacaaggtgtttgttttcgacacagtggttaatgagaaagtgatgctacgtatcgagccagagtggatgccggacaatgccaatgatggctttgcccaaggcaaaaacaagcgtaaattcggtgacgacgataatcggcgctctaatggtggcaacaacaacaacaacaatcccaacggctcccgaagtttccacacctcgaactaccagggccgaggtgggaatcgcggtggcgccaggggtggtggcgctcacgggcgtggcaaccgtggcacagccagaggccgcggaggtggtcgaggtggtcgcggcggctatcgatcactggacgacgtcggcacccgagagggccagggaggatatggagccagttccgtctcgtacgacgataactttccagctctaggtggccatcaaggtccaactgtacaaccaccgcagttcgcccagcagaattattcgcaacagccgggccagtggcaggctccgaacaactcgcaaggtgggtacggcgctggtggtctagatctgcagaagttctattaaagctttgcacagctagacttgtggttttgtccagaatatctgatgaatgtcctatggatgtgtattgcggcgcaaaatgagaaacgggaaagggagggaaaagatgatatcctagcactgtgcattgtacgatagaggcatgtggcttttcgtagccgagctatggctttgttcaagtcaaggattgcaacactgatatgacaaggaagacggcgtttggtatctagagtacggatggaaactctagtttgtatttccaaggcgactgggtcacgtccgctgttcaggtatagtataccctacgttgtcggttgtcttttgcatggccacgagatggcaccgttggcagaggcggattctaacgagatcacgcaataaacagtcactgactggaattttgagaattctcggtgtcctgactattattccccagaagtgaatgtgtctgaactgtaggagtttcaat

SEQ ID NO: 1833 - DNA, 390 bp, Muscodor strobelii
  misc_feature: SGI cDNA ID NO. 560224
  misc_feature: Encodes the peptide sequence at SEQ ID NO 1834
atgtcgcctcgagcagcgatcagtcttatacaacctaaatcacaaaagtcaccacttaagaccattttgcaactccactgccaagtccgcccaggtgcaagtaaagcacgagaaggtgttgtcgccataactgacgagactatccaattatgtgtggctgcccaagcccaagatggcaaggcaaataaggctgtgttagaggtgttaagcgatgcactggatgtgccaaaatccgacctgcagattgtacatgggctgaaatcgaaagagaaaaccatcaatttggcttgtataccgtcttggcacaggcaaggcgatgataattctggcatcgtcgaggcagtgagagagaaactgctttccaatacaacagcagcaatgtctcaatga

SEQ ID NO: 1834 - protein, 129 aa, Muscodor strobelii
  misc_feature: SGI Peptide ID NO. 560224
  misc_feature (19)..(97): Pfam Id: PF02594 Pfam Desc: Uncharacterised ACR, YggU family COG1872
  misc_feature (19)..(93): Pfam Id: PF02594 Pfam Desc: Uncharacterised ACR, YggU family COG1872
  misc_feature (1)..(125): NCBI GI: 85092099 Blast Desc: NCU06879 [Neurospora crassa OR74A] gi|28920629|gb|EAA29990.1| [Neurospora crassa OR74A]
  misc_feature (1)..(107): NCBI GI: 171679393 Blast Desc: protein product [Podospora anserina] gi|170939322|emb|CAP64550.1| protein product [Podospora anserina]
  misc_feature (23)..(95): NCBI GI: 256732901 Blast Desc: NECHADRAFT_19877 [Nectria haematococca mpVI 77-13-4]
  misc_feature (13)..(119): NCBI GI: 146324075 Blast Desc: DUF167 domain protein [Aspergillus fumigatus Af293] gi|129558081|gb|EBA27446.1| DUF167 domain protein [Aspergillus fumigatus Af293] gi|159126298|gb|EDP51414.1| YggU family protein
  misc_feature (13)..(119): NCBI GI: 119498429 Blast Desc: YggU family protein [Neosartorya fischeri NRRL 181] gi|119414136|gb|EAW24075.1| YggU family protein [Neosartorya fischeri NRRL 181]
  misc_feature (1)..(98): NCBI GI: 67523595 Blast Desc: AN2253.2 [Aspergillus nidulans FGSC A4] gi|40744782|gb|EAA63938.1| AN2253.2 [Aspergillus nidulans FGSC A4] gi|259487644|tpe|CBF86471.1| TPA: DUF167 domain protein FGSC
  misc_feature (18)..(119): NCBI GI: 121712776 Blast Desc: YggU family protein [Aspergillus clavatus NRRL 1] gi|119402152|gb|EAW12573.1| YggU family protein [Aspergillus clavatus NRRL 1]
  misc_feature (1)..(96): NCBI GI: 145253637 Blast Desc: An17g01020 [Aspergillus niger] gi|134083900|emb|CAK48804.1| protein product [Aspergillus niger]
  misc_feature (20)..(119): NCBI GI: 238494338 Blast Desc: DUF167 domain protein [Aspergillus flavus NRRL3357] gi|220695055|gb|EED51398.1| DUF167 domain protein [Aspergillus flavus NRRL3357]
  misc_feature (20)..(119): NCBI GI: 169777211 Blast Desc: [Aspergillus oryzae RIB40] gi|83771808|dbj|BAE61938.1| protein product [Aspergillus oryzae]
MSPRAAISLIQPKSQKSPLKTILQLHCQVRPGASKAREGVVAITDETIQLCVAAQAQDGKANKAVLEVLSDALDVPKSDLQIVHGLKSKEKTINLACIPSWHRQGDDNSGIVEAVREKLLSNTTAAMSQ

SEQ ID NO: 1835 - DNA, 2037 bp, Muscodor strobelii
  misc_feature: SGI EST ID NO. CUFF.4914.0
  misc_feature: Variant of the nucleotide sequence at SEQ ID NO 1833
ctccgatttcgaggacaatggaggcgaggacacacaatctcgctcgaagacaggaaaccaaacaaggcagatccgcacgtgatgtatgttgtctgcccaatacttcgaatcactaccctggagacggcagaatggtattatcactctgctttgtatgattccatccgtccttaaatcattcgacttgaaaactcacaatacatgacaccaaaacacgccaaaggcttctaggcttggaagtaccgagatagacacaccaaagcagtcggacttgaaatgtcgcctcgagcagcgatcagtcttatacaacctaaatcacaaaagtcaccacttaagaccattttgcaactccactgccaagtccgcccaggtgcaagtaaagcacgagaaggtgttgtcgccataactgacgagactatccaattatgtgtggctgcccaagcccaagatggcaaggcaaataaggctgtgttagaggtgttaagcgatgcactggatgtgccaaaatccgacctgcagattgtacatgggctgaaatcgaaagagaaaaccatcaatttggcttgtataccgtcttggcacaggcaaggcgatgataattctggcatcgtcgaggcagtgagagagaaactgctttccaatacaacagcagcaatgtctcaatgagttgcgttctctgagaacatcacacgcaacaaacatcatcaaggaactaagcgtagaagaaattagtcacaagagttcatgacggccgaaaggagttgatatgtgagagtcgcatagcatcaggaatgatagaacattggtgattagactaatcatactcattgaaagagtcataaacagcctctaaagagaaattcatcataatagcgaagggaaatattgatgtgcaatatggaacacttaccactgggttgatcagtatcggtgccgatgcaacatgacaggcacaaaaacaactggcagactgacaaaagagcatccatttggtggcgcagttacatcccattctatatatacagatcccacacgtctattcgttgactgcccgttctactctacgagcgcagagacgggcttgatttccacaccgtacttctctttcagtcgctctcgtctcctctcctcgtatccaggtggctcaatgcctgagagtatgttagtaaagggctataccatgggtcatatgccttcgttgtgacaaaatgccgtccgtacctctgccctctccaagctccatgatggtctcttctatcggtcgtctgcggttgtttcgtaggtattctttgcgctggtactcgtccatctcggggacttcggtccgtttgcctgcgaggctgcctccggtgtagttgaaggcggtcatgacgacagcgaaggcagcgccgtagccaagaacctgaggcatgcgtccagctgtttgttgacttgtcagttctctccatttgaacttggtagtatctgtgaatagatcatacccctcagacccataacagcacctccgaagaaagctccaacgccatgattgatgctatcatccttctctcgcaagttggctgaggcatctgtagcgaagccgtagatggctgagacggcggctaagagaagagcaatgcatgtcagctgtggtcggaaccaagattaggagggcggtctctgtactgatgtatccgatggtgctcccagtcttggtgaagacgccccaggtgccgaggttgcgcttggagagggagttctgaacggcggagagcatgaagccagctccagcgcccgtggcaccgccgacgaggcccgatttgatggcgtccttcgggtggaagacctgctcctcgaccggtcgtgggatggggtgagggttggccatcgtgacggagggggtcgagtcgcaattgggtttgggatggatacgaattggtggtacttgtcggcagctccagtgacggcgatagctcttaggatgctttgaattgaagttgtctgattcgagctgcgggtcgggcggcggctccacctgacacctgcattcacggtgcc

SEQ ID NO: 1836 - DNA, 615 bp, Muscodor strobelii
  misc_feature: SGI cDNA ID NO. 560225
  misc_feature: Encodes the peptide sequence at SEQ ID NO 1837
atggccaaccctcaccccatcccacgaccggtcgaggagcaggtcttccacccgaaggacgccatcaaatcgggcctcgtcggcggtgccacgggcgctggagctggcttcatgctctccgccgttcagaactccctctccaagcgcaacctcggcacctggggcgtcttcaccaagactgggagcaccatcggatacatcaccgccgtctcagccatctacggcttcgctacagatgcctcagccaacttgcgagagaaggatgatagcatcaatcatggcgttggagctttcttcggaggtgctgttatgggtctgagggctggacgcatgcctcaggttcttggctacggcgctgccttcgctgtcgtcatgaccgccttcaactacaccggaggcagcctcgcaggcaaacggaccgaagtccccgagatggacgagtaccagcgcaaagaatacctacgaaacaaccgcagacgaccgatagaagagaccatcatggagcttggagagggcagaggcattgagccacctggatacgaggagaggagacgagagcgactgaaagagaagtacggtgtggaaatcaagcccgtctctgcgctcgtagagtag

SEQ ID NO: 1837 - protein, 204 aa, Muscodor strobelii
  misc_feature: SGI Peptide ID NO. 560225
  misc_feature (12)..(201): NCBI GI: 85094628 Blast Desc: NADH:ubiquinone oxidoreductase 21.3kD subunit 21.3b [Neurospora crassa OR74A] gi|128869|sp|P25710.1|NUJM_NEUCR RecName: Full=NADH-ubiquinone oxidoreductase 21.3 kDa subunit I)
  misc_feature (12)..(200): NCBI GI: 240105149 Blast Desc: Mitochondrial import inner membrane translocase subunit Tim17 family protein [Coccidioides posadasii C735 delta SOWgp]
  misc_feature (12)..(200): NCBI GI: 119194815 Blast Desc: CIMG_01782 [Coccidioides immitis RS]
  misc_feature (16)..(201): NCBI GI: 171679651 Blast Desc: protein product [Podospora anserina] gi|170939451|emb|CAP64679.1| protein product [Podospora anserina]
  misc_feature (12)..(196): NCBI GI: 115389934 Blast Desc: conserved [Aspergillus terreus NIH2624] gi|114194868|gb|EAU36568.1| conserved [Aspergillus terreus NIH2624]
  misc_feature (12)..(201): NCBI GI: 119472576 Blast Desc: NADH-ubiquinone oxidoreductase 213 kDa subunit [Neosartorya fischeri NRRL 181] gi|119406523|gb|EAW16474.1| NADH-ubiquinone oxidoreductase 213 kDa subunit [Neosartorya NRRL
  misc_feature (12)..(200): NCBI GI: 67539000 Blast Desc: AN5670.2 [Aspergillus nidulans FGSC A4] gi|40743573|gb|EAA62763.1| AN5670.2 [Aspergillus nidulans FGSC A4] gi|259484855|tpe|CBF81433.1| TPA: NADH-ubiquinone 213 kDa A4]
  misc_feature (10)..(201): NCBI GI: 116203457 Blast Desc: CHGG_09612 [Chaetomium globosum CBS 148.51] gi|88175740|gb|EAQ83208.1| CHGG_09612 [Chaetomium globosum CBS 148.51]
  misc_feature (12)..(201): NCBI GI: 70992515 Blast Desc: NADH-ubiquinone oxidoreductase 213 kDa subunit [Aspergillus fumigatus Af293] gi|66848739|gb|EAL89068.1| NADH-ubiquinone oxidoreductase 213 kDa subunit [Aspergillus 213
  misc_feature (1)..(202): NCBI GI: 121700036 Blast Desc: NADH-ubiquinone oxidoreductase 213 kDa subunit [Aspergillus clavatus NRRL 1] gi|119396425|gb|EAW06857.1| NADH-ubiquinone oxidoreductase 213 kDa subunit [Aspergillus NRRL
  misc_feature (12)..(201): SWISSPROT Homolog: EC 1.6.5.3 NADH dehydrogenase (ubiquinone)
  misc_feature (12)..(201): SWISSPROT Homolog: EC 1.6.99.3 NADH dehydrogenase
MANPHPIPRPVEEQVFHPKDAIKSGLVGGATGAGAGFMLSAVQNSLSKRNLGTWGVFTKTGSTIGYITAVSAIYGFATDASANLREKDDSINHGVGAFFGGAVMGLRAGRMPQVLGYGAAFAVVMTAFNYTGGSLAGKRTEVPEMDEYQRKEYLRNNRRRPIEETIMELGEGRGIEPPGYEERRRERLKEKYGVEIKPVSALVE

SEQ ID NO: 1838 - DNA, 1927 bp, Muscodor strobelii
  misc_feature: SGI EST ID NO. CUFF.4915.1
  misc_feature: Variant of the nucleotide sequence at SEQ ID NO 1836
ggcaccgtgaatgcaggtgtcaggtggagccgccgcccgacccgcagctcgaatcagacaacttcaattcaaagcatcctaagagctatcgccgtcactggagctgccgacaagtaccaccaattcgtatccatcccaaacccaattgcgactcgaccccctccgtcacgatggccaaccctcaccccatcccacgaccggtcgaggagcaggtcttccacccgaaggacgccatcaaatcgggcctcgtcggcggtgccacgggcgctggagctggcttcatgctctccgccgttcagaactccctctccaagcgcaacctcggcacctggggcgtcttcaccaagactgggagcaccatcggatacatcaccgccgtctcagccatctacggcttcgctacagatgcctcagccaacttgcgagagaaggatgatagcatcaatcatggcgttggagctttcttcggaggtgctgttatgggtctgagggctggacgcatgcctcaggttcttggctacggcgctgccttcgctgtcgtcatgaccgccttcaactacaccggaggcagcctcgcaggcaaacggaccgaagtccccgagatggacgagtaccagcgcaaagaatacctacgaaacaaccgcagacgaccgatagaagagaccatcatggagcttggagagggcagaggcattgagccacctggatacgaggagaggagacgagagcgactgaaagagaagtacggtgtggaaatcaagcccgtctctgcgctcgtagagtagaacgggcagtcaacgaatagacgtgtgggatctgtatatatagaatgggatgtaactgcgccaccaaatggatgctcttttgtcagtctgccagttgtttttgtgcctgtcatgttgcatcggcaccgatactgatcaacccagtggtaagtgttccatattgcacatcaatatttcccttcgctattatgatgaatttctctttagaggctgtttatgactctttcaatgagtatgattagtctaatcaccaatgttctatcattcctgatgctatgcgactctcacatatcaactcctttcggccgtcatgaactcttgtgactaatttcttctacgcttagttccttgatgatgtttgttgcgtgtgatgttctcagagaacgcaactcattgagacattgctgctgttgtattggaaagcagtttctctctcactgcctcgacgatgccagaattatcatcgccttgcctgtgccaagacggtatacaagccaaattgatggttttctctttcgatttcagcccatgtacaatctgcaggtcggattttggcacatccagtgcctattcctcgtaagtctatggtatcagtgcagaacatattcatattttccctgcaatgttggtaggtttgagaactgcgtacatacatcgcttaacacctctaacacagccttatttgccttgccatcttgggcttgggcagccacacataattggatagtctcgtcagttatggcgacaacaccttctcgtgctttacttgcacctgggcggacttggcagtggagttgcaaaatggtcttaagtggtgacttttgtgatttaggttgtataagactgatcgctgctcgaggcgacatttcaagtccgactgctttggtgtgtctatctcggtacttccaagcctagaagcctttggcgtgttttggtgtcatgtattgtgagttttcaagtcgaatgatttaaggacggatggaatcatacaaagcagagtgataataccattctgccgtctccagggtagtgattcgaagtattgggcagacaacatacatcacgtgcggatctgccttgtttggtttcctgtcttcgagcgagattgtgtgtcctcgcctccattgtcctcgaaatcggag

SEQ ID NO: 1839 - DNA, 3738 bp, Muscodor strobelii
  misc_feature: SGI cDNA ID NO. 560226
  misc_feature: Encodes the peptide sequence at SEQ ID NO 1840
atgtctcctatacttagacctagaccggtgtcggacgacacgggacaagctcctccaacaggcagtagaacctggaatcttaagaaggaggcgatcgagcattttaaaacatcgagccatgctcatgcttatacgtctccccagttcctgaccagactgatagagtcaaaagtgtctgagttagattatcacacggactgctcctatcatgagtgggtcactgagtctgacggattgtctgataccaatagcaagacacctttgcttgtcttcttgtgccgctcctgcagggttcacttccagctgtcagttaccaaagaatacgacaacccggtggaccgtccaaatcaccctagacatatgctgatcccctgccgctcgagcatacagggagatccaaacgagaagcgagcgtcttcagatcgtacagcgactgctagcttcatctgtgctgttcctggatgctttcataccgtcgtacttgaggttgcaccaccagtcctctctaacgacgatgtggccaagtttggagacagctggcgaaccttgaggaacttggaagctgccagactcgatgatccccagagatatgcaggcacagcagatgattatggcgccaatgccatcgacaacatgatgacttacctgaaagacaccctgaatcaagagccgggccaaggcaatgtcaagaaaatcaagaagcgcaataagcgatttaaggtatcgtttggccatgacttcgatgatcttcttcagcgtatcggttttgtagacaagaccgacgaagcgggcgaagaatgttggttccttccagtcctcgacggctcattcgatgaagcaacttcccgtacaccaggacacacggttcgagccgcgctagaggaaatttccgttttagatggtaaaacaaaacctgtttgggacagactcctccaagtcctaaatgctaggtatcatagcgttggcattgttgatgcctctgaatctgacctgtctctgctgggatgcttgaaagacttcccgacgagttggtatagctggtctgccatcacactcgcagaaatctgtccgtcgcgccgaaacgagtttctccaggccggtctccgctgttgcaataagaagaatgacggagacgctgccacggaaattgtcatgtacagttctcaatttgactcggaacctttaggcaacccgcagtttgaatcagctgtcgagttctttggagctgcggggaaatcttttccggaactcagtgagctggactggataagtcaatatcgcaaagccactggagctgcgtctacggatgatactcgagcccaggcttaccagcacctcgaagccattgggaacactcttaataaggatctcttaggcgaacttgctcgttctgagtctatgaacactcttgaatcttttcccgccagcactgagcacaacagacgcctcagcattcgatccgctgctcggattctgggtgtcgaggcaagttactccgcagagatgatcgcggaggcctcccaaaacgtgggtgcggtgactccatcttcgaaggtcgtcgaggctcttagagtgctggccgagctcaagaacaatcaggataatcctagcgaagcccaagctctctatcatgctgctaatatgttgagtgcctcgttcaatgaccaaggtgatgttccggagcttatacagccaaactcgtcacaaagtgggataggcctcaccactccaccagggcttcgaaacatcggcaatacatgttacttgaatagtcttttgcagtatttctacaatgttaggacaattcgagagatggtcctcaacttcgaccaaattaacttagaattgactggactagctgtgggtaagagacgcactggtggcaatggtacacctgttactctcgaagaagctatcgtcgcccaacaattcgtcgaggagcttcgccgtctcttcctagagctccagtccaccactgatgctgctgcttgtccgtctcaaaagctcgccaatactgcgctatcgtctgccaaagagatactcagcaacacaactcgaaacaacacgccaccaccgttaccagcacgtccctctaccgtcgagccacttacacctccaccagaagatgtcgatatggtcaatgtcactgtggagcctatagatgagaagaatgatactgctagcactcgaagttcggtcacacttgtgagcgatagcgtggatgcacaaccccgtctcatcgttcctatatctagcctcaacggggataaagtaattgacactagatcaacgggaaaatttgtcaatggagaaagtaccgagacggaccgacccagggagcatatcgagcatatcgagcactcgcagcaccaccaagacgttgagatgacagatgttctcagtctttcagttcttgatgacaagatcgcacaaatatcgcgacgcctagagcagtcagatagatcggggacttcccagcaagacgtggaagagattattggcaatattctcgagcacttcatgcgtgcaatccgtccggatggtccaataatagacaaacctgagcttcaagccgacataattacgaagactttcttcactacaatcgtcaactctactaccaagtctaccctcagtcatacagcagcaacaaatggcacaattcctcataagcaagagagtttacacaacgaagagattgtacctgagcgatggataaccgccttccctcacccggacagaaatagtaaagttcaaagctcactttatcaagcacttgatcgttacttcgcctacgaacagctcagtgacccggatatcggacgctacgcaaccatccggactttaccaccgatcattcatatctgcattcagcgatctgatgccgatggtataaaaaaccgcaacccagtcacgatcgaggaagatctatatttggattgctatatggaggtcaagaaaggtacttcagcctggaatgatcgccagagatggtatgcaatacaagcgcgcaagaaagatcttgaatcaagatccgctctgaatgcgacaaccgctttcaaacgcccggagtcgaacgactggcagcaatatgccgcagaagaagctatggatttttcggtacctgaagaggatcattcgtcatctacttcagacagcaccatactaggcgacattgcccggcctctgaaacgtaaaatgctacaagcgcagctgaaacaaccagaggaatctaggtcacccaagaggagatctctgtcgcctgaagaaagcacaaagcttaggcctgcagacctgctattcaagatttcacaacgtgaagacgactttgccgcagcagagctcttagatctagagagggaggaaaagggacttcgcgaggctgtgaggcgtcacaagtatcgcctgcatgctgtaatttgtcatagtggcggtatgaatgcaggccactactgggtgtggatccgagacttcaacaaacaggtctggtacaaattcaacgatagcatcgtcacagaagactctcggccctcacagcaacttctcgatgagctaagcaacagcggtgacccttactatttggcatatattgaagacgagtcaagaaacatgctggtggatgttcctcagcgtaaagaaaacaaagacgacaatgttgctgtaactaatggcactgatgtggatatggaagtcatagacggtgttgctatcgacctccctatatctccacctcattaa

SEQ ID NO: 1840 - protein, 1245 aa, Muscodor strobelii
  misc_feature: SGI Peptide ID NO. 560226
  misc_feature (575)..(1196): Pfam Id: PF00443 Pfam Desc: Ubiquitin carboxyl-terminal hydrolase
  misc_feature (575)..(1173): Pfam Id: PF00443 Pfam Desc: Ubiquitin carboxyl-terminal hydrolase
  misc_feature (79)..(1223): NCBI GI: 256733029 Blast Desc: NECHADRAFT_38255 [Nectria haematococca mpVI 77-13-4]
  misc_feature (84)..(1208): NCBI GI: 46123415 Blast Desc: FG06085.1 [Gibberella zeae PH-1]
  misc_feature (140)..(1212): NCBI GI: 85094632 Blast Desc: NCU02281 [Neurospora crassa OR74A] gi|28921382|gb|EAA30689.1| [Neurospora crassa OR74A]
  misc_feature (88)..(1233): NCBI GI: 116203459 Blast Desc: CHGG_09613 [Chaetomium globosum CBS 148.51] gi|88175741|gb|EAQ83209.1| CHGG_09613 [Chaetomium globosum CBS 148.51]
  misc_feature (89)..(1212): NCBI GI: 171679649 Blast Desc: protein product [Podospora anserina] gi|170939450|emb|CAP64678.1| protein product [Podospora anserina]
  misc_feature (148)..(1211): NCBI GI: 156042444 Blast Desc: SS1G_11019 [Sclerotinia sclerotiorum 1980] gi|154695406|gb|EDN95144.1| SS1G_11019 [Sclerotinia sclerotiorum 1980]
  misc_feature (239)..(1004): NCBI GI: 261358973 Blast Desc: conserved [Verticillium albo-atrum VaMs.102]
  misc_feature (92)..(1244): NCBI GI: 212534702 Blast Desc: ubiquitin hydrolase, [Penicillium marneffei ATCC 18224] gi|210069906|gb|EEA23996.1| ubiquitin hydrolase, [Penicillium marneffei ATCC 18224]
  misc_feature (92)..(1207): NCBI GI: 121700034 Blast Desc: ubiquitin carboxyl-terminal hydrolase, [Aspergillus clavatus NRRL 1] gi|119396424|gb|EAW06856.1| ubiquitin carboxyl-terminal hydrolase, [Aspergillus clavatus NRRL 1]
  misc_feature (92)..(1244): NCBI GI: 119472574 Blast Desc: ubiquitin carboxyl-terminal hydrolase, [Neosartorya fischeri NRRL 181] gi|119406522|gb|EAW16473.1| ubiquitin carboxyl-terminal hydrolase, [Neosartorya fischeri NRRL 181]
MSPILRPRPVSDDTGQAPPTGSRTWNLKKEAIEHFKTSSHAHAYTSPQFLTRLIESKVSELDYHTDCSYHEWVTESDGLSDTNSKTPLLVFLCRSCRVHFQLSVTKEYDNPVDRPNHPRHMLIPCRSSIQGDPNEKRASSDRTATASFICAVPGCFHTVVLEVAPPVLSNDDVAKFGDSWRTLRNLEAARLDDPQRYAGTADDYGANAIDNMMTYLKDTLNQEPGQGNVKKIKKRNKRFKVSFGHDFDDLLQRIGFVDKTDEAGEECWFLPVLDGSFDEATSRTPGHTVRAALEEISVLDGKTKPVWDRLLQVLNARYHSVGIVDASESDLSLLGCLKDFPTSWYSWSAITLAEICPSRRNEFLQAGLRCCNKKNDGDAATEIVMYSSQFDSEPLGNPQFESAVEFFGAAGKSFPELSELDWISQYRKATGAASTDDTRAQAYQHLEAIGNTLNKDLLGELARSESMNTLESFPASTEHNRRLSIRSAARILGVEASYSAEMIAEASQNVGAVTPSSKVVEALRVLAELKNNQDNPSEAQALYHAANMLSASFNDQGDVPELIQPNSSQSGIGLTTPPGLRNIGNTCYLNSLLQYFYNVRTIREMVLNFDQINLELTGLAVGKRRTGGNGTPVTLEEAIVAQQFVEELRRLFLELQSTTDAAACPSQKLANTALSSAKEILSNTTRNNTPPPLPARPSTVEPLTPPPEDVDMVNVTVEPIDEKNDTASTRSSVTLVSDSVDAQPRLIVPISSLNGDKVIDTRSTGKFVNGESTETDRPREHIEHIEHSQHHQDVEMTDVLSLSVLDDKIAQISRRLEQSDRSGTSQQDVEEIIGNILEHFMRAIRPDGPIIDKPELQADIITKTFFTTIVNSTTKSTLSHTAATNGTIPHKQESLHNEEIVPERWITAFPHPDRNSKVQSSLYQALDRYFAYEQLSDPDIGRYATIRTLPPIIHICIQRSDADGIKNRNPVTIEEDLYLDCYMEVKKGTSAWNDRQRWYAIQARKKDLESRSALNATTAFKRPESNDWQQYAAEEAMDFSVPEEDHSSSTSDSTILGDIARPLKRKMLQAQLKQPEESRSPKRRSLSPEESTKLRPADLLFKISQREDDFAAAELLDLEREEKGLREAVRRHKYRLHAVICHSGGMNAGHYWVWIRDFNKQVWYKFNDSIVTEDSRPSQQLLDELSNSGDPYYLAYIEDESRNMLVDVPQRKENKDDNVAVTNGTDVDMEVIDGVAIDLPISPPH

SEQ ID NO: 1841 - DNA, 3133 bp, Muscodor strobelii
  misc_feature: SGI EST ID NO. CUFF.4774.0
  misc_feature: Variant of the nucleotide sequence at SEQ ID NO 1839
cagttctcaatttgactcggaacctttaggcaacccgcagtttgaatcagctgtcgagttctttggagctgcggggaaatcttttccggaactcagtgagctggactggataagtcaatatcgcaaagccactggagctgcgtctacggatgatactcgagcccaggcttaccagcacctcgaagccattgggaacactcttaataaggatctcttaggcgaacttgctcgttctgagtctatgaacactcttgaatcttttcccgccagcactgagcacaacagacgcctcagcattcgatccgctgctcggattctgggtgtcgaggcaagttactccgcagagatgatcgcggaggcctcccaaaacgtgggtgcggtgactccatcttcgaaggtcgtcgaggctcttagagtgctggccgagctcaagaacaatcaggataatcctagcgaagcccaagctctctatcatgctgctaatatgttgagtgcctcgttcaatgaccaaggtgatgttccggagcttatacagccaaactcgtcacaaagtgggataggcctcaccactccaccagggcttcgaaacatcggcaatacatgttacttgaatagtcttttgcagtatttctacaatgttaggacaattcgagagatggtcctcaacttcgaccaaattaacttagaattgactggactagctgtgggtaagagacgcactggtggcaatggtacacctgttactctcgaagaagctatcgtcgcccaacaattcgtcgaggagcttcgccgtctcttcctagagctccagtccaccactgatgctgctgcttgtccgtctcaaaagctcgccaatactgcgctatcgtctgccaaagagatactcagcaacacaactcgaaacaacacgccaccaccgttaccagcacgtccctctaccgtcgagccacttacacctccaccagaagatgtcgatatggtcaatgtcactgtggagcctatagatgagaagaatgatactgctagcactcgaagttcggtcacacttgtgagcgatagcgtggatgcacaaccccgtctcatcgttcctatatctagcctcaacggggataaagtaattgacactagatcaacgggaaaatttgtcaatggagaaagtaccgagacggaccgacccagggagcatatcgagcatatcgagcactcgcagcaccaccaagacgttgagatgacagatgttctcagtctttcagttcttgatgacaagatcgcacaaatatcgcgacgcctagagcagtcagatagatcggggacttcccagcaagacgtggaagagattattggcaatattctcgagcacttcatgcgtgcaatccgtccggatggtccaataatagacaaacctgagcttcaagccgacataattacgaagactttcttcactacaatcgtcaactctactaccaagtctaccctcagtcatacagcagcaacaaatggcacaattcctcataagcaagagagtttacacaacgaagagattgtacctgagcgatggataaccgccttccctcacccggacagaaatagtaaagttcaaagctcactttatcaagcacttgatcgttacttcgcctacgaacagctcagtgacccggatatcggacgctacgcaaccatccggactttaccaccgatcattcatatctgcattcagcgatctgatgccgatggtataaaaaaccgcaacccagtcacgatcgaggaagatctatatttggattgctatatggaggtcaagaaaggtacttcagcctggaatgatcgccagagatggtatgcaatacaagcgcgcaagaaagatcttgaatcaagatccgctctgaatgcgacaaccgctttcaaacgcccggagtcgaacgactggcagcaatatgccgcagaagaagctatggatttttcggtacctgaagaggatcattcgtcatctacttcagacagcaccatactaggcgacattgcccggcctctgaaacgtaaaatgctacaagcgcagctgaaacaaccagaggaatctaggtcacccaagaggagatctctgtcgcctgaagaaagcacaaagcttaggcctgcagacctgctattcaagatttcacaacgtgaagacgactttgccgcagcagagctcttagatctagagagggaggaaaagggacttcgcgaggctgtgaggcgtcacaagtatcgcctgcatgctgtaatttgtcatagtggcggtatgaatgcaggccactactgggtgtggatccgagacttcaacaaacaggtctggtacaaattcaacgatagcatcgtcacagaagactctcggccctcacagcaacttctcgatgagctaagcaacagcggtgacccttactatttggcatatattgaagacgagtcaagaaacatgctggtggatgttcctcagcgtaaagaaaacaaagacgacaatgttgctgtaactaatggcactgatgtggatatggaagtcatagacggtgttgctatcgacctccctatatctccacctcattaagaccaagctagggcgcacccagaggcggttaaaggcaattcctctgctttggcatctctgccactttactgtagtcatatattgacattggttggattatagccgtgtggagtgagagatggaccgagacaatggatagccggtgttttcgcttccgaatgcatgacaaacggcgttttgtaggagttatactgtagcataccatactttagagatcatgcaggagattgatcttccttcgacatcaattatccagcctcctggcgtatccaaatggccaaggaactgtatgatcctttgattagcgccatggtctcaagtacgtatagatcagaaaaacgaagtgttatgtaaaacaggtcgttcggtaatcgtttttattcaagtgaggaagagcgcagacttgctgttgtctccgactactagtagtgttcccaattgtatctcagccatggcctatactgtataatcacgtattgtatacaagaggacagtcaaatgcgcacggattttgcacacatttcgagttaaggggaacacattatagactcc

SEQ ID NO: 1842 - DNA, 4599 bp, Muscodor strobelii
  misc_feature: SGI cDNA ID NO. 560227
  misc_feature: Encodes the peptide sequence at SEQ ID NO 1843
atgcctacaacaggctcagtcaacagacaaatctctcgctacgagaccactgcagtctacacccatccagatgccaaagtagacatcattctcgtccatggcctgaatggggagccacaaaagacctggacagccaaaaatggcgtcttttggcccgccgatctcctcccagcgtctctcagagaagctcgagcaaacgttctcgtttatggctataatgccgatgtctactcgaagaagcacgggtcgaatccgagcgacaatttcatatacatgcatgctcaaacattagtcacctcacttacacactaccggaaagatgagatgacgtcgcacaatcccattatatgggtttgtcatagtttgggcggaattcttgtgaagcgagcccttctatactccaacgacttacggacatcgcagcatgaggactatcgctctgtctatgtatcaacttatggcatcgtgtttctcggtacaccacatactgggtcagacgtagcaacgtggggtacagttcttcaagccatgtcagacgctgtcgtgcccagatccatcttccagtccgagtctgtactgctcagaactctgaaaagagacaacgaaacgctccagaacataaatagtcatttccttgacgtttatcagcgcttcaagattcttatggctcacgaaaaccataaaacggacctcaagggcactaggatgttggttgtcgatgcaaactcagcgagcccacaactacccggagtcacttactatgctatcgaagcaacgcactcgggtatgtgcaagttcgatagtaagaatgctcccggatacagaactgtcgcaacggctatcagagaatgggcaacagatgctccagatgttgtcctcactcgatggcgagttgaagatgaggagaagctggcacgagcacaacatgaaatcgaagaaagaatgaagccttggattcgttcgcaacgactccgaccatctgatcaaggagcgaatactccgcagcaaaataatgagactacattaccctctactcaagaaccttcgacaattcagaatccaactagatcaatgcttcctgagccagaaacacctagtcggacggatgatgaagaagagcttttcccatctcaacaatcaagatctgatggcagtcagaccaaggacccaatctttgtacgaccaacagtattccggccgaatactgtcttcataggtcgagaaagggagctaaagcagttacacaacatgctaaaggataagaagagaagatcaagtggcacatcatcagtcttgattcaaagtatgccgggaggtggcaaaagtcacctcgcgcggcagtacgtcttcgagcataagaacgactatcctggcggtatcttctggatccgagcgaaatcacttgaagaactagactatggatactatgatatcgctaaggtggcgaatttaaaagagctttctagttcggttcaggctgaggctagtgacacccgcacagttgttaaagctgttcaaaggtggctcagtgacactaaagactggctattggtccttgatggtgttcattttgacttcgaaggacttgctcactacataccattcgccaaacacacgagcatcatttacacgtcgacggagcggaccacgggagagggatatcagtttgataatccgcagatcctagcgctggatccattgtcgaagcaacatgctcaagaactactatttgaagagatggggaagaagaaaccttacactcaggatgatcttcaccgtgcagaagagctagtcgagttgatggaccgactaccgctcatgattcatgtagccgcgctacatctcaatgctacccgagaaccgcttgccaggtatctgagatcttacaaaagtcggccaaaggcaggcaatctcccagcataccgtgctgttcgtgaacaactggagcatcgaggtgcatttgctgccctaaacttgatgtctttactggccttttttgggaaccatataccagtcgagctgattgcacttggcacaaaaaagctcgatagaagcacaccagtcaaatccacaactcctggaactaggaagcgatcactgagtagcacgttgaagactctaattgctttctcgctcgtagaacgtaacgagagtaaggaagcctctgtcgctagctcccgcagcactcgcagcgtcgatacggcccaggacagtctagatatactcagagtacatagcatcgtccaagctttcttcgttgatattctagatgaagaaaagcagattcacatctggctagatcgagcaatttgcgtcttctgtggggctttcgacgcaagcgttcaaagagtggaagaagatcgccaaactggcatgccagaagactatcgccgcttgcttatacacggtcagcggctactgtttcatttggatcgtttcgaaaaacggtttcctggcttggcgcaatcccgcgaggaactagaattgagactcgactcggttgagagtctcattgatcagttaagcaagagagtcgatgtagcggctagtcaggggtcagaagagccgattgtctctgtttttgaaagaaccaatagtctctcagagaatgagtcgacgaccactccaagtgactacagcgtcatcgacgacttcgccgtggatgatgctactgatactttaggatctcccacagcttacacgcctgatgattacaatccataccactggcacattcaatacccacatggcaatggtatcccaggtgttattgatgatacatcaagaactgtgactccacaaccgccgcccactgagatttttgacgcgatgtcaatgccggatgatgacgaaacaactctacgagtctttggtccgaaccatcgaaccatcaagaagcatgctgaacgtcgctatcgtgatcatgccggggcatggagggcttctccgcaaattattagtgatcctcgagttacgatcagtcgtgaaaacgctcgaggcttcatcaacactgcgccatccacgacaccaattcaccatcgctcggcaggcgacaacgtagcttatggtcggagcgaggctgagatcagcttaaatcaaattcaaaaagggacacccgcgcttcaaaaaggcatcacagcgttattcactccagagcctagccagtctcgcccaagactggtcgccgggcgaccatcgtatgcaaacgcaagagctgaggaggctgatttagagaacgactttgtaacacccacattttcatatccaccaccatcgtctaagccggctgttgccgccattgcgcgactcaaggagaatgatcgacccgtgtcgcttgatgggctttgcccaatcaagatttcgagccctctcgcaggagatcctatgagtagcaatgcgatatcatcaacagactccccgcccgggggaagtgcaatggaaagcgagttactaccatctcaacagagttcaattctgttgccaggaatgtcggctcgccggcgttctgactctctctcacgcaccagccagccatctccctcacagtccctaggaccattccgaccaccccctgtcccattggatatgtcaagtagcctacactctctgccgcttgccagctcccgaaatgcgggctcaaatcagctttctacttattctattgatgagtatggcgagatctcagctttagctcaatcgtttccgactattagacaaccggttcaattaccctatcccaccactccacatacattacaaatcccgcctgaggccttctcaccgggaccaccaccgccttgggtcacctcctcagggggtatcaattcgctgcctcaggggtactctagccagccaatgtctcgtgatgccagtcaccagtccaactccagtcatggatcgaacttctcgcccccacaggcatacaacaactcatcaatatttctcaatcagacgtacagctcttccccaggctcacagatcatgcagagaccacgatcacgacgcccaagcatggtagagaccgaaccaagcccaccactcaagccactcgattctgacgggactagctatgagctgtataacgatggccaccacttgcacagaaacgtacataatcatatacctcgtggacgagatcaccttgtcagcgcgcctcttccatatcctcctcctcaaggatctggtttcttgtcccgcatccggtctatgagaacacgtagtggtagatggcagcgccgaagtgaatcagctggtggaaggctaggaggaagtgtaggtcaagagcagaatagaagtcaaacttccgacagtcctaagcttgaccgtgtccccgtcagtgaggaaatgtcgcgttcgggctctgcttccggcggcatacggtttgacaatgatacactcgtcgaattcggaagcgcaccatcaccaccctcggcaaccgccatgaggcgaagtagtccgaggcttggcaacaagagtcctggtaactcgtcaccttttcgtccgcccagaaaggaaaacagaagcccgtcactagcaagaggtagccctcccagccaaccagttgttggcctagggatacagcaaagaagagcctcgtga

SEQ ID NO: 1843 - protein, 1532 aa, Muscodor strobelii
  misc_feature: SGI Peptide ID NO. 560227
  misc_feature (5)..(1074): NCBI GI: 116203709 Blast Desc: CHGG_09738 [Chaetomium globosum CBS 148.51] gi|88175866|gb|EAQ83334.1| CHGG_09738 [Chaetomium globosum CBS 148.51]
  misc_feature (5)..(1040): NCBI GI: 145610873 Blast Desc: MGG_00850 [Magnaporthe grisea 70-15] gi|145018209|gb|EDK02488.1| MGG_00850 [Magnaporthe grisea 70-15]
  misc_feature (10)..(1103): NCBI GI: 154309997 Blast Desc: BC1G_06919 [Botryotinia fuckeliana B05.10] gi|150851707|gb|EDN26900.1| BC1G_06919 [Botryotinia fuckeliana B05.10]
  misc_feature (10)..(1103): NCBI GI: 156039209 Blast Desc: SS1G_11741 [Sclerotinia sclerotiorum 1980] gi|154697478|gb|EDN97216.1| SS1G_11741 [Sclerotinia sclerotiorum 1980]
  misc_feature (5)..(995): NCBI GI: 256733036 Blast Desc: NECHADRAFT_78939 [Nectria haematococca mpVI 77-13-4]
  misc_feature (7)..(842): NCBI GI: 259486168 Blast Desc: TPA: LipA and NB-ARC domain protein (AFU_orthologue; AFUA_3G11500) [Aspergillus nidulans FGSC A4]
  misc_feature (17)..(842): NCBI GI: 121705776 Blast Desc: LipA and NB-ARC domain protein [Aspergillus clavatus NRRL 1] gi|119399297|gb|EAW09725.1| LipA and NB-ARC domain protein [Aspergillus clavatus NRRL 1]
  misc_feature (17)..(842): NCBI GI: 159127486 Blast Desc: LipA and NB-ARC domain protein [Aspergillus fumigatus A1163]
  misc_feature (17)..(842): NCBI GI: 70999500 Blast Desc: LipA and NB-ARC domain protein [Aspergillus fumigatus Af293] gi|66852106|gb|EAL92431.1| LipA and NB-ARC domain protein [Aspergillus fumigatus Af293]
  misc_feature (7)..(842): NCBI GI: 67524875 Blast Desc: AN2895.2 [Aspergillus nidulans FGSC A4] gi|40744290|gb|EAA63466.1| AN2895.2 [Aspergillus nidulans FGSC A4]
MPTTGSVNRQISRYETTAVYTHPDAKVDIILVHGLNGEPQKTWTAKNGVFWPADLLPASLREARANVLVYGYNADVYSKKHGSNPSDNFIYMHAQTLVTSLTHYRKDEMTSHNPIIWVCHSLGGILVKRALLYSNDLRTSQHEDYRSVYVSTYGIVFLGTPHTGSDVATWGTVLQAMSDAVVPRSIFQSESVLLRTLKRDNETLQNINSHFLDVYQRFKILMAHENHKTDLKGTRMLVVDANSASPQLPGVTYYAIEATHSGMCKFDSKNAPGYRTVATAIREWATDAPDVVLTRWRVEDEEKLARAQHEIEERMKPWIRSQRLRPSDQGANTPQQNNETTLPSTQEPSTIQNPTRSMLPEPETPSRTDDEEELFPSQQSRSDGSQTKDPIFVRPTVFRPNTVFIGRERELKQLHNMLKDKKRRSSGTSSVLIQSMPGGGKSHLARQYVFEHKNDYPGGIFWIRAKSLEELDYGYYDIAKVANLKELSSSVQAEASDTRTVVKAVQRWLSDTKDWLLVLDGVHFDFEGLAHYIPFAKHTSIIYTSTERTTGEGYQFDNPQILALDPLSKQHAQELLFEEMGKKKPYTQDDLHRAEELVELMDRLPLMIHVAALHLNATREPLARYLRSYKSRPKAGNLPAYRAVREQLEHRGAFAALNLMSLLAFFGNHIPVELIALGTKKLDRSTPVKSTTPGTRKRSLSSTLKTLIAFSLVERNESKEASVASSRSTRSVDTAQDSLDILRVHSIVQAFFVDILDEEKQIHIWLDRAICVFCGAFDASVQRVEEDRQTGMPEDYRRLLIHGQRLLFHLDRFEKRFPGLAQSREELELRLDSVESLIDQLSKRVDVAASQGSEEPIVSVFERTNSLSENESTTTPSDYSVIDDFAVDDATDTLGSPTAYTPDDYNPYHWHIQYPHGNGIPGVIDDTSRTVTPQPPPTEIFDAMSMPDDDETTLRVFGPNHRTIKKHAERRYRDHAGAWRASPQIISDPRVTISRENARGFINTAPSTTPIHHRSAGDNVAYGRSEAEISLNQIQKGTPALQKGITALFTPEPSQSRPRLVAGRPSYANARAEEADLENDFVTPTFSYPPPSSKPAVAAIARLKENDRPVSLDGLCPIKISSPLAGDPMSSNAISSTDSPPGGSAMESELLPSQQSSILLPGMSARRRSDSLSRTSQPSPSQSLGPFRPPPVPLDMSSSLHSLPLASSRNAGSNQLSTYSIDEYGEISALAQSFPTIRQPVQLPYPTTPHTLQIPPEAFSPGPPPPWVTSSGGINSLPQGYSSQPMSRDASHQSNSSHGSNFSPPQAYNNSSIFLNQTYSSSPGSQIMQRPRSRRPSMVETEPSPPLKPLDSDGTSYELYNDGHHLHRNVHNHIPRGRDHLVSAPLPYPPPQGSGFLSRIRSMRTRSGRWQRRSESAGGRLGGSVGQEQNRSQTSDSPKLDRVPVSEEMSRSGSASGGIRFDNDTLVEFGSAPSPPSATAMRRSSPRLGNKSPGNSSPFRPPRKENRSPSLARGSPPSQPVVGLGIQQRRAS

SEQ ID NO: 1844 - DNA, 6266 bp, Muscodor strobelii
  misc_feature: SGI EST ID NO. CUFF.5216.2
  misc_feature: Variant of the nucleotide sequence at SEQ ID NO 1842
gtcgtcaccaacagcaaacctcaactctcaacgtcattggccggcatggagagaaataaaggtgtagagccccagcttacgggtgcagcagccttcggcaattctcataagggtggaggccactaaaatagtttccctgacgttgtgaaaccatcccccggatagtgagacccattttctgctcttttcacgatgtggcgccaataatagataggtattaagacagaggggctagacgggcagtggaaagggggtgagccttagcggaagaggtggatgatggcgcggcgggagtcaacgggtatgacggttaggggaggcaaatggatcatggctctttcgatgacgatcctgtcgctcaactcactattctgtcggttgtgcttctggttgtgctcggccgtctcaggggacagaggggagagatggtggcagttggagtggcagcgtgaccctggctagccccaaatctgtttagatcgttgctcagaagtggctcagctgccctgccattctccagttcccagtcagaccctagctcacatcccatcacgctttgaagtcttgtcgcctgtctccctcccacgccagcagatgctgtattcccgtgacgcaagttctttctttgatgcctttcctctgtcgcgtcgtcgcttgtcgtcgtcttacgctgtctttcttgcgtacgatgtgacatgtctggtatttccatcacagccgctacacttcgtgaattcatgctcgcctctcgcgccagttccggagacgtttcctggtcgcctaattccacggtgcacacccatcatgggctgctactccaactttccaaagcccagttgacataaacggctctaagaatatcttgtcaacctggttacgaagtacatgtcttgtgccttctcatactctgtacattccgaaagctttgtgtcacgcgccgtatccactactccagattcgcagctcttttataagagccttagagccacttcctcgtagcctgttaaccctgggtagatcttgataattttacacgctcttcaagactgacgccagcatttcatcaaggcagctttgcgtctgtctggatcgcaagcatgcctacaacaggctcagtcaacagacaaatctctcgctacgagaccactgcagtctacacccatccagatgccaaagtagacatcattctcgtccatggcctgaatggggagccacaaaagacctggacagccaaaaatggcgtcttttggcccgccgatctcctcccagcgtctctcagagaagctcgagcaaacgttctcgtttatggctataatgccgatgtctactcgaagaagcacgggtcgaatccgagcgacaatttcatatacatgcatgctcaaacattagtcacctcacttacacactaccggaaagatgagatgacgtcgcacaatcccattatatgggtttgtcatagtttgggcggaattcttgtgaagcgagcccttctatactccaacgacttacggacatcgcagcatgaggactatcgctctgtctatgtatcaacttatggcatcgtgtttctcggtacaccacatactgggtcagacgtagcaacgtggggtacagttcttcaagccatgtcagacgctgtcgtgcccagatccatcttccagtccgagtctgtactgctcagaactctgaaaagagacaacgaaacgctccagaacataaatagtcatttccttgacgtttatcagcgcttcaagattcttatggctcacgaaaaccataaaacggacctcaagggcactaggatgttggttgtcgatgcaaactcagcgagcccacaactacccggagtcacttactatgctatcgaagcaacgcactcgggtatgtgcaagttcgatagtaagaatgctcccggatacagaactgtcgcaacggctatcagagaatgggcaacagatgctccagatgttgtcctcactcgatggcgagttgaagatgaggagaagctggcacgagcacaacatgaaatcgaagaaagaatgaagccttggattcgttcgcaacgactccgaccatctgatcaaggagcgaatagtaggtcatcgccattgctcttacccagtcgcaccatggatcatcatagaattagctttcatggagacactgttcagggtgttcaattcccctttgagatagaggaaatagatgaacagaaaattgtataagaactagataacagggaacgaggctgatctttcattttctatagctccgcagcaaaataatgagactacattaccctctactcaagaaccttcgacaattcagaatccaactagatcaatgcttcctgagccagaaacacctagtcggacggatgatgaagaagagcttttcccatctcaacaatcaagatctgatggcagtcagaccaaggacccaatctttgtacgaccaacagtattccggccgaatactgtcttcataggtcgagaaagggagctaaagcagttacacaacatgctaaaggataagaagagaagatcaagtggcacatcatcagtcttgattcaaagtatgccgggaggtggcaaaagtcacctcgcgcggcagtacgtcttcgagcataagaacgactatcctggcggtatcttctggatccgagcgaaatcacttgaagaactagactatggatactatgatatcgctaaggtggcgaatttaaaagagctttctagttcggttcaggctgaggctagtgacacccgcacagttgttaaagctgttcaaaggtggctcagtgacactaaagactggctattggtccttgatggtgttcattttgacttcgaaggacttgctcactacataccattcgccaaacacacgagcatcatttacacgtcgacggagcggaccacgggagagggatatcagtttgataatccgcagatcctagcgctggatccattgtcgaagcaacatgctcaagaactactatttgaagagatggggaagaagaaaccttacactcaggatgatcttcaccgtgcagaagagctagtcgagttgatggaccgactaccgctcatgattcatgtagccgcgctacatctcaatgctacccgagaaccgcttgccaggtatctgagatcttacaaaagtcggccaaaggcaggcaatctcccagcataccgtgctgttcgtgaacaactggagcatcgaggtgcatttgctgccctaaacttgatgtctttactggccttttttgggaaccatataccagtcgagctgattgcacttggcacaaaaaagctcgatagaagcacaccagtcaaatccacaactcctggaactaggaagcgatcactgagtagcacgttgaagactctaattgctttctcgctcgtagaacgtaacgagagtaaggaagcctctgtcgctagctcccgcagcactcgcagcgtcgatacggcccaggacagtctagatatactcagagtacatagcatcgtccaagctttcttcgttgatattctagatgaagaaaagcagattcacatctggctagatcgagcaatttgcgtcttctgtggggctttcgacgcaagcgttcaaagagtggaagaagatcgccaaactggcatgccagaagactatcgccgcttgcttatacacggtcagcggctactgtttcatttggatcgtttcgaaaaacggtttcctggcttggcgcaatcccgcgaggaactagaattgagactcgactcggttgagagtctcattgatcagttaagcaagagagtcgatgtagcggctagtcaggggtcagaagagccgattgtctctgtttttgaaagaaccaatagtctctcagagaatgagtcgacgaccactccaagtgactacagcgtcatcgacgacttcgccgtggatgatgctactgatactttaggatctcccacagcttacacgcctgatgattacaatccataccactggcacattcaatacccacatggcaatggtatcccaggtgttattgatgatacatcaagaactgtgactccacaaccgccgcccactgagatttttgacgcgatgtcaatgccggatgatgacgaaacaactctacgagtctttggtccgaaccatcgaaccatcaagaagcatgctgaacgtcgctatcgtgatcatgccggggcatggagggcttctccgcaaattattagtgatcctcgagttacgatcagtcgtgaaaacgctcgaggcttcatcaacactgcgccatccacgacaccaattcaccatcgctcggcaggcgacaacgtagcttatggtcggagcgaggctgagatcagcttaaatcaaattcaaaaagggacacccgcgcttcaaaaaggcatcacagcgttattcactccagagcctagccagtctcgcccaagactggtcgccgggcgaccatcgtatgcaaacgcaagagctgaggaggctgatttagagaacgactttgtaacacccacattttcatatccaccaccatcgtctaagccggctgttgccgccattgcgcgactcaaggagaatgatcgacccgtgtcgcttgatgggctttgcccaatcaagatttcgagccctctcgcaggagatcctatgagtagcaatgcgatatcatcaacagactccccgcccgggggaagtgcaatggaaagcgagttactaccatctcaacagagttcaattctgttgccaggaatgtcggctcgccggcgttctgactctctctcacgcaccagccagccatctccctcacagtccctaggaccattccgaccaccccctgtcccattggatatgtcaagtagcctacactctctgccgcttgccagctcccgaaatgcgggctcaaatcagctttctacttattctattgatgagtatggcgagatctcagctttagctcaatcgtttccgactattagacaaccggttcaattaccctatcccaccactccacatacattacaaatcccgcctgaggccttctcaccgggaccaccaccgccttgggtcacctcctcagggggtatcaattcgctgcctcaggggtactctagccagccaatgtctcgtgatgccagtcaccagtccaactccagtcatggatcgaacttctcgcccccacaggcatacaacaactcatcaatatttctcaatcagacgtacagctcttccccaggctcacagatcatgcagagaccacgatcacgacgcccaagcatggtagagaccgaaccaagcccaccactcaagccactcgattctgacgggactagctatgagctgtataacgatggccaccacttgcacagaaacgtacataatcatatacctcgtggacgagatcaccttgtcagcgcgcctcttccatatcctcctcctcaaggatctggtttcttgtcccgcatccggtctatgagaacacgtagtggtagatggcagcgccgaagtgaatcagctggtggaaggctaggaggaagtgtaggtcaagagcagaatagaagtcaaacttccgacagtcctaagcttgaccgtgtccccgtcagtgaggaaatgtcgcgttcgggctctgcttccggcggcatacggtttgacaatgatacactcgtcgaattcggaagcgcaccatcaccaccctcggcaaccgccatgaggcgaagtagtccgaggcttggcaacaagagtcctggtaactcgtcaccttttcgtccgcccagaaaggaaaacagaagcccgtcactagcaagaggtagccctcccagccaaccagttgttggcctagggatacagcaaagaagagcctcgtgagctacgtcaaattgcagacatctacattgttccaccacctacaataccatcatttgctttttgtttcggtctgatgagccttattagtcggctattgctaaaagatctgattttggaacgtgcatttcgcctgctgctgagacgagtttggaaggaaaagaaagaggcaaatcatgacatacgatgttcattggctccagtaataaagcatttagataggtgcatttgtaacgacgaacccgggagattgcatgcacagaaaagataagaacggcgatacccattctgtttcagtatcaaatagtttacagaaaagaatcaaagaaatacttacattaagagagcagtcaaaacatgtcgaaatatgctatttgttttacttagatgacttatcc

SEQ ID NO: 1845 - DNA, 3432 bp, Muscodor strobelii
  misc_feature: SGI cDNA ID NO. 560228
  misc_feature: Encodes the peptide sequence at SEQ ID NO 1846
atgcctacaacaggctcagtcaacagacaaatctctcgctacgagaccactgcagtctacacccatccagatgccaaagtagacatcattctcgtccatggcctgaatggggagccacaaaagacctggacagccaaaaatggcgtcttttggcccgccgatctcctcccagcgtctctcagagaagctcgagcaaacgttctcgtttatggctataatgccgatgtctactcgaagaagcacgggtcgaatccgagcgacaatttcatatacatgcatgctcaaacattagtcacctcacttacacactaccggaaagatgagatgacgtcgcacaatcccattatatgggtttgtcatagtttgggcggaattcttgtgaagcgagcccttctatactccaacgacttacggacatcgcagcatgaggactatcgctctgtctatgtatcaacttatggcatcgtgtttctcggtacaccacatactgggtcagacgtagcaacgtggggtacagttcttcaagccatgtcagacgctgtcgtgcccagatccatcttccagtccgagtctgtactgctcagaactctgaaaagagacaacgaaacgctccagaacataaatagtcatttccttgacgtttatcagcgcttcaagattcttatggctcacgaaaaccataaaacggacctcaagggcactaggatgttggttgtcgatgcaaactcagcgagcccacaactacccggagtcacttactatgctatcgaagcaacgcactcgggtatgtgcaagttcgatagtaagaatgctcccggatacagaactgtcgcaacggctatcagagaatgggcaacagatgctccagatgttgtcctcactcgatggcgagttgaagatgaggagaagctggcacgagcacaacatgaaatcgaagaaagaatgaagccttggattcgttcgcaacgactccgaccatctgatcaaggagcgaatactccgcagcaaaataatgagactacattaccctctactcaagaaccttcgacaattcagaatccaactagatcaatgcttcctgagccagaaacacctagtcggacggatgatgaagaagagcttttcccatctcaacaatcaagatctgatggcagtcagaccaaggacccaatctttgtacgaccaacagtattccggccgaatactgtcttcataggtcgagaaagggagctaaagcagttacacaacatgctaaaggataagaagagaagatcaagtggcacatcatcagtcttgattcaaagtatgccgggaggtggcaaaagtcacctcgcgcggcagtacgtcttcgagcataagaacgactatcctggcggtatcttctggatccgagcgaaatcacttgaagaactagactatggatactatgatatcgctaaggtggcgaatttaaaagagctttctagttcggttcaggctgaggctagtgacacccgcacagttgttaaagctgttcaaaggtggctcagtgacactaaagactggctattggtccttgatggtgttcattttgacttcgaaggacttgctcactacataccattcgccaaacacacgagcatcatttacacgtcgacggagcggaccacgggagagggatatcagtttgataatccgcagatcctagcgctggatccattgtcgaagcaacatgctcaagaactactatttgaagagatggggaagaagaaaccttacactcaggatgatcttcaccgtgcagaagagctagtcgagttgatggaccgactaccgctcatgattcatgtagccgcgctacatctcaatgctacccgagaaccgcttgccaggtatctgagatcttacaaaagtcggccaaaggcaggcaatctcccagcataccgtgctgttcgtgaacaactggagcatcgaggtgcatttgctgccctaaacttgatgtctttactggccttttttgggaaccatataccagtcgagctgattgcacttggcacaaaaaagctcgatagaagcacaccagtcaaatccacaactcctggaactaggaagcgatcactgagtagcacgttgaagactctaattgctttctcgctcgtagaacgtaacgagagtaaggaagcctctgtcgctagctcccgcagcactcgcagcgtcgatacggcccaggacagtctagatatactcagagtacatagcatcgtccaagctttcttcgttgatattctagatgaagaaaagcagattcacatctggctagatcgagcaatttgcgtcttctgtggggctttcgacgcaagcgttcaaagagtggaagaagatcgccaaactggcatgccagaagactatcgccgcttgcttatacacggtcagcggctactgtttcatttggatcgtttcgaaaaacggtttcctggcttggcgcaatcccgcgaggaactagaattgagactcgactcggttgagagtctcattgatcagttaagcaagagagtcgatgtagcggctagtcaggggtcagaagagccgattgtctctgtttttgaaagaaccaatagtctctcagagaatgagtcgacgaccactccaagtgactacagcgtcatcgacgacttcgccgtggatgatgctactgatactttaggatctcccacagcttacacgcctgatgattacaatccataccactggcacattcaatacccacatggcaatggtatcccaggtgttattgatgatacatcaagaactgtgactccacaaccgccgcccactgagatttttgacgcgatgtcaatgccggatgatgacgaaacaactctacgagtctttggtccgaaccatcgaaccatcaagaagcatgctgaacgtcgctatcgtgatcatgccggggcatggagggcttctccgcaaattattagtgatcctcgagttacgatcagtcgtgaaaacgctcgaggcttcatcaacactgcgccatccacgacaccaattcaccatcgctcggcaggcgacaacgtagcttatggtcggagcgaggctgagatcagcttaaatcaaattcaaaaagggacacccgcgcttcaaaaaggcatcacagcgttattcactccagagcctagccagtctcgcccaagactggtcgccgggcgaccatcgtatgcaaacgcaagagctgaggaggctgatttagagaacgactttgtaacacccacattttcatatccaccaccatcgtctaagccggctgttgccgccattgcgcgactcaaggagaatgatcgacccgtgtcgcttgatgggctttgcccaatcaagatttcgagccctctcgcaggagatcctatgaagttcaattctgttgccaggaatgtcggctcgccggcgttctga

SEQ ID NO: 1846 - protein, 1143 aa, Muscodor strobelii
  misc_feature: SGI Peptide ID NO. 560228
  misc_feature (5)..(1074): NCBI GI: 116203709 Blast Desc: CHGG_09738 [Chaetomium globosum CBS 148.51] gi|88175866|gb|EAQ83334.1| CHGG_09738 [Chaetomium globosum CBS 148.51]
  misc_feature (5)..(1040): NCBI GI: 145610873 Blast Desc: MGG_00850 [Magnaporthe grisea 70-15] gi|145018209|gb|EDK02488.1| MGG_00850 [Magnaporthe grisea 70-15]
  misc_feature (10)..(1103): NCBI GI: 154309997 Blast Desc: BC1G_06919 [Botryotinia fuckeliana B05.10] gi|150851707|gb|EDN26900.1| BC1G_06919 [Botryotinia fuckeliana B05.10]
  misc_feature (10)..(1103): NCBI GI: 156039209 Blast Desc: SS1G_11741 [Sclerotinia sclerotiorum 1980] gi|154697478|gb|EDN97216.1| SS1G_11741 [Sclerotinia sclerotiorum 1980]
  misc_feature (5)..(1011): NCBI GI: 256733036 Blast Desc: NECHADRAFT_78939 [Nectria haematococca mpVI 77-13-4]
  misc_feature (7)..(842): NCBI GI: 259486168 Blast Desc: TPA: LipA and NB-ARC domain protein (AFU_orthologue; AFUA_3G11500) [Aspergillus nidulans FGSC A4]
  misc_feature (17)..(842): NCBI GI: 121705776 Blast Desc: LipA and NB-ARC domain protein [Aspergillus clavatus NRRL 1] gi|119399297|gb|EAW09725.1| LipA and NB-ARC domain protein [Aspergillus clavatus NRRL 1]
  misc_feature (17)..(842): NCBI GI: 159127486 Blast Desc: LipA and NB-ARC domain protein [Aspergillus fumigatus A1163]
  misc_feature (17)..(842): NCBI GI: 70999500 Blast Desc: LipA and NB-ARC domain protein [Aspergillus fumigatus Af293] gi|66852106|gb|EAL92431.1| LipA and NB-ARC domain protein [Aspergillus fumigatus Af293]
  misc_feature (7)..(842): NCBI GI: 67524875 Blast Desc: AN2895.2 [Aspergillus nidulans FGSC A4] gi|40744290|gb|EAA63466.1| AN2895.2 [Aspergillus nidulans FGSC A4]
MPTTGSVNRQISRYETTAVYTHPDAKVDIILVHGLNGEPQKTWTAKNGVFWPADLLPASLREARANVLVYGYNADVYSKKHGSNPSDNFIYMHAQTLVTSLTHYRKDEMTSHNPIIWVCHSLGGILVKRALLYSNDLRTSQHEDYRSVYVSTYGIVFLGTPHTGSDVATWGTVLQAMSDAVVPRSIFQSESVLLRTLKRDNETLQNINSHFLDVYQRFKILMAHENHKTDLKGTRMLVVDANSASPQLPGVTYYAIEATHSGMCKFDSKNAPGYRTVATAIREWATDAPDVVLTRWRVEDEEKLARAQHEIEERMKPWIRSQRLRPSDQGANTPQQNNETTLPSTQEPSTIQNPTRSMLPEPETPSRTDDEEELFPSQQSRSDGSQTKDPIFVRPTVFRPNTVFIGRERELKQLHNMLKDKKRRSSGTSSVLIQSMPGGGKSHLARQYVFEHKNDYPGGIFWIRAKSLEELDYGYYDIAKVANLKELSSSVQAEASDTRTVVKAVQRWLSDTKDWLLVLDGVHFDFEGLAHYIPFAKHTSIIYTSTERTTGEGYQFDNPQILALDPLSKQHAQELLFEEMGKKKPYTQDDLHRAEELVELMDRLPLMIHVAALHLNATREPLARYLRSYKSRPKAGNLPAYRAVREQLEHRGAFAALNLMSLLAFFGNHIPVELIALGTKKLDRSTPVKSTTPGTRKRSLSSTLKTLIAFSLVERNESKEASVASSRSTRSVDTAQDSLDILRVHSIVQAFFVDILDEEKQIHIWLDRAICVFCGAFDASVQRVEEDRQTGMPEDYRRLLIHGQRLLFHLDRFEKRFPGLAQSREELELRLDSVESLIDQLSKRVDVAASQGSEEPIVSVFERTNSLSENESTTTPSDYSVIDDFAVDDATDTLGSPTAYTPDDYNPYHWHIQYPHGNGIPGVIDDTSRTVTPQPPPTEIFDAMSMPDDDETTLRVFGPNHRTIKKHAERRYRDHAGAWRASPQIISDPRVTISRENARGFINTAPSTTPIHHRSAGDNVAYGRSEAEISLNQIQKGTPALQKGITALFTPEPSQSRPRLVAGRPSYANARAEEADLENDFVTPTFSYPPPSSKPAVAAIARLKENDRPVSLDGLCPIKISSPLAGDPMKFNSVARNVGSPAF

SEQ ID NO: 1847 - DNA, 6266 bp, Muscodor strobelii; identical to SEQ ID NO: 1844
  misc_feature: SGI EST ID NO. CUFF.5216.2
  misc_feature: Variant of the nucleotide sequence at SEQ ID NO 1845

SEQ ID NO: 1848 - DNA, 876 bp, Muscodor strobelii
  misc_feature: SGI cDNA ID NO. 560229
  misc_feature: Elevated expression when VOC is produced
  misc_feature: Encodes the peptide sequence at SEQ ID NO 1849
atgggctacgatcgttcgcctcgtcccggatcacgcagtcggccgcgtcatgacgagacacacagagatagcaggagcaggagagagcgctcgaaagacgaccggcgccgccgcaggtcgagatctcccaccgactcacacaggcggcgttcgtcacgagacagaggccaggacgcggatagaagacacagacgacagcgctcacgcgatgatgacgaacccagtgggaagagttcgcgccgacatcgggcgcatgacgaccaaggcgacgaggctagcgaccgagaccgagacaggagtagcaaacaagtagtcaggcgcaacgggccgttgccttctcaggcagactccttcgccctgacaaacggcgaagagccgcccaaaccgaaggagaagcccaactttgggagttccggtgctcttgctgccgcttccaactcagtcacacaggcagacggttccaccatcgttctcaaatatcacgagcccccagaagcgcgcaaaccgcctcccaaggaccaatggaagctattcgttttcaagggagaatcaatcatcgacaccgttccactcagtaatcgaagttgctggctcgtggggagagagcttgccgttgttgacatggttgctgagcatcccagcatcagcaagcaacacgccgtgatccagttccgataccttgagaagcgaaatgagtacggcgataagattggcaaggtaaaaccctatctcatagatcttgagagtgccaatggcactctgctcaactcaaagaaagtgccggatagccgataccttgaattatgcgacaaagatatgattcaatttggccagagtacgagggagtacgtattgatgctcgcgcccaaggattga

SEQ ID NO: 1849 - protein, 291 aa, Muscodor strobelii
  misc_feature: SGI Peptide ID NO. 560229
  misc_feature (197)..(277): Pfam Id: PF00498 Pfam Desc: FHA domain
  misc_feature (97)..(290): NCBI GI: 171679385 Blast Desc: protein product [Podospora anserina] gi|170939318|emb|CAP64546.1| protein product [Podospora anserina]
  misc_feature (89)..(291): NCBI GI: 46125221 Blast Desc: FG06988.1 [Gibberella zeae PH-1]
  misc_feature (111)..(290): NCBI GI: 261361207 Blast Desc: smad nuclear-interacting protein [Verticillium albo-atrum VaMs.102]
  misc_feature (98)..(291): NCBI GI: 145610875 Blast Desc: MGG_00849 [Magnaporthe grisea 70-15] gi|145018210|gb|EDK02489.1| MGG_00849 [Magnaporthe grisea 70-15]
  misc_feature (88)..(291): NCBI GI: 164424668 Blast Desc: NCU06883 [Neurospora crassa OR74A] gi|157070611|gb|EAA29994.2| conserved [Neurospora crassa OR74A]
  misc_feature (105)..(291): NCBI GI: 256733037 Blast Desc: NECHADRAFT_78940 [Nectria haematococca mpVI 77-13-4]
  misc_feature (106)..(290): NCBI GI: 154309995 Blast Desc: BC1G_06918 [Botryotinia fuckeliana B05.10] gi|150851706|gb|EDN26899.1| BC1G_06918 [Botryotinia fuckeliana B05.10]
  misc_feature (74)..(282): NCBI GI: 116203711 Blast Desc: CHGG_09739 [Chaetomium globosum CBS 148.51] gi|88175867|gb|EAQ83335.1| CHGG_09739 [Chaetomium globosum CBS 148.51]
  misc_feature (123)..(290): NCBI GI: 156039215 Blast Desc: SS1G_11744 [Sclerotinia sclerotiorum 1980] gi|154697481|gb|EDN97219.1| SS1G_11744 [Sclerotinia sclerotiorum 1980]
  misc_feature (101)..(287): NCBI GI: 67524871 Blast Desc: AN2893.2 [Aspergillus nidulans FGSC A4] gi|40744288|gb|EAA63464.1| AN2893.2 [Aspergillus nidulans FGSC A4] gi|259486170|tpe|CBF83797.1| TPA: FHA domain protein SNIP1,
  misc_feature: Useful for introducing or modulating the production of volatile compounds
MGYDRSPRPGSRSRPRHDETHRDSRSRRERSKDDRRRRRSRSPTDSHRRRSSRDRGQDADRRHRRQRSRDDDEPSGKSSRRHRAHDDQGDEASDRDRDRSSKQVVRRNGPLPSQADSFALTNGEEPPKPKEKPNFGSSGALAAASNSVTQADGSTIVLKYHEPPEARKPPPKDQWKLFVFKGESIIDTVPLSNRSCWLVGRELAVVDMVAEHPSISKQHAVIQFRYLEKRNEYGDKIGKVKPYLIDLESANGTLLNSKKVPDSRYLELCDKDMIQFGQSTREYVLMLAPKD

SEQ ID NO: 1850 - DNA, 3558 bp, Muscodor strobelii
  misc_feature: SGI EST ID NO. CUFF.5218.0
  misc_feature: Variant of the nucleotide sequence at SEQ ID NO 1848
ctgtactgtgctagatcccagatctctgatctcgccatgatgcgttcaatggatttggcgttctactcactacttctatctgctcctcggtcttacactaaagccagggaactccattttaggcgccaagtcgtacttccctactcgctctaggctcgccttgctacatcctatagccatagcttgtttgccatgtacccgcgatatgcatggctaatcttgctagtcctcggcgatggtctttaagtgttggttttggtgtatatcttggtgagatcacagtcgaatggggggttgacgccggggaaaatcgactgtcaaaaaaaggatttaacgttaaattgattccctacaggtttgtaggctgctgtttaatttatcgatcattgttctcgctttggaattatttatgtgagagaaaggagccgcgactacattggcgccgtaatacgattgtttattcgagtattcgagtattgactgagaaatttctacgcggtagtactcgttggtttcaaagatgatcagtggaattggcctaaatggaagctaggtaggtacataggtaggtgggttgtggcgcggcggcgagctctagcttgcccatgttgtggctttttagtctgtgctctagtgcccattttccaattgaacccagttgtatcgttgtcccgcacgacactggtacatttgatatcgcggtccatatcacaccctgacaacacctaagtcgatactgcgtgactctctgagccttacgagctttcctgagtctgtgcgacgtacaattcggcaacgcgctttcaacaagagatgggctacgatcgttcgcctcgtcccggatcacgcagtcggccgcgtcatgacgagacacacagagatagcaggagcaggagagagcgctcgaaagacgaccggcgccgccgcaggtcgagatctcccaccgactcacacaggcggcgttcgtcacgagacagaggccaggacgcggatagaagacacagacgacagcgctcacgcgatgatgacgaacccagtgggaagagttcgcgccgacatcgggcgcatgacgaccaaggcgacgaggctagcgaccgagaccgagacaggagtagcaaacaagtagtcaggcgcaacgggccgttgccttctcaggcagactccttcgccctgacaaacggcgaagagccgcccaaaccgaaggagaagcccaactttgggagttccggtgctcttgctgccgcttccaactcagtcacacaggcagacggttccaccatcgttctcaaatatcacgagcccccagaagcgcgcaaaccgcctcccaaggaccaatggaagctattcgttttcaagggagaatcaatcatcgacaccgttccactcagtaatcgaagttgctggctcgtggggagagagcttgccgttgttgacatggttgctgagcatcccagcatcagcaagcaacacgccgtgatccagttccgataccttgagaagcgaaatgagtacggcgataagattggcaaggtaaaaccctatctcatagatcttgagagtgccaatggcactctgctcaactcaaagaaagtgccggatagccgataccttgaattatgcgacaaagatatgattcaatttggccagagtacgagggagtacgtattgatgctcgcgcccaaggattgaacctcaaaaggcaggcatagtttgagccaccgtcaatccgttcccacccaccctttcgcttttggttactatccacattgcgaactacaaattctagatacacgcccaaaaagggacatacaacgagcttaagatgaggcctcttcttccgtcactatctccaaagccactaaatgatcgcgtgtcgcttgactggaaaaacatatgcgaggctagccacctttgacaagttgttctccccaacccaacctgtcatgacaaagaacgaggctatcgtcggtatgactcagtgggctgtgtctaagacctcgaaactccgtttgcttggaacttgctccccttgcctctgccattttaggaatctttgggagcacacgactgactccaggccaaatgtgttacccaaagggccagactggagccagccaaaaccatggaaaatacgaatgctgggcaaaagcccaggtaagaaaaccacgagtacgagttcatatttctgagatggtggcttcatcaagacgaaatggtggtgccctctaaacacttatgacgtttggccatctttctgctcggcatgtgacagatgcaaggaaagagcagttcctgcatatcgacaaatgcacaacaagcacgatagaaccgttggttgtgacgaacggcaggccatgattggtctagggctctccctgctttagccgcaacttcaccacaaggttgtatccattttcaaccgcggggccaggtggatggcttcggagaaaaatcccggttggtcttgtcaccgagcacaagcgaatggtatacctgttagtcatacgagtccgagtagttgtggtgtggatgttgggatgcatacccattcgcaatgtcggtggaagcgaggtggagcagacatcgagaaaagtgacgtgttactggggtgcatctgccatcacaatcgaaagacgaggagcttgacaaatagcagtccaaggaaaacagaaagcaagtcacaagctcgattcgaattaatggtcaaagagaaaattgtcacttctcagggtttcagattccgtgaattgaacaagatgcttgcttatcacctactgcgatatctaaccatgctcgatatgttggggagatcgatgtcagatgcggcgtggcgccgtggccaggaacagttgatgggctgcattccgaccaactaggattccccggcaatcctcccgccttgcatgacgctatccagtccaaatttactgtagcagtcggccagtatttgcctttatgtggcctgcactttcaattgagccattgaaataaaccctgtaattacttgaaacagtttatcgtaacaattagtcattattcagcttgatggccatggcaatgttgcagctttgaggtctaggcagaagagcaaggcacttcaccgagcaaaaatgagttagtcatctggatgctacgggctttaggatggtgcacaacagcctcatttgtgtagaatgatgaacagggcactgcacaacacaaacgatagagttaagttcaggcgcaatgctgtggttgtgctactgaagtctgtccttgccgcagctgctagccattgctatgactggtcgtagaggcggcatcgcgtgtccgtcaagtggtcggcgttgctcttattggacgaagttgacagccataccaaaaagcaatggtaaaattatcaacacctgttattatgattcgatgctttcaaattgttacctagtgctagtctgtacaggaagaccgatggaagtttccacgtttcgcaattctgccctgcggcgtccgcccatggcgtctgtttatgcagcactggccaatgctctccatctatcgcttcgtaatgtctcagcttcc

SEQ ID NO: 1851 - DNA, 6468 bp, Muscodor strobelii
  misc_feature: SGI cDNA ID NO. 560230
  misc_feature: Reduced expression when VOC is produced
  misc_feature: Encodes the peptide sequence at SEQ ID NO 1852
atgttgggcctcttacggactccttcagggcatagcaatctgtctacgaagcagaccaagcgagcaccagaacctgttgtcaccgaagtcaacctttccgagaacgctccgcataaagacatgggctctataagctcacctccgctccagagccaaacagctctactgtcgccgccactgatgagtggtagtatgcgagctaacaagcgttcttcgtcgtacgcaaaacgttccttgatacgcactacaactacgcaatccgctggcatacactttgtgaaagatcagtattactctgttcgtcaaagatgccaacgagagcttggcgctggtgtgggcttctctgcccttgacacatctcactctgccctggatcactggatcagagaggagcgcgtggctaggttgcctcgtaagggcagctcatgggatcgtgttctgatctccgtccattacttcgccgcccaggtctaccgacttagcgaggcaattgagtctttcactccagaatgtggaccggcatcaaaccttctgtatgggcagtgtctgcttcttctcgagcttggtcacgaaaacgcatcagctctacaaacagcttttgacctgttttatcagcttggtttggagctctcgccactgttgagagcccagcatgcattactctcggatcattcgatcatggaagacgtcagtcgggctttctcagagctgctctatatcgtctctggtattgcaattgggttctattctgctgttcatggttcccgtcaatctactacgaggctagatatctacgcgactttcggtgcttctattgacaactaccgttcgcgcattcagcactgcgagtacgcaatatggaatgttgaactccaacgatcgcatgggcatgacggtgccacccacattgaggcccttcaggaatggttggagccccaagacaaggtcctcgcttttctcgcctccaaccacatcactctcgcaagccgagcggaaaactatacttgcgattggttccacaaacccctaactcagttcttcaagcatgacgaaaaagtgctgcttgtggagggaaaatcaggatccggaaagacgacactagccaactgggtcgttaatcggctgcagagacctgtgaatggtcgagtcatatccaccttgaacttcttctacaattcgagcatttccgcgcaagcatcttgtctttacatgttgaaaactctgctgtttcaactgctatcgttgagaattggcgacctggatctgttcaacgtcatcttcaaggcttacacggactcgcaatccctgactacaactaaagcacaggaagaaaggctgtgggaagctctccaccaggcattgcatgcggtcagcggcgatgaagatgacgtattggctattgttatcgacggtctagatgagatggagggccaaaagcctgcagcaaagcaagtgagcatgaagcttcaaggcatagtgcaagatgttgccggtctacgggcgattctatttactcagcccctcgatattggatcagcgcatctcatcgaaagaatcgaactgtcgcctgagaatgtggacgatgacattcaaaccatcattcgacaaggcctgtcaagacttcagcatttctctgatagagacttttccgagcaagatcagataatcgatgacctgctgaatattgctgacgggtctatgctactcgctactcttttcgtccggtatcttgcgcagcacaagacacacgcagagctcggagaggccgtcaaggaattactaaagccaccaccgcgaggtgtcgctgaccttgtccaaaaactccttagagtcttgaagcttgattccagcagcaagactgtgctctcatgtcttgtggcagctaagaggccactatctcttaccgagatagaccttctgctccgatcagggccaaagagtactggcttggacaagcccgtgcaaattggctccatcactaagtcaattactgctttcactgttagagtagaaggcctcatcgcattgcgacatgatgccattaaacaggctttgctatctatccccgatacctcaaatgtatcgttacatctcaaggataggcataaggacttgctcatccgccttctcacgtgctcagccaagcatttgcgagacgtggacgaaccacgcttagacctctcatcatcgcccgaattcgacaggaaacttgcatcaaattatctccttgaatacactgtccgatattgggccattcatttcaagctgtcatccttattcaaggttcaaggcgacttgcatttgcccgaggagttcacttcagtctttcctgagtcagttagctttgctttgttggaagcaagccgttggagagttcagtgcttgcctgacgaggctgtagagctatttgctatcgctttccgcgtccgaaaaacactgttcggtcttgaacatgccagcgtgctacagtctgctattacttgtgccgtcttctacgaaacggtactgacacgttataccgaagctactcagtggtatgctcaggtggtcagaatcagcaagacattacttggtttccagtcagagcttgtgattacctgttgcaacacacttcttcgtatctcggagacgcttgtcaccaagaagcgcacggagatcatgacataccgggaggagatattgatcgtgttgatctcttcttatacgcaccaatatggagctacatcaaaggaagtcctccagatttacgaaacacttgccgagctctacgtgttcattagtgaagagacaaaagcgacggagattcgagtgaaaattcgcgaaatccactctggacaccatgatcatcactcagtggatcatgaccacgtttccagagagcttggcgttatactcaggaagcatgagcacatagaggaagtcgagggctttgatagtctcctgtttggctacgaagaagagactgaggagtcttggagtattgtgcacgtcgagagcatgattctatttgccttagaactcatcaagcgtgggcagttcagcggtgccgaagagatatatgtggaattatggctcaaactcacggagcattgccacactactcaggtatgcgagtggcacgagaagcgaattgaggtagtgctcagttacgcttctttccttcgcacacacaaacgaattgaggaagcttcagctgtcctgatctgctgctggaatgaatactcgaaccatcaagtgtcgatgtttgagtccattattctcctcctgaaagaaattgctgtctgcatgaaaactgtggggatgatatcgctttctctcacagttttccagagatgttggtcatggttcaagtccactcacaaggaacagagcagtgtcttcaaggagattgtggaacacatcgcgatcacttcaagcgagattgtcaagcattcatccacaactactaccacaacgacaacttcatcgagtgagaccgtcattcgggaggtgtttgagtcatctttctcatccactgagactcaaattactactacgactgtggaactgtgtaactctttgacctctatctacattgagcaagagaagtggtctgaagcagtgtccgtaatcaagagcacgctcaagagaacgtgggcttcttttttctcagagtcgctggagagcgtcagcctcgaaacatcattctcttcccagagcatcaaactcgttcttgacttggctcagtgctacatcaatcagaagcgatatgataaagttgactatatctatgtacggctctatagggttcattgtaaagccctgaagttcgacgacgtcgctgtcatcaagtacagagagctctacatagagttcctcaagaagtatgagatgcatagcgcactgatcagcttctaccaggagctccttgtcgaataccgctccttctatggaccagcccacgcaaggacaatcgcaatattgtatgctctaggcgatacatgccgaagccatcacttgactcacgggtattggatcgaatattactcggaaatcatcgttgtcttgaacaaaggtgcgctcatttgccatgaagacgccttacgtgctctcaatatcgtggctgagtattactacgaaactcagcggtacgctgagtctctggtgtatctcaagtccatcattgcaacgttttgccagtttggaacgaaatacaaatatttccaagccaccgcttttgttcagaagacctttgaaagatactatcgggtcatcgaggaaacccagattgaaattcatgagcacattaagattttgaaggaaatccgcgaagcctgctcaaagttctatggcgagtcctctgagatctcattgagcgttaccgtcacgctcgctgaggtatgcactaagagcgagaagtaccaattcgaagcagtgtcatactacgagcacatcatgaagcactccagcaccgtttctaccacaactgtgacgcgcagtcagagcgttttacgttctctctatgtgaagcagatcacttctacaagctcctcgactacagtgacgaaggagacacttgaaaaggcaacaaccatgacattcgagcgctatgtcgaaattaagaagacacattcttgcagtcacgagtccactctcacgacactgaaagagctggtcgtgctctatcaaaaacagaataaagtggagcttgcaattaaggagcttaaaagcctagttgcgcaatgtgttctcactgtaagctcttcgaaggagctgatcgagaccgctcggtccatcgcctccatctatgtcggcgtcttcgcatcctacggtttccagctagtccgtgaactcaagttgcagatcatttacaaatctgtatcaaaaggcgttggcttcgacgtctcgaaagcaggacgctcctgcttcgccttcatcgcagcttttgagtactatctacgcgccggtgagtcaggaacaatcgccggctatatggcagagattcttgccgagttcctcttctacgggcgtctagtctcgtccataaaggtcaaagccaaagcaggggttgttattcttcatggtgctcgtctccgagatatccttgtccgaactaagcgtaacgaggactttgataatatcgttgaacaccagattctggattacttcacagccgctgaggtgcatgtggtaaagggatcaacaaagtcggctgtccgaagctttgtgcgaattctgcttgtccatttctcgcagcatcgccagccaaagaactttgttgcctcagccgctcgggcagccgtatcagagttgaagatccatttggcgaacaagaagtataggttggcttacgagttggctcaatgcacatacaggtacctcatggcgcatgagggcttagacgatccaacagagatcacgctcggcttccagctctgcctcatgatggcaggtcgtggcgagtacaaacgtaccgctatcgacgaagaaaccaacaaggacatgttggcactctcacgagccatactcggcgaggtgttcgatatctgcaagaacaacaagatcgatctgtaccgctgccctctcgccgagctcaacgaacttgtctctctcgtcggagatcagaaggacagacctcgcctgttatggctattggatagtctctgggtctccagagataagcagacgtcttgggactccgaatttaagctgacgttaggtacccgccttgtgcaagctcgatttgtagctggcgacatcaaagtggccactagtctagctgaggacatcgtctacaatctccgaagaatcaacgggcctcgtcataggcaaaccttggccatgtatgagctccttgctagcatctatacgagtgctggtcatcacttcaccacgaagagcagtgcagagaacgccagtgaaggagacaagaaacgcgatagcgcactggccaagtcttactttaagaaggcagtcacagtcaatgaggacctactaaagctgctagtcgagacagatgcagatgacagtgatgacgacgacgatgacttctctgttgtcagcagtcatcatggttccgttaggagccgaagaagtacctatggactggggagaagaagtgtgtccaaccttgccacccttgcggcacgatcccccggcagcgggcttgaagagtcggacctcagcgctacacttgctggccatcgccaccaagaagctcctcgtgaagtgttggttgaggtggcgcgcaagcatttgaggttggcgaagttggcggtgcagcgatacggcggtttggacaggatcatgactcgtcggttcgatatcttgacaaccaagatttggaatgagttcaaagcagaattgaagctaaaggacgagcaggttctcagtagtaagtggaaagtacaaggatttggtaatggtaaagctgagggagggtatgacgaggatgggtttgtggttcccggaaactgggcaatttgttga

SEQ ID NO: 1852 - protein, 2155 aa, Muscodor strobelii
  misc_feature: SGI Peptide ID NO. 560230
  misc_feature (46)..(2145): NCBI GI: 169606178 Blast Desc: SNOG_06125 [Phaeosphaeria nodorum SN15] gi|160706930|gb|EAT85956.2| SNOG_06125 [Phaeosphaeria nodorum SN15]
  misc_feature (46)..(2154): NCBI GI: 189192841 Blast Desc: NACHT domain containing protein [Pyrenophora tritici-repentis Pt-1C-BFP] gi|187978323|gb|EDU44949.1| NACHT domain containing protein [Pyrenophora tritici-repentis
  misc_feature (46)..(2142): NCBI GI: 212534054 Blast Desc: NACHT domain protein [Penicillium marneffei ATCC 18224] gi|210069582|gb|EEA23672.1| NACHT domain protein [Penicillium marneffei ATCC 18224]
  misc_feature (98)..(2142): NCBI GI: 242789304 Blast Desc: NACHT domain protein [Talaromyces stipitatus ATCC 10500] gi|218717921|gb|EED17341.1| NACHT domain protein [Talaromyces stipitatus ATCC 10500]
  misc_feature (54)..(2142): NCBI GI: 119497963 Blast Desc: NACHT domain protein [Neosartorya fischeri NRRL 181] gi|119413903|gb|EAW23842.1| NACHT domain protein [Neosartorya fischeri NRRL 181]
  misc_feature (54)..(2142): NCBI GI: 70988921 Blast Desc: NACHT domain protein [Aspergillus fumigatus Af293] gi|66846942|gb|EAL87273.1| NACHT domain protein [Aspergillus fumigatus Af293]
  misc_feature (54)..(2142): NCBI GI: 159128725 Blast Desc: NACHT domain protein [Aspergillus fumigatus A1163]
  misc_feature (43)..(2142): NCBI GI: 145235787 Blast Desc: An03g06670 [Aspergillus niger] gi|134058231|emb|CAK38423.1| protein product [Aspergillus niger]
  misc_feature (100)..(2142): NCBI GI: 255955899 Blast Desc: Pc21g17040 [Penicillium chrysogenum Wisconsin 54-1255] gi|211590413|emb|CAP96601.1| Pc21g17040 [Penicillium chrysogenum Wisconsin 54-1255]
  misc_feature (38)..(2142): NCBI GI: 115401886 Blast Desc: [Aspergillus terreus NIH2624] gi|114190472|gb|EAU32172.1| [Aspergillus terreus NIH2624]
  misc_feature: Useful for introducing or modulating the production of volatile compounds
MLGLLRTPSGHSNLSTKQTKRAPEPVVTEVNLSENAPHKDMGSISSPPLQSQTALLSPPLMSGSMRANKRSSSYAKRSLIRTTTTQSAGIHFVKDQYYSVRQRCQRELGAGVGFSALDTSHSALDHWIREERVARLPRKGSSWDRVLISVHYFAAQVYRLSEAIESFTPECGPASNLLYGQCLLLLELGHENASALQTAFDLFYQLGLELSPLLRAQHALLSDHSIMEDVSRAFSELLYIVSGIAIGFYSAVHGSRQSTTRLDIYATFGASIDNYRSRIQHCEYAIWNVELQRSHGHDGATHIEALQEWLEPQDKVLAFLASNHITLASRAENYTCDWFHKPLTQFFKHDEKVLLVEGKSGSGKTTLANWVVNRLQRPVNGRVISTLNFFYNSSISAQASCLYMLKTLLFQLLSLRIGDLDLFNVIFKAYTDSQSLTTTKAQEERLWEALHQALHAVSGDEDDVLAIVIDGLDEMEGQKPAAKQVSMKLQGIVQDVAGLRAILFTQPLDIGSAHLIERIELSPENVDDDIQTIIRQGLSRLQHFSDRDFSEQDQIIDDLLNIADGSMLLATLFVRYLAQHKTHAELGEAVKELLKPPPRGVADLVQKLLRVLKLDSSSKTVLSCLVAAKRPLSLTEIDLLLRSGPKSTGLDKPVQIGSITKSITAFTVRVEGLIALRHDAIKQALLSIPDTSNVSLHLKDRHKDLLIRLLTCSAKHLRDVDEPRLDLSSSPEFDRKLASNYLLEYTVRYWAIHFKLSSLFKVQGDLHLPEEFTSVFPESVSFALLEASRWRVQCLPDEAVELFAIAFRVRKTLFGLEHASVLQSAITCAVFYETVLTRYTEATQWYAQVVRISKTLLGFQSELVITCCNTLLRISETLVTKKRTEIMTYREEILIVLISSYTHQYGATSKEVLQIYETLAELYVFISEETKATEIRVKIREIHSGHHDHHSVDHDHVSRELGVILRKHEHIEEVEGFDSLLFGYEEETEESWSIVHVESMILFALELIKRGQFSGAEEIYVELWLKLTEHCHTTQVCEWHEKRIEVVLSYASFLRTHKRIEEASAVLICCWNEYSNHQVSMFESIILLLKEIAVCMKTVGMISLSLTVFQRCWSWFKSTHKEQSSVFKEIVEHIAITSSEIVKHSSTTTTTTTTSSSETVIREVFESSFSSTETQITTTTVELCNSLTSIYIEQEKWSEAVSVIKSTLKRTWASFFSESLESVSLETSFSSQSIKLVLDLAQCYINQKRYDKVDYIYVRLYRVHCKALKFDDVAVIKYRELYIEFLKKYEMHSALISFYQELLVEYRSFYGPAHARTIAILYALGDTCRSHHLTHGYWIEYYSEIIVVLNKGALICHEDALRALNIVAEYYYETQRYAESLVYLKSIIATFCQFGTKYKYFQATAFVQKTFERYYRVIEETQIEIHEHIKILKEIREACSKFYGESSEISLSVTVTLAEVCTKSEKYQFEAVSYYEHIMKHSSTVSTTTVTRSQSVLRSLYVKQITSTSSSTTVTKETLEKATTMTFERYVEIKKTHSCSHESTLTTLKELVVLYQKQNKVELAIKELKSLVAQCVLTVSSSKELIETARSIASIYVGVFASYGFQLVRELKLQIIYKSVSKGVGFDVSKAGRSCFAFIAAFEYYLRAGESGTIAGYMAEILAEFLFYGRLVSSIKVKAKAGVVILHGARLRDILVRTKRNEDFDNIVEHQILDYFTAAEVHVVKGSTKSAVRSFVRILLVHFSQHRQPKNFVASAARAAVSELKIHLANKKYRLAYELAQCTYRYLMAHEGLDDPTEITLGFQLCLMMAGRGEYKRTAIDEETNKDMLALSRAILGEVFDICKNNKIDLYRCPLAELNELVSLVGDQKDRPRLLWLLDSLWVSRDKQTSWDSEFKLTLGTRLVQARFVAGDIKVATSLAEDIVYNLRRINGPRHRQTLAMYELLASIYTSAGHHFTTKSSAENASEGDKKRDSALAKSYFKKAVTVNEDLLKLLVETDADDSDDDDDDFSVVSSHHGSVRSRRSTYGLGRRSVSNLATLAARSPGSGLEESDLSATLAGHRHQEAPREVLVEVARKHLRLAKLAVQRYGGLDRIMTRRFDILTTKIWNEFKAELKLKDEQVLSSKWKVQGFGNGKAEGGYDEDGFVVPGNWAIC

SEQ ID NO: 1853 - DNA, 5695 bp, Muscodor strobelii
  misc_feature: SGI EST ID NO. CUFF.4802.0
  misc_feature: Variant of the nucleotide sequence at SEQ ID NO 1851
atgggcatgacggtgccacccacattgaggcccttcaggaatggttggagccccaagacaaggtcctcgcttttctcgcctccaaccacatcactctcgcaagccgagcggaaaactatacttgcgattggttccacaaacccctaactcagttcttcaagcatgacgaaaaagtgctgcttgtggagggaaaatcaggatccggaaagacgacactagccaactgggtcgttaatcggctgcagagacctgtgaatggtcgagtcatatccaccttgaacttcttctacaattcgagcatttccgcgcaagcatcttgtctttacatgttgaaaactctgctgtttcaactgctatcgttgagaattggcgacctggatctgttcaacgtcatcttcaaggcttacacggactcgcaatccctgactacaactaaagcacaggaagaaaggctgtgggaagctctccaccaggcattgcatgcggtcagcggcgatgaagatgacgtattggctattgttatcgacggtctagatgagatggagggccaaaagcctgcagcaaagcaagtgagcatgaagcttcaaggcatagtgcaagatgttgccggtctacgggcgattctatttactcagcccctcgatattggatcagcgcatctcatcgaaagaatcgaactgtcgcctgagaatgtggacgatgacattcaaaccatcattcgacaaggcctgtcaagacttcagcatttctctgatagagacttttccgagcaagatcagataatcgatgacctgctgaatattgctgacgggtctatgctactcgctactcttttcgtccggtatcttgcgcagcacaagacacacgcagagctcggagaggccgtcaaggaattactaaagccaccaccgcgaggtgtcgctgaccttgtccaaaaactccttagagtcttgaagcttgattccagcagcaagactgtgctctcatgtcttgtggcagctaagaggccactatctcttaccgagatagaccttctgctccgatcagggccaaagagtactggcttggacaagcccgtgcaaattggctccatcactaagtcaattactgctttcactgttagagtagaaggcctcatcgcattgcgacatgatgccattaaacaggctttgctatctatccccgatacctcaaatgtatcgttacatctcaaggataggcataaggacttgctcatccgccttctcacgtgctcagccaagcatttgcgagacgtggacgaaccacgcttagacctctcatcatcgcccgaattcgacaggaaacttgcatcaaattatctccttgaatacactgtccgatattgggccattcatttcaagctgtcatccttattcaaggttcaaggcgacttgcatttgcccgaggagttcacttcagtctttcctgagtcagttagctttgctttgttggaagcaagccgttggagagttcagtgcttgcctgacgaggctgtagagctatttgctatcgctttccgcgtccgaaaaacactgttcggtcttgaacatgccagcgtgctacagtctgctattacttgtgccgtcttctacgaaacggtactgacacgttataccgaagctactcagtggtatgctcaggtggtcagaatcagcaagacattacttggtttccagtcagagcttgtgattacctgttgcaacacacttcttcgtatctcggagacgcttgtcaccaagaagcgcacggagatcatgacataccgggaggagatattgatcgtgttgatctcttcttatacgcaccaatatggagctacatcaaaggaagtcctccagatttacgaaacacttgccgagctctacgtgttcattagtgaagagacaaaagcgacggagattcgagtgaaaattcgcgaaatccactctggacaccatgatcatcactcagtggatcatgaccacgtttccagagagcttggcgttatactcaggaagcatgagcacatagaggaagtcgagggctttgatagtctcctgtttggctacgaagaagagactgaggagtcttggagtattgtgcacgtcgagagcatgattctatttgccttagaactcatcaagcgtgggcagttcagcggtgccgaagagatatatgtggaattatggctcaaactcacggagcattgccacactactcaggtatgcgagtggcacgagaagcgaattgaggtagtgctcagttacgcttctttccttcgcacacacaaacgaattgaggaagcttcagctgtcctgatctgctgctggaatgaatactcgaaccatcaagtgtcgatgtttgagtccattattctcctcctgaaagaaattgctgtctgcatgaaaactgtggggatgatatcgctttctctcacagttttccagagatgttggtcatggttcaagtccactcacaaggaacagagcagtgtcttcaaggagattgtggaacacatcgcgatcacttcaagcgagattgtcaagcattcatccacaactactaccacaacgacaacttcatcgagtgagaccgtcattcgggaggtgtttgagtcatctttctcatccactgagactcaaattactactacgactgtggaactgtgtaactctttgacctctatctacattgagcaagagaagtggtctgaagcagtgtccgtaatcaagagcacgctcaagagaacgtgggcttcttttttctcagagtcgctggagagcgtcagcctcgaaacatcattctcttcccagagcatcaaactcgttcttgacttggctcagtgctacatcaatcagaagcgatatgataaagttgactatatctatgtacggctctatagggttcattgtaaagccctgaagttcgacgacgtcgctgtcatcaagtacagagagctctacatagagttcctcaagaagtatgagatgcatagcgcactgatcagcttctaccaggagctccttgtcgaataccgctccttctatggaccagcccacgcaaggacaatcgcaatattgtatgctctaggcgatacatgccgaagccatcacttgactcacgggtattggatcgaatattactcggaaatcatcgttgtcttgaacaaaggtgcgctcatttgccatgaagacgccttacgtgctctcaatatcgtggctgagtattactacgaaactcagcggtacgctgagtctctggtgtatctcaagtccatcattgcaacgttttgccagtttggaacgaaatacaaatatttccaagccaccgcttttgttcagaagacctttgaaagatactatcgggtcatcgaggaaacccagattgaaattcatgagcacattaagattttgaaggaaatccgcgaagcctgctcaaagttctatggcgagtcctctgagatctcattgagcgttaccgtcacgctcgctgaggtatgcactaagagcgagaagtaccaattcgaagcagtgtcatactacgagcacatcatgaagcactccagcaccgtttctaccacaactgtgacgcgcagtcagagcgttttacgttctctctatgtgaagcagatcacttctacaagctcctcgactacagtgacgaaggagacacttgaaaaggcaacaaccatgacattcgagcgctatgtcgaaattaagaagacacattcttgcagtcacgagtccactctcacgacactgaaagagctggtcgtgctctatcaaaaacagaataaagtggagcttgcaattaaggagcttaaaagcctagttgcgcaatgtgttctcactgtaagctcttcgaaggagctgatcgagaccgctcggtccatcgcctccatctatgtcggcgtcttcgcatcctacggtttccagctagtccgtgaactcaagttgcagatcatttacaaatctgtatcaaaaggcgttggcttcgacgtctcgaaagcaggacgctcctgcttcgccttcatcgcagcttttgagtactatctacgcgccggtgagtcaggaacaatcgccggctatatggcagagattcttgccgagttcctcttctacgggcgtctagtctcgtccataaaggtcaaagccaaagcaggggttgttattcttcatggtgctcgtctccgagatatccttgtccgaactaagcgtaacgaggactttgataatatcgttgaacaccagattctggattacttcacagccgctgaggtgcatgtggtaaagggatcaacaaagtcggctgtccgaagctttgtgcgaattctgcttgtccatttctcgcagcatcgccagccaaagaactttgttgcctcagccgctcgggcagccgtatcagagttgaagatccatttggcgaacaagaagtataggttggcttacgagttggctcaatgcacatacaggtacctcatggcgcatgagggcttagacgatccaacagagatcacgctcggcttccagctctgcctcatgatggcaggtcgtggcgagtacaaacgtaccgctatcgacgaagaaaccaacaaggacatgttggcactctcacgagccatactcggcgaggtgttcgatatctgcaagaacaacaagatcgatctgtaccgctgccctctcgccgagctcaacgaacttgtctctctcgtcggagatcagaaggacagacctcgcctgttatggctattggatagtctctgggtctccagagataagcagacgtcttgggactccgaatttaagctgacgttaggtacccgccttgtgcaagctcgatttgtagctggcgacatcaaagtggccactagtctagctgaggacatcgtctacaatctccgaagaatcaacgggcctcgtcataggcaaaccttggccatgtatgagctccttgctagcatctatacgagtgctggtcatcacttcaccacgaagagcagtgcagagaacgccagtgaaggagacaagaaacgcgatagcgcactggccaagtcttactttaagaaggcagtcacagtcaatgaggacctactaaagctgctagtcgagacagatgcagatgacagtgatgacgacgacgatgacttctctgttgtcagcagtcatcatggttccgttaggagccgaagaagtacctatggactggggagaagaagtgtgtccaaccttgccacccttgcggcacgatcccccggcagcgggcttgaagagtcggacctcagcgctacacttgctggccatcgccaccaagaagctcctcgtgaagtgttggttgaggtggcgcgcaagcatttgaggttggcgaagttggcggtgcagcgatacggcggtttggacaggatcatgactcgtcggttcgatatcttgacaaccaagatttggaatgagttcaaagcagaattgaagctaaaggacgagcaggttctcagtagtaagtggaaagtacaaggatttggtaatggtaaagctgagggagggtatgacgaggatgggtttgtggttcccggaaactgggcaatttgttgaataactgtatcaatccccctattgtgtatttcataatcctttgtagtgttggttttctttcaaaactggacaataataatctttccatcatcttgaaatactgagcaaac

SEQ ID NO: 1854 - DNA, 2109 bp, Muscodor strobelii
  misc_feature: SGI cDNA ID NO. 560231
  misc_feature: Encodes the peptide sequence at SEQ ID NO 1855
atgaagcgcccattgcttacttggctgctgcagtctttatggttgcacactgcatttagcaatgttggactaaacggcgccgatgaccttttcaaatttgtaacaagacctgatttgatgagcccgaaatggaatatcacatatcaccacaaagaactgatagctcctggctattggtttgtgacgccttttaagtttatagagcatctactcgacgacctcaaatgggttccatgccaagtagggcctatgatatacgacaatgatggagaactggtctggagcggtgcatgccagtacaatcagcgaatattttacgacctctttccggtcgaacttaacaatcagacggttctcaaagcaatcgtcaagaattctgaatttcctgtatcgaactgtggtgctggcgcattcattaatgaagagtatgagttagtccatgacttctttattgacaaagaagacttgcacgtcaatatccacgagttcaattatatcgagcgccgtaacactacacttgtgactactcgacggccacggcaatggtctggccataatcttggcctcaatgaagatttaatttggatcgattcgaatggattcagagagtatgatttgacgaccggtaacatcacattccaatggcatgcggagtatcatgtcggtctttcagaaagcaccctgccgccggcttattatactcccgatcaaaataagacacgcgttccattcactcattttacaagagattatgtctatgacccatggcatatcaactcggttgatgaaaactccgatggcaactatctggtctcgttccgccacttggatactatcatgctcgttgcaggggacgacggacgggtcctatggagatttggtggtaagcacagcgactatatccacgagggcggtttcaaattctcgcgtcaacaccacgctagatatatcagccatagcaccgagcgcgacgtcatcagcttcatggataatgcgtccggcgaacagcatctcgacttccaaccgccatcaaataattacagccggggtctcattgttgaacttctccgaccgaaaggcgagccacaacgagcccgaatccttcaagaatacaaacgtcccgacagacagcttgccgacaagcgaggagccttgcaacgtcttacgaatggtaacgtcttcatgtcttggacagatgctggatacctctcagaacatagtaaaaatgatgacaaagttctcatggaggcccgcttcctaaacgagacgagacttggcacatatcgaacttacaaatcaacaaattgggtcggtcgaccgaaagagccgccggatgtgaagtctctcggctacggacttggcgcaaattccatgactgcaatatatgtttcatggaacggagccacggagcataagacatggaaattcttctccggggatcagttactgggtcaaaagaacaggacagggttcgaaaccgtgtttgtgactgacgttcctgtaaaaaccgtccgagccgaagcctacgacgtcaatgggatattcatgcgaaaatcgaaagacgtcatgacagagtatgccaatggctggataccgcgagcgatggacccgttaaatacggatgtctccgtaaatgcagagcccgctgaagctccagacgacgtcacacacaaggttccgccccctattgacgagcaactcccgcctatcgatctcccagttccgatcgaagaaatcggagagtcagggactttcaattctccaccaacgcctatagattctttccaccccttgaagtcgtcagatatcatgtcgtctatcaaggagattccatcagattcgaaagagaacgtgcttacgatagagtcatctagccccgtcaaagagccagcccaacctgtaaaatcggccatgccgctggaagagcccacaactccagttgaaccagaacatctgacagaaccagctaataatacccacaagccacacgccgacaacaatttttcggcagtatacgtaacgtcagagactagtcccctctatctcgcccttttaggaattccctgcgcgataggatactatgtgatcttgaaacttctctacagacag

SEQ ID NO: 1855 - protein, 703 aa, Muscodor strobelii
  misc_feature: SGI Peptide ID NO. 560231
  misc_feature (5)..(530): NCBI GI: 115394898 Blast Desc: conserved [Aspergillus terreus NIH2624] gi|114193029|gb|EAU34729.1| conserved [Aspergillus terreus NIH2624]
  misc_feature (28)..(530): NCBI GI: 119482588 Blast Desc: NFIA_024970 [Neosartorya fischeri NRRL 181] gi|119409477|gb|EAW19425.1| conserved [Neosartorya fischeri NRRL 181]
  misc_feature (18)..(530): NCBI GI: 238495847 Blast Desc: conserved [Aspergillus flavus NRRL3357] gi|220694039|gb|EED50383.1| conserved [Aspergillus flavus NRRL3357]
  misc_feature (28)..(530): NCBI GI: 70987257 Blast Desc: conserved [Aspergillus fumigatus Af293] gi|66846737|gb|EAL87069.1| conserved [Aspergillus fumigatus Af293]
  misc_feature (28)..(530): NCBI GI: 159123120 Blast Desc: conserved [Aspergillus fumigatus A1163]
  misc_feature (28)..(530): NCBI GI: 145247875 Blast Desc: An13g00460 [Aspergillus niger] gi|134080931|emb|CAK41447.1| protein product [Aspergillus niger]
  misc_feature (31)..(530): NCBI GI: 169775495 Blast Desc: [Aspergillus oryzae RIB40] gi|83770078|dbj|BAE60213.1| protein product [Aspergillus oryzae]
  misc_feature (29)..(553): NCBI GI: 255953547 Blast Desc: Pc21g04800 [Penicillium chrysogenum Wisconsin 54-1255] gi|211589237|emb|CAP95377.1| Pc21g04800 [Penicillium chrysogenum Wisconsin 54-1255]
  misc_feature (5)..(566): NCBI GI: 255947778 Blast Desc: Pc22g06260 [Penicillium chrysogenum Wisconsin 54-1255] gi|211591673|emb|CAP97914.1| Pc22g06260 [Penicillium chrysogenum Wisconsin 54-1255]
  misc_feature (28)..(557): NCBI GI: 255954359 Blast Desc: Pc21g08930 [Penicillium chrysogenum Wisconsin 54-1255] gi|211589643|emb|CAP95790.1| Pc21g08930 [Penicillium chrysogenum Wisconsin 54-1255]
MKRPLLTWLLQSLWLHTAFSNVGLNGADDLFKFVTRPDLMSPKWNITYHHKELIAPGYWFVTPFKFIEHLLDDLKWVPCQVGPMIYDNDGELVWSGACQYNQRIFYDLFPVELNNQTVLKAIVKNSEFPVSNCGAGAFINEEYELVHDFFIDKEDLHVNIHEFNYIERRNTTLVTTRRPRQWSGHNLGLNEDLIWIDSNGFREYDLTTGNITFQWHAEYHVGLSESTLPPAYYTPDQNKTRVPFTHFTRDYVYDPWHINSVDENSDGNYLVSFRHLDTIMLVAGDDGRVLWRFGGKHSDYIHEGGFKFSRQHHARYISHSTERDVISFMDNASGEQHLDFQPPSNNYSRGLIVELLRPKGEPQRARILQEYKRPDRQLADKRGALQRLTNGNVFMSWTDAGYLSEHSKNDDKVLMEARFLNETRLGTYRTYKSTNWVGRPKEPPDVKSLGYGLGANSMTAIYVSWNGATEHKTWKFFSGDQLLGQKNRTGFETVFVTDVPVKTVRAEAYDVNGIFMRKSKDVMTEYANGWIPRAMDPLNTDVSVNAEPAEAPDDVTHKVPPPIDEQLPPIDLPVPIEEIGESGTFNSPPTPIDSFHPLKSSDIMSSIKEIPSDSKENVLTIESSSPVKEPAQPVKSAMPLEEPTTPVEPEHLTEPANNTHKPHADNNFSAVYVTSETSPLYLALLGIPCAIGYYVILKLLYRQ

SEQ ID NO: 1856 - DNA, 354 bp, Muscodor strobelii
  misc_feature: SGI cDNA ID NO. 560232
  misc_feature: Elevated expression when VOC is produced
  misc_feature: Encodes the peptide sequence at SEQ ID NO 1857
atgtcgctgcgcacgatcttcttctccgccctcgtggcaacacttaccggcgttagtttcggacaatccgatgacatctgggtcggctgcttctcggtgccaaacacatacgatcgctgctgtcaaacgtacgaatctgtgcctggcgcgaactacactggcacatactgctccggtgcctctgtcgcctcgggatcttcctaccgatactgcatgaatcctaatccctacgttgctggagctatttggggcgcctgttgcgagactgctgcaccctcaaaccgcacatcggcgcatggcctatcaacaggctgtactctcatgggtaaggctcgaacccaaccatggtcttga

SEQ ID NO: 1857 - protein, 117 aa, Muscodor strobelii
  misc_feature: SGI Peptide ID NO. 560232
  misc_feature: Useful for introducing or modulating the production of volatile compounds
MSLRTIFFSALVATLTGVSFGQSDDIWVGCFSVPNTYDRCCQTYESVPGANYTGTYCSGASVASGSSYRYCMNPNPYVAGAIWGACCETAAPSNRTSAHGLSTGCTLMGKARTQPWS

SEQ ID NO: 1858 - DNA, 1269 bp, Muscodor strobelii
  misc_feature: SGI EST ID NO. CUFF.4827.0
  misc_feature: Variant of the nucleotide sequence at SEQ ID NO 1856
cagagccaaaaatagtgcaggtctagatataaaatctaccgatctcgaatgtcagacctaggtggtgcttctctcctagtgttgaaaataccctgacatctaattgtcagcttggccatcaactacagctcaagaatcgtacaatgtcgctgcgcacgatcttcttctccgccctcgtggcaacacttaccggcgttagtttcggacaatccgatgacatctgggtcggctgcttctcggtgccaaacacatacgatcgctgctgtcaaacgtacgaatctgtgcctggcgcgaactacactggcacatactgctccggtgcctctgtcgcctcgggatcttcctaccgatactgcatgaatcctaatccctacgttgctggagctatttggggcgcctgttgcgagactgctgcaccctcaaaccgcacatcggcgcatggcctatcaacaggctgtactctcatgggtaaggctcgaacccaaccatggtcttgatgggccatcaagaatgaacatcaagggatttggtcttcaaactcaagggggggaaacataagaaatgctgaagtagcatcaatgtacaatcgatacatccgattatctcatcccgtttccctggtatttttgacgctggtattgctcttattgttaatactcaaagctcgttgatcgtctgggactacttatgattggtgtcaatgcctcgttggtatagcaactgatggtcatgttcaagaaagttaccatcaggctcggtgaagtgaccttcttttgtgctctcacatagtattacaccttctggcgcatagaagtagttgcgaccgggacgatttgacgcacattttaaccagacattcattgggcgactcaattagagtccaacatacaagctcctagtaggaacagcaactacgtgtattgtagatgaaagaatgataagtacattgcatagactgcatgcttaacatctcattttgttactaaattgtgtcgcaatagttgcattcctaatcctgcgacaaatcagttgagctccgcacttcattattataatacgctaaattttatcgcgaatggcgcagaaaatgctcgcggctcgaacttcgagttaaccctttactcaattttcagtatactggacgtagtgggagtgcgccgtagcttgtgtgatgttgatgtgcgatggttgtcacgccaagcgccggcttccgcaggccaatgctgacttgtcgggtgcattgatctcagccaagtccattaattatcg

SEQ ID NO: 1859 - DNA, 750 bp, Muscodor strobelii
  misc_feature: SGI cDNA ID NO. 560233
  misc_feature: Elevated expression when VOC is produced
  misc_feature: Encodes the peptide sequence at SEQ ID NO 1860
atgtcggcagtcgaagaggtactaaaagcagcacgtatcgctaaagcaaatggatcgaatcgattctgtatgggtgccgcatggcgcgacctgaaagggaggaagagaggcttgaagaacatcactgagatgatcaagggagtccgggctctgggtatggaagcatgcgttacccttgggatggtcgacaaggagcaggcgaaggagctgaaagaagcgggcttgactgcctacaaccacaatctcgatacgtcaagagaacactacccgaaaataatatcgacaagaacttatgacgaaaggcttcagacgattgagaacgtccgcgaggcaggtattcatgtctgcagtggcggcattctcggccttggagaaagcgcagagactgaccatgttggcctgattcacactcttgcgactctaccggagcatccagaatccttcccggtcaacaagctggtcccgatcaagggcacaccgatgtttggagaagagcccgccaaactcgaagatgttgtccggtgtattgcgactgcacgactcgtaatgcctggaacaattattcgattggcagccgggcgcgtgacaatgcccgagagtgagcagatgctttgcttcatggctggggccaatgcgatatttactggcgagaaaatgctcacgacggattgcaacagttgggatgaagacaaagcaatggttcgagcgctggggtctatcctctttggaaacttcggcgagcaagattga

SEQ ID NO: 1860 - protein, 249 aa, Muscodor strobelii
  misc_feature: SGI Peptide ID NO. 560233
  misc_feature (149)..(241): Pfam Id: PF06968 Pfam Desc: Biotin and Thiamin Synthesis associated domain
  misc_feature (4)..(135): Pfam Id: PF04055 Pfam Desc: Radical SAM superfamily
  misc_feature (1)..(238): NCBI GI: 189188286 Blast Desc: biotin synthase, mitochondrial precursor [Pyrenophora tritici-repentis Pt-1C-BFP] gi|187972088|gb|EDU39587.1| biotin synthase, mitochondrial precursor [Pyrenophora tritici-repentis
  misc_feature (1)..(238): NCBI GI: 169623765 Blast Desc: SNOG_15127 [Phaeosphaeria nodorum SN15] gi|111056232|gb|EAT77352.1| SNOG_15127 [Phaeosphaeria nodorum SN15]
  misc_feature (1)..(245): NCBI GI: 212526008 Blast Desc: biotin synthase, [Penicillium marneffei ATCC 18224] gi|210072559|gb|EEA26646.1| biotin synthase, [Penicillium marneffei ATCC 18224]
  misc_feature (1)..(248): NCBI GI: 242779782 Blast Desc: biotin synthase, [Talaromyces stipitatus ATCC 10500] gi|218719605|gb|EED19024.1| biotin synthase, [Talaromyces stipitatus ATCC 10500]
  misc_feature (1)..(245): NCBI GI: 119467532 Blast Desc: biotin synthase, [Neosartorya fischeri NRRL 181] gi|119405724|gb|EAW15675.1| biotin synthase, [Neosartorya fischeri NRRL 181]
  misc_feature (1)..(245): NCBI GI: 70984394 Blast Desc: biotin synthase [Aspergillus fumigatus Af293] gi|66845337|gb|EAL85672.1| biotin synthase, [Aspergillus fumigatus Af293] gi|159122496|gb|EDP47617.1| biotin synthase,
  misc_feature (1)..(245): NCBI GI: 121703840 Blast Desc: biotin synthase, [Aspergillus clavatus NRRL 1] gi|119398328|gb|EAW08758.1| biotin synthase, [Aspergillus clavatus NRRL 1]
  misc_feature (4)..(248): NCBI GI: 116204433 Blast Desc: CHGG_10100 [Chaetomium globosum CBS 148.51] gi|88176228|gb|EAQ83696.1| CHGG_10100 [Chaetomium globosum CBS 148.51]
  misc_feature (1)..(245): NCBI GI: 119193883 Blast Desc: biotin synthase [Coccidioides immitis RS]
  misc_feature (1)..(245): NCBI GI: 240105532 Blast Desc: biotin synthase, mitochondrial precursor, [Coccidioides posadasii C735 delta SOWgp]
  misc_feature (1)..(238): SWISSPROT Homolog: EC 2.8.1.6 Biotin synthase
  misc_feature: Useful for introducing or modulating the production of volatile compounds
MSAVEEVLKAARIAKANGSNRFCMGAAWRDLKGRKRGLKNITEMIKGVRALGMEACVTLGMVDKEQAKELKEAGLTAYNHNLDTSREHYPKIISTRTYDERLQTIENVREAGIHVCSGGILGLGESAETDHVGLIHTLATLPEHPESFPVNKLVPIKGTPMFGEEPAKLEDVVRCIATARLVMPGTIIRLAAGRVTMPESEQMLCFMAGANAIFTGEKMLTTDCNSWDEDKAMVRALGSILFGNFGEQD

SEQ ID NO: 1861 - DNA, 1896 bp, Muscodor strobelii
  misc_feature: SGI EST ID NO. CUFF.4833.0
  misc_feature: Variant of the nucleotide sequence at SEQ ID NO 1859
gcagtatcgcatccatgcaatctacaattgccccgccttagtgcccggcctaatggccatcttctatggctcttcatgatggccagtcaacttcgttttgttattgattgcgatggcgcaaatgcagcaaggtaatacattgatagtgtagccagtggatgcccctctcttggctcagctccttaccccaatcccaccctcccacaagccacatcgtcagagctgcttaggagaagcttcatggcttcattcccctcagtaatccgcgcttgcgatgatgaagaccattgtcgggcttagtcgcagcctgggagctgtgattcgtcatgccaggaacagtcctactcttgcgctgggcataaaatcagcgagcactttgaggcaggcagagtccccaacatccactgagccttactcgattcttagcgaagtgataagggcggatcgaccgcgatccaattggactagagatgagatatcaatcatccatcgccagcctctgatggaacttacgtttgcagcaggggcccttcatcgacgatttcactatccatcctccgttcagttgtgtacgctcatgaatatcaaggttggaggatgtacggaagactgctcatactgcgcacaatcctcaagatacagcacgggtcttcaggcgacaaaaatgtcggcagtcgaagaggtactaaaagcagcacgtatcgctaaagcaaatggatcgaatcgattctgtatgggtgccgcatggcgcgacctgaaagggaggaagagaggcttgaagaacatcactgagatgatcaagggagtccgggctctgggtatggaagcatgcgttacccttgggatggtcgacaaggagcaggcgaaggagctgaaagaagcgggcttgactgcctacaaccacaatctcgatacgtcaagagaacactacccgaaaataatatcgacaagaacttatgacgaaaggcttcagacgattgagaacgtccgcgaggcaggtattcatgtctgcagtggcggcattctcggccttggagaaagcgcagagactgaccatgttggcctgattcacactcttgcgactctaccggagcatccagaatccttcccggtcaacaagctggtcccgatcaagggcacaccgatgtttggagaagagcccgccaaactcgaagatgttgtccggtgtattgcgactgcacgactcgtaatgcctggaacaattattcgattggcagccgggcgcgtgacaatgcccgagagtgagcagatgctttgcttcatggctggggccaatgcgatatttactggcgagaaaatgctcacgacggattgcaacagttgggatgaagacaaagcaatggtacgtgcggaaagatcccacgcgagttatttcttaattgtgttcttaagacattttactaacttctttatagtaagtgacctaacctgtcaactattagaaactagccctttgtcttaaaaacggcggcctcgcaaataatcataaaaaataactaacccaatacctttctggctaccaggttcgagcgctggggtctatcctctttggaaacttcggcgagcaagattgatgtattgtagatgtggaaggccgagtatgataaggacacgaacaatataagctaagttgcttatccctaattagaatacgtagatattgtcaagtgaaggacctggatgcgttgatgacgtctttcgtagatccagtcgcagatccggagaatgtgttgcctaagcgactgatgttgattttagtctcgtaaatgtaacacaacctatcctagtagtatatggcccaagtcagcccttatcggaattatcatcatcattccggccgttgccatctagaccaacaattctctcttcgtccga

SEQ ID NO: 1862 - DNA, 1203 bp, Muscodor strobelii
  misc_feature: SGI cDNA ID NO. 560234
  misc_feature: Reduced expression when VOC is produced
  misc_feature: Encodes the peptide sequence at SEQ ID NO 1863
atggctgcacccctgacaccagaccagataagtgttgtgaagtccacagcaccagtcctaaaagaacatggcgtaaccatcacgacacttttctacaagaatctgatagatgccaatcctgaacttcacaatatattcaaccaagctaatcaagttggcggagcccaacctcgtgcgctcgcgggagccgtatttgcctatgcctcgtacattgatgatcttggcaagctcggcgctctcgttgaaaggattgcacaaaagcatgtcagtctgaacgtcgcgcccgagcactaccccattgtcggcaaatacttgattgaggcagtggcagcagtactcggcgatgcctgcaccccggagattgctagtgcttggactgcagcatacgcagtcctagcagacatcttcatcaacagggaaaagcagatttacacttctcatgagaattgggccggttggaggcgcttcaaaatagcgaaaaagataccagaatcaagtgacattaccagtttctatctggcgcctgaagacggagttgctttacctctttacttgccggggcaatacatcagcgtacagctatttatccctaagcttggagtcaaacagccacgacaatattcactcagcgacgagccaaggagcgactactaccggatcagtgtcaagaaggagacggcgaagttggccagtgcgccaagcttggtctctactatgctgcacgaagaattgaaggagggtgatgtagtcgagttgacacatcccgcgggcgacttcttcgttgaaatagatgcaaagacgcccattgctctcatctcagccggtgttggaataacgcccatggtcgccatcttaaacagcgctttgtcaagggattcgcaacgaccaatctctgtagtacatggtgcccatgctgcagaagagcgagccttcgccaagcttctcaaagaggcgggtggtaggcccaacattcaaacgaaaacgtttttgaccacggttaaggaaggtgacgactatgacttccgcgggcgtgtagatctcgacaaagttgagcctgcgtatttattcttaggagacaccaacgcgcattactatatctgtggccctccgggcttcatggattacatcaaacaacggctcattagtcatggcgtggggactgacagcgtccaccttgaagtgttcggagtaggtgacgaatga

SEQ ID NO: 1863 - protein, 400 aa, Muscodor strobelii
  misc_feature: SGI Peptide ID NO. 560234
  misc_feature (155)..(261): Pfam Id: PF00970 Pfam Desc: Oxidoreductase FAD-binding domain
  misc_feature (9)..(106): Pfam Id: PF00042 Pfam Desc: Globin
  misc_feature (270)..(378): Pfam Id: PF00175 Pfam Desc: Oxidoreductase NAD-binding domain
  misc_feature (5)..(398): NCBI GI: 145249066 Blast Desc: An14g02460 [Aspergillus niger] gi|134081547|emb|CAK41983.1| protein product [Aspergillus niger]
  misc_feature (2)..(398): NCBI GI: 145254478 Blast Desc: An18g01780 [Aspergillus niger] gi|134084218|emb|CAK47250.1| protein product [Aspergillus niger]
  misc_feature (2)..(398): NCBI GI: 121700523 Blast Desc: flavohemoprotein, [Aspergillus clavatus NRRL 1] gi|119396669|gb|EAW07100.1| flavohemoprotein, [Aspergillus clavatus NRRL 1]
  misc_feature (4)..(398): NCBI GI: 119487359 Blast Desc: flavohemoprotein [Neosartorya fischeri NRRL 181] gi|119410629|gb|EAW20575.1| flavohemoprotein [Neosartorya fischeri NRRL 181]
  misc_feature (4)..(398): NCBI GI: 50788082 Blast Desc: flavohaemoglobin [Aspergillus fumigatus] gi|159122242|gb|EDP47364.1| flavohemoprotein [Aspergillus fumigatus A1163]
  misc_feature (3)..(399): NCBI GI: 171678421 Blast Desc: protein product [Podospora anserina] gi|170937280|emb|CAP61937.1| protein product [Podospora anserina]
  misc_feature (4)..(398): NCBI GI: 70981999 Blast Desc: flavohemoprotein [Aspergillus fumigatus Af293] gi|66844151|gb|EAL84490.1| flavohemoprotein [Aspergillus fumigatus Af293]
  misc_feature (4)..(398): NCBI GI: 121714557 Blast Desc: flavohemoprotein [Aspergillus clavatus NRRL 1] gi|119403043|gb|EAW13463.1| flavohemoprotein [Aspergillus clavatus NRRL 1]
  misc_feature (4)..(398): NCBI GI: 169782824 Blast Desc: [Aspergillus oryzae RIB40] gi|83774618|dbj|BAE64741.1| protein product [Aspergillus oryzae]
  misc_feature (4)..(398): NCBI GI: 238492475 Blast Desc: flavohemoprotein [Aspergillus flavus NRRL3357] gi|220695968|gb|EED52310.1| flavohemoprotein [Aspergillus flavus NRRL3357]
  misc_feature (5)..(396): SWISSPROT Homolog: EC 1.14.12.17 Nitric oxide dioxygenase
  misc_feature: Useful for introducing or modulating the production of volatile compounds
MAAPLTPDQISVVKSTAPVLKEHGVTITTLFYKNLIDANPELHNIFNQANQVGGAQPRALAGAVFAYASYIDDLGKLGALVERIAQKHVSLNVAPEHYPIVGKYLIEAVAAVLGDACTPEIASAWTAAYAVLADIFINREKQIYTSHENWAGWRRFKIAKKIPESSDITSFYLAPEDGVALPLYLPGQYISVQLFIPKLGVKQPRQYSLSDEPRSDYYRISVKKETAKLASAPSLVSTMLHEELKEGDVVELTHPAGDFFVEIDAKTPIALISAGVGITPMVAILNSALSRDSQRPISVVHGAHAAEERAFAKLLKEAGGRPNIQTKTFLTTVKEGDDYDFRGRVDLDKVEPAYLFLGDTNAHYYICGPPGFMDYIKQRLISHGVGTDSVHLEVFGVGDE

SEQ ID NO: 1864 - DNA, 1679 bp, Muscodor strobelii
  misc_feature: SGI EST ID NO. CUFF.5126.1
  misc_feature: Variant of the nucleotide sequence at SEQ ID NO 1862
cacggaatatggttctgacatcaatgatgcgggcgcgatatttgcaacgacccatatcatccttataagtgtaagtagtgtcttcgtcaacgttgtgctgcttgtaaactcataccacgcctcaatctacattcacatcaatattatcatggctgcacccctgacaccagaccagataagtgttgtgaagtccacagcaccagtcctaaaagaacatggcgtaaccatcacgacacttttctacaagaatctgatagatgccaatcctgaacttcacaatatattcaaccaagctaatcaagttggcggagcccaacctcgtgcgctcgcgggagccgtatttgcctatgcctcgtacattgatgatcttggcaagctcggcgctctcgttgaaaggattgcacaaaagcatgtcagtctgaacgtcgcgcccgagcactaccccattgtcggcaaatacttgattgaggcagtggcagcagtactcggcgatgcctgcaccccggagattgctagtgcttggactgcagcatacgcagtcctagcagacatcttcatcaacagggaaaagcagatttacacttctcatgagaattgggccggttggaggcgcttcaaaatagcgaaaaagataccagaatcaagtgacattaccagtttctatctggcgcctgaagacggagttgctttacctctttacttgccggggcaatacatcagcgtacagctatttatccctaagcttggagtcaaacagccacgacaatattcactcagcgacgagccaaggagcgactactaccggatcagtgtcaagaaggagacggcgaagttggccagtgcgccaagcttggtctctactatgctgcacgaagaattgaaggagggtgatgtagtcgagttgacacatcccgcgggcgacttcttcgttgaaatagatgcaaagacgcccattgctctcatctcagccggtgttggaataacgcccatggtcgccatcttaaacagcgctttgtcaagggattcgcaacgaccaatctctgtagtacatggtgcccatgctgcagaagagcgagccttcgccaagcttctcaaagaggcgggtggtaggcccaacattcaaacgaaaacgtttttgaccacggttaaggaaggtgacgactatgacttccgcgggcgtgtagatctcgacaaagttgagcctgcgtatttattcttaggagacaccaacgcgcattactatatctgtggccctccgggcttcatggattacatcaaacaacggctcattagtcatggcgtggggactgacagcgtccaccttgaagtgttcggagtaggtgacgaatgatgggcaatacgtcgcagcggggcgggttgagttcacaggttggtggcagtgtgtgacacgctataaaaagagcatattcgttgaaatatggtatgttggctcgaacgacgagataattaacgcaaggtacgagagagaggctcgacgacagctcgactttcaaatcattgtctagatatgataagaagcactgtgtccgaatgtacaaagtataatagattcatattaataccacgaaagattcctattctgcgacgcagatctttcgcattttagccaactggctactgcgtcatatagccagaaccaacagaaagatgacgctggc

SEQ ID NO: 1865 - DNA, 7443 bp, Muscodor strobelii
  misc_feature: SGI cDNA ID NO. 560235
  misc_feature: Encodes the peptide sequence at SEQ ID NO 1866
atggctcaatcagagccgatcgccattattggcagcagttgtcgctttgctggccaagcgaattctccagccaagctatggcacctcctgtgcaatgcgcccgacctttcccgcgaggtaccctctggaagattcaacgccaaagcattttatcacccggatcccgagtatcatggcacgacagattcaatcaagggctattggctcgagcagaaccctggcgtcttcgacgccaatttcttcaacatcaaccccagagaagctgaagcaatggatcctcagcagcgcatcttgctggaggttgtgttcgaggccttggactcagctggcatctctattgcgcagtatagtggaaagccagtaggagtgttttcgggatgcatgacacaggactacgaaactttgtcgcaacgagatgaattaacagcatccaagtactttccaacaggtaattcgagagccatcatgtcgaaccgcatctcgtatttctacaacttccagggcccatccatgaccatcgacactgcatgtagttccagtcttgtggctctgaaccaggcagttctcagtcttcgatctggctcgtccgagctcgcctgcgtaaccggcgcaaatttgttgctgacacccgatatattcattgttgaatcgtcccttcatatgctgagccctacaggaaagtgtcatatgtgggacgatcgcgcagacggctatgctcgaggcgaaggctttgcgtgcgtgctactaaaatcattgtcaagagccttagcagacggagacgagattgaaggcgtcatccgtgaagtcggtatcaatgcagatggcaagacaagcggtattactatgcccaactcagcagcgcagaccaacttgatacgacagacgtaccagaacgcaggacttgatccaacagaccttgcgggtcgatgtcagtactttgaagcacatggcaccggaactgcggctggggacccccgagaagcagctgcaatccatgcagccttcttcgagaagccaccttcagacgagagctctaaggaaagcagggatcttccagcaccggcagagaaactatgggttggctctgtcaaaaccgtgatcggacacacagagtcttcggcaggtcttgctggcatcctgaaagtcatcgcttgcatgaaacatcgtaagataacgcctaatcttcatttcaagacgctcaatccgcaagtagagccctactacagaaactttcagatccccacggcaattgtcccttggccggaccctcctccgggacagccacggcgggcgagtgtcaactcgttcgggttcggaggcgccaatgctcatgctattgtcgagctctacgatgcggaaattcaccctgcaatcatccgaagcatccacccgtctttgacaatccaacccaaggcacctgtttcacctcgacggccgtcagaccattcgacacgagacagttcgacacaagaagacgtgcagtctatagcacctttctacttgcctcttgtgatctctgcagcttctctcaaggcgctgccagatgttgctcgctcgtatctgggctatttaaacgaaaactccattgatattcaccgattatcttggcatttatattctcgacgggctgctctaccctatcgagtgataatgtctgcagcatcgcagcaagaagctctgcaaaccttgaagtctttgttgtcatcgaaggaggctactctccctggcgcacacatcatacgggacggtgctgctactaagacgatacggatattgggagttttcaccggacaaggtgcacagtggccaactatgtcgctatcacttctccagcaaaacaatgtatatcgccagaccatacgcaatctcgatgccatcctcaaggattgtctgcttccgccgtcttggaccctggaagagcagatcaaggctgctaaagacgtctcgcgtgtcaatgaggcggcaatctcgcagccactctgtactgcaatccagattgcgcttgtggatttgatgcgaagcatcggcattgatttccacaccgtcgttggacattcatccggcgagatagccgctgcgtatacggctgccagaatctccgcacgagatgcgattctgattgcttattatcgaggcatggtcgcacacactgccgctggcgccgatcagcaaaaagggggcatgatggctgtgggcttgccggaaagcgaagcaattgctctgctgaatgatccattgttctcaggtcgcgttgctgtggctgcgaacaacagctccaacagcataacactctccggggatctggacctaatcgaccagatgcacaaattcttgaagaagcaacatgttttccatcgaaagttagtggtcgaggcagcctatcacagctatcacatgactaaaccggcagttgcgtacactaaagccctgcgggaatctggtgtttctctgagcagcgaaggcaacgaggttgtctgggtgtcgagcgtcgatggacgcccccgaatcaatcaaacagatcttgatacccaatattgggttgataacatggtatcgacagtacgattccgtgaagcagtagagtatgccctcacaacgactgatgggtttgactgcgtgatcgaaatcggcccgcatcccgcgcttcaaggtcccttcgcccagactatggcggaggtaggcacccaaaatatctgctatctctgccctctggaccgaagcaaagacagcagtttttccttcgcgaactttctcggtaatatttggtctacctttggatcctcaaaaatcgacttgaacacctatataaatcaatttcgagcacgaaatatagaccgatctagattgatacaactaccgtcctatcccttcgatcattcgaccacttactggagagagtcacgtatgtctcgccaatatcacttcaaagccgcggcacctcatgagctacttggtgttcggggccgcgaagacaatcgccacgagctcaagtggcgtaatgtcttaaagcgtgagaaactgccttggctagagcaccactgtttccaaggccaagccctgctacctgcttctagctattgcgtgatggcccttgatgcagccaggtcgatcctcgaaggacggcaagcgtccataattgagcttcgagacatccagatactgagcggtgtcaacatcgagaaagagagtgccggagttgaaacactgttttccttgtcaatcgaaccgggcgccaaaacgaggaaagagagcaaagtaatcaatgcaactttcagtttctactcctgcccagtcgatagcgagccaattatggagaagcatttgactgggtcattacaagtcgttctcggagacccgtcgatagacgcattgcctgctaggcgacctcaactcccggaaaccatgtccgcagacccggatgaattctaccaaatgatggaagggacaggcctcacgtacgctggtcctttcaaaactatcagctctattcgacggagataccgatactgctcagcaactctcagtcgcatccaccctcaggaaagcacgagccttgacgtaagccctgcaagtctcgatggctgttttcagtcggctttcctggcttacgcgtcaccaggagacagatctctgtggactgcttttctccccacgaccatcgaccgtatccggttcaatcttgccgctctgaacaagagtatcgagaggccgaaggatgatgttctggccgttgatacagaaattgtccggcgcataagcccggaccgggtcaatacttctatcgtcgccgtcgacatctcagtgttcaatgagaacgatgaagcggaggtacaggtggagggactcgcggttcgtgcattagccaataaccagccgaaagatgacgcagagttctatctccacactattatggatattgatccaaacgatgaaatcattcaagttagtgatacggcgttggaaggggaagacgttctactcgctgagaactgctcccgtatcatatctttccagattgaggaacaacatggggaagcaagcgaggcaaaagccaacattgataagatgatcttcaactcaaaacatccagcctatcttgaacatgttcgaagagcagcacaagacgatgtcaatcgtcttacggagaaaatgccgacgatagtcgaagaagcacaccgtgtttccaatttcctaaatcacattggccgggtcgtgaaacagattgcacaccgttatccctggatgaatatcttgtacctcgcaaactcggagcttcagcttttgaagccagtactggccgctatcgattccgctttccaatcattcagtgtcggtatcatccgaagtacctctccggatgagatcgagataaccactagccccaacattgatagcatcgagatgcatacgtttcaaccaaacgaaaggatgcaggactgccttgaccctaaccgtccacaagatctcgttctactctcagctgagatattgcagcagaaagactcaggtgctctattccatgaagttcgtgagctcatgagacccggggcgttcctcgtgcttgtcaacctttacggtacgctgtgtgctcgaagttacccggaccgtaaaacagagccgccaacaccaccacaatgggtcgacatcttggatgattgcggatttatacaacaggcacgcaattctgaccagtttcataaggccggctatctgatcgtacggcagctccgcgagatgtcgccgaaccaggcatctcctctcaaagacgagccacttgttgaaaatctgctgctggttcatgcctaccaagaaggtgtcgacagtgacggcattgccacattagagaatctgcttactccatcgtgcagaaatgtattgtctcgggcgttggatgaagccagtaaaaatgagctagagacctgcacagcagcaatcgttctcgctgatcttgcggaatcaatcatgatgaacatgacggagcatcgtattcaacaacttcgcagccttcttcgaccgaatgtcacagtactatggctaacatgcaatgcgcggattgacaacccgggcaacgcggcaagccttgggttcctgcgtacaatccaagcagaggtacccggcctcaagctccaaacattggatttggagtcgaatgatctaaagtttttaagtgatctcgtctctgaaacatttttgcgtcttgtttctacaactctccacatgcttcagaactccctgaccagtttagagccagaagtgtacatggaggagggacgccggctcgtcccacgtgtcgttccgctgaagcagttcaacgacagaggaaatgcctggcgacgagtggtaacgaggcctcttaatacgctgagagaatgtgtagaaatcgttccccgtgtagtctcgagctgtgaagttcgattcgccgcccgggagactcgacagcctctcctaaacacaccgaagcgcagcgtcttgatccaggtagattatagctcggctttaccgtttaagctgaacgagcaagtctccgcatatgtgtgcgtcggacgagagctaacgactggcgtgctgctggcagctctgtctagtatcaatgcatcctgcattatttgcccctccgcacatactttcgcgttacgaggggaggcaatcttagaattcgcgacactgcatcgtctaattcgattcatcgcggctgtatcggccgcttggttcagcccttatcaacatcagatcatattgatcgagccagatgtggaatttgcgaagtgcttggtcgatgtgacggcacctagaggatctttaagtcccagagtggcaatcctcgaaacgcaaaaatacccagaaggttcctcgccttacgttgatatcaaggcggcacagatgcgccattccaagtcgtcgtacttgcatcctcggactacgaccagggaattgaaaggcttattctttagagatgcatcggttttcaatttcttgacagacgagcctgatctttctcgtaggatcttagcatcggtgcacgacggggacgattattactccggaatcgacatgttcagcacgaaccacctcatgaacgacgctgattttgccaccgtcaagcccctatggaagttcgctgtgatgttgacggagcaaagcgcaccagagcggtctcatgtcgttcgaaaagataacgtcatatctgtaaatcagttggtgtctcagtcgaatcgtttcaacgctttccagatcgtcgactggagacaggaccgagatacagtacaagacgtcaagcctctcgtgagcccttctttactcagtcccgacaaaacttacattttcttcggcatgacacgggactttgggcagagtctttgccgactgttcctggagcatggggcgaagaacatcgtgcttgccagccgcaatcctgacacatcgccgaactggattgaaatcgaaatgcgtgcctatgatgctgacatcagaattgaacgagcggatgtgacaaaaccaaacagccttacagggcttaaagccaggctcgctgaaactatgccgacggtcggaggtattatcaatggcgccatggtgttggatgatcgtatttttgctcagatgaccagtgaaacgtggaatcgcgtcctacagcccaagacgatcgggtcgatgaatctggatcacattttctcagaaccggatctagaattcttcatcatgacttcatcatttgcagcgataggggggcatcccggacaagccaactacgccgcggcaaatatgtatatgaatggcctagccgtgagccgtcgtctccgtggcctcgcagcatccgtacttaacattggcgtcatttacggcattggcttcctccagcgcgagaaatctcacctctacgccgggctagagcgggaaggttacccaccagtgtcagaacatgacgtccatcacatgttcctcgaggcaattgtggccgggaagcctaatgtcccgggtcaacccgttgatattacgacgggcttggctcggttccggcgaggtgaagcgcaccccctacattggcaccgggatccacgattcgggcatttcgcgctccgcaaagactcgggcgtagacgcagccgcttcagccaacgaagccgcgcgaaaatctcttctcgatcaggtcgcggaactgactgagatcaaggatattgcagtgacaatcggtgtcgcgcttgtcggtcgactgcgggtattacttgggctagccgaggacgcaatcgacagagattcaagcctgttgacgattggcatggactcgctggcggcagttgaagtccgtaactggctctttgaaacactgggtattcaaattgccgtcatgaagatcttgaatgtcccaagcatcaatcatcgtgagttgatacctaatgatgctgctaattgtgttgttgttaccctgctgacgctcgagaaatag

SEQ ID NO: 1866 - protein, 2480 aa, Muscodor strobelii
  misc_feature: SGI Peptide ID NO. 560235
  misc_feature (594)..(932): Pfam Id: PF00698 Pfam Desc: Acyl transferase domain
  misc_feature (2104)..(2269): Pfam Id: PF00106 Pfam Desc: short chain dehydrogenase
  misc_feature (5)..(255): Pfam Id: PF00109 Pfam Desc: Beta-ketoacyl synthase, N-terminal domain
  misc_feature (263)..(398): Pfam Id: PF02801 Pfam Desc: Beta-ketoacyl synthase, C-terminal domain
  misc_feature (2105)..(2282): Pfam Id: PF08659 Pfam Desc: KR domain
  misc_feature (658)..(884): Pfam Id: PF00698 Pfam Desc: Acyl transferase domain
  misc_feature (594)..(629): Pfam Id: PF00698 Pfam Desc: Acyl transferase domain
  misc_feature (2115)..(2282): Pfam Id: PF08659 Pfam Desc: KR domain
  misc_feature (4)..(2457): NCBI GI: 85110103 Blast Desc: NCU08399 [Neurospora crassa OR74A] gi|28924909|gb|EAA34002.1| conserved [Neurospora crassa OR74A]
  misc_feature (4)..(1796): NCBI GI: 116204417 Blast Desc: CHGG_10092 [Chaetomium globosum CBS 148.51] gi|88176220|gb|EAQ83688.1| CHGG_10092 [Chaetomium globosum CBS 148.51]
  misc_feature (4)..(1932): NCBI GI: 171678423 Blast Desc: protein product [Podospora anserina] gi|170937281|emb|CAP61938.1| protein product [Podospora anserina]
  misc_feature (4)..(2453): NCBI GI: 255941844 Blast Desc: Pc16g13930 [Penicillium chrysogenum Wisconsin 54-1255] gi|211586314|emb|CAP94063.1| Pc16g13930 [Penicillium chrysogenum Wisconsin 54-1255]
  misc_feature (5)..(2459): NCBI GI: 146324637 Blast Desc: hybrid PKS-NRPS enzyme [Aspergillus fumigatus Af293] gi|129555493|gb|EAL85113.2| hybrid PKS-NRPS enzyme, [Aspergillus fumigatus Af293]
  misc_feature (3)..(2457): NCBI GI: 121704363 Blast Desc: hybrid NRPS/PKS enzyme, [Aspergillus clavatus NRRL 1] gi|119398590|gb|EAW09019.1| hybrid NRPS/PKS enzyme, [Aspergillus clavatus NRRL 1]
  misc_feature (5)..(2453): NCBI GI: 121719578 Blast Desc: hybrid NRPS/PKS enzyme, [Aspergillus clavatus NRRL 1] gi|119404686|gb|EAW15062.1| hybrid NRPS/PKS enzyme, [Aspergillus clavatus NRRL 1]
  misc_feature (5)..(2459): NCBI GI: 159124036 Blast Desc: hybrid NRPS/PKS enzyme, [Aspergillus fumigatus A1163]
  misc_feature (5)..(2459): NCBI GI: 154818234 Blast Desc: pseurotin A precursor [Aspergillus fumigatus Af293]
  misc_feature (675)..(2458): NCBI GI: 145611690 Blast Desc: MGG_11638 [Magnaporthe grisea 70-15] gi|145018942|gb|EDK03221.1| MGG_11638 [Magnaporthe grisea 70-15]
  misc_feature (1)..(2468): SWISSPROT Homolog: EC 2.3.1.161 Lovastatin nonaketide synthase
  misc_feature: Useful for fungicidal and/or biocontrol applications
MAQSEPIAIIGSSCRFAGQANSPAKLWHLLCNAPDLSREVPSGRFNAKAFYHPDPEYHGTTDSIKGYWLEQNPGVFDANFFNINPREAEAMDPQQRILLEVVFEALDSAGISIAQYSGKPVGVFSGCMTQDYETLSQRDELTASKYFPTGNSRAIMSNRISYFYNFQGPSMTIDTACSSSLVALNQAVLSLRSGSSELACVTGANLLLTPDIFIVESSLHMLSPTGKCHMWDDRADGYARGEGFACVLLKSLSRALADGDEIEGVIREVGINADGKTSGITMPNSAAQTNLIRQTYQNAGLDPTDLAGRCQYFEAHGTGTAAGDPREAAAIHAAFFEKPPSDESSKESRDLPAPAEKLWVGSVKTVIGHTESSAGLAGILKVIACMKHRKITPNLHFKTLNPQVEPYYRNFQIPTAIVPWPDPPPGQPRRASVNSFGFGGANAHAIVELYDAEIHPAIIRSIHPSLTIQPKAPVSPRRPSDHSTRDSSTQEDVQSIAPFYLPLVISAASLKALPDVARSYLGYLNENSIDIHRLSWHLYSRRAALPYRVIMSAASQQEALQTLKSLLSSKEATLPGAHIIRDGAATKTIRILGVFTGQGAQWPTMSLSLLQQNNVYRQTIRNLDAILKDCLLPPSWTLEEQIKAAKDVSRVNEAAISQPLCTAIQIALVDLMRSIGIDFHTVVGHSSGEIAAAYTAARISARDAILIAYYRGMVAHTAAGADQQKGGMMAVGLPESEAIALLNDPLFSGRVAVAANNSSNSITLSGDLDLIDQMHKFLKKQHVFHRKLVVEAAYHSYHMTKPAVAYTKALRESGVSLSSEGNEVVWVSSVDGRPRINQTDLDTQYWVDNMVSTVRFREAVEYALTTTDGFDCVIEIGPHPALQGPFAQTMAEVGTQNICYLCPLDRSKDSSFSFANFLGNIWSTFGSSKIDLNTYINQFRARNIDRSRLIQLPSYPFDHSTTYWRESRMSRQYHFKAAAPHELLGVRGREDNRHELKWRNVLKREKLPWLEHHCFQGQALLPASSYCVMALDAARSILEGRQASIIELRDIQILSGVNIEKESAGVETLFSLSIEPGAKTRKESKVINATFSFYSCPVDSEPIMEKHLTGSLQVVLGDPSIDALPARRPQLPETMSADPDEFYQMMEGTGLTYAGPFKTISSIRRRYRYCSATLSRIHPQESTSLDVSPASLDGCFQSAFLAYASPGDRSLWTAFLPTTIDRIRFNLAALNKSIERPKDDVLAVDTEIVRRISPDRVNTSIVAVDISVFNENDEAEVQVEGLAVRALANNQPKDDAEFYLHTIMDIDPNDEIIQVSDTALEGEDVLLAENCSRIISFQIEEQHGEASEAKANIDKMIFNSKHPAYLEHVRRAAQDDVNRLTEKMPTIVEEAHRVSNFLNHIGRVVKQIAHRYPWMNILYLANSELQLLKPVLAAIDSAFQSFSVGIIRSTSPDEIEITTSPNIDSIEMHTFQPNERMQDCLDPNRPQDLVLLSAEILQQKDSGALFHEVRELMRPGAFLVLVNLYGTLCARSYPDRKTEPPTPPQWVDILDDCGFIQQARNSDQFHKAGYLIVRQLREMSPNQASPLKDEPLVENLLLVHAYQEGVDSDGIATLENLLTPSCRNVLSRALDEASKNELETCTAAIVLADLAESIMMNMTEHRIQQLRSLLRPNVTVLWLTCNARIDNPGNAASLGFLRTIQAEVPGLKLQTLDLESNDLKFLSDLVSETFLRLVSTTLHMLQNSLTSLEPEVYMEEGRRLVPRVVPLKQFNDRGNAWRRVVTRPLNTLRECVEIVPRVVSSCEVRFAARETRQPLLNTPKRSVLIQVDYSSALPFKLNEQVSAYVCVGRELTTGVLLAALSSINASCIICPSAHTFALRGEAILEFATLHRLIRFIAAVSAAWFSPYQHQIILIEPDVEFAKCLVDVTAPRGSLSPRVAILETQKYPEGSSPYVDIKAAQMRHSKSSYLHPRTTTRELKGLFFRDASVFNFLTDEPDLSRRILASVHDGDDYYSGIDMFSTNHLMNDADFATVKPLWKFAVMLTEQSAPERSHVVRKDNVISVNQLVSQSNRFNAFQIVDWRQDRDTVQDVKPLVSPSLLSPDKTYIFFGMTRDFGQSLCRLFLEHGAKNIVLASRNPDTSPNWIEIEMRAYDADIRIERADVTKPNSLTGLKARLAETMPTVGGIINGAMVLDDRIFAQMTSETWNRVLQPKTIGSMNLDHIFSEPDLEFFIMTSSFAAIGGHPGQANYAAANMYMNGLAVSRRLRGLAASVLNIGVIYGIGFLQREKSHLYAGLEREGYPPVSEHDVHHMFLEAIVAGKPNVPGQPVDITTGLARFRRGEAHPLHWHRDPRFGHFALRKDSGVDAAASANEAARKSLLDQVAELTEIKDIAVTIGVALVGRLRVLLGLAEDAIDRDSSLLTIGMDSLAAVEVRNWLFETLGIQIAVMKILNVPSINHRELIPNDAANCVVVTLLTLEK

SEQ ID NO: 1867 - DNA, 627 bp, Muscodor strobelii
  misc_feature: SGI cDNA ID NO. 560236
  misc_feature: Encodes the peptide sequence at SEQ ID NO 1868
atgaagttctctgtgacattactcgcatgcttcatcgcctcatgctggggagatgacggaacagacaaacccagactccctgcatgctcctcgacagcgtccacgccgtgtcgatgcccaggaggcacacaatatctggaatgcatcaccgtcggggttatcggtgcagcggcctcggacgtagaagaattaatgaacgatttctacaagatagagtggcagctaggtgccgttccgtacaaaactaagggccctgacaacatagtcggagctgtgcgatcggtgaaatacaagattgtgccttctgggatagaggatttgactgagtatctcgtgaaaagcgacggttccttcgaacaacgcttcgagcaagtgcagacttctatcccgtatcctgacaagagtggtgtttttgctggattctgggggaccatctcaggcaaggcggtcactggcgacgcaaccattgtaaccttctcaaactgggcatgcgagacagctcatattcgcaactttgctggatttcacgagatggcgctgaagaatgctagcgctatccttgcagcaaacgggaaagttaaaggagctcatgctggcccggtttcggctcaatcttttacgccataa

SEQ ID NO: 1868 - protein, 208 aa, Muscodor strobelii
  misc_feature: SGI Peptide ID NO. 560236
  misc_feature (1)..(202): NCBI GI: 116204493 Blast Desc: CHGG_10130 [Chaetomium globosum CBS 148.51] gi|88176258|gb|EAQ83726.1| CHGG_10130 [Chaetomium globosum CBS 148.51]
  misc_feature (26)..(207): NCBI GI: 115390619 Blast Desc: conserved [Aspergillus terreus NIH2624] gi|114193738|gb|EAU35438.1| conserved [Aspergillus terreus NIH2624]
  misc_feature (26)..(207): NCBI GI: 115400455 Blast Desc: conserved [Aspergillus terreus NIH2624] gi|114191482|gb|EAU33182.1| conserved [Aspergillus terreus NIH2624]
  misc_feature (24)..(202): NCBI GI: 156049719 Blast Desc: SS1G_08566 [Sclerotinia sclerotiorum 1980] gi|154692965|gb|EDN92703.1| SS1G_08566 [Sclerotinia sclerotiorum 1980]
  misc_feature (26)..(195): NCBI GI: 67902556 Blast Desc: AN8265.2 [Aspergillus nidulans FGSC A4] gi|40739813|gb|EAA59003.1| [Aspergillus nidulans FGSC A4] gi|259481056|tpe|CBF74241.1| TPA: conserved [Aspergillus nidulans
  misc_feature (1)..(202): NCBI GI: 154309107 Blast Desc: BC1G_07448 [Botryotinia fuckeliana B05.10] gi|150852491|gb|EDN27683.1| BC1G_07448 [Botryotinia fuckeliana B05.10]
  misc_feature (20)..(202): NCBI GI: 145241464 Blast Desc: An09g00540 [Aspergillus niger] gi|134077916|emb|CAL00314.1| [Aspergillus niger]
MKFSVTLLACFIASCWGDDGTDKPRLPACSSTASTPCRCPGGTQYLECITVGVIGAAASDVEELMNDFYKIEWQLGAVPYKTKGPDNIVGAVRSVKYKIVPSGIEDLTEYLVKSDGSFEQRFEQVQTSIPYPDKSGVFAGFWGTISGKAVTGDATIVTFSNWACETAHIRNFAGFHEMALKNASAILAANGKVKGAHAGPVSAQSFTP

SEQ ID NO: 1869 - DNA, 1695 bp, Muscodor strobelii
  misc_feature: SGI cDNA ID NO. 560237
  misc_feature: Encodes the peptide sequence at SEQ ID NO 1870
atgtcgagcaaggacgagaaggaggtaggcctcggtgcctataacacctcctcctccgatgatgcccccgttggtgcgattcgctctgagaattgggctacgcgcaatggtatcaacatggagtctttcaagatgcgtgactatggtctcggcatcgttgagatggaccgttccatgaagccccgacacttgcacatgatcgctattggtggttccattggtgctggtttcttcgtcggttcgggtaatgcgctcagagttggtggccccggttttctcctgatcgacttcctcattatcggtattatgatcttcaacgtcgtctacgctcttggtgaactcgctgttatgtatcctgtctccggtggtttctacacgtacgcgaatcgcttcatcgacccctcttggggcttcgctatgggttggaactatgtcgctcaatgggctgtcgtcgtacctcttgagcttacagtctgtgccatttcggtcgcgtactggaatgactcgatcagctctgctgtctggatctctgtgttctgggttactatcatcatcttcaacatctttggaactttgggttatgcagaagaagaattctgggcctctgcgcttaagttgactggcactgtcattttcctcgttattgcctttatcatggttttgggcggaggtcctgaaggtggtttatatgacgaatactggggcgcccgtctgtggtacagccctggtgcctttgcgaatggtctcaagggtttttgctccgtcttcgtcacagcggctttcgctttctccggaaccgaattggttggtctcgctgccgctgagtccgagaacccaagcaaagctctgcccagtgctatcaagcaagtgttctggcgtatcactttgttttacgttcttggtcttctgttcgtcggcctgctcatctcgcacgacgaccctcatttgttgaactccagctccgatgatcctgctgcctctcctttcgttctcgttggccaatatgctcatctctatggatttaatcacttcatgaatgtcatcattttggtctcagtcgtctctattagcatgtccggcgtgtacggtggtagtcgaaccttgactgctttggctcagcaaggttacgctcccaagatcttcacctacgttgaccgcagtggccgtcctctgccgtcagttgtcctcatgcttctcttcggcgcgcttgcctacctcgatcttgcttcgagcggagagacggtcttcgcctggctgcaagctttgtctggtctcgcggctctcttcacctggggctctattctccttgctcacattcgcttccgacacgcgtgggctcaccacggccacaccctcgatgagatcccattcaaggccgttggaggtgtctggggctcctggatctctctgttcctcatcatcatcgttctgattgctcagttctacactgccgtgtcacccatcggcaaaagagttggtaccgctaccgacttctttcagtcttacttggcccttcccgtcgttctcttcttctggcttgtcggctacatctggaagcgcgagggctggttaaaggttagccagattgatgttgacactggtcgccgccagcacaactgggaattgatcaatgcgcagcgtgaggagcttgctaggtcccctgcgtggaagcgtctgtggcacttcttcttctaa

SEQ ID NO: 1870 - protein, 564 aa, Muscodor strobelii
  misc_feature: SGI Peptide ID NO. 560237
  misc_feature (63)..(528): Pfam Id: PF00324 Pfam Desc: Amino acid permease
  misc_feature (3)..(559): NCBI GI: 261360422 Blast Desc: amino-acid permease inda1 [Verticillium albo-atrum VaMs.102]
  misc_feature (6)..(564): NCBI GI: 462414 Blast Desc: INDA1_TRIAT RecName: Full=Amino-acid permease inda1 gi|296570|emb|CAA80308.1| INDA1 [Hypocrea lixii]
  misc_feature (5)..(564): NCBI GI: 189205457 Blast Desc: amino-acid permease inda1 [Pyrenophora tritici-repentis Pt-1C-BFP] gi|187975156|gb|EDU41782.1| amino-acid permease inda1 [Pyrenophora tritici-repentis
  misc_feature (12)..(559): NCBI GI: 39967959 Blast Desc: MGG_02072 [Magnaporthe grisea 70-15] gi|145012949|gb|EDJ97590.1| MGG_02072 [Magnaporthe grisea 70-15]
  misc_feature (28)..(564): NCBI GI: 39975129 Blast Desc: MGG_00289 [Magnaporthe grisea 70-15] gi|145018833|gb|EDK03112.1| MGG_00289 [Magnaporthe grisea 70-15]
  misc_feature (2)..(564): NCBI GI: 164427455 Blast Desc: NCU03509 [Neurospora crassa OR74A] gi|157071750|gb|EAA26575.2| [Neurospora crassa OR74A]
  misc_feature (5)..(564): NCBI GI: 115397765 Blast Desc: amino-acid permease inda1 [Aspergillus terreus NIH2624] gi|114192665|gb|EAU34365.1| amino-acid permease inda1 [Aspergillus terreus NIH2624]
  misc_feature (14)..(558): NCBI GI: 46115140 Blast Desc: FG03412.1 [Gibberella zeae PH-1]
  misc_feature (6)..(561): NCBI GI: 256728896 Blast Desc: NECHADRAFT_104321 [Nectria haematococca mpVI 77-13-4]
  misc_feature (2)..(564): NCBI GI: 18376316 Blast Desc: amino acid permease NAAP1 [Neurospora crassa]
MSSKDEKEVGLGAYNTSSSDDAPVGAIRSENWATRNGINMESFKMRDYGLGIVEMDRSMKPRHLHMIAIGGSIGAGFFVGSGNALRVGGPGFLLIDFLIIGIMIFNVVYALGELAVMYPVSGGFYTYANRFIDPSWGFAMGWNYVAQWAVVVPLELTVCAISVAYWNDSISSAVWISVFWVTIIIFNIFGTLGYAEEEFWASALKLTGTVIFLVIAFIMVLGGGPEGGLYDEYWGARLWYSPGAFANGLKGFCSVFVTAAFAFSGTELVGLAAAESENPSKALPSAIKQVFWRITLFYVLGLLFVGLLISHDDPHLLNSSSDDPAASPFVLVGQYAHLYGFNHFMNVIILVSVVSISMSGVYGGSRTLTALAQQGYAPKIFTYVDRSGRPLPSVVLMLLFGALAYLDLASSGETVFAWLQALSGLAALFTWGSILLAHIRFRHAWAHHGHTLDEIPFKAVGGVWGSWISLFLIIIVLIAQFYTAVSPIGKRVGTATDFFQSYLALPVVLFFWLVGYIWKREGWLKVSQIDVDTGRRQHNWELINAQREELARSPAWKRLWHFFF

SEQ ID NO: 1871 - DNA, 2479 bp, Muscodor strobelii
  misc_feature: SGI EST ID NO. CUFF.4955.0
  misc_feature: Variant of the nucleotide sequence at SEQ ID NO 1869
tgaatgtctgtctgtacctagcatactcctgcgaatgtcactgatccctggttgcagaatggccgagcaagggttgtggataatagtccagggcatgtaactaatcgtgggaggagagacagccgggggtccttgggtcgtcccatcaagtcgtgctagtgtcagtcagctctgtactgtacattgcctacctattgaatgataagccattgtccatagattcctacatgtccatctcgaggaagcccttcgtacataattgtcgcgctgcccttgctcctccaaagcttgtagtccttctatttctctctctattcctcatcattctgttcggcgccgagtctgtctggatcctgcctgttcaaccgtaacaagcagccagcagaccaacacactctactcgggtcttcttttcttcttctcctggattgccttaattagtcttcactggatcgtcgtcgcccaccatgtcgagcaaggacgagaaggaggtaggcctcggtgcctataacacctcctcctccgatgatgcccccgttggtgcgattcgctctgagaattgggctacgcgcaatggtatcaacatggagtctttcaagatgcgtgactatggtctcggcatcgttgagatggaccgttccatgaagccccgacacttgcacatgatcgctattggtggttccattggtgctggtttcttcgtcggttcgggtaatgcgctcagagttggtggccccggttttctcctgatcgacttcctcattatcggtattatgatcttcaacgtcgtctacgctcttggtgaactcgctgttatgtatcctgtctccggtggtttctacacgtacgcgaatcgcttcatcgacccctcttggggcttcgctatgggttggaactatgtcgctcaatgggctgtcgtcgtacctcttgagcttacagtctgtgccatttcggtcgcgtactggaatgactcgatcagctctgctgtctggatctctgtgttctgggttactatcatcatcttcaacatctttggaactttgggttatgcagaagaagaattctgggcctctgcgcttaagttgactggcactgtcattttcctcgttattgcctttatcatggttttgggcggaggtcctgaaggtggtttatatgacgaatactggggcgcccgtctgtggtacagccctggtgcctttgcgaatggtctcaagggtttttgctccgtcttcgtcacagcggctttcgctttctccggaaccgaattggttggtctcgctgccgctgagtccgagaacccaagcaaagctctgcccagtgctatcaagcaagtgttctggcgtatcactttgttttacgttcttggtcttctgttcgtcggcctgctcatctcgcacgacgaccctcatttgttgaactccagctccgatgatcctgctgcctctcctttcgttctcgttggccaatatgctcatctctatggatttaatcacttcatgaatgtcatcattttggtctcagtcgtctctattagcatgtccggcgtgtacggtggtagtcgaaccttgactgctttggctcagcaaggttacgctcccaagatcttcacctacgttgaccgcagtggccgtcctctgccgtcagttgtcctcatgcttctcttcggcgcgcttgcctacctcgatcttgcttcgagcggagagacggtcttcgcctggctgcaagctttgtctggtctcgcggctctcttcacctggggctctattctccttgctcacattcgcttccgacacgcgtgggctcaccacggccacaccctcgatgagatcccattcaaggccgttggaggtgtctggggctcctggatctctctgttcctcatcatcatcgttctgattgctcagttctacactgccgtgtcacccatcggcaaaagagttggtaccgctaccgacttctttcagtcttacttggcccttcccgtcgttctcttcttctggcttgtcggctacatctggaagcgcgagggctggttaaaggttagccagattgatgttgacactggtcgccgccagcacaactgggaattgatcaatgcgcagcgtgaggagcttgctaggtcccctgcgtggaagcgtctgtggcacttcttcttctaaatgcggaagaggagtgtgtttgggagtacggttccaatcgtgcatgtatatagttaacaaagtcacatattcgttgtgtatctcctgggtaattcagggctacacattctgagcggaagacctcgccatcggcgaggcgattgtactcgatttagatttcaatgatacctccttattgagccaatctgtctttctacttgtccattctagactatcctactagatcttttgaccatggaacgttaggaaaggacggtgatgagatgcgcttcaaatgggttcaatcgttgagaatttggactcgaactcagcctagc

SEQ ID NO: 1872 - DNA, 612 bp, Muscodor strobelii
  misc_feature: SGI cDNA ID NO. 560238
  misc_feature: Encodes the peptide sequence at SEQ ID NO 1873
atgcctcagcataacacgtcgtttcgtcagcacactggcgaggcgtcccgcccaaaattctcgttcggaaagcagctaggcgtgccatcaccagattatgacgaacacaaaaataagcatgaaggcaagactggctctgcatcgaactgggttgacgaagcccatctcagcatacgtcaagatctcataacctcgaagaaggaactagctctcatcatttcattactcgaggagatggaaaagggtttcaaaatacagggatcccttaaaaccaggcttgtcaaccagatgatgcttatgaacgcgtgcaaagattattcggcctctcgttgtaacctcctagacgagcgactccgtcagctgggatactggtcgcggagcaaggagatgggctcgcagatgcctgacaaagctcccgatgagtggcgcttggcagatatcgaatggcggagctggctaagcgatcaagccgcacacagtggcatcgcctcatctctcggtactcctacagatccgaccaaagacatcgcctggagagttttggggcccgtcgcgtatatacttgacgccttcttcttcttggaaggttacgacccgaacatccagatctga

SEQ ID NO: 1873 - protein, 203 aa, Muscodor strobelii
  misc_feature: SGI Peptide ID NO. 560238
MPQHNTSFRQHTGEASRPKFSFGKQLGVPSPDYDEHKNKHEGKTGSASNWVDEAHLSIRQDLITSKKELALIISLLEEMEKGFKIQGSLKTRLVNQMMLMNACKDYSASRCNLLDERLRQLGYWSRSKEMGSQMPDKAPDEWRLADIEWRSWLSDQAAHSGIASSLGTPTDPTKDIAWRVLGPVAYILDAFFFLEGYDPNIQI

SEQ ID NO: 1874 - DNA, 1215 bp, Muscodor strobelii
  misc_feature: SGI cDNA ID NO. 560239
  misc_feature: Elevated expression when VOC is produced
  misc_feature: Encodes the peptide sequence at SEQ ID NO 1875
atggataagtctaagcctgtggacgagtccgtcgcaagggcctccggctccgacgatgcgcccgggtccgtgatcagcgctgatgccctgccttcggactctcctctcccaacggcaatagggcaactcactctgcgatcgcagcgcgtgctctgcccatgctgccactacataggcaataccgctgtcccggctagtcggagtcggacactccagatgattgctcactcggcttcgatcatcatatacacaggaggactggtggcgcccctttttttctggtggttgcctatcgtaagagatagtgccactggttatgcagcacggcttctacaggcagagctcttaaatatcagccgcctgacgtctttctacctgccagacttctgctccaactgcggggtccatctagcctactggagtggcgatgcgactcacgtctttgccgagagtaattatctcacgacgacttcagttcagcctgcccagaaaagcgacgatccggtcacgagcagcatttatatacgctctcctctcggagcgccgccactgcgcggctcagggctctacgcgcgcaattggcctgatatatctcgggatccgcttcgattaagcatcattccagacggcgagatcagcggcatgcctagcaagctggtcgacaaggacactcttgagccgttattcacagtcaaggcgtacaattccgaaaacctacgatggtatgcttacgagattaagtatttcctaccaattcccgttgcaaacgacgcggacgattcgtggcgagtcgacagcgcctcgatctacatttcagccaccggccatcatgggaaggaagtcgctcgtctcgagttctaccgcgataactgcaatataggggtccgttgggatgacccatccgatcacgggccgcattacaaccgcattggtactaataacctgaagtgcatcacacaaagaccctacttgccattcctcagccgcgccggacctatggtatggacccatcggaagggactccagggacctgtgctcttggacgcttacgaccgggtcgtcgcctatggcgagttaaacatttgcgacaaggacacaccgtcaaatgttcttggagagatcgttgcgtcctacatcgcactacgtgttcagaccggcagatacattgattacgatgcggccgtagacgctgaacgacaatcccgtagccagtaa

SEQ ID NO: 1875 - protein, 404 aa, Muscodor strobelii
  misc_feature: SGI Peptide ID NO. 560239
  misc_feature: Useful for introducing or modulating the production of volatile compounds
MDKSKPVDESVARASGSDDAPGSVISADALPSDSPLPTAIGQLTLRSQRVLCPCCHYIGNTAVPASRSRTLQMIAHSASIIIYTGGLVAPLFFWWLPIVRDSATGYAARLLQAELLNISRLTSFYLPDFCSNCGVHLAYWSGDATHVFAESNYLTTTSVQPAQKSDDPVTSSIYIRSPLGAPPLRGSGLYARNWPDISRDPLRLSIIPDGEISGMPSKLVDKDTLEPLFTVKAYNSENLRWYAYEIKYFLPIPVANDADDSWRVDSASIYISATGHHGKEVARLEFYRDNCNIGVRWDDPSDHGPHYNRIGTNNLKCITQRPYLPFLSRAGPMVWTHRKGLQGPVLLDAYDRVVAYGELNICDKDTPSNVLGEIVASYIALRVQTGRYIDYDAAVDAERQSRSQ

SEQ ID NO: 1876 - DNA, 500 bp, Muscodor strobelii
  misc_feature: SGI EST ID NO. CUFF.4962.0
  misc_feature: Variant of the nucleotide sequence at SEQ ID NO 1874
ccggaatccggatgagccatagacaaatgagtgcctccagcaccgaacgtatttaaagcataatgatctctggctcgtcttcccatggaaagggcttagtggatctcgctctcatcgatcaacgcagtttgtccttccagtttctcagatagtccatacgaccagcgtttgaatcttgagtcaagcacagatggataagtctaagcctgtggacgagtccgtcgcaagggcctccggctccgacgatgcgcccgggtccgtgatcagcgctgatgccctgccttcggactctcctctcccaacggcaatagggcaactcactctgcgatcgcagcgcgtgctctgcccatgctgccactacataggcaataccgctgtcccggctagtcggagtcggacactccagatgattgctcactcggcttcgatcatcatatacacaggaggactggtggcgcccctttttttctggtggttgcctatcgtaagagatagtgcca

SEQ ID NO: 1877 - DNA, 7980 bp, Muscodor strobelii
  misc_feature: SGI cDNA ID NO. 560240
  misc_feature: Encodes the peptide sequence at SEQ ID NO 1878
atggcaaatataggagggcctagcctggtttccctgcctcagctcgacacctccgtcaactccattcccggcggctcggtacgagaagcagcagagatcagatcggcccaggaaccccgggagctgcttcgcggccgcaactacttttcctcggcccagaactccccgtcgctgccccaagcaaggcgaggagacacgccggacctgttccggtcagccaccgaggccattgccagcgctctcgacgtcgatgccaacgatctgccccagcccttctatggcgtgccctggtcgtcgcgcgacgatgacgacgccaacagcgacaccgacgagggctacccccaccaggtcgcgcgctacccgaccgcgcttcgtgagccccgcggccagcacgaccagaccatgagcctgcccccgatctctgatccctaccagaacacgtactggcagaatcccgaagcgagtgaagcgggccgaccctaccacgcatccacgcgccaataccctgaggcatacgatgacatacctcgttcggcgggctcgtttgtcgagtttagtgggaaaaggacgacgatacagaatgtgctggccgatcgcgactctcaggtcacttcgatgcaggccgcagggaacaccgcggccgaccacgagcagtgggcacccctcagcccgctccaagcatccggtcgccgcggattatcggcaatgatcagtcccctcgaccccaactcgccgtacttgcagcactctcccggcgctggctatatgagcccaagtcagggagctggataccacagcccccccgccataccggccaaagcccgagctcggtcgaagagcccgccacgaataccgcgcaaagcttcgcgaaggctgcgcactgacgccgaacaagtcgtcgcgtcggagcatggcgtacagagtgcggccgtgatcaaaccgaaagctgggttgttcgagggacaatatgtcgctttcctcagtctcacaggctctacagtcgaaagctccaacgatgacgagatccgattgcagaatgcctactatacaagcagcttgccttccatccggaagaacgtcgagtcccagctcgcaccggagtatgtgcctaatgtctgggtcgtcttggagaagatgcccttggatcccgagggccaggtccaacggagaaaattgcaaacttggatacagaatgcgaacgatgaaacctaccgccgcatcacgtcgatcgagtccaaggaagagctcaagaagcccaccacgacgatagaacgaaggctctccaaggctgtgggaagagttctacagattaacccgaccgacataggcatgaacatgtcttttagtaatctcggaggcagccctcataccgccgaacagctcgcagtacgattccagtcgcaaggcatcccgctagacccccacgatgtcatggaagctcccactttgacagatcttgcgcagattgcgagtccggtagaacagatcttcgagacacccgaagaagaagaggaagaagaagcatcactatcagatgtgttcgacctctctcccatgcaacatctatatttcctcacgcccatgggtaaagatagcgcacgtaggaagtccggtgatggcgactaccgttttaaccaaagtacactctttcggttaaagcatacggtaggcgtagaagagctacgagcggctatcgaggctgttgtgagccatcattcaatgctgcgaactcgtttccgcttttccaacggaacttggtggcagtcgaccgacccagaggcttccactgcgtctgatttcgcacatcatctcatcggaaccgaggccgagctagagtctataatcacagctgcacaaagcgccatcaacatcgagaatggtcccatattttctgctcatcacttccatacgcatgatggctatcaactattatacttcgttgctcatcatcttgtcgttgaccttcggtcatggcaagttgtggccaaggacgtcgaatcgctcttgacacatgggcatttgagctctggacaatctattaccttcaaggagtggacattgcatcagaagcatcgtgttgaacacacaacagatgctctgacacttccgtttgagctgccggcccgtaactgggagtattggggcgtcaacgatgctctcaatacgtatggtaataccgtcgctttgggcttcacgttagattccgacgtcatgtccattctcgaaacggccaataaggaactcaaggccgattcatgcgaccttttcatgtcagctctgctcctttcattcttgcacgcatttaaagatcggtccgttcccattttatggaatcaagaacacgaacgcagtgcactggatccagaccgtgatatctcgcagaccgtaggatggttcacgtatctattccctctcgtcattgacttgtccgctacagatgacatctggtcagttatgagtcgcgtgaaagatgcgaggcgggcttcttcgaagataagtctatcgcatttcaccgccaatctcatcgacgcatcatcggccgaatctttcgcattctctcactgcccccttgagttaattttcacatttgccgctggagcgcttggaagcaacaaaaatcggaatgctgttctcgaagaaatagatatcccaggaaagacgatagactccgaaactgccgatattggtcattccgtcggaagaattgctatcttcgaagtgtccatctggatggatgagaatgaggcaagagtcaagtttctccacaatagggattcaaagcacagagagcagattcagtcatggatccgccactatgaacgtatcctccgccaatctatacataagctcaaggatcatgctccaggacttgctatgtctgatgttcctgatttggacgtaacaccagagggcctccttcgtttgaatcgagaaatactcccgcggttgaatttgaacatcagtaatgtggaaagtgtccttcctgccacgccttgtcaacagctccaattggtccgccagacattacagccaggtagtacgcatgctcatgtaatctatgagctcaacacggttggcgctcctatcgatacggcgcggatatgcacagcgtggaagcaagtcactgatttacaccctgctatgcgtaccatattctctcctagtgtcatgacagccggtctctacgatcaggttattctacgcaatcattccccgaacatgttgtttttggagagtggtgagatagaaggacccatggcaactattggaaaagttcccccgttgcatttgaacgagggcgtcccttggcatcggttgattgtatgccagtcaattggcaaagcatacttgaagctagaagtcagtcaggtcatttgtgatatgtccagcatcaacattctcatccatgcacttgaaaagatctactttgaaggacagctaacgcctcctacgaaattcccgtttgccgattacaaccaatgtctcatgccttcaaagaccaacgtcgatttttggaaagagaaattgtctagcgcacgaccgtgccaatttccaatactaacgtcaaaatctgcggcaccaatggagtggcagaccatttctttggacttacaggttccattccaacgtcttcgcgatttcgctcggttctacaaggtggaccaatctacgatcttccgcgtcgcctgggggctgctcttgaggacatacctcgaggtcgacaacgtgactttcgggtatcggacgccgggaagagacttgccagtctcagggttggatggcgccgtcggcccattttcaagactcttgacttccaagatgcaggcgactgcggacaagcaaatatcccagcttcttcgagatgcagagactgaacgacaaaaagatatccagcatcaaactgtcaacgtgtgtacggctgagcatgagcttggcatgaaaggtgctaggttcttcaacacgtgtgtttcatttggctaccaagacatgtcagccctgaaggagtcagacagcaaattctctcgcaatagcgccagccaagcttctgaatatgatcttaatgcagatttcatcgttcgagatggtaccctagctattgagttgggtcatcggattctctcgccgcaacaagcgaacactgtcgctcaagtattcggcaaagcactcgaaagtattctggaaagcccaagtgctacagtgaaagaagctgatttgtttactatcaatgatcacaaccagatcctcgcgtggaacagcatgcctcaaatcgacgtgcaacaaaaccacctccccacacttattggcatgcgagcccagaggcacggagatattcaagctatttgtgcatgggatggtttgttgagctatactgaactcgacaagctatctagaggatttgcgcaattcttgttgagtgctggcgttcgacctcaaatgccagttcccattgtcgttgataagagccggtgggctgtcgtggccatgttggccatcttatacactggcgcaatactcgtgccagtggatgccgagtccacctccatgtacccctgggttgtgcaggtcataaacaggggtctcgtactggcctcggataacgtccgaggctattttgcgaactcgggctgtaatgttatcgcagttaatgaggagactatcacctcaccttacgtgcaatcagtggagttaccaggtgccgtaccaacaaaggcacacgatatcgccattctgctcttaaaccctgcaggctccaagaattctaaggcagtagcctatacgtcacggcgccttggctacctcatgcgccggccaggggcctacattgcgcatcaacccatcaagtcgaccgtggtatgcttcagggctcgacaactcgatactgaagcgcatgtgcaatggatgggtaaggctaaagtgatactcgtttatgggtcggccgaagcgtgtcctcttggtctctcagcagctgaagtcacggagaagacctccatcccaagtttcaggaatcccttctctggaaacttctggatcgtcagccctgaagaccacaatcgattaatgccagtgggtgcaattggcgaactagtcataggaggacctactcttgctgcagctagttcactcgacatggagaacttagacatcgacgtgctcatcaaaaagagctctactagagcccgtgctctgctggaacaatcgggcagtcgtcttctcaagacaggccatcgggttcgttatcgggaacaaggagaaatcgaattcgtgactcttgaaggcgagaagttggctatcaatgggacatcgttccacgtatcagtagtggagccaaaacttcgacggtgtttcggacgaagcgtcgatgtcatcgtcgagacgattgccttcaaagacacgaactcacagcccattttggctgcatttgttgagctcggcgagcaatttaccgacagcacagaggatcttgccaagctcagccacaacactaaacagaaactgtgctacttcaaacagacggctgatctggcactcagcgaatctgttccgccctacatgctgccttcggcttatatcccggtcagacactttgctctgacgtcgtcactgaaggtgaacagaaaaagccttcaaaagctgattacaggtctgtcgcggcaacaactactcgctctcgcagaggtagaaaacgggcttgaggtaccggttcagagtctcaaacctctgcctttgacgcaagccgaacaggtcatgcggtctatttgggctcaagttctcggaattgaagaccagaccaccatagtgtgcaccgacggattcttgaagcttggcggcgatgtcatcacgagccatcgcgtcgtcgtggtatgtcgccaacgcggcatcgaaatctccattctcgatcttcttcgaaatatgcccttatcagagctttgtagagatatcaccaacttccaaatccctacgcctgtgaagttgaaaccggaccatggagagattgagaaagccaaggttgtagtacaagagactggagccccgaaactcggctctgggagcgtcatcgaagatgttgcagaagcatcgtctctccaaacaatgtttgttgaatcggcaatgttgcaagcacgaggaaatgtgtcatactttgtgcttagtgctacgggcttcttggattggcacaagcttgagaatgcatgcttcatgctgaccaaagcccacccaatcctacgcactgcatttgtctcccacagccgtcaagtctaccaaacggtattgcggacatatcgccccgaattcctgcgttatcaataccagaactggcggttaagcaaccttgcggtaaaactcatacggcgagatcagcagcttcccattgacttccgccgccctgttactaagttctactttcttgatgctggcaaatgctccattctagtgatgcgcctgtcccgcgctcaatacgatgacctatctattccaatcctggtgcgcgatctgggtcgtttctaccgtcaaactacccctgccgcccagagcactggtttctgtgaggtcatcagagcagctcgttcgacatatgccagcggcgctaccgagtactggcgttcactgcttgacggtgcaaacatgacgcaaattgtgtcacagccttcattacccgtcgctaactcgaatccgaagacactggtccagaagattcccattggctctctgcagaacttcggtataccctttgagacaattctcaaaggagcctggtccatcgtcttatcgaatttgtcgggtactgacgacgttgttttcggacacatggtggaaggcagacacttgagccttgctaatgggcagacaatctcaagtgtcgtcgggccaaaaggcaacgtcattcctgtacgcacacgcataccagaatatccagtcacacctctcgaatacttcagaaatgtacagagccagtatgttgccagcgtaccttacgagaatctacagacagccgatgttatcgacaagtgtacagcctggccgtcatggacacgcttcagcaccgtcgtgcatcatcagagacagtctgagcgatataagttgcttaatttcaccattggcgaagcgagctgtactcttgatatgataggcttgagtcatgaggactccgatgtcttcgttcagaccatgatgatcgattccaagaacgtcgaggtttctgtcacattttgcgaaaagaaaattcaaactttttttgccgatgaggttctcaagatgttgtgttctaccatctccgtcctcacttccaacttcgtcatggagcctatggtcttgaagggtctaaatgacacatacacaacaccacgcattccattgccagcacccaaacgagaaagcagtgctatctctggcgcactgtccgttgatccagatcacgctcgcgctgctcacagcgtcatctcagctgcgtgggacacggtcctcggggcacagagtttgcaagttgctgacattcgctcggtgccattctacgagatatggggcgcacacatgcctgcagctgaactagcgcgctactatacacaaaaagtacctaggttcccgggcttggagcagaaagtctatacgacggaagagatcattgatcatccgacaatgatgcagcagtacgaacttatcattgctaaacagcaagaaccactcaagcgggggagaagcttccttaagcgcacgcccggatctctccgaaagaatttccggaagctcactgttggaactggtgtacctaatggcggagaaggtatggtacctatatctgcatcgggcaggctgcatcctcatcgacctttgaatgggaatagttccctggagtctctgtcgacactcagtagcgtcccagacccggatgcagaagtaattaaggagggtgttcccacgcccccaacgccatctgacggcaccgggaagatggggggtggaggaatgaacggcggctttatatga

SEQ ID NO: 1878 - protein, 2659 aa, Muscodor strobelii
  misc_feature: SGI Peptide ID NO. 560240
  misc_feature (510)..(810): Pfam Id: PF00668 Pfam Desc: Condensation domain
  misc_feature (990)..(1275): Pfam Id: PF00668 Pfam Desc: Condensation domain
  misc_feature (1455)..(1513): Pfam Id: PF00501 Pfam Desc: AMP-binding enzyme
  misc_feature (1632)..(1755): Pfam Id: PF00501 Pfam Desc: AMP-binding enzyme
  misc_feature (510)..(691): Pfam Id: PF00668 Pfam Desc: Condensation domain
  misc_feature (294)..(2555): NCBI GI: 164425711 Blast Desc: NCU04531 [Neurospora crassa OR74A] gi|157071032|gb|EAA27706.2| [Neurospora crassa OR74A]
  misc_feature (288)..(1593): NCBI GI: 116205980 Blast Desc: CHGG_02283 [Chaetomium globosum CBS 148.51] gi|88182880|gb|EAQ90348.1| CHGG_02283 [Chaetomium globosum CBS 148.51]
  misc_feature (1617)..(2555): NCBI GI: 116205980 Blast Desc: CHGG_02283 [Chaetomium globosum CBS 148.51] gi|88182880|gb|EAQ90348.1| CHGG_02283 [Chaetomium globosum CBS 148.51]
  misc_feature (285)..(1610): NCBI GI: 39942642 Blast Desc: MGG_03401 [Magnaporthe grisea 70-15] gi|145015580|gb|EDK00070.1| MGG_03401 [Magnaporthe grisea 70-15]
  misc_feature (1608)..(2555): NCBI GI: 39942642 Blast Desc: MGG_03401 [Magnaporthe grisea 70-15] gi|145015580|gb|EDK00070.1| MGG_03401 [Magnaporthe grisea 70-15]
  misc_feature (283)..(1657): NCBI GI: 171678561 Blast Desc: protein product [Podospora anserina] gi|170937350|emb|CAP62008.1| protein product [Podospora anserina]
  misc_feature (1617)..(2560): NCBI GI: 171678561 Blast Desc: protein product [Podospora anserina] gi|170937350|emb|CAP62008.1| protein product [Podospora anserina]
  misc_feature (369)..(2352): NCBI GI: 70992477 Blast Desc: nonribosomal peptide synthase [Aspergillus fumigatus Af293] gi|66848720|gb|EAL89049.1| nonribosomal peptide synthase, [Aspergillus fumigatus Af293]
  misc_feature (369)..(2352): NCBI GI: 159124658 Blast Desc: nonribosomal peptide synthase, [Aspergillus fumigatus A1163]
  misc_feature (1619)..(2555): NCBI GI: 261360420 Blast Desc: conserved [Verticillium albo-atrum VaMs.102]
  misc_feature (347)..(1678): SWISSPROT Homolog: EC 5.1.1.13 Aspartate racemase
  misc_feature (347)..(1678): SWISSPROT Homolog: EC 5.1.1.11 Phenylalanine racemase (ATP-hydrolyzing)
MANIGGPSLVSLPQLDTSVNSIPGGSVREAAEIRSAQEPRELLRGRNYFSSAQNSPSLPQARRGDTPDLFRSATEAIASALDVDANDLPQPFYGVPWSSRDDDDANSDTDEGYPHQVARYPTALREPRGQHDQTMSLPPISDPYQNTYWQNPEASEAGRPYHASTRQYPEAYDDIPRSAGSFVEFSGKRTTIQNVLADRDSQVTSMQAAGNTAADHEQWAPLSPLQASGRRGLSAMISPLDPNSPYLQHSPGAGYMSPSQGAGYHSPPAIPAKARARSKSPPRIPRKASRRLRTDAEQVVASEHGVQSAAVIKPKAGLFEGQYVAFLSLTGSTVESSNDDEIRLQNAYYTSSLPSIRKNVESQLAPEYVPNVWVVLEKMPLDPEGQVQRRKLQTWIQNANDETYRRITSIESKEELKKPTTTIERRLSKAVGRVLQINPTDIGMNMSFSNLGGSPHTAEQLAVRFQSQGIPLDPHDVMEAPTLTDLAQIASPVEQIFETPEEEEEEEASLSDVFDLSPMQHLYFLTPMGKDSARRKSGDGDYRFNQSTLFRLKHTVGVEELRAAIEAVVSHHSMLRTRFRFSNGTWWQSTDPEASTASDFAHHLIGTEAELESIITAAQSAINIENGPIFSAHHFHTHDGYQLLYFVAHHLVVDLRSWQVVAKDVESLLTHGHLSSGQSITFKEWTLHQKHRVEHTTDALTLPFELPARNWEYWGVNDALNTYGNTVALGFTLDSDVMSILETANKELKADSCDLFMSALLLSFLHAFKDRSVPILWNQEHERSALDPDRDISQTVGWFTYLFPLVIDLSATDDIWSVMSRVKDARRASSKISLSHFTANLIDASSAESFAFSHCPLELIFTFAAGALGSNKNRNAVLEEIDIPGKTIDSETADIGHSVGRIAIFEVSIWMDENEARVKFLHNRDSKHREQIQSWIRHYERILRQSIHKLKDHAPGLAMSDVPDLDVTPEGLLRLNREILPRLNLNISNVESVLPATPCQQLQLVRQTLQPGSTHAHVIYELNTVGAPIDTARICTAWKQVTDLHPAMRTIFSPSVMTAGLYDQVILRNHSPNMLFLESGEIEGPMATIGKVPPLHLNEGVPWHRLIVCQSIGKAYLKLEVSQVICDMSSINILIHALEKIYFEGQLTPPTKFPFADYNQCLMPSKTNVDFWKEKLSSARPCQFPILTSKSAAPMEWQTISLDLQVPFQRLRDFARFYKVDQSTIFRVAWGLLLRTYLEVDNVTFGYRTPGRDLPVSGLDGAVGPFSRLLTSKMQATADKQISQLLRDAETERQKDIQHQTVNVCTAEHELGMKGARFFNTCVSFGYQDMSALKESDSKFSRNSASQASEYDLNADFIVRDGTLAIELGHRILSPQQANTVAQVFGKALESILESPSATVKEADLFTINDHNQILAWNSMPQIDVQQNHLPTLIGMRAQRHGDIQAICAWDGLLSYTELDKLSRGFAQFLLSAGVRPQMPVPIVVDKSRWAVVAMLAILYTGAILVPVDAESTSMYPWVVQVINRGLVLASDNVRGYFANSGCNVIAVNEETITSPYVQSVELPGAVPTKAHDIAILLLNPAGSKNSKAVAYTSRRLGYLMRRPGAYIAHQPIKSTVVCFRARQLDTEAHVQWMGKAKVILVYGSAEACPLGLSAAEVTEKTSIPSFRNPFSGNFWIVSPEDHNRLMPVGAIGELVIGGPTLAAASSLDMENLDIDVLIKKSSTRARALLEQSGSRLLKTGHRVRYREQGEIEFVTLEGEKLAINGTSFHVSVVEPKLRRCFGRSVDVIVETIAFKDTNSQPILAAFVELGEQFTDSTEDLAKLSHNTKQKLCYFKQTADLALSESVPPYMLPSAYIPVRHFALTSSLKVNRKSLQKLITGLSRQQLLALAEVENGLEVPVQSLKPLPLTQAEQVMRSIWAQVLGIEDQTTIVCTDGFLKLGGDVITSHRVVVVCRQRGIEISILDLLRNMPLSELCRDITNFQIPTPVKLKPDHGEIEKAKVVVQETGAPKLGSGSVIEDVAEASSLQTMFVESAMLQARGNVSYFVLSATGFLDWHKLENACFMLTKAHPILRTAFVSHSRQVYQTVLRTYRPEFLRYQYQNWRLSNLAVKLIRRDQQLPIDFRRPVTKFYFLDAGKCSILVMRLSRAQYDDLSIPILVRDLGRFYRQTTPAAQSTGFCEVIRAARSTYASGATEYWRSLLDGANMTQIVSQPSLPVANSNPKTLVQKIPIGSLQNFGIPFETILKGAWSIVLSNLSGTDDVVFGHMVEGRHLSLANGQTISSVVGPKGNVIPVRTRIPEYPVTPLEYFRNVQSQYVASVPYENLQTADVIDKCTAWPSWTRFSTVVHHQRQSERYKLLNFTIGEASCTLDMIGLSHEDSDVFVQTMMIDSKNVEVSVTFCEKKIQTFFADEVLKMLCSTISVLTSNFVMEPMVLKGLNDTYTTPRIPLPAPKRESSAISGALSVDPDHARAAHSVISAAWDTVLGAQSLQVADIRSVPFYEIWGAHMPAAELARYYTQKVPRFPGLEQKVYTTEEIIDHPTMMQQYELIIAKQQEPLKRGRSFLKRTPGSLRKNFRKLTVGTGVPNGGEGMVPISASGRLHPHRPLNGNSSLESLSTLSSVPDPDAEVIKEGVPTPPTPSDGTGKMGGGGMNGGFI

SEQ ID NO: 1879 - DNA, 9104 bp, Muscodor strobelii
  misc_feature: SGI EST ID NO. CUFF.4975.0
  misc_feature: Variant of the nucleotide sequence at SEQ ID NO 1877
cgatctcctagtgccgctgccctgctatggcggcggcgccggcctccatacgatgaaaggacatgccttgacatggtcgactatcgacattacgtgtttcgatggagaggactttcggcccaggacctcgagtgatagtgctttcctgcaggtgacgatggtgattctgatgtattccactccccaaccgcaataaacggggtcctgaccactttaatctgccagcagccgccctcgtctggcctcaagttgacttgcacgcggtcgccgtctctcgtaagcgactattgtccagctcctgcggctggggaaggcctctgagcttacggcccccaatactgtgatatgccacattgtcagcgcaaacaaattcatttctgacccagggggaaaaaagggaaagacagaaacataatcacgcgcgaccaacttcgtaggtaatgaacgcccatgtctgctggattctgatgtccacgccgccatggcaaatataggagggcctagcctggtttccctgcctcagctcgacacctccgtcaactccattcccggcggctcggtacgagaagcagcagagatcagatcggcccaggaaccccgggagctgcttcgcggccgcaactacttttcctcggcccagaactccccgtcgctgccccaagcaaggcgaggagacacgccggacctgttccggtcagccaccgaggccattgccagcgctctcgacgtcgatgccaacgatctgccccagcccttctatggcgtgccctggtcgtcgcgcgacgatgacgacgccaacagcgacaccgacgagggctacccccaccaggtcgcgcgctacccgaccgcgcttcgtgagccccgcggccagcacgaccagaccatgagcctgcccccgatctctgatccctaccagaacacgtactggcagaatcccgaagcgagtgaagcgggccgaccctaccacgcatccacgcgccaataccctgaggcatacgatgacatacctcgttcggcgggctcgtttgtcgagtttagtgggaaaaggacgacgatacagaatgtgctggccgatcgcgactctcaggtcacttcgatgcaggccgcagggaacaccgcggccgaccacgagcagtgggcacccctcagcccgctccaagcatccggtcgccgcggattatcggcaatgatcagtcccctcgaccccaactcgccgtacttgcagcactctcccggcgctggctatatgagcccaagtcagggagctggataccacagcccccccgccataccggccaaagcccgagctcggtcgaagagcccgccacgaataccgcgcaaagcttcgcgaaggctgcgcactgacgccgaacaagtcgtcgcgtcggagcatggcgtacagagtgcggccgtgatcaaaccgaaagctgggttgttcgagggacaatatgtcgctttcctcagtctcacaggctctacagtcgaaagctccaacgatgacgagatccgattgcagaatgcctactatacaagcagcttgccttccatccggaagaacgtcgagtcccagctcgcaccggagtatgtgcctaatgtctgggtcgtcttggagaagatgcccttggatcccgagggccaggtccaacggagaaaattgcaaacttggatacagaatgcgaacgatgaaacctaccgccgcatcacgtcgatcgagtccaaggaagagctcaagaagcccaccacgacgatagaacgaaggctctccaaggctgtgggaagagttctacagattaacccgaccgacataggcatgaacatgtcttttagtaatctcggaggcagccctcataccgccgaacagctcgcagtacgattccagtcgcaaggcatcccgctagacccccacgatgtcatggaagctcccactttgacagatcttgcgcagattgcgagtccggtagaacagatcttcgagacacccgaagaagaagaggaagaagaagcatcactatcagatgtgttcgacctctctcccatgcaacatctatatttcctcacgcccatgggtaaagatagcgcacgtaggaagtccggtgatggcgactaccgttttaaccaaagtacactctttcggttaaagcatacggtaggcgtagaagagctacgagcggctatcgaggctgttgtgagccatcattcaatgctgcgaactcgtttccgcttttccaacggaacttggtggcagtcgaccgacccagaggcttccactgcgtctgatttcgcacatcatctcatcggaaccgaggccgagctagagtctataatcacagctgcacaaagcgccatcaacatcgagaatggtcccatattttctgctcatcacttccatacgcatgatggctatcaactattatacttcgttgctcatcatcttgtcgttgaccttcggtcatggcaagttgtggccaaggacgtcgaatcgctcttgacacatgggcatttgagctctggacaatctattaccttcaaggagtggacattgcatcagaagcatcgtgttgaacacacaacagatgctctgacacttccgtttgagctgccggcccgtaactgggagtattggggcgtcaacgatgctctcaatacgtatggtaataccgtcgctttgggcttcacgttagattccgacgtcatgtccattctcgaaacggccaataaggaactcaaggccgattcatgcgaccttttcatgtcagctctgctcctttcattcttgcacgcatttaaagatcggtccgttcccattttatggaatcaagaacacgaacgcagtgcactggatccagaccgtgatatctcgcagaccgtaggatggttcacgtatctattccctctcgtcattgacttgtccgctacagatgacatctggtcagttatgagtcgcgtgaaagatgcgaggcgggcttcttcgaagataagtctatcgcatttcaccgccaatctcatcgacgcatcatcggccgaatctttcgcattctctcactgcccccttgagttaattttcacatttgccgctggagcgcttggaagcaacaaaaatcggaatgctgttctcgaagaaatagatatcccaggaaagacgatagactccgaaactgccgatattggtcattccgtcggaagaattgctatcttcgaagtgtccatctggatggatgagaatgaggcaagagtcaagtttctccacaatagggattcaaagcacagagagcagattcagtcatggatccgccactatgaacgtatcctccgccaatctatacataagctcaaggatcatgctccaggacttgctatgtctgatgttcctgatttggacgtaacaccagagggcctccttcgtttgaatcgagaaatactcccgcggttgaatttgaacatcagtaatgtggaaagtgtccttcctgccacgccttgtcaacagctccaattggtccgccagacattacagccaggtagtacgcatgctcatgtaatctatgagctcaacacggttggcgctcctatcgatacggcgcggatatgcacagcgtggaagcaagtcactgatttacaccctgctatgcgtaccatattctctcctagtgtcatgacagccggtctctacgatcaggttattctacgcaatcattccccgaacatgttgtttttggagagtggtgagatagaaggacccatggcaactattggaaaagttcccccgttgcatttgaacgagggcgtcccttggcatcggttgattgtatgccagtcaattggcaaagcatacttgaagctagaagtcagtcaggtcatttgtgatatgtccagcatcaacattctcatccatgcacttgaaaagatctactttgaaggacagctaacgcctcctacgaaattcccgtttgccgattacaaccaatgtctcatgccttcaaagaccaacgtcgatttttggaaagagaaattgtctagcgcacgaccgtgccaatttccaatactaacgtcaaaatctgcggcaccaatggagtggcagaccatttctttggacttacaggttccattccaacgtcttcgcgatttcgctcggttctacaaggtggaccaatctacgatcttccgcgtcgcctgggggctgctcttgaggacatacctcgaggtcgacaacgtgactttcgggtatcggacgccgggaagagacttgccagtctcagggttggatggcgccgtcggcccattttcaagactcttgacttccaagatgcaggcgactgcggacaagcaaatatcccagcttcttcgagatgcagagactgaacgacaaaaagatatccagcatcaaactgtcaacgtgtgtacggctgagcatgagcttggcatgaaaggtgctaggttcttcaacacgtgtgtttcatttggctaccaagacatgtcagccctgaaggagtcagacagcaaattctctcgcaatagcgccagccaagcttctgaatatgatcttaatgcagatttcatcgttcgagatggtaccctagctattgagttgggtcatcggattctctcgccgcaacaagcgaacactgtcgctcaagtattcggcaaagcactcgaaagtattctggaaagcccaagtgctacagtgaaagaagctgatttgtttactatcaatgatcacaaccagatcctcgcgtggaacagcatgcctcaaatcgacgtgcaacaaaaccacctccccacacttattggcatgcgagcccagaggcacggagatattcaagctatttgtgcatgggatggtttgttgagctatactgaactcgacaagctatctagaggatttgcgcaattcttgttgagtgctggcgttcgacctcaaatgccagttcccattgtcgttgataagagccggtgggctgtcgtggccatgttggccatcttatacactggcgcaatactcgtgccagtggatgccgagtccacctccatgtacccctgggttgtgcaggtcataaacaggggtctcgtactggcctcggataacgtccgaggctattttgcgaactcgggctgtaatgttatcgcagttaatgaggagactatcacctcaccttacgtgcaatcagtggagttaccaggtgccgtaccaacaaaggcacacgatatcgccattctgctcttaaaccctgcaggctccaagaattctaaggcagtagcctatacgtcacggcgccttggctacctcatgcgccggccaggggcctacattgcgcatcaacccatcaagtcgagttatgcagctctcttcctatggtgttgatgtttcgttgactgagatattcacggttctcgttaatggtggatgtgtctgtgtacctgcatcttcggaaaggcttgtgagttttgtggccgcagcacaacggatgaaggtgaattggacatacttaactgcgccactctcacggaaaattgaccccgaatcgcttcccaacttagccgtggtatgcttcagggctcgacaactcgatactgaagcgcatgtgcaatggatgggtaaggctaaagtgatactcgtttatgggtcggccgaagcgtgtcctcttggtctctcagcagctgaagtcacggagaagacctccatcccaagtttcaggaatcccttctctggaaacttctggatcgtcagccctgaagaccacaatcgattaatgccagtgggtgcaattggcgaactagtcataggaggacctactcttgctgcagctagttcactcgacatggagaacttagacatcgacgtgctcatcaaaaagagctctactagagcccgtgctctgctggaacaatcgggcagtcgtcttctcaagacaggccatcgggttcgttatcgggaacaaggagaaatcgaattcgtgactcttgaaggcgagaagttggctatcaatgggacatcgttccacgtatcagtagtggagccaaaacttcgacggtgtttcggacgaagcgtcgatgtcatcgtcgagacgattgccttcaaagacacgaactcacagcccattttggctgcatttgttgagctcggcgagcaatttaccgacagcacagaggatcttgccaagctcagccacaacactaaacagaaactgtgctacttcaaacagacggctgatctggcactcagcgaatctgttccgccctacatgctgccttcggcttatatcccggtcagacactttgctctgacgtcgtcactgaaggtgaacagaaaaagccttcaaaagctgattacaggtctgtcgcggcaacaactactcgctctcgcagaggtagaaaacgggcttgaggtaccggttcagagtctcaaacctctgcctttgacgcaagccgaacaggtcatgcggtctatttgggctcaagttctcggaattgaagaccagaccaccatagtgtgcaccgacggattcttgaagcttggcggcgatgtcatcacgagccatcgcgtcgtcgtggtatgtcgccaacgcggcatcgaaatctccattctcgatcttcttcgaaatatgcccttatcagagctttgtagagatatcaccaacttccaaatccctacgcctgtgaagttgaaaccggaccatggagagattgagaaagccaaggttgtagtacaagagactggagccccgaaactcggctctgggagcgtcatcgaagatgttgcagaagcatcgtctctccaaacaatgtttgttgaatcggcaatgttgcaagcacgaggaaatgtgtcatactttgtgcttagtgctacgggcttcttggattggcacaagcttgagaatgcatgcttcatgctgaccaaagcccacccaatcctacgcactgcatttgtctcccacagccgtcaagtctaccaaacggtattgcggacatatcgccccgaattcctgcgttatcaataccagaactggcggttaagcaaccttgcggtaaaactcatacggcgagatcagcagcttcccattgacttccgccgccctgttactaagttctactttcttgatgctggcaaatgctccattctagtgatgcgcctgtcccgcgctcaatacgatgacctatctattccaatcctggtgcgcgatctgggtcgtttctaccgtcaaactacccctgccgcccagagcactggtttctgtgaggtcatcagagcagctcgttcgacatatgccagcggcgctaccgagtactggcgttcactgcttgacggtgcaaacatgacgcaaattgtgtcacagccttcattacccgtcgctaactcgaatccgaagacactggtccagaagattcccattggctctctgcagaacttcggtataccctttgagacaattctcaaaggagcctggtccatcgtcttatcgaatttgtcgggtactgacgacgttgttttcggacacatggtggaaggcagacacttgagccttgctaatgggcagacaatctcaagtgtcgtcgggccaaaaggcaacgtcattcctgtacgcacacgcataccagaatatccagtcacacctctcgaatacttcagaaatgtacagagccagtatgttgccagcgtaccttacgagaatctacagacagccgatgttatcgacaagtgtacagcctggccgtcatggacacgcttcagcaccgtcgtgcatcatcagagacagtctgagcgatataagttgcttaatttcaccattggcgaagcgagctgtactcttgatatgataggcttgagtcatgaggactccgatgtcttcgttcagaccatgatgatcgattccaagaacgtcgaggtttctgtcacattttgcgaaaagaaaattcaaactttttttgccgatgaggttctcaagatgttgtgttctaccatctccgtcctcacttccaacttcgtcatggagcctatggtcttgaagggtctaaatgacacatacacaacaccacgcattccattgccagcacccaaacgagaaagcagtgctatctctggcgcactgtccgttgatccagatcacgctcgcgctgctcacagcgtcatctcagctgcgtgggacacggtcctcggggcacagagtttgcaagttgctgacattcgctcggtgccattctacgagatatggggcgcacacatgcctgcagctgaactagcgcgctactatacacaaaaagtacctaggttcccgggcttggagcagaaagtctatacgacggaagagatcattgatcatccgacaatgatgcagcagtacgaacttatcattgctaaacagcaagaaccactcaagcgggggagaagcttccttaagcgcacgcccggatctctccgaaagaatttccggaagctcactgttggaactggtgtacctaatggcggagaaggtatggtacctatatctgcatcgggcaggctgcatcctcatcgacctttgaatgggaatagttccctggagtctctgtcgacactcagtagcgtcccagacccggatgcagaagtaattaaggagggtgttcccacgcccccaacgccatctgacggcaccgggaagatggggggtggaggaatgaacggcggctttatatgaggatgggaagacaagctgtcttcccgattaattcaaacttgtaaggtctgagaaagggagggaagacacgaaaaacgagaggacaagatttgttctgtggatgatttcttcgcactaaaaacgtcatctagagatggagcgactaatcgattgagcgagcagctttgatacccttggttatgattagagctgtttgatttggcttcgtggaaggggagtggaatggcaattttggatcggggacgattggatgatggactatgttgtaaatacatgacttagcatagcattggagcgaatcttattcctttgatacattgaggaggagaccttttgtgaaacgttcattcagatatagatgtaacctagcgctcaagttttgactacctaagcaacaggtttatacacttgtagctgagaatcactaaggtcacagcc

SEQ ID NO: 1880 - DNA, 3492 bp, Muscodor strobelii
  misc_feature: SGI cDNA ID NO. 560241
  misc_feature: Encodes the peptide sequence at SEQ ID NO 1881
atgttctggagatttggcggctacgccaacatctcgactatcgacaccatcctcgataagcctgatttccagctagacgacctcctcgatgagagcgacctaattcaagagctgaagcagcacaacacaaagcttctcgagtacttgcgccaggagcgagtcctcgccaaactgcttgaatatgtcaccgctcccaagctcgagcccgtagagaacaccgaggatgacagccagggtgatgataccagtaagaaggggaagtcgctgggcctgccctttggccgttctcgtgcttcctcctcggctaccaacgacgggaatgaggaagatgaagttgagaagaagcgaaaccggtatgcttatgtggctgccgaagtcttgtcttcggacaactggtccatctatgagtccttgatggagaaccgccctctacttcgcgacttttgggctttcctgaagctgcctgctccgcttgaccccctgcaagccagctacttcaccaaagtgaatgaatcgctcttcgacaagaagactcatgagatgctcgaccttctcaaatccctcgatgatgctgtccccgacatgttgcgccatgttgattgtccaatgattatggatctgttgctcaagataatcagcctcgagagaacagatgacggccagggtattgtcgagtggctctacactaaggatgtgatgccttcactgctctccttcttaggacctgatcacagctgggccacgcagactgcggccggcgacttcatcaaagccatcattacggtctctgcaaatgcttcgcaaaacgagcaggcatgcattggcccgaatgaacttacacgtcagctcgtctccaaagactgtgttgaaaagatcattagctacatgctcggcggaggcaatcctctcactgtaggagttggcattattatcgaagtaatcaggaaaaacaactcagactacgacccggatgttggaacagactcgaatacccagccttcaagtcgtgatcccatctatctcgggacccttctccgcctttttgctgagcacgttcctgattttatgtccctagttctaaatgcacccgcgcaaaagcaacgtctggattcgacctttggtgataagattgagcctctgggctttgatcgattcaagacatgtgaactgatggccgagttgttgcattgtagcaacatggcgctcttgaatgaggttggctcagagcaggtcattgcacaacgtgacgtcgaacgacagcgtctgcgcctagcaggccgtctcgtgtcggcgcgtagcgaagagggccaatcgtctgagaatcttactatgcgcgtgcgccattcctcgcctgatgacagccgtcgccttgaggtaactaatgcttccgatgacgatggcttcgaagaggttacaccatctggcgagatgactgaggatacttcacatgagttcatcaaagctgaagatgagatccctgtcggcacatctgcctccttcttagacaaagatgacgatgaatttgtcgacgaaccacttagttcgccgcgtctacatgtgcaggatgatcatctggacgagactgaattcgagaacccagagcttgtggttgcgccattgtctcctaagaaggtatcgaaagcacaacctgcgcctgctcctgacagcgaaactcaagttgatattcctggagatttacctcttgaaaaggaaggaaaccagattccggaaacggtcgaggacagcaccacacgtccaacaggcgttcaaacaaccatttttgaagtttcaccggatgatacaccgactgtcgagtcttccaccaagactgaagacacagaaatggcgggtgatgaagctgtcaagacgtcgtcagtctctacagagaccaaagccgaagaaccccccgagccttcttctaccacgacagaggcggatgtggcaactgaacctgttcctcagagtgatgtatctgctattattcaagatcacaaagatgccacccacgtctctgcagaacaaccggagccggttgttggcgactacttgaagatgcaatttgtggaaaataaggttgttcctacgatcctgtcattcttcttccgatatccttggaacaacttcttgcacaatgttgtctatgacattgttcaacaagtattcaacggaccgatggaccggggtttcaatcccactcttgccatttcactctttgagaatgcagatatcacaaatgccatcatcaatggacagactgcaagcgaacagtcgcaggctcagagcaagactcgcatgggcttcatgggacacctgaccctgattgccgaggaggtagtcaaattcacagagcgaaatccacctgagcttttgtctgacctcgtattggatcgtgtgatgagccaagactggatcaactatgtcgaaggtgcgctggccgagacccgcgagcgagacaatgccatccttggtggtgtgaggcccgaagttgcaatgagcaatagggcacaaatgggtggcaacggtctcggagggatgggtctctctagtcttggactcggaagtggtcaaggtggcgcatcgaatgctctcgccgaggctggtcttaacgggggcggcggtaatgccatggacgcacctgatcacggcagtggcagtagtcttggaccttttagcatcagttccgggctcctgtctggctctggctttggaagctccagtgatgaggacgaggatgaatcggaagacaacgaagaagacgttaacaatgagttccgcgcctacactgatcctctcaatgcttcatcagggatggacccaccctctattcctcccccgccaccaccacctccgcctctgaacattccgccatcccgtgcccgcctgcagcttgcagctcgactggctatgcatcagaagaccatggctgctagttcttctcagtctgccaatctcgagagcaacgaaggaggcgagggtctcggtgagacgcgtggtattctccgaaacccgttcgaggacgacggtgaagatgaggatgaggacagtgatgacgacctcagcggagagggccaggaacgctatacaggaagctcacgtggcagctggtggcgtgatgcattgaatcgtggccgtgagaggtttggtgatggccgagatgatttagactcggattctgaccgtgagaacccacctggcgcagacgacgatgatgacgagtttggtgacttcgctctccccgaagttggtcaggacggcaagacaggcgtcattgtcaagccgctgcctgttcatcctccccagcacaacaccaagagctcgggatttaccagcctttggccattcggatccaaagagaaaacgaagggcgatgaggctggtgaggggacagatgagcaaccgaatgacgataacgacgagaagatcaaggcgacgcatgaagctacccgtcggacgagcatcgaggaccctgacgaagatgaggttgtcctctag

SEQ ID NO: 1881 - protein, 1163 aa, Muscodor strobelii
  misc_feature: SGI Peptide ID NO. 560241
  misc_feature (170)..(820): Pfam Id: PF04499 Pfam Desc: SIT4 phosphatase-associated protein
  misc_feature (170)..(422): Pfam Id: PF04499 Pfam Desc: SIT4 phosphatase-associated protein
  misc_feature (677)..(820): Pfam Id: PF04499 Pfam Desc: SIT4 phosphatase-associated protein
  misc_feature (1)..(1153): NCBI GI: 116206224 Blast Desc: CHGG_02405 [Chaetomium globosum CBS 148.51] gi|88183002|gb|EAQ90470.1| CHGG_02405 [Chaetomium globosum CBS 148.51]
  misc_feature (1)..(1154): NCBI GI: 256734954 Blast Desc: NECHADRAFT_20407 [Nectria haematococca mpVI 77-13-4]
  misc_feature (1)..(902): NCBI GI: 46138019 Blast Desc: FG10524.1 [Gibberella zeae PH-1]
  misc_feature (1)..(897): NCBI GI: 145608072 Blast Desc: MGG_12709 [Magnaporthe grisea 70-15] gi|145015583|gb|EDK00073.1| MGG_12709 [Magnaporthe grisea 70-15]
  misc_feature (1)..(929): NCBI GI: 85089694 Blast Desc: NCU10018 [Neurospora crassa OR74A] gi|28919383|gb|EAA28830.1| conserved [Neurospora crassa OR74A]
  misc_feature (1)..(923): NCBI GI: 171679940 Blast Desc: protein product [Podospora anserina] gi|170939596|emb|CAP64823.1| protein product [Podospora anserina]
  misc_feature (1)..(906): NCBI GI: 154320969 Blast Desc: BC1G_01359 [Botryotinia fuckeliana B05.10] gi|150851897|gb|EDN27089.1| BC1G_01359 [Botryotinia fuckeliana B05.10]
  misc_feature (1)..(906): NCBI GI: 156054602 Blast Desc: SS1G_06149 [Sclerotinia sclerotiorum 1980] gi|154703929|gb|EDO03668.1| SS1G_06149 [Sclerotinia sclerotiorum 1980]
  misc_feature (1)..(550): NCBI GI: 261360416 Blast Desc: extragenic suppressor of kinetochore protein [Verticillium albo-atrum VaMs.102]
  misc_feature (1)..(885): NCBI GI: 261199828 Blast Desc: SIT4 phosphatase-associated protein [Ajellomyces dermatitidis SLH14081] gi|239594523|gb|EEQ77104.1| SIT4 phosphatase-associated protein [Ajellomyces dermatitidis protein
MFWRFGGYANISTIDTILDKPDFQLDDLLDESDLIQELKQHNTKLLEYLRQERVLAKLLEYVTAPKLEPVENTEDDSQGDDTSKKGKSLGLPFGRSRASSSATNDGNEEDEVEKKRNRYAYVAAEVLSSDNWSIYESLMENRPLLRDFWAFLKLPAPLDPLQASYFTKVNESLFDKKTHEMLDLLKSLDDAVPDMLRHVDCPMIMDLLLKIISLERTDDGQGIVEWLYTKDVMPSLLSFLGPDHSWATQTAAGDFIKAIITVSANASQNEQACIGPNELTRQLVSKDCVEKIISYMLGGGNPLTVGVGIIIEVIRKNNSDYDPDVGTDSNTQPSSRDPIYLGTLLRLFAEHVPDFMSLVLNAPAQKQRLDSTFGDKIEPLGFDRFKTCELMAELLHCSNMALLNEVGSEQVIAQRDVERQRLRLAGRLVSARSEEGQSSENLTMRVRHSSPDDSRRLEVTNASDDDGFEEVTPSGEMTEDTSHEFIKAEDEIPVGTSASFLDKDDDEFVDEPLSSPRLHVQDDHLDETEFENPELVVAPLSPKKVSKAQPAPAPDSETQVDIPGDLPLEKEGNQIPETVEDSTTRPTGVQTTIFEVSPDDTPTVESSTKTEDTEMAGDEAVKTSSVSTETKAEEPPEPSSTTTEADVATEPVPQSDVSAIIQDHKDATHVSAEQPEPVVGDYLKMQFVENKVVPTILSFFFRYPWNNFLHNVVYDIVQQVFNGPMDRGFNPTLAISLFENADITNAIINGQTASEQSQAQSKTRMGFMGHLTLIAEEVVKFTERNPPELLSDLVLDRVMSQDWINYVEGALAETRERDNAILGGVRPEVAMSNRAQMGGNGLGGMGLSSLGLGSGQGGASNALAEAGLNGGGGNAMDAPDHGSGSSLGPFSISSGLLSGSGFGSSSDEDEDESEDNEEDVNNEFRAYTDPLNASSGMDPPSIPPPPPPPPPLNIPPSRARLQLAARLAMHQKTMAASSSQSANLESNEGGEGLGETRGILRNPFEDDGEDEDEDSDDDLSGEGQERYTGSSRGSWWRDALNRGRERFGDGRDDLDSDSDRENPPGADDDDDEFGDFALPEVGQDGKTGVIVKPLPVHPPQHNTKSSGFTSLWPFGSKEKTKGDEAGEGTDEQPNDDNDEKIKATHEATRRTSIEDPDEDEVVL

SEQ ID NO: 1882 - DNA, 5067 bp, Muscodor strobelii
  misc_feature: SGI EST ID NO. CUFF.5073.1
  misc_feature: Variant of the nucleotide sequence at SEQ ID NO 1880
cacatcttgagttggacactgaacagaactgcgcgtcttcctgcgcttccccagccagtcccactccctcacaaggggccactgccatcttcagcccgaagactctgttcctttcgatcaagcccttgaactctatcttttctctcaagggtgcgcccgaccccggactgctgttgtgctccttgctcacagcgctgataggagaggagatagcacagtacctggatacggtagggaatcttgcatcaccgccaacagtcagcccccaactacagtccaacaacatcatacctttgctttcctcctccatatacctctctacctcactcacgacaaggagccgtcggatagctttgcactgcagccgttgaccgacctgtccttccttcaaccatcgtcatcccgttgcatgtctttcttggcatctgaaactggatccaagttctctcactgtacatcacaacactctcccctccaccaagccaacagcatcggcgcatagaagtgtgtatacctcagccagaagcatcgtttagagggtgcatttgcattgggacagcttggcataccctctccagagacatctagggttaggtatatatgcactcatagacacacggtctgatatagaagcgcacgcccctgcttcgagccgactccaacagccactccacagccgtcacgacaatcataatcaacttgcgaccggtcgccctcttgccgcccgtctttgcggtcactcagcatctttatcagcagccaagcaagctgcaggcgtgagcgaccgagccgagctcttcgtatgttgtcatcaagacactgcggtttctctacatccctacaccaatccggacctgtcctccttcctgtcttgggtcggccgtggcatagcagcccagccgacacaacgacgcattcagagcatccaccatgttctggagatttggcggctacgccaacatctcgactatcgacaccatcctcgataagcctgatttccagctagacgacctcctcgatgagagcgacctaattcaagagctgaagcagcacaacacaaagcttctcgagtacttgcgccaggagcgagtcctcgccaaactgcttgaatatgtcaccgctcccaagctcgagcccgtagagaacaccgaggatgacagccagggtgatgataccagtaagaaggggaagtcgctgggcctgccctttggccgttctcgtgcttcctcctcggctaccaacgacgggaatgaggaagatgaagttgagaagaagcgaaaccggtatgcttatgtggctgccgaagtcttgtcttcggacaactggtccatctatgagtccttgatggagaaccgccctctacttcgcgacttttgggctttcctgaagctgcctgctccgcttgaccccctgcaagccagctacttcaccaaagtgaatgaatcgctcttcgacaagaagactcatgagatgctcgaccttctcaaatccctcgatgatgctgtccccgacatgttgcgccatgttgattgtccaatgattatggatctgttgctcaagataatcagcctcgagagaacagatgacggccagggtattgtcgagtggctctacactaaggatgtgatgccttcactgctctccttcttaggacctgatcacagctgggccacgcagactgcggccggcgacttcatcaaagccatcattacggtctctgcaaatgcttcgcaaaacgagcaggcatgcattggcccgaatgaacttacacgtcagctcgtctccaaagactgtgttgaaaagatcattagctacatgctcggcggaggcaatcctctcactgtaggagttggcattattatcgaagtaatcaggaaaaacaactcagactacgacccggatgttggaacagactcgaatacccagccttcaagtcgtgatcccatctatctcgggacccttctccgcctttttgctgagcacgttcctgattttatgtccctagttctaaatgcacccgcgcaaaagcaacgtctggattcgacctttggtgataagattgagcctctgggctttgatcgattcaagacatgtgaactgatggccgagttgttgcattgtagcaacatggcgctcttgaatgaggttggctcagagcaggtcattgcacaacgtgacgtcgaacgacagcgtctgcgcctagcaggccgtctcgtgtcggcgcgtagcgaagagggccaatcgtctgagaatcttactatgcgcgtgcgccattcctcgcctgatgacagccgtcgccttgaggtaactaatgcttccgatgacgatggcttcgaagaggttacaccatctggcgagatgactgaggatacttcacatgagttcatcaaagctgaagatgagatccctgtcggcacatctgcctccttcttagacaaagatgacgatgaatttgtcgacgaaccacttagttcgccgcgtctacatgtgcaggatgatcatctggacgagactgaattcgagaacccagagcttgtggttgcgccattgtctcctaagaaggtatcgaaagcacaacctgcgcctgctcctgacagcgaaactcaagttgatattcctggagatttacctcttgaaaaggaaggaaaccagattccggaaacggtcgaggacagcaccacacgtccaacaggcgttcaaacaaccatttttgaagtttcaccggatgatacaccgactgtcgagtcttccaccaagactgaagacacagaaatggcgggtgatgaagctgtcaagacgtcgtcagtctctacagagaccaaagccgaagaaccccccgagccttcttctaccacgacagaggcggatgtggcaactgaacctgttcctcagagtgatgtatctgctattattcaagatcacaaagatgccacccacgtctctgcagaacaaccggagccggttgttggcgactacttgaagatgcaatttgtggaaaataaggttgttcctacgatcctgtcattcttcttccgatatccttggaacaacttcttgcacaatgttgtctatgacattgttcaacaagtattcaacggaccgatggaccggggtttcaatcccactcttgccatttcactctttgagaatgcagatatcacaaatgccatcatcaatggacagactgcaagcgaacagtcgcaggctcagagcaagactcgcatgggcttcatgggacacctgaccctgattgccgaggaggtagtcaaattcacagagcgaaatccacctgagcttttgtctgacctcgtattggatcgtgtgatgagccaagactggatcaactatgtcgaaggtgcgctggccgagacccgcgagcgagacaatgccatccttggtggtgtgaggcccgaagttgcaatgagcaatagggcacaaatgggtggcaacggtctcggagggatgggtctctctagtcttggactcggaagtggtcaaggtggcgcatcgaatgctctcgccgaggctggtcttaacgggggcggcggtaatgccatggacgcacctgatcacggcagtggcagtagtcttggaccttttagcatcagttccgggctcctgtctggctctggctttggaagctccagtgatgaggacgaggatgaatcggaagacaacgaagaagacgttaacaatgagttccgcgcctacactgatcctctcaatgcttcatcagggatggacccaccctctattcctcccccgccaccaccacctccgcctctgaacattccgccatcccgtgcccgcctgcagcttgcagctcgactggctatgcatcagaagaccatggctgctagttcttctcagtctgccaatctcgagagcaacgaaggaggcgagggtctcggtgagacgcgtggtattctccgaaacccgttcgaggacgacggtgaagatgaggatgaggacagtgatgacgacctcagcggagagggccaggaacgctatacaggaagctcacgtggcagctggtggcgtgatgcattgaatcgtggccgtgagaggtttggtgatggccgagatgatttagactcggattctgaccgtgagaacccacctggcgcagacgacgatgatgacgagtttggtgacttcgctctccccgaagttggtcaggacggcaagacaggcgtcattgtcaagccgctgcctgttcatcctccccagcacaacaccaagagctcgggatttaccagcctttggccattcggatccaaagagaaaacgaagggcgatgaggctggtgaggggacagatgagcaaccgaatgacgataacgacgagaagatcaaggcgacgcatgaagctacccgtcggacgagcatcgaggaccctgacgaagatgaggttgtcctctaggaaaagataccggctcgtgagaggaaccctgaaagctttgtgcgcgtgcgtcgtcccgtggaccagcccgctgatgatctacctatgctgctgcccactgtctatgtgccgccagtgcagcgacctgtggggcgccctgtcttgcagccaactgccttccggccgcccgacccaaccagcgctgtgaatgcggcaagacgtgggggacgcaattcgcctcgtggacacaggcttactaggagagagtacacccttcaggacgtgaggagattcggacattgagcgcgtgaggtgagtgcgactttgcattgtggcccatggataatggctttacgggatgatgaggattcatgaggttgggcgacatgatgatttgtatcatagaattcaggggttgcttggttgattgcttgatggatatcgacgcaacattttcttcgccttgtcttgtctatagccgatagctcgacggtgaaagaccctgtttgtacagtacgatacctctgggtaaataaatggctactagctttgctgatacgatatcgccgcatgtattcgtgtgtgacgctgatgattgttcccctgcttaaacaatggaaaagacaccagacacaacaacgacatgacactcgatatggatgcagc

SEQ ID NO: 1883 - DNA, 2247 bp, Muscodor strobelii
  misc_feature: SGI cDNA ID NO. 560242
  misc_feature: Encodes the peptide sequence at SEQ ID NO 1884
atgttgagggtcctctcattcatgtggttcatgactattgtggcggggcttcaattacttccgccaccaaacaacacaacagttacgcccggctctggtctctcactgaacgacatcacacctataatttacataagctcacgtctagcctcacatcgcgataccgacggtctgaccctgataccgccgtctggaaaagacttcgcagagacctttctctcagatctgaaccaagcctcgtctcagaaatggacactcaaagttcttgatactctgccaggtacagagggtatctacctgagcattcacaatgacacaagcttgttcacgtacgcaaacgggaagtctacatccgaaggatatactcttagcatatcttcctcaggagctcatatcacgggatctggagcgcggggcatgttctggggcacccggacgttactacagctttatttcacagcaaatgcaacatcgacaataccagcgcagtctatcgccgatgtcccggcgtacgcaacacgcggtttcatgcttgacgcgggacggaaatggtattctccgtcattccttaaagagctatgtagctacgcatcgttctacaagctctccgagttccactatcacacctcagacaactaccccctgaaccgaggtcacaatgagacatggaacaaagtgtactctcagttctctctccgtcccgagagcgatgctctccagggaatcgtgcagcggccaaatgagacactgagccgtgcagacttcgaagatttacaaagtcactgcgccagccgtggcgtaacggtagtcccagagatcgaagccccaggtcattgcctaagcatcacgaaatggaaaccagagctcgcgcttccaaccaaaaaggatctactcaatctcacacatcctgattccataccaacagtgaaggcaatctggaccgagttcctgccctggttccagacaaaagaggttcacatcggcgccgatgagtacgacgcgacactcgcagatgactacatacatttcgtgaatgagatgtccgactgggtaaacagcacatcgggcaagaaagtgcgcatctggggtacatacgagccaccatcaacacctgacctctctatttccaaggacgtggttatacagcattggcaatatggacaatctgaccctgttgagcttgctgcagacggatacgagttcctgaacacagaggactggtgggcgtacatgagtcttaaaaacgaccacatgcccatcttacccgcaccttatccacagttcttcaacgaaacccgagtcctgaacttcggcggccagagcgaatggcaatggagccccgaattattcaatttcgagaatcttaccgaacaggtagactctaccacaaaaggtctcaagggcgcatttcttgcagcttggaacgacaacggaccagatgcctcaacgcaactggaagcgtactgcgctatccgccggggcataccattagtaggcgcaagatcttggtccgggaacgcaggacccgagctcgatgcatcctcggtcgagttctcaatagattttctcggccccttagcaccaactcagaacctagatcgtcgaattcccgggaccggaaaacttatctcctgggcaagtaacacaacgagtactgatgaaatcaagttgggatacggtagcaaaggaatgaactacacgctatccctttccatcacaggtcccttcaccctgtcctcttccgacacgcaacttaccttgtccgattctggcgagctctcattcatagctgacggttggacctatcccctacgctctgtatcagagagcgacggcttcgacccgagtctaccaggccggatatgggccaatgctacaacatcatcacacgaggttgttatactagacatcacaaaatcacaggagttgacaataaccggggatgtgataggtggatctcgcgtctacgttgatggaaaatttatagggcggttcgaggtttatgtgtttggggggaagaatacaattttcagttggagtcagatggctttcgttgcaccccttgagagtgtgaagggtggcgtggcgagtttgggcttgtgggatggagtaaaaataccaatgggaggaagtggaaatggaacggtgattcccgggactggtgatgctgctatgatgagccacggggcaatgggaagcatagtatggctatggattgggttactgagtcttgctgtcagctggtaa

SEQ ID NO: 1884 - protein, 748 aa, Muscodor strobelii
  misc_feature: SGI Peptide ID NO. 560242
  misc_feature (171)..(506): Pfam Id: PF00728 Pfam Desc: Glycosyl hydrolase family 20, catalytic domain
  misc_feature (171)..(399): Pfam Id: PF00728 Pfam Desc: Glycosyl hydrolase family 20, catalytic domain
  misc_feature (7)..(703): NCBI GI: 70988687 Blast Desc: beta-N-hexosaminidase [Aspergillus fumigatus Af293] gi|66846832|gb|EAL87163.1| beta-N-hexosaminidase, [Aspergillus fumigatus Af293] gi|159128614|gb|EDP53728.1| [Aspergillus A1163]
  misc_feature (7)..(700): NCBI GI: 226278765 Blast Desc: conserved [Paracoccidioides brasiliensis Pb01]
  misc_feature (7)..(700): NCBI GI: 226295229 Blast Desc: conserved [Paracoccidioides brasiliensis Pb18]
  misc_feature (7)..(700): NCBI GI: 225677623 Blast Desc: beta-N-acetylhexosaminidase [Paracoccidioides brasiliensis Pb03]
  misc_feature (10)..(705): NCBI GI: 240274589 Blast Desc: glycoside hydrolase [Ajellomyces capsulatus H143]
  misc_feature (12)..(705): NCBI GI: 225561484 Blast Desc: glycoside hydrolase [Ajellomyces capsulatus G186AR]
  misc_feature (1)..(705): NCBI GI: 154282723 Blast Desc: conserved [Ajellomyces capsulatus NAm1] gi|150410337|gb|EDN05725.1| conserved [Ajellomyces capsulatus NAm1]
  misc_feature (10)..(704): NCBI GI: 261194274 Blast Desc: beta-N-hexosaminidase [Ajellomyces dermatitidis SLH14081] gi|239588556|gb|EEQ71199.1| beta-N-hexosaminidase [Ajellomyces dermatitidis SLH14081] gi|239612787|gb|EEQ89774.1|
  misc_feature (7)..(703): NCBI GI: 119497725 Blast Desc: beta-N-hexosaminidase, [Neosartorya fischeri NRRL 181] gi|119413784|gb|EAW23723.1| beta-N-hexosaminidase, [Neosartorya fischeri NRRL 181]
  misc_feature (2)..(734): NCBI GI: 115433198 Blast Desc: conserved [Aspergillus terreus NIH2624] gi|114189588|gb|EAU31288.1| conserved [Aspergillus terreus NIH2624]
MLRVLSFMWFMTIVAGLQLLPPPNNTTVTPGSGLSLNDITPIIYISSRLASHRDTDGLTLIPPSGKDFAETFLSDLNQASSQKWTLKVLDTLPGTEGIYLSIHNDTSLFTYANGKSTSEGYTLSISSSGAHITGSGARGMFWGTRTLLQLYFTANATSTIPAQSIADVPAYATRGFMLDAGRKWYSPSFLKELCSYASFYKLSEFHYHTSDNYPLNRGHNETWNKVYSQFSLRPESDALQGIVQRPNETLSRADFEDLQSHCASRGVTVVPEIEAPGHCLSITKWKPELALPTKKDLLNLTHPDSIPTVKAIWTEFLPWFQTKEVHIGADEYDATLADDYIHFVNEMSDWVNSTSGKKVRIWGTYEPPSTPDLSISKDVVIQHWQYGQSDPVELAADGYEFLNTEDWWAYMSLKNDHMPILPAPYPQFFNETRVLNFGGQSEWQWSPELFNFENLTEQVDSTTKGLKGAFLAAWNDNGPDASTQLEAYCAIRRGIPLVGARSWSGNAGPELDASSVEFSIDFLGPLAPTQNLDRRIPGTGKLISWASNTTSTDEIKLGYGSKGMNYTLSLSITGPFTLSSSDTQLTLSDSGELSFIADGWTYPLRSVSESDGFDPSLPGRIWANATTSSHEVVILDITKSQELTITGDVIGGSRVYVDGKFIGRFEVYVFGGKNTIFSWSQMAFVAPLESVKGGVASLGLWDGVKIPMGGSGNGTVIPGTGDAAMMSHGAMGSIVWLWIGLLSLAVSW

SEQ ID NO: 1885 - DNA, 2456 bp, Muscodor strobelii
  misc_feature: SGI EST ID NO. CUFF.5015.0
  misc_feature: Variant of the nucleotide sequence at SEQ ID NO 1883
ttggaattgatgtagtcccgtgcaacattatgagttataaggcccttgtgatatctaaactcagaaataccacgcctctctcatcaagatacatactttttagtactagagcggcatcatgttgagggtcctctcattcatgtggttcatgactattgtggcggggcttcaattacttccgccaccaaacaacacaacagttacgcccggctctggtctctcactgaacgacatcacacctataatttacataagctcacgtctagcctcacatcgcgataccgacggtctgaccctgataccgccgtctggaaaagacttcgcagagacctttctctcagatctgaaccaagcctcgtctcagaaatggacactcaaagttcttgatactctgccaggtacagagggtatctacctgagcattcacaatgacacaagcttgttcacgtacgcaaacgggaagtctacatccgaaggatatactcttagcatatcttcctcaggagctcatatcacgggatctggagcgcggggcatgttctggggcacccggacgttactacagctttatttcacagcaaatgcaacatcgacaataccagcgcagtctatcgccgatgtcccggcgtacgcaacacgcggtttcatgcttgacgcgggacggaaatggtattctccgtcattccttaaagagctatgtagctacgcatcgttctacaagctctccgagttccactatcacacctcagacaactaccccctgaaccgaggtcacaatgagacatggaacaaagtgtactctcagttctctctccgtcccgagagcgatgctctccagggaatcgtgcagcggccaaatgagacactgagccgtgcagacttcgaagatttacaaagtcactgcgccagccgtggcgtaacggtagtcccagagatcgaagccccaggtcattgcctaagcatcacgaaatggaaaccagagctcgcgcttccaaccaaaaaggatctactcaatctcacacatcctgattccataccaacagtgaaggcaatctggaccgagttcctgccctggttccagacaaaagaggttcacatcggcgccgatgagtacgacgcgacactcgcagatgactacatacatttcgtgaatgagatgtccgactgggtaaacagcacatcgggcaagaaagtgcgcatctggggtacatacgagccaccatcaacacctgacctctctatttccaaggacgtggttatacagcattggcaatatggacaatctgaccctgttgagcttgctgcagacggatacgagttcctgaacacagaggactggtgggcgtacatgagtcttaaaaacgaccacatgcccatcttacccgcaccttatccacagttcttcaacgaaacccgagtcctgaacttcggcggccagagcgaatggcaatggagccccgaattattcaatttcgagaatcttaccgaacaggtagactctaccacaaaaggtctcaagggcgcatttcttgcagcttggaacgacaacggaccagatgcctcaacgcaactggaagcgtactgcgctatccgccggggcataccattagtaggcgcaagatcttggtccgggaacgcaggacccgagctcgatgcatcctcggtcgagttctcaatagattttctcggccccttagcaccaactcagaacctagatcgtcgaattcccgggaccggaaaacttatctcctgggcaagtaacacaacgagtactgatgaaatcaagttgggatacggtagcaaaggaatgaactacacgctatccctttccatcacaggtcccttcaccctgtcctcttccgacacgcaacttaccttgtccgattctggcgagctctcattcatagctgacggttggacctatcccctacgctctgtatcagagagcgacggcttcgacccgagtctaccaggccggatatgggccaatgctacaacatcatcacacgaggttgttatactagacatcacaaaatcacaggagttgacaataaccggggatgtgataggtggatctcgcgtctacgttgatggaaaatttatagggcggttcgaggtttatgtgtttggggggaagaatacaattttcagttggagtcagatggctttcgttgcaccccttgagagtgtgaagggtggcgtggcgagtttgggcttgtgggatggagtaaaaataccaatgggaggaagtggaaatggaacggtgattcccgggactggtgatgctgctatgatgagccacggggcaatgggaagcatagtatggctatggattgggttactgagtcttgctgtcagctggtaaaccaaatgatactcaagctgtaaacgtgcttaatactataagcttctcggccactagagtcatgaatgcgagcgacacacatgattacggg

SEQ ID NO: 1886 - DNA, 996 bp, Muscodor strobelii
  misc_feature: SGI cDNA ID NO. 560243
  misc_feature: Encodes the peptide sequence at SEQ ID NO 1887
atgcccatcttacccgcaccttatccacagttcttcaacgaaacccgagtcctgaacttcggcggccagagcgaatggcaatggagccccgaattattcaatttcgagaatcttaccgaacaggtagactctaccacaaaaggtctcaagggcgcatttcttgcagcttggaacgacaacggaccagatgcctcaacgcaactggaagcgtactgcgctatccgccggggcataccattagtaggcgcaagatcttggtccgggaacgcaggacccgagctcgatgcatcctcggtcgagttctcaatagattttctcggccccttagcaccaactcagaacctagatcgtcgaattcccgggaccggaaaacttatctcctgggcaagtaacacaacgagtactgatgaaatcaagttgggatacggtagcaaaggaatgaactacacgctatccctttccatcacaggtcccttcaccctgtcctcttccgacacgcaacttaccttgtccgattctggcgagctctcattcatagctgacggttggacctatcccctacgctctgtatcagagagcgacggcttcgacccgagtctaccaggccggatatgggccaatgctacaacatcatcacacgaggttgttatactagacatcacaaaatcacaggagttgacaataaccggggatgtgataggtggatctcgcgtctacgttgatggaaaatttatagggcggttcgaggtttatgtgtttggggggaagaatacaattttcagttggagtcagatggctttcgttgcaccccttgagagtgtgaagggtggcgtggcgagtttgggcttgtgggatggagtaaaaataccaatgggaggaagtggaaatggaacggtgattcccgggactggtgatgctgctatgatgagccacggggcaatgggaagcatagtatggctatggattgggttactgagtcttgctgtcagctggtaa

SEQ ID NO: 1887 - protein, 331 aa, Muscodor strobelii
  misc_feature: SGI Peptide ID NO. 560243
  misc_feature (2)..(287): NCBI GI: 261194274 Blast Desc: beta-N-hexosaminidase [Ajellomyces dermatitidis SLH14081] gi|239588556|gb|EEQ71199.1| beta-N-hexosaminidase [Ajellomyces dermatitidis SLH14081] gi|239612787|gb|EEQ89774.1|
  misc_feature (1)..(286): NCBI GI: 70988687 Blast Desc: beta-N-hexosaminidase [Aspergillus fumigatus Af293] gi|66846832|gb|EAL87163.1| beta-N-hexosaminidase, [Aspergillus fumigatus Af293] gi|159128614|gb|EDP53728.1| [Aspergillus A1163]
  misc_feature (2)..(288): NCBI GI: 240274589 Blast Desc: glycoside hydrolase [Ajellomyces capsulatus H143]
  misc_feature (1)..(281): NCBI GI: 238494552 Blast Desc: beta-N-hexosaminidase, [Aspergillus flavus NRRL3357] gi|220695162|gb|EED51505.1| beta-N-hexosaminidase, [Aspergillus flavus NRRL3357]
  misc_feature (1)..(288): NCBI GI: 255951202 Blast Desc: Pc22g24800 [Penicillium chrysogenum Wisconsin 54-1255] gi|211593385|emb|CAP99768.1| Pc22g24800 [Penicillium chrysogenum Wisconsin 54-1255]
  misc_feature (2)..(288): NCBI GI: 225561484 Blast Desc: glycoside hydrolase [Ajellomyces capsulatus G186AR]
  misc_feature (2)..(288): NCBI GI: 154282723 Blast Desc: conserved [Ajellomyces capsulatus NAm1] gi|150410337|gb|EDN05725.1| conserved [Ajellomyces capsulatus NAm1]
  misc_feature (1)..(317): NCBI GI: 115433198 Blast Desc: conserved [Aspergillus terreus NIH2624] gi|114189588|gb|EAU31288.1| conserved [Aspergillus terreus NIH2624]
  misc_feature (1)..(286): NCBI GI: 121711024 Blast Desc: beta-N-hexosaminidase, [Aspergillus clavatus NRRL 1] gi|119401278|gb|EAW11702.1| beta-N-hexosaminidase, [Aspergillus clavatus NRRL 1]
  misc_feature (1)..(283): NCBI GI: 226278765 Blast Desc: conserved [Paracoccidioides brasiliensis Pb01]
MPILPAPYPQFFNETRVLNFGGQSEWQWSPELFNFENLTEQVDSTTKGLKGAFLAAWNDNGPDASTQLEAYCAIRRGIPLVGARSWSGNAGPELDASSVEFSIDFLGPLAPTQNLDRRIPGTGKLISWASNTTSTDEIKLGYGSKGMNYTLSLSITGPFTLSSSDTQLTLSDSGELSFIADGWTYPLRSVSESDGFDPSLPGRIWANATTSSHEVVILDITKSQELTITGDVIGGSRVYVDGKFIGRFEVYVFGGKNTIFSWSQMAFVAPLESVKGGVASLGLWDGVKIPMGGSGNGTVIPGTGDAAMMSHGAMGSIVWLWIGLLSLAVSW

SEQ ID NO: 1888 - DNA, 2456 bp, Muscodor strobelii; identical to SEQ ID NO: 1885
  misc_feature: SGI EST ID NO. CUFF.5015.0
  misc_feature: Variant of the nucleotide sequence at SEQ ID NO 1886

SEQ ID NO: 1889 - DNA, 564 bp, Muscodor strobelii
  misc_feature: SGI cDNA ID NO. 560244
  misc_feature: Reduced expression when VOC is produced
  misc_feature: Encodes the peptide sequence at SEQ ID NO 1890
atgcgcgtggaacggaccggagccgaggacaccggagttgccattcgcttcgaacttattagtctttcggatcgaccccagcccgccagttgtctctcatctgcttcggaggtgtctgccagcccactcccagccttagagggattctggagacaggcagacagtcggttcagcccgtccagacccagcctgcagcaggttgcaacgaagctagcccgcgcaggccagacagacaaccccccggcccagcgcagcagagagagcgcccgagtgatcgtcgctgctaccaccagcctaccgccgctaccaccgctggcaccgctggcactccctgatctgtcgactgtctctggattcccgccactgcccccatcgcgcaccgcaccgcaccgcaccgcaccgcaccgcaccacgctcgcgacagtgccgtatgccgctctcgcgactgtcgctccctcgtcgaccgaaccgttggcccatccaccgctgatcagtcccagttccgtcctgcatgtcgccctcaccacatcgactccagccgctccacgcttcgccatctggtag

SEQ ID NO: 1890 - protein, 187 aa, Muscodor strobelii
  misc_feature: SGI Peptide ID NO. 560244
  misc_feature (59)..(182): NCBI GI: 66570962 Blast Desc: merzoite surface protein 1 [Plasmodium reichenowi]
  misc_feature: Useful for introducing or modulating the production of volatile compounds
MRVERTGAEDTGVAIRFELISLSDRPQPASCLSSASEVSASPLPALEGFWRQADSRFSPSRPSLQQVATKLARAGQTDNPPAQRSRESARVIVAATTSLPPLPPLAPLALPDLSTVSGFPPLPPSRTAPHRTAPHRTTLATVPYAALATVAPSSTEPLAHPPLISPSSVLHVALTTSTPAAPRFAIW

SEQ ID NO: 1891 - DNA, 6756 bp, Muscodor strobelii
  misc_feature: SGI EST ID NO. CUFF.5312.1
  misc_feature: Variant of the nucleotide sequence at SEQ ID NO 1889
agaaaacactcgtattttaaatgataaaaaatcatcttttattcagctcagtctgcagcgactatacggctgcctaccaacgatctacgactaggatagcgttcgacaccttgctcatcggtagacggatactcaaaacctgaaaaccaccagttagtctagtgaaaccacttcaaattcgaagacaaaaacatgatttgaaacgtctaatcagacatccaaggaagtattagccctcatatgcttctcaaaggctctgagtgaagctcgagtggaaactgcgaagtaggtatggaacttttcgtcatatagaccaaggcgcgtgtgtgcttgaatgaaggacttgactcacccgctatgtttgtgcagtttcggggggtgattcttcacatagacggacgtcacgatagagatctgaagacagcgagcatgttagctggggatcaaggaaagacggtgcattatggtagcatggcaacccttccctcacctccgtcgcccagaggacgatgaagacgagagatcagacaaagtatactggcaagtaacaggcaaaagcccgaacagtcgaaacttcttcatggtcgattcggttgggaaaagaagacatattgtatggatgtcatcctaaaaagggaaaatgcagtgattgtaggaaggggtttgaggactcacaaattattcatcacacagcacgcgcaagagagcacgtacctcgaatcgcttaccattgaaatctctgtcactaagagatcgacgcaaagaaatataagtagatgctaatatgcgccgtgccagagattgtgcgcgatgaagagtgaaaaggaaagagtgtgaagagaggacgagactcgctgcaaatttatgaggaaagaggtcgaaatgaagaaaaaatttagtgggacgttggccaggaagctttggtggggtttcactagtacctatatgtacataaggtagatattttgcgcgtccgagtactgaacggttgcgcttaggctcgctgagttcttgaggcttttgtcaccagctggattgtcttgttcatgaagggcgccagcccgacatgactagcccccacctcctcgaagcatccaattcaattcagcccccatgacgttcccattatttggatatcgatagcaaatgtccaatatcgtagctgcgacgtagatgcgacagtacagacgcgatgctaagcttatgcaggtacatgttttaagcaagtccagaaacattataccaagtattgtcaacaagaccaagactaagagttgactattccatactgagtaataaacaacatcaatcaaatagtatgtatgtcttccggctctcgtcagttatgcgagatttattctggacaaagggctgctaactcattgcaggtgaaggcatgcccaggtgattcagatatgtgaggctggagagacagaaagtccgatctccgatgggtatcgccgtgtgaatggctacggtgcacgtcacagcccacaaatccagtccaaaaaaagacggcagcccaccattagagaggcggcagaaggggtcgcatcccacatggtgcacctgtcagtggcaggctctctgcttcagttttgcgacggggatttgcgacgagcccacctctggacggcactcggttttctggccgtcttccatctttctctgcctcctcggaggattcctgaagattccttagtcatccagaccgttcaacgacctgtgtgtttctgacgactacactccctctatgctgttttggtttctagttgattgtcgtatcccgtctatcttagccagtgtcttttggtgttctttgagtatttccattgcttcgaaaccaagagcagaacgtgctggggggaaacgtgcgaggcctgctctatcgcacttaggtagcgccaagagccgcagccatccgctatcttgctgcagcccatctacaattataccacagccctcgaccagatcggcaggatcatcagcaaatgcaactttagagagagaaaagggagacaagaaaggagaagggggaaaacatttttgtgaaaacataatctgatttgattgaacttgatttgacatcacggcggtcttgacagcagaacacggctgttagtggccccggctgagttggtggtctccatctctgaggtgtgccccatccccagccaactgcccaagtcgagagacaggaagcaagaggagaggcgagagggaactgcgacacggaaatacgtaaagtgaacttcttgtcctatccctcttgcaccgttcgaggatctctctcctccaaacactactcatcccacttgctcgctcgtctcatctcgtccgtggatgcgcgtggaacggaccggagccgaggacaccggagttgccattcgcttcgaacttattagtcttcacgcctagatatcattttctcaggtctaagtagcagatatctgatagttgcagtcggatcgaccgtatgtgttccccgtttcagctttgttacccactgtcttccgcctgccagaatccgcccagacattccatctcatcgtccactgctccttttggcgttgctggcctggcgcctgggtgatcttgagtccctgtcaagagcccacttcttcctgccccccggctgacttgacaggccggtagccagcccgccagttgtctctcatctgcttcggaggtgtctgccagcccactcccagccttagagggattctggagacaggcagacagtcggttcagcccgtccagacccagcctgcagcaggttgcaacgaagctagcccgcgcaggccagacagacaaccccccggcccagcgcagcagagagagcgcccgagtgatcgtcgctgctaccaccagcctaccgccgctaccaccgctggcaccgctggcactccctgatctgtcgactgtctctggattcccgcgtctctgatcacaccatccaccaccactcgacatctgcacctcgaccgccggcgatatcccgacctcaacctcctccacctccaccgccgccgtcgtctggtgcctggtttgcttgcttgcttgctttgcctgccttccagcactgcccccatcgcgcaccgcaccgcaccgcaccgcaccgcaccgcaccacgctcgcgacagtgccgtatgccgctctcgcgactgtcgctccctcgtcgaccgaaccgttggcccatccaccgctgatcagtcccagttccgtcctgcatgtcgccctcaccacatcgactccagccgctccacgcttcgccatctggtagactgctggatcactagccacagccgccatcccgacgtccttcgtttgtcttcccgcgtcggcagatcacagcacctggccttgccatcccgtatcgctcccgtcgcatccacacctacgaacacgtctgtggcggctcgtcgcgtttgcgtcgtccactcgtctgtgtctctgcgaatacctgggcttcagtgatttccgcatcgcaccgcatcgcaccgcatcgcatcgcatcgcgtctctgacgaagcagtgacacgactcccgcgcccgccgaaccactggttacatctccatcccctccctggccgatgcaaaggtgcatggtacgtcactagagtgtatcgcgtcagtatccacggctgtggatagtcgaccgtctccgagatgatggcaagcatgggacccgctggtttccatccgggcatgccacagcacggcgtccacccaggccatccgatgggcgcccccggcatggcccacaaccccagccagccaggcacgcaaccaggcatgcccccccagatggccgcccagatggctgcttccggcgccggaggccaggtgaacatgatggccggcatgccccagggagccggcggccccaacgcacacgccatgcaccacctgaacccggtcttccagcagcagggccagccacagtacatggcccagaacccccagatgctcatgcagcagcagcgcatgatcgcacagcggcaggctcagatggcacagatgcaacaccagcagcagcagatgtacgccaacggtggcaacatgcccatgaacatgcagatggccaaccagttccaggccatgaggcagaaccccaacatgcagcgcatgatacccgcacatctccagcagcagctcctccagcaacagggccatgcgacccctcagcagcaacaacttctacaacaccagctcgccatgcagcaacagcaccaggctcagcaagccgccgcgaacaaccagatgcaccaaggcggccagcccggccatcccggtcagatgacaccgcagcaacagcttcagctccaagctcagcagcaagcccagatggcagcacagtccatggcgcaacagatgccgtcgacaacagcagcacagagccagcagccccaacctccgcctccgcaacctcagagccagcctcagccagcgcaacaacaacaacagcaacagccacagccgccgcaaccgcaaggccagcagcaacccggccaacagccaggtcctcaggcccaggcaggacccccgggccctcagagagccgccacgcccgccactacccagagcgcacaaggccagactcagactcccaccacgacccagccaagccaatcgcaacctgctccggcccaggcgcagggtcccaatccgcagccgaaccaagcccagcagcagaatgcccagctcctgcaggcggcgcatcagcagcagcaacttgcgaacctccaggctctggcccagaacaaccaaaagaacggcgagatgatgaaggggcactgcttactgaagcttatgcagttcagtgaacatctcagcggcttcccgggcacaaagaacagagacgacgtgagctactggcacgcgttcgtcaaccagttcttctcgcatcgcggcatcttccgccactccatatctgttaccggctcagatcctgccaatgaagagcacgggacagatgtcaaagtatacgagatcgtcgggccggcactagcgagatatttccacacacacttcacaagtggcataacacaaatgcagttgaccttcgaaaagggcaccgtggataggcccctgcccaatggttgccatttcatcgagaaccaaaagtccaacctgatctactggtttgagaactctcatgtcgtagcatcgggcaccctacgggcccatttcgatgctgagcaaaagctggagcttctggaattcatcactgttggtcacgaggaatacgtctcgaggcgcatggtgatcaacgcagcgagaccaacccacttgtgggccaaggattggaagaaggtcaacggtcaggacgccatgtcgccggagatgaacaagaagggcaagtcgaaggcgatgaaatctccgccgaacccacccccggatttcgtcataccgcactcagccgtcaagggcaacatgggcattaccgagcccgttttccagtacctcgagatcgtcgaggtcatgggtcagatgaacccactatttcaattttgccagacgcaagcaacactgtcaccatatcaagcgctcgagcagtacgtccagacggtggtagcgaatggccaaccccagatgaacggtaacatgcagccaagtcaacggacaccgagtttccaacagttcccaatgggtgcatcccctgccgcctcacatctccagcttcccaactctcctcacatgggaagcccagctcaagttcacatgcaagcgccaggcatgcaagtgcaacatagccagcaaggaacgagctccagtggccccagcgccaatacgagcccggccagcaacaagcgcaggagaccttccaccgtcaaggccgaggaggagagcggtgcgcccacgccagccagcatgggcggtccgcaggtcaatggcgtcgccatggcgggcaagaaacctccaacaccacggatgcaaaagcgacagaagcaaaaccccacgtaggaaggtctggtgtcttattatcgcaacttgtttcccttttcgtcatcatcatcagcatatcggcgtttgactggataggaattatctttggtcctgcttttgcccggtgttgacccggtttgcttgaccacacatcatctatcacctggagcgacgtcaaattcatttcattcggcattcttgaagacattccttgatccggggccacgaccttggcccatccgactgtcccaggcacgttaactaaccactgccgcatactagtggactaattgtatctcgaagcgtggctaggccataagtcacgcgtcgagtagagaacataacacgaaggggttgaaagagagctatcctcgagtttgtatctacctatttgaagaagtcaaggaggagaaataacttaatgctgatgaggaatgtatgaaggaaggctctccatcccgcaaccacacgcaaatgtacgatataccttactgccttcatgtttatctcgagattccatgattttcaaaatcggtgcaaggagtagaggttgttttttccggtctctggggctggcgaggcgagattgtgatggtggggaggtgtgacatcggctcggccaggctctgatttgatataaaagttgctatttcttgttcatactgatcctccgacttgacgtgatggtgatatgcgtacgctcaacgatgactcctttgaggtaaatttgaagaagcctcaagttgtgcaatcaacgtctagctcgttcctaaatactattttcaacatacaacctcgaaaatcgaa

SEQ ID NO: 1892 - DNA, 2298 bp, Muscodor strobelii
  misc_feature: SGI cDNA ID NO. 560245
  misc_feature: Reduced expression when VOC is produced
  misc_feature: Encodes the peptide sequence at SEQ ID NO 1893
atgatggcaagcatgggacccgctggtttccatccgggcatgccacagcacggcgtccacccaggccatccgatgggcgcccccggcatggcccacaaccccagccagccaggcacgcaaccaggcatgcccccccagatggccgcccagatggctgcttccggcgccggaggccaggtgaacatgatggccggcatgccccagggagccggcggccccaacgcacacgccatgcaccacctgaacccggtcttccagcagcagggccagccacagtacatggcccagaacccccagatgctcatgcagcagcagcgcatgatcgcacagcggcaggctcagatggcacagatgcaacaccagcagcagcagatgtacgccaacggtggcaacatgcccatgaacatgcagatggccaaccagttccaggccatgaggcagaaccccaacatgcagcgcatgatacccgcacatctccagcagcagctcctccagcaacagggccatgcgacccctcagcagcaacaacttctacaacaccagctcgccatgcagcaacagcaccaggctcagcaagccgccgcgaacaaccagatgcaccaaggcggccagcccggccatcccggtcagatgacaccgcagcaacagcttcagctccaagctcagcagcaagcccagatggcagcacagtccatggcgcaacagatgccgtcgacaacagcagcacagagccagcagccccaacctccgcctccgcaacctcagagccagcctcagccagcgcaacaacaacaacagcaacagccacagccgccgcaaccgcaaggccagcagcaacccggccaacagccaggtcctcaggcccaggcaggacccccgggccctcagagagccgccacgcccgccactacccagagcgcacaaggccagactcagactcccaccacgacccagccaagccaatcgcaacctgctccggcccaggcgcagggtcccaatccgcagccgaaccaagcccagcagcagaatgcccagctcctgcaggcggcgcatcagcagcagcaacttgcgaacctccaggctctggcccagaacaaccaaaagaacggcgagatgatgaaggggcactgcttactgaagcttatgcagttcagtgaacatctcagcggcttcccgggcacaaagaacagagacgacgtgagctactggcacgcgttcgtcaaccagttcttctcgcatcgcggcatcttccgccactccatatctgttaccggctcagatcctgccaatgaagagcacgggacagatgtcaaagtatacgagatcgtcgggccggcactagcgagatatttccacacacacttcacaagtggcataacacaaatgcagttgaccttcgaaaagggcaccgtggataggcccctgcccaatggttgccatttcatcgagaaccaaaagtccaacctgatctactggtttgagaactctcatgtcgtagcatcgggcaccctacgggcccatttcgatgctgagcaaaagctggagcttctggaattcatcactgttggtcacgaggaatacgtctcgaggcgcatggtgatcaacgcagcgagaccaacccacttgtgggccaaggattggaagaaggtcaacggtcaggacgccatgtcgccggagatgaacaagaagggcaagtcgaaggcgatgaaatctccgccgaacccacccccggatttcgtcataccgcactcagccgtcaagggcaacatgggcattaccgagcccgttttccagtacctcgagatcgtcgaggtcatgggtcagatgaacccactatttcaattttgccagacgcaagcaacactgtcaccatatcaagcgctcgagcagtacgtccagacggtggtagcgaatggccaaccccagatgaacggtaacatgcagccaagtcaacggacaccgagtttccaacagttcccaatgggtgcatcccctgccgcctcacatctccagcttcccaactctcctcacatgggaagcccagctcaagttcacatgcaagcgccaggcatgcaagtgcaacatagccagcaaggaacgagctccagtggccccagcgccaatacgagcccggccagcaacaagcgcaggagaccttccaccgtcaaggccgaggaggagagcggtgcgcccacgccagccagcatgggcggtccgcaggtcaatggcgtcgccatggcgggcaagaaacctccaacaccacggatgcaaaagcgacagaagcaaaaccccacgtag

SEQ ID NO: 1893 - protein, 765 aa, Muscodor strobelii
  misc_feature: SGI Peptide ID NO. 560245
  misc_feature (354)..(764): NCBI GI: 256729228 Blast Desc: NECHADRAFT_105122 [Nectria haematococca mpVI 77-13-4]
  misc_feature (373)..(761): NCBI GI: 116199673 Blast Desc: CHGG_07992 [Chaetomium globosum CBS 148.51] gi|88179271|gb|EAQ86739.1| CHGG_07992 [Chaetomium globosum CBS 148.51]
  misc_feature (367)..(764): NCBI GI: 171688754 Blast Desc: protein product [Podospora anserina] gi|170944339|emb|CAP70449.1| protein product [Podospora anserina]
  misc_feature (371)..(764): NCBI GI: 261354510 Blast Desc: PTAB [Verticillium albo-atrum VaMs.102]
  misc_feature (325)..(763): NCBI GI: 85078878 Blast Desc: NCU01543 [Neurospora crassa OR74A] gi|28917301|gb|EAA27010.1| [Neurospora crassa OR74A]
  misc_feature (325)..(763): NCBI GI: 18376154 Blast Desc: conserved [Neurospora crassa]
  misc_feature (368)..(764): NCBI GI: 154295445 Blast Desc: BC1G_13201 [Botryotinia fuckeliana B05.10] gi|150844069|gb|EDN19262.1| BC1G_13201 [Botryotinia fuckeliana B05.10]
  misc_feature (331)..(764): NCBI GI: 39973593 Blast Desc: MGG_01057 [Magnaporthe grisea 70-15] gi|145017986|gb|EDK02265.1| MGG_01057 [Magnaporthe grisea 70-15]
  misc_feature (368)..(639): NCBI GI: 156048953 Blast Desc: SS1G_08183 [Sclerotinia sclerotiorum 1980] gi|154692582|gb|EDN92320.1| SS1G_08183 [Sclerotinia sclerotiorum 1980]
  misc_feature (373)..(761): NCBI GI: 261195276 Blast Desc: PtaB protein [Ajellomyces dermatitidis SLH14081] gi|239587914|gb|EEQ70557.1| PtaB protein [Ajellomyces dermatitidis SLH14081]
  misc_feature: Useful for introducing or modulating the production of volatile compounds
MMASMGPAGFHPGMPQHGVHPGHPMGAPGMAHNPSQPGTQPGMPPQMAAQMAASGAGGQVNMMAGMPQGAGGPNAHAMHHLNPVFQQQGQPQYMAQNPQMLMQQQRMIAQRQAQMAQMQHQQQQMYANGGNMPMNMQMANQFQAMRQNPNMQRMIPAHLQQQLLQQQGHATPQQQQLLQHQLAMQQQHQAQQAAANNQMHQGGQPGHPGQMTPQQQLQLQAQQQAQMAAQSMAQQMPSTTAAQSQQPQPPPPQPQSQPQPAQQQQQQQPQPPQPQGQQQPGQQPGPQAQAGPPGPQRAATPATTQSAQGQTQTPTTTQPSQSQPAPAQAQGPNPQPNQAQQQNAQLLQAAHQQQQLANLQALAQNNQKNGEMMKGHCLLKLMQFSEHLSGFPGTKNRDDVSYWHAFVNQFFSHRGIFRHSISVTGSDPANEEHGTDVKVYEIVGPALARYFHTHFTSGITQMQLTFEKGTVDRPLPNGCHFIENQKSNLIYWFENSHVVASGTLRAHFDAEQKLELLEFITVGHEEYVSRRMVINAARPTHLWAKDWKKVNGQDAMSPEMNKKGKSKAMKSPPNPPPDFVIPHSAVKGNMGITEPVFQYLEIVEVMGQMNPLFQFCQTQATLSPYQALEQYVQTVVANGQPQMNGNMQPSQRTPSFQQFPMGASPAASHLQLPNSPHMGSPAQVHMQAPGMQVQHSQQGTSSSGPSANTSPASNKRRRPSTVKAEEESGAPTPASMGGPQVNGVAMAGKKPPTPRMQKRQKQNPT

SEQ ID NO: 1894 - DNA, 6756 bp, Muscodor strobelii; identical to SEQ ID NO: 1891
  misc_feature: SGI EST ID NO. CUFF.5312.1
  misc_feature: Variant of the nucleotide sequence at SEQ ID NO 1892

SEQ ID NO: 1895 - DNA, 393 bp, Muscodor strobelii
  misc_feature: SGI cDNA ID NO. 560246
  misc_feature: Encodes the peptide sequence at SEQ ID NO 1896
atgtccgacccacccgcaaacccagctcccccaacctcaacaacatcgacaaacacgacgacgcaagtccaactgaaagcaacatacacctcacccacctccgcccaaaccttctcctcgcccgccctctccctcccacaaactccctcccaatccacaccagcctccatctcacaaaagaagtcctacctctcgactctccgatctcaaaccgcagcccttcaagagcgcatcaacgaggagttgaccaaacagatggagatcgatctgcagaacgacaaagagcaggcggtgaagcagggtgtcaatgggagtggcaagaagagaaaagtggatgaagctgccgaggaagagaattatggggaggaggtcgttgacgaagacgaaatttga

SEQ ID NO: 1896 - protein, 130 aa, Muscodor strobelii
  misc_feature: SGI Peptide ID NO. 560246
  misc_feature (9)..(121): Pfam Id: PF08738 Pfam Desc: Gon7 family
  misc_feature (16)..(128): NCBI GI: 121711597 Blast Desc: conserved [Aspergillus clavatus NRRL 1] gi|119401565|gb|EAW11988.1| conserved [Aspergillus clavatus NRRL 1]
  misc_feature (18)..(129): NCBI GI: 154295449 Blast Desc: BC1G_13203 [Botryotinia fuckeliana B05.10] gi|150844071|gb|EDN19264.1| BC1G_13203 [Botryotinia fuckeliana B05.10]
  misc_feature (25)..(128): NCBI GI: 238482707 Blast Desc: conserved [Aspergillus flavus NRRL3357] gi|220700642|gb|EED56980.1| conserved [Aspergillus flavus NRRL3357]
  misc_feature (25)..(128): NCBI GI: 169766074 Blast Desc: [Aspergillus oryzae RIB40] gi|83765363|dbj|BAE55506.1| protein product [Aspergillus oryzae]
  misc_feature (16)..(128): NCBI GI: 119482994 Blast Desc: NFIA_027020 [Neosartorya fischeri NRRL 181] gi|119409680|gb|EAW19628.1| NFIA_027020 [Neosartorya fischeri NRRL 181]
  misc_feature (24)..(128): NCBI GI: 145237302 Blast Desc: An07g02120 [Aspergillus niger] gi|134075765|emb|CAK48113.1| protein product [Aspergillus niger]
  misc_feature (16)..(128): NCBI GI: 39973597 Blast Desc: [Magnaporthe grisea 70-15] gi|145017989|gb|EDK02268.1| [Magnaporthe grisea 70-15]
  misc_feature (16)..(128): NCBI GI: 146324858 Blast Desc: conserved [Aspergillus fumigatus Af293] gi|129556624|gb|EBA27292.1| conserved [Aspergillus fumigatus Af293] gi|159123299|gb|EDP48419.1| AFUB_091360 [Aspergillus
  misc_feature (25)..(128): NCBI GI: 115399886 Blast Desc: [Aspergillus terreus NIH2624] gi|114191198|gb|EAU32898.1| [Aspergillus terreus NIH2624]
  misc_feature (22)..(126): NCBI GI: 238841602 Blast Desc: conserved [Microsporum canis CBS 113480]
MSDPPANPAPPTSTTSTNTTTQVQLKATYTSPTSAQTFSSPALSLPQTPSQSTPASISQKKSYLSTLRSQTAALQERINEELTKQMEIDLQNDKEQAVKQGVNGSGKKRKVDEAAEEENYGEEVVDEDEI

SEQ ID NO: 1897 - DNA, 3659 bp, Muscodor strobelii
  misc_feature: SGI EST ID NO. CUFF.5011.2
  misc_feature: Variant of the nucleotide sequence at SEQ ID NO 1895
gtcgttttcaagttgtctttgccttgagtgaatgactgggatacgtgatcgactgctaggtagctcggctcccccctggacacatccgaaatccatacctacagctggacaacccctctatcgcgtgtcgtaaacctccatcaaccccaccatcagtatcgacatcatctgcattctcaaccacgcctgcatcgcgccttattgatataaacatccatcgccaaagccgattccagtcttgcacctcaaaactctacgtattcccacgaaccgccctattcaaaccacgatgtccgacccacccgcaaacccagctcccccaacctcaacaacatcgacaaacacgacgacgcaagtccaactgaaagcaacatacacctcacccacctccgcccaaaccttctcctcgcccgccctctccctcccacaaactccctcccaatccacaccagcctccatctcacaaaagaagtcctacctctcgactctccgatctcaaaccgcagcccttcaagagcgcatcaacgaggagttgaccaaacagatggagatcgatctgcagaacgacaaagagcaggcggtgaagcagggtgtcaatgggagtggcaagaagagaaaagtggatgaagctgccgaggaagagaattatggggaggaggtcgttgacgaagacgaaatttgagcatcataggcattttcgccgcgaagaaatgcagatgtgaaggtgcgcggttggagcatagcgtggcatgggagtttgtcaggaggggaaaaagcatggatttgccgtcggacgcttcgcacacgacggctccaggcatccgagagtccggcacacacaatcaaaccatcagaagtcgcatggagccgggtcgaagcgaaccacattgcatctcgacgggacatcaatcgaaacgacgaaaaacctcggtatcatatatatatatatatatgcccaacaagaacaaagcgggtattatcagcaaaattcacaagaaaagactccataaacatgcgacaccgctccatgcttggtaccccgggtactcttattcttccaaattccacacaacttcattccctcacccccttcgaccccaagacccagcaacccgatcccccttcccaccgacactagtcttctgtctgttaagacacccgtaatgcacgacggcattatccggcaacacagcaacaacggtattgcccaccctcttatgacaaaccccacaaacccgctcctcaccaataaccaccctcctattcctgccgccctgcccgcccggcacgccatcgccaagcaatagcagactttgcgtattcaccagctgagtcttgcgtagcgcttcgacgatacgggactcagaaaccacgctgttggccgcacggatgcggccccggaagtaggactctagttccgtcactggtagcttatccggaatcagggaaagggtgcttgtagcgggcagtctggagccgtgacgactgaggagggccaatgcgggctgccagttcggctcatgcggtggttgaggagcaagatataaggagaggagggtgtgatatatagatggcgtctcgtctggatcctctggctctcttgacgttgatgccgtggcgggactaccgtctcttttctcgggcgggagagcgtgtaccgtgttacagtatctgtacctagtcagtatcactgtgacaaataggacagagttggagcagagaacatactcttccgctctcgcatagtcctccatcttgaaaacgtagatttccagcgcttgcttgtgattgcccatgtgttgcaagacaatggcttgcgcctcatagaatgccggatctgtagatctcaatcaatacggatactcgaacacatatctcaattctcaaggggaaaagactgggggcgaacataccattccgcggaatcatgttgaaagtcttggtaagagcatactgtgtactcccctccagaaaaaagacaagtttcttcatcttgtctctccatttctcatctcgatggttttcttccacgcccttcaacgaatcgacaagcaactcgacgagtctattgtggaactctggcgtgccatcactgagctcatggatgatgtgctcgaggtacttgatctcaagctctgtattgattccgcgcagatacgaaatcactttctctcttagaagtgtctcggcgttctccgagtcggcgaggaatacttccatgcccaggtctggatcccgccgtaggacccattccgcgaactcaaggatgaggtctgtcatctccggggacagcgactggaggtatccgattgtacgacgtggaccgcgaagttgttctggtatctcaacttgctgaggcgcatcatcgccattgctgatcttggtggtgtccccatcaggcggtagatcaccaaacttcttgagcaaagtgagagcatcgcggtggagtttcttcccgtagaagaaatccacgagctcattgtatctattatgttctagcagcttctcatttacgaccgccgggtcgcaaaaattaggaatgcggaacagcgagggcgcgagggaaggctggctgaacatgtagcccctgaacagagtcgtgtcgacgagcgtgaatgcctttctgagctcctcttccaactgctcctctgactcggagcgatggcgggatgtcaagagtgcgtcaagattctcgtcggtgctggaagaatgcgccatacccggtgtgattttccgtgggcgaagcttgcctgtctccggatcgatgactcgctgtagtcgggctctcgtgcccgcaaggaagctgttcaattcacgtaccgctttgatcagttcagctccgtccagcgggcccttttcttccggctttttgggtttgggcttgatgctggcggcatcgtcattgtctggtttcgacgaggcgatagatgcagcgtcggaatcggctttgcgatgacctcctatccaatacttggcgaagcctcccgctccgcccttagctggcgaggcgacctctggattgatctcggcctttgtgtctttggtctcggaactcgtctccccttcatctggcgtactgtcttcctcttctggcgtctcctctcgctgcgactcggtcgataaatcaccagcgatgatcttggggtacaacctcaggactctctcgggaggcgcatgcacatcgtcttcattgaacagatccaagctctggcggaacttcctctgcttgaagagagcttcagccttcaacatcttgacctcgcgcattgtccccgtcttgtccttgagcagggcatcttcaagcatgcccaagacgctgatggcctcgtcgtattttgccttgtcgatgagctcctggacctgggtatcgtagtcggtggcgtccatcttccagactgcccggtcgctgcttatgtggaagcctttgccggcatgtgctaggctgtaggtgggaggcgggaagtgcagctgtgcggcgccggcgaggtcgattgtctgcagcaggttgagggtctcggggttccggacctcgagggagcccttggtcgggggctggagggcgaggatgtaggggtagctgtagccgatgttctcgggggcgctctgccaggggatctggcgcttgtcgaggggcttgccgtcggtgtcgacgaacatgg

SEQ ID NO: 1898 - DNA, 333 bp, Muscodor strobelii
  misc_feature: SGI cDNA ID NO. 560247
  misc_feature: Encodes the peptide sequence at SEQ ID NO 1899
atgggctttttcaaggctctattcagctgctttgtcccccgggacaagaaaatcaagaacattgagcaccacggcttcgaagatcatcggtcggggttcgacacggtccaggagcaaggcgtgaagaacgctgagcgcatggtccgagagcgtagagaacgcattgtgcgagaccgtgaagagagagaaaacaaccgctggagggatagcggtattcgaccacctcctcctgtcccagaggccggatggaaatcgcttcgtcgacctccacctcaaggtccacaagtttctaggccatatcgtccgcaagatcaggcctggtgggagaaatag

SEQ ID NO: 1899 - protein, 110 aa, Muscodor strobelii
  misc_feature: SGI Peptide ID NO. 560247
MGFFKALFSCFVPRDKKIKNIEHHGFEDHRSGFDTVQEQGVKNAERMVRERRERIVRDREERENNRWRDSGIRPPPPVPEAGWKSLRRPPPQGPQVSRPYRPQDQAWWEK

SEQ ID NO: 1900 - DNA, 294 bp, Muscodor strobelii
  misc_feature: SGI cDNA ID NO. 560248
  misc_feature: Reduced expression when VOC is produced
  misc_feature: Encodes the peptide sequence at SEQ ID NO 1901
atgctcggcagaaacagcaaagctgaagtccagcctgatggcacgaccacgaacgtcaccaagtctggcgagaagcttaagggtgacttccaaggtgctgtacacaagaccgtcggttccatgcaagctgcaaccggcgcagccacgagaaacgacaatttgcatcaacagggccttcagaagatgcaggaggaagaccagcgtatcggtgccaagcacggtgtcatgcctgtcggctcaagcttgagagaaaaggccactggtgtccccgaaacccaggcaaagccaaactaa

SEQ ID NO: 1901 - protein, 97 aa, Muscodor strobelii
  misc_feature: SGI Peptide ID NO. 560248
  misc_feature: Useful for introducing or modulating the production of volatile compounds
MLGRNSKAEVQPDGTTTNVTKSGEKLKGDFQGAVHKTVGSMQAATGAATRNDNLHQQGLQKMQEEDQRIGAKHGVMPVGSSLREKATGVPETQAKPN

SEQ ID NO: 1902 - DNA, 1695 bp, Muscodor strobelii
  misc_feature: SGI cDNA ID NO. 560249
  misc_feature: Reduced expression when VOC is produced
  misc_feature: Encodes the peptide sequence at SEQ ID NO 1903
atggcgagcagcacttttgagactgaaggcgtccgcgtcgcagtagagggatgcggccacggaacactcgatgccatatatgcctcagtagctcgagccagcaaagcacgcggctgggatggcgtggacctcctcatcatcggcggagactttgaagcagttcgcaatgcagctgacctctcagtcatgtctgtgcccgccaagtacagagagctaggtgatttcccagcatactacagcgggcagaagacagcaccctacctgacgatcttcatcgccggaaatcacgaggctagctcgtatctctgggagctgtactacggaggctgggtcgcgccgaatatctactatcttggcgctgcgaatgtgctacgctttggtccactgcgcatcgctggaatgagtggcatttggaagggtttcgattatcgcaaaccgcaccatgaacggcttccattcagccaggacgatatcaaaagcttttaccatgtccgtgagattgacattcgcaagctcttgctactgagagaacaggttgatgtaggattgagtcacgattggccaagagctatcgagaaccatggtgacgctgctgccttatggcgaatgaaaccggattttagacaagagagcatcgatgggacgttgggcaacccggcagcggagtatgtgatggatcgactgaggccggcatattggttttcggcgcatatgcattgcaaatttgctgcgatcaagacatatcagcagccagctactggcgaggttccagcagagaagaatccccagccagctgctccgcctgtcactacagagcctgagcagcctgctggaaacccagatgagatcgatctagacgacgacacggacgacacagcagacataaaactagtccagaccgaagcaccaaagccgccatcacagccacctacagccgcatcatcaataccagacgacctccgcgcacaacttccagcatctttcgcagcgcccgccaagaccggtccaaagctcaacccaggccaacccgtcccacccaccattacaaacacaacaacgcgcttcctcgcgctcgataaatgtctcccgggccgtaaatttatccagctcagcggtttgctgcctgtctcctcctctgatctcacactctaccccccagccaactccacacagcgcttcaaactatcctacgaccctgaatggctagccataacgcgagtcttcgccaaagaactcacaatcggcgaatctgctaccgtatctacagacttgggcgaggaggcgtacgtaccgcttattgacgcagagcgcaaatgggtggaagaacacatcgtcgcaccaggacaactcgcagtgccggagaatttcgagatcactgccccgccacacgttgatggagagccggagaccgtgaactatcagccggaggagtatacgaacccacagactacagcattctgcgagcttgttggtgtcccaaatatatgggatgcgagccccgaggagagggctgagaggaaggcgaagggtccaccggctaatgcggagaggagaggtgggtttggcggcggaggtggtagaggaggacggggtggcgggagaggcggacgaggtggtgctggtggatttggaggacggggacgaggatttggtagaggccggggtcgaggaggtgccagaggtggttggcattga

SEQ ID NO: 1903 - protein, 564 aa, Muscodor strobelii
  misc_feature: SGI Peptide ID NO. 560249
  misc_feature (344)..(500): Pfam Id: PF05011 Pfam Desc: Lariat debranching enzyme, C-terminal domain
  misc_feature (11)..(241): Pfam Id: PF00149 Pfam Desc: Calcineurin-like phosphoesterase
  misc_feature (344)..(406): Pfam Id: PF05011 Pfam Desc: Lariat debranching enzyme, C-terminal domain
  misc_feature (1)..(517): NCBI GI: 46105348 Blast Desc: FG00302.1 [Gibberella zeae PH-1]
  misc_feature (1)..(512): NCBI GI: 116199909 Blast Desc: CHGG_08110 [Chaetomium globosum CBS 148.51] gi|88179389|gb|EAQ86857.1| CHGG_08110 [Chaetomium globosum CBS 148.51]
  misc_feature (4)..(517): NCBI GI: 85082132 Blast Desc: NCU03409 [Neurospora crassa OR74A] gi|18376344|emb|CAD21122.1| related to lariat-debranching enzyme [Neurospora crassa] gi|28917935|gb|EAA27620.1| conserved crassa
  misc_feature (1)..(511): NCBI GI: 156060135 Blast Desc: SS1G_02206 [Sclerotinia sclerotiorum 1980] gi|154699614|gb|EDN99352.1| SS1G_02206 [Sclerotinia sclerotiorum 1980]
  misc_feature (11)..(503): NCBI GI: 171689916 Blast Desc: protein product [Podospora anserina] gi|170944920|emb|CAP71031.1| protein product [Podospora anserina]
  misc_feature (1)..(516): NCBI GI: 261353009 Blast Desc: lariat debranching enzyme [Verticillium albo-atrum VaMs.102]
  misc_feature (6)..(511): NCBI GI: 169772671 Blast Desc: [Aspergillus oryzae RIB40] gi|83768665|dbj|BAE58802.1| protein product [Aspergillus oryzae]
  misc_feature (2)..(517): NCBI GI: 189189586 Blast Desc: lariat debranching enzyme [Pyrenophora tritici-repentis Pt-1C-BFP] gi|187972738|gb|EDU40237.1| lariat debranching enzyme [Pyrenophora tritici-repentis Pt-1C-BFP]
  misc_feature (1)..(492): NCBI GI: 154315459 Blast Desc: BC1G_04302 [Botryotinia fuckeliana B05.10] gi|150847242|gb|EDN22435.1| BC1G_04302 [Botryotinia fuckeliana B05.10]
  misc_feature (65)..(517): NCBI GI: 169608195 Blast Desc: SNOG_07165 [Phaeosphaeria nodorum SN15] gi|160701587|gb|EAT85816.2| SNOG_07165 [Phaeosphaeria nodorum SN15]
  misc_feature: Useful for introducing or modulating the production of volatile compounds
MASSTFETEGVRVAVEGCGHGTLDAIYASVARASKARGWDGVDLLIIGGDFEAVRNAADLSVMSVPAKYRELGDFPAYYSGQKTAPYLTIFIAGNHEASSYLWELYYGGWVAPNIYYLGAANVLRFGPLRIAGMSGIWKGFDYRKPHHERLPFSQDDIKSFYHVREIDIRKLLLLREQVDVGLSHDWPRAIENHGDAAALWRMKPDFRQESIDGTLGNPAAEYVMDRLRPAYWFSAHMHCKFAAIKTYQQPATGEVPAEKNPQPAAPPVTTEPEQPAGNPDEIDLDDDTDDTADIKLVQTEAPKPPSQPPTAASSIPDDLRAQLPASFAAPAKTGPKLNPGQPVPPTITNTTTRFLALDKCLPGRKFIQLSGLLPVSSSDLTLYPPANSTQRFKLSYDPEWLAITRVFAKELTIGESATVSTDLGEEAYVPLIDAERKWVEEHIVAPGQLAVPENFEITAPPHVDGEPETVNYQPEEYTNPQTTAFCELVGVPNIWDASPEERAERKAKGPPANAERRGGFGGGGGRGGRGGGRGGRGGAGGFGGRGRGFGRGRGRGGARGGWH

SEQ ID NO: 1904 - DNA, 3218 bp, Muscodor strobelii
  misc_feature: SGI EST ID NO. CUFF.5007.0
  misc_feature: Variant of the nucleotide sequence at SEQ ID NO 1902
gagtataccaggcatcttgatatcaaaattcggaaagcgtgtcatggtgcttagaagttgcgatgttgaggttctaggcatttcatactgctgcgacccactaaaatttgctgaaaccaacctgacctcaaccaagcttcatctctgaacactcaatcaatgcctaccaaccacccaccactggatgccatggcctcgattagtcttaaccgaacctgaaatgaagtgagagcggtcctcttctcactcactcagacaagccaggttgctgcgaccttctcaatggcgagcagcacttttgagactgaaggcgtccgcgtcgcagtagagggatgcggccacggaacactcgatgccatatatgcctcagtagctcgagccagcaaagcacgcggctgggatggcgtggacctcctcatcatcggcggagactttgaagcagttcgcaatgcagctgacctctcagtcatgtctgtgcccgccaagtacagagagctaggtgatttcccagcatactacagcgggcagaagacagcaccctacctgacgatcttcatcgccggaaatcacgaggctagctcgtatctctgggagctgtactacggaggctgggtcgcgccgaatatctactatcttggcgctgcgaatgtgctacgctttggtccactgcgcatcgctggaatgagtggcatttggaagggtttcgattatcgcaaaccgcaccatgaacggcttccattcagccaggacgatatcaaaagcttttaccatgtccgtgagattgacattcgcaagctcttgctactgagagaacaggttgatgtaggattgagtcacgattggccaagagctatcgagaaccatggtgacgctgctgccttatggcgaatgaaaccggattttagacaagagagcatcgatgggacgttgggcaacccggcagcggagtatgtgatggatcgactgaggccggcatattggttttcggcgcatatgcattgcaaatttgctgcgatcaagacatatcagcagccagctactggcgaggttccagcagagaagaatccccagccagctgctccgcctgtcactacagagcctgagcagcctgctggaaacccagatgagatcgatctagacgacgacacggacgacacagcagacataaaactagtccagaccgaagcaccaaagccgccatcacagccacctacagccgcatcatcaataccagacgacctccgcgcacaacttccagcatctttcgcagcgcccgccaagaccggtccaaagctcaacccaggccaacccgtcccacccaccattacaaacacaacaacgcgcttcctcgcgctcgataaatgtctcccgggccgtaaatttatccagctcagcggtttgctgcctgtctcctcctctgatctcacactctaccccccagccaactccacacagcgcttcaaactatcctacgaccctgaatggctagccataacgcgagtcttcgccaaagaactcacaatcggcgaatctgctaccgtatctacagacttgggcgaggaggcgtacgtaccgcttattgacgcagagcgcaaatgggtggaagaacacatcgtcgcaccaggacaactcgcagtgccggagaatttcgagatcactgccccgccacacgttgatggagagccggagaccgtgaactatcagccggaggagtatacgaacccacagactacagcattctgcgagcttgttggtgtcccaaatatatgggatgcgagccccgaggagagggctgagaggaaggcgaagggtccaccggctaatgcggagaggagaggtgggtttggcggcggaggtggtagaggaggacggggtggcgggagaggcggacgaggtggtgctggtggatttggaggacggggacgaggatttggtagaggccggggtcgaggaggtgccagaggtggttggcattgagaaaggcgtgattattgatatctctgtctctttggcatgtcgatgaggtatgttgactgctgatgtgtgttacatcttgggcatgtgacggggacatgattgctagagaagtcatatttgagcggacctgtcgtgtcacatcaccatcaccgtgaagtgggaatttgataactgtattactactacctgaagaatgtccatagcctaacctcgctgaatatgactgtattattaactttatgtgatgtatcccctcctaaaaagcatgatctccacggagtaacatgaggcacgcagagtgcgggggacgaatatatcaatcttccatccatattagacattcaacccacggagcgagattgggttgaacgtatatgctaagatgggatttcgggacgtggcgaaagaagtaaaccagatacttagacttgccgaagtcaccctgaacttacgatatgggcttgatgaacgtattaagatagaccctcgatggtcttgttcacattaacgccagttgtcctactcttttcttgtctatccgactgaagacatcatatcgtggtatcaccgtaatcatttccgagcaactgaaggccatgaacgccaaacctaacctcgaaacgccaaccatttaccgtgtacaagctacacaatacaataaaggatatcatcagttacgttcacgctgatgcttgtcccataccttcagcttctcgttagccttttctgctgtgtaggggtgaccttctacctcccactagggcggatagacctcctccttcccactgggatagatgaacttgtgacgtcttctttctcactagagcttgaagtcttcgtcgccatcgtcatcatctttctgattctcttcatagtacttgggttcgcgaagagaatcattgcggagggttcgttgggcttcttgttcttttgtcagggtgaccttacgatccattccaagatagtctgcagcgacgagcagctccagacagagttcgactgggatctccatgtcggggacaccttctgagttgcggtacttgtaccagtattggaaatactcgacgatcttctcaagcaccatgccactagaaagtgagacaccagtcagctccaggactcaggagtgagaggcgatgagggagatgggatgtgagaggaaagtgtcagatcaagtgtagttggtgtcatgtagaccaacccgtgagggggtccatcagtaagaacacagcgaaatattg

SEQ ID NO: 1905 - DNA, 435 bp, Muscodor strobelii
  misc_feature: SGI cDNA ID NO. 560250
  misc_feature: Encodes the peptide sequence at SEQ ID NO 1906
atggcttcttctagctcgcagagcaagtacgtcacgctggtgtcttgcgacgacttcgaattcactgttctgcgcgaggcctgcatgatcagcccggctatcaagggaatgctaggaaacccattctccgagggtaagactggtcgctgtgtcttttcagaccttagtggcatggtgcttgagaagatcgtcgagtatttccaatactggtacaagtaccgcaactcagaaggtgtccccgacatggagatcccagtcgaactctgtctggagctgctcgtcgctgcagactatcttggaatggatcgtaaggtcaccctgacaaaagaacaagaagcccaacgaaccctccgcaatgattctcttcgcgaacccaagtactatgaagagaatcagaaagatgatgacgatggcgacgaagacttcaagctctag

SEQ ID NO: 1906 - protein, 144 aa, Muscodor strobelii
  misc_feature: SGI Peptide ID NO. 560250
  misc_feature (9)..(72): Pfam Id: PF03931 Pfam Desc: Skp1 family, tetramerisation domain
  misc_feature (9)..(66): Pfam Id: PF03931 Pfam Desc: Skp1 family, tetramerisation domain
  misc_feature (8)..(103): NCBI GI: 46105350 Blast Desc: FG00303.1 [Gibberella zeae PH-1]
  misc_feature (3)..(104): NCBI GI: 85082120 Blast Desc: NCU03406 [Neurospora crassa OR74A] gi|18376341|emb|CAD21119.1| related to Elongin C transcription elongation factor [Neurospora crassa] gi|28917932|gb|EAA27617.1|
  misc_feature (8)..(103): NCBI GI: 256734627 Blast Desc: [Nectria haematococca mpVI 77-13-4]
  misc_feature (6)..(106): NCBI GI: 116199907 Blast Desc: CHGG_08109 [Chaetomium globosum CBS 148.51] gi|88179388|gb|EAQ86856.1| CHGG_08109 [Chaetomium globosum CBS 148.51]
  misc_feature (2)..(103): NCBI GI: 39943782 Blast Desc: MGG_03902 [Magnaporthe grisea 70-15] gi|145014603|gb|EDJ99171.1| MGG_03902 [Magnaporthe grisea 70-15]
  misc_feature (6)..(104): NCBI GI: 171689920 Blast Desc: protein product [Podospora anserina] gi|170944922|emb|CAP71033.1| protein product [Podospora anserina]
  misc_feature (2)..(99): NCBI GI: 154311887 Blast Desc: [Botryotinia fuckeliana B05.10] gi|150850627|gb|EDN25820.1| [Botryotinia fuckeliana B05.10]
  misc_feature (3)..(99): NCBI GI: 156060503 Blast Desc: [Sclerotinia sclerotiorum 1980] gi|154699798|gb|EDN99536.1| [Sclerotinia sclerotiorum 1980]
  misc_feature (1)..(99): NCBI GI: 169772651 Blast Desc: [Aspergillus oryzae RIB40] gi|238490566|ref|XP_002376520.1| transcriptional elongation regulator Elc1/Elongin C, [Aspergillus flavus NRRL3357] protein
  misc_feature (2)..(99): NCBI GI: 119471511 Blast Desc: transcriptional elongation regulator (Elongin C), [Neosartorya fischeri NRRL 181] gi|119406331|gb|EAW16282.1| transcriptional elongation regulator (Elongin C), [Neosartorya
MASSSSQSKYVTLVSCDDFEFTVLREACMISPAIKGMLGNPFSEGKTGRCVFSDLSGMVLEKIVEYFQYWYKYRNSEGVPDMEIPVELCLELLVAADYLGMDRKVTLTKEQEAQRTLRNDSLREPKYYEENQKDDDDGDEDFKL

SEQ ID NO: 1907 - DNA, 3164 bp, Muscodor strobelii
  misc_feature: SGI EST ID NO. CUFF.5008.1
  misc_feature: Variant of the nucleotide sequence at SEQ ID NO 1905
ccacgcaaagctccaacaatccatgccctggccaaattttctttcaactagaaaacagcaagtttctctcaccttctttatgctcatgaagtgaagtcatgtgctgaacctcaagcactcgaccacagccgtactcatctatcactgttagagtcattgactgctttgtcgctctcaagatggcttcttctagctcgcagagcaagtacgtcacgctggtgtcttgcgacgacttcgaattcactgttctgcgcgaggcctgcatgatcagcccggctatcaagggaatgctaggaaacccattctccgagggtaagactggtcgctgtgtcttttcagaccttagtggcatggtgcttgagaagatcgtcgagtatttccaatactggtacaagtaccgcaactcagaaggtgtccccgacatggagatcccagtcgaactctgtctggagctgctcgtcgctgcagactatcttggaatggatcgtatgggacaagcatcagcgtgaacgtaactgatgatatcctttattgtattgtgtagcttgtacacggtaaatggttggcgtttcgaggttaggtttggcgttcatggccttcagttgctcggaaatgattacggtgataccacgatatgatgtcttcagtcggatagacaagaaaagagtaggacaactggcgttaatgtgaacaagaccatcgagggtctatcttaatacgttcatcaagcccatatcgtaagttcagggtgacttcggcaagtctaagtatctggtttacttctttcgccacgtcccgaaatcccatcttagcatatacgttcaacccaatctcgctccgtgggttgaatgtctaatatggatggaagattgatatattcgtcccccgcactctgcgtgcctcatgttactccgtggagatcatgctttttaggaggggatacatcacataaagttaataatacagtcatattcagcgaggttaggctatggacattcttcaggtagtagtaatacagttatcaaattcccacttcacggtgatggtgatgtgacacgacaggtccgctcaaatatgacttctctagcaatcatgtccccgtcacatgcccaagatgtaacacacatcagcagtcaacatacctcatcgacatgccaaagagacagagatatcaataatcacgcctttctcaatgccaaccacctctggcacctcctcgaccccggcctctaccaaatcctcgtccccgtcctccaaatccaccagcaccacctcgtccgcctctcccgccaccccgtcctcctctaccacctccgccgccaaacccacctctcctctccgcattagccggtggacccttcgccttcctctcagccctctcctcggggctcgcatcccatatatttgggacaccaacaagctcgcagaatgctgtagtctgtgggttcgtatactcctccggctgatagttcacggtctccggctctccatcaacgtgtggcggggcagtgatctcgaaattctccggcactgcgagttgtcctggtgcgacgatgtgttcttccacccatttgcgctctgcgtcaataagcggtacgtacgcctcctcgcccaagtctgtagatacggtagcagattcgccgattgtgagttctttggcgaagactcgcgttatggctagccattcagggtcgtaggatagtttgaagcgctgtgtggagttggctggggggtagagtgtgagatcagaggaggagacaggcagcaaaccgctgagctggataaatttacggcccgggagacatttatcgagcgcgaggaagcgcgttgttgtgtttgtaatggtgggtgggacgggttggcctgggttgagctttggaccggtcttggcgggcgctgcgaaagatgctggaagttgtgcgcggaggtcgtctggtattgatgatgcggctgtaggtggctgtgatggcggctttggtgcttcggtctggactagttttatgtctgctgtgtcgtccgtgtcgtcgtctagatcgatctcatctgggtttccagcaggctgctcaggctctgtagtgacaggcggagcagctggctggggattcttctctgctggaacctcgccagtagctggctgctgatatgtcttgatcgcagcaaatttgcaatgcatatgcgccgaaaaccaatatgccggcctcagtcgatccatcacatactccgctgccgggttgcccaacgtcccatcgatgctctcttgtctaaaatccggtttcattcgccataaggcagcagcgtcaccatggttctcgatagctcttggccaatcgtgactcaatcctacatcaacctgttctctcagtagcaagagcttgcgaatgtcaatctcacggacatggtaaaagcttttgatatcgtcctggctgaatggaagccgttcatggtgcggtttgcgataatcgaaacccttccaaatgccactcattccagcgatgcgcagtggaccaaagcgtagcacattcgcagcgccaagatagtagatattcggcgcgacccagcctccgtagtacagctcccagagatacgagctagcctcgtgatttccggcgatgaagatcgtcaggtagggtgctgtcttctgcccgctgtagtatgctgggaaatcacctagctctctgtacttggcgggcacagacatgactgagaggtcagctgcattgcgaactgcttcaaagtctccgccgatgatgaggaggtccacgccatcccagccgcgtgctttgctggctcgagctactgaggcatatatggcatcgagtgttccgtggccctgaggtagttagtatccgaaaacggcattggccggaaatcagtatgagatactcacgcatccctctactgcgacgcggacgccttcagtctcaaaagtgctgctcgccattgagaaggtcgcagcaacctggcttgtctgagtgagtgagaagaggaccgctctcacttcatttcaggttcggttaagactaatcgaggccatggcatccagtggtgggtggttggtaggcattgattgagtgttcagagatgaagcttggttgaggtcaggttggtttcagcaaattttagtgggtcgcagcagtatgaaatgcctagaacctcaacatcgc

SEQ ID NO: 1908 - DNA, 882 bp, Muscodor strobelii
  misc_feature: SGI cDNA ID NO. 560251
  misc_feature: Encodes the peptide sequence at SEQ ID NO 1909
atggcgcatgcccaatatcgaagctcccagtacgtcaacagcaatacagacagatacgacagcggcctgcagcgcaaccccacagatcgtcgtaacatgaggtccagtgagggcaccgtcagcacaaccatgagctcatcgacaggcagagagtcgtcggcgacgcacatgaccgaggcacccgcctactccaagaagattgtcgtcgttggcgacggtggatgtggaaagacatgcttgttgatcagctatagccagggctatttccccgaaaaatacgtcccaacagtcttcgagaactacatcacataccccacacaccaacagagcggcaagacggtcgagctcgcgctgtgggacaccgctggacaggaggaatacgacagattacgaccgctttcctaccccgagacagacttgatcttcgtctgctttgccattgactgtccaaactcattagacaacgtactcgacaagtggtacccagaagtcctccatttctgtccctacacgcccctaatcctcgtgggcctcaagtccgacctacgacacaaaaagacctgcatcgagatgctcaaaacacaaggtctgacaccggttacgacgcaacagggcgaagcagtcgcgcgaaagatgaacgcgcagtacatggagtgctcgtccaaggacatggtcggcgtcgacgagatcttcgaccgcgcgattcacaccgtcgtcagtaacgatcggaagaatctagaggctgcgatggcggctgcgcctagctcgagtaaggctgagaagagagcggcgtccggtgggagtggaggggcgggtgtgggaggcgtgggcttcccgggtgttaggggtcttaagaagaagaggaaatgtaactttttgtga

SEQ ID NO: 1909 - protein, 293 aa, Muscodor strobelii
  misc_feature: SGI Peptide ID NO. 560251
  misc_feature (66)..(181): Pfam Id: PF08477 Pfam Desc: Miro-like protein
  misc_feature (66)..(240): Pfam Id: PF00071 Pfam Desc: Ras family
  misc_feature (2)..(252): NCBI GI: 145606983 Blast Desc: conserved [Magnaporthe grisea 70-15] gi|145014602|gb|EDJ99170.1| conserved [Magnaporthe grisea 70-15]
  misc_feature (5)..(293): NCBI GI: 171689922 Blast Desc: protein product [Podospora anserina] gi|170944923|emb|CAP71034.1| protein product [Podospora anserina]
  misc_feature (8)..(293): NCBI GI: 256735354 Blast Desc: [Nectria haematococca mpVI 77-13-4]
  misc_feature (34)..(293): NCBI GI: 46105352 Blast Desc: FG00304.1 [Gibberella zeae PH-1]
  misc_feature (57)..(293): NCBI GI: 116199905 Blast Desc: conserved [Chaetomium globosum CBS 148.51] gi|88179387|gb|EAQ86855.1| conserved [Chaetomium globosum CBS 148.51]
  misc_feature (24)..(245): NCBI GI: 119477538 Blast Desc: Rho GTPase Rho4, [Neosartorya fischeri NRRL 181] gi|119407429|gb|EAW17378.1| Rho GTPase Rho4, [Neosartorya fischeri NRRL 181]
  misc_feature (57)..(293): NCBI GI: 156060089 Blast Desc: SS1G_02182 [Sclerotinia sclerotiorum 1980] gi|154699591|gb|EDN99329.1| SS1G_02182 [Sclerotinia sclerotiorum 1980]
  misc_feature (32)..(293): NCBI GI: 115399408 Blast Desc: protein rho4 [Aspergillus terreus NIH2624] gi|114192176|gb|EAU33876.1| protein rho4 [Aspergillus terreus NIH2624]
  misc_feature (24)..(293): NCBI GI: 121714146 Blast Desc: Rho GTPase Rho4, [Aspergillus clavatus NRRL 1] gi|119402837|gb|EAW13258.1| Rho GTPase Rho4, [Aspergillus clavatus NRRL 1]
  misc_feature (24)..(245): NCBI GI: 70996993 Blast Desc: Rho GTPase Rho4 [Aspergillus fumigatus Af293] gi|66850887|gb|EAL91213.1| Rho GTPase Rho4, [Aspergillus fumigatus Af293] gi|159127021|gb|EDP52137.1| Rho GTPase Rho4,
MAHAQYRSSQYVNSNTDRYDSGLQRNPTDRRNMRSSEGTVSTTMSSSTGRESSATHMTEAPAYSKKIVVVGDGGCGKTCLLISYSQGYFPEKYVPTVFENYITYPTHQQSGKTVELALWDTAGQEEYDRLRPLSYPETDLIFVCFAIDCPNSLDNVLDKWYPEVLHFCPYTPLILVGLKSDLRHKKTCIEMLKTQGLTPVTTQQGEAVARKMNAQYMECSSKDMVGVDEIFDRAIHTVVSNDRKNLEAAMAAAPSSSKAEKRAASGGSGGAGVGGVGFPGVRGLKKKRKCNFL

SEQ ID NO: 1910 - DNA, 2133 bp, Muscodor strobelii
  misc_feature: SGI EST ID NO. CUFF.5178.0
  misc_feature: Variant of the nucleotide sequence at SEQ ID NO 1908
caagcgggcgttgccctgccgactgtattgacctctgacgaaatgcatgattcgaccttcagcagcgtctgtacaccttgaatacgaccgtcatcccagtcgagtcagccgtcacaaagcccaattgactttactaccctgcaactgttttcatttccaccgccttcctccatcaccgcaattcgtgccctctaccctcatgcgactcaacttcccgactgtttctttttgatttcctcccactcaaaaagtcttacctccattccgcaccaccacctcaatctatcaatacgagtataggtagtaacagtacctattttccaacacccgcccattgagcttcttagagtacatccggttatctacacaacacactgcacaatacacatccgacaccacctgaacattcagtctaaaccgcccggcgcccgcgatggcgcatgcccaatatcgaagctcccagtacgtcaacagcaatacagacagatacgacagcggcctgcagcgcaaccccacagatcgtcgtaacatgaggtccagtgagggcaccgtcagcacaaccatgagctcatcgacaggcagagagtcgtcggcgacgcacatgaccgaggcacccgcctactccaagaagattgtcgtcgttggcgacggtggatgtggaaagacatgcttgttgatcagctatagccagggctatttccccgaaaaatacgtcccaacagtcttcgagaactacatcacataccccacacaccaacagagcggcaagacggtcgagctcgcgctgtgggacaccgctggacaggaggaatacgacagattacgaccgctttcctaccccgagacagacttgatcttcgtctgctttgccattgactgtccaaactcattagacaacgtactcgacaagtggtacccagaagtcctccatttctgtccctacacgcccctaatcctcgtgggcctcaagtccgacctacgacacaaaaagacctgcatcgagatgctcaaaacacaaggtctgacaccggttacgacgcaacagggcgaagcagtcgcgcgaaagatgaacgcgcagtacatggagtgctcgtccaaggacatggtcggcgtcgacgagatcttcgaccgcgcgattcacaccgtcgtcagtaacgatcggaagaatctagaggctgcgatggcggctgcgcctagctcgagtaaggctgagaagagagcggcgtccggtgggagtggaggggcgggtgtgggaggcgtgggcttcccgggtgttaggggtcttaagaagaagaggaaatgtaactttttgtgaggggtgaaggggaggaatggggatggtgaggagttgggagaggagcgcaagcacgccggtaatgacccatgcatttctttgctacgattttttctctccgcggtcttgcacacgacagagacgctggcaagatgatgagggagtgcttttcgcctttcttgtcggggcgcggacttttcctatcttgcattctaattgtccaaagtagggtaggcgtttcgtcttgcattcaggtcgttggcgaaggaaacggtacatacgggacgacaagagggagggaggcgtaggacttgttcatgaggcttgaggtagatcgagattgaatcttgctctactggatgctgcttctggacatgctgggtcctgcttaatgttgcgaaacgaaacagaacaaaacttgtatgaatgagtagtaggacttaggcaggattgatattccgatttgttgtcttacagagcattctgcatggtttgaggataggaaatacgaaataacgtcaaaaatcatatgtttgttctcctattgtgacttgtgtgaacagcccccataacttcgttcagattgggtctttgggtatccttactccgaacgcctatgtagacatttcctcaagctcaacatcacttaaaacacccttatcaccattgtctgatatatgacactactttttagacgtagtctcctcgctctcgtcattcctttctggctcttcatccgcctcaccatcgccaggcgcctttgtctcactctcatccttagccatgacgccctcgaactgtgaccatagggcttctacggatgagaattcattgccaac

SEQ ID NO: 1911 - DNA, 378 bp, Muscodor strobelii
  misc_feature: SGI cDNA ID NO. 560252
  misc_feature: Encodes the peptide sequence at SEQ ID NO 1912
atgtcgacgaatcaacgctcagcgatgaacacgagtgctggacagacgagggacaagacgtactttgagatgcagcgtgaggcgcttattggtgagattgctatgagcttcgagcacgtcctcgctaatatcaataaactgaatcggtcgcttgaggctgttgtcgctacggatttcggtggctgggcaatgtctgggatgaatgaagctaactcatacaaggttggcaatgaattctcatccgtagaagccctatggtcacagttcgagggcgtcatggctaaggatgagagtgagacaaaggcgcctggcgatggtgaggcggatgaagagccagaaaggaatgacgagagcgaggagactacgtctaaaaagtag

SEQ ID NO: 1912 - protein, 125 aa, Muscodor strobelii
  misc_feature: SGI Peptide ID NO. 560252
  misc_feature (20)..(95): Pfam Id: PF08649 Pfam Desc: DASH complex subunit Dad1
  misc_feature (20)..(56): Pfam Id: PF08649 Pfam Desc: DASH complex subunit Dad1
  misc_feature (71)..(95): Pfam Id: PF08649 Pfam Desc: DASH complex subunit Dad1
  misc_feature (1)..(124): NCBI GI: 46105394 Blast Desc: FG00325.1 [Gibberella zeae PH-1]
  misc_feature (1)..(117): NCBI GI: 145606981 Blast Desc: [Magnaporthe grisea 70-15] gi|145014601|gb|EDJ99169.1| [Magnaporthe grisea 70-15]
  misc_feature (14)..(100): NCBI GI: 85082116 Blast Desc: NCU03405 [Neurospora crassa OR74A] gi|18376377|emb|CAD21154.1| conserved [Neurospora crassa] gi|28917931|gb|EAA27616.1| [Neurospora crassa OR74A]
  misc_feature (2)..(117): NCBI GI: 261353006 Blast Desc: conserved [Verticillium albo-atrum VaMs.102]
  misc_feature (2)..(109): NCBI GI: 116199903 Blast Desc: CHGG_08107 [Chaetomium globosum CBS 148.51] gi|88179386|gb|EAQ86854.1| CHGG_08107 [Chaetomium globosum CBS 148.51]
  misc_feature (1)..(95): NCBI GI: 171689924 Blast Desc: protein product [Podospora anserina] gi|170944924|emb|CAP71035.1| protein product [Podospora anserina]
  misc_feature (18)..(109): NCBI GI: 156060091 Blast Desc: [Sclerotinia sclerotiorum 1980] gi|154699592|gb|EDN99330.1| [Sclerotinia sclerotiorum 1980]
  misc_feature (21)..(124): NCBI GI: 240106360 Blast Desc: CPC735_059230 [Coccidioides posadasii C735 delta SOWgp]
  misc_feature (1)..(113): NCBI GI: 169611046 Blast Desc: SNOG_08632 [Phaeosphaeria nodorum SN15] gi|160702208|gb|EAT83800.2| SNOG_08632 [Phaeosphaeria nodorum SN15]
  misc_feature (21)..(124): NCBI GI: 119191756 Blast Desc: [Coccidioides immitis RS]
MSTNQRSAMNTSAGQTRDKTYFEMQREALIGEIAMSFEHVLANINKLNRSLEAVVATDFGGWAMSGMNEANSYKVGNEFSSVEALWSQFEGVMAKDESETKAPGDGEADEEPERNDESEETTSKK

SEQ ID NO: 1913 - DNA, 3943 bp, Muscodor strobelii
  misc_feature: SGI EST ID NO. CUFF.5179.1
  misc_feature: Variant of the nucleotide sequence at SEQ ID NO 1911
tgctaggtaaggtaaggtacctagaggctacaggtgacaggagtgcaattcacagcgtttgttagtctccacctgtcactgccaagccaggcgacccgaagtgcggaataccttacccttagtacttagcggccccatgtcagcccctgtcgccgcacgtgaagatggatttacagtgctacgacgctcccgccgaccaacttcactatccccacgccgatgtaccagcaccagcaccattaccaccaacaccccaactaaataacagcacagcgacaaccagccaccctcccgctacgcctcccgacgactcccctcgacggccctcccaccatcgccgtcgtcataccgccctctcctctcccgtccagttgaccatacccccgactcctcctccgcctccgcgtccgactgcaggtatggcgtcgtcgtccgcccgtgccgcagtgcccaagccaggcccggccaagctgacctcgggcgccggcctcgacgagtggctcgaggaggccaagcaatgccactatctgcctgagcctgtcatgaaggagctctgtgagatggttaaggaagtcctcatggaagaatccaacatacagcccgtagtcactccagttacagtgtgcggcgatatccatggccaattctatgacctgttggagctattccgagtcagcggcggcatgcccggccagcctgccaccgaggccccccagacagtcaccaccgtcatcacctccgacgacatcgagccccccgagatcaccaagcccaagcttatgaagaagatcaagcagaccaagaagcccgacgacagcgccggctccgactcggccgccgctgacgatgaggacgacgataccaccgagattgccgagtcctcacgcatcacctccaccgaggtcaccacatctaccaacggcgccgatacccggtttgtcttcttgggggactttgtcgatcgaggctacttcagtctggagacattcacgctgctgatgtgtctgaaagccaaatatcctgatcgaatcattcttgtccggggtaatcacgagtcgagacagatcacccaagtatatggattttacgaggaatgccagcaaaagtacggaaatgcgtcagtatggaaagcatgctgccaggtattcgacttcctggttcttgccgccatcgtcgatggtgagatcctctgtgtgcatggcggtctgagtccggagatcagaaccattgaccagatccgcgtcgtggcccgagcccaggagatacctcatgagggtgccttttgcgatcttgtttggagcgaccccgaagacgtcgagacctgggctattagcccccgaggtgctggatggctgttcggtgacaaggtggcgaccgagttcaatcatgtcaatggtctcaaactcattgcccgtgctcatcagctggtaaacgagggctacaagtatcatttcccacaaaactcagtagtcaccgtctggtcagcacccaactactgttaccgctgcggcaacgttgcctcgattatgaccgtggataagaacctcgatcctaaattcagcatcttctctgccgttccggacgatatgcggcatgtccccgccggcagacgcggcccgtcggactatttcctgtaaaccttgttatacccgtcatgaaactggaatgattgataccattgaggcgtttgggtggaagacttcacaatgtgatgcatacaactggttacgcattaaggcttgaacgttgcataagacccgattgcttaacgggtgggagagtgggatgagagagagcggctaggtaaaatggaacctggctggtggtgtaaactcttgttggaagatgtctcgagcagtgaaagccgagttgtattttagtataacgacggggcgtgtcggatgcagcctgaggtagttgcacacgcttctgtccgtacttctcggtatgagagggtgtggtcgataggaaatacagtgggcctaacgtacgcgacagtcatctagcgactaacgctcaatacgacaagttcctctgtatgtaatggctcctgctatcataccaactatctacaatttagtcgtaaataactcgttctaaatatggcaccatgtctcggattgaatggatgtgcttttgtcatgtcatccggagagcggggcagttttgacagagaacaaccccaccaagacctcgcgcgagtcggcgccagagcttaagtgcatcgcgtctctcaggcacagaacaaatcaaagaactataggagactacctaactcaataaacataataaggggagctgtcacatcgtttgcaagccgacatatacgatccggcgaagtacccacaaacgcaaacaagtagttgagacaacacttgatctcatcttcctgcaactacccagggctcaggcaaagggcatccacggacagctagtacggtaccgacctccataagcctccacaatacaacgcatgagagcctatcaccaaaccgaaatcgttgagtcaacaccgaaggcgatagagtattagggcagagagcaagcaagatgtcgacgaatcaacgctcagcgatgaacacgagtgctggacagacgagggacaagacgtactttgagatgcagcgtgaggcgcttattggtgagattgctatgagcttcgagcacgtcctcgctaatatcaataaactgaatcggtcgcttgaggctgttgtcgctgttggcaatgaattctcatccgtagaagccctatggtcacagttcgagggcgtcatggctaaggatgagagtgagacaaaggcgcctggcgatggtgaggcggatgaagagccagaaaggaatgacgagagcgaggagactacgtctaaaaagtagtgtcatatatcagacaatggtgataagggtgttttaagtgatgttgagcttgaggaaatgtctacataggcgttcggagtaaggatacccaaagacccaatctgaacgaagttatgggggctgttcacacaagtcacaataggagaacaaacatatgatttttgacgttatttcgtatttcctatcctcaaaccatgcagaatgctctgtaagacaacaaatcggaatatcaatcctgcctaagtcctactactcattcatacaagttttgttctgtttcgtttcgcaacattaagcaggacccagcatgtccagaagcagcatccagtagagcaagattcaatctcgatctacctcaagcctcatgaacaagtcctacgcctccctccctcttgtcgtcccgtatgtaccgtttccttcgccaacgacctgaatgcaagacgaaacgcctaccctactttggacaattagaatgcaagataggaaaagtccgcgccccgacaagaaaggcgaaaagcactccctcatcatcttgccagcgtctctgtcgtgtgcaagaccgcggagagaaaaaatcgtagcaaagaaatgcatgggtcattaccggcgtgcttgcgctcctctcccaactcctcaccatccccattcctccccttcacccctcacaaaaagttacatttcctcttcttcttaagacccctaacacccgggaagcccacgcctcccacacccgcccctccactcccaccggacgccgctctcttctcagccttactcgagctaggcgcagccgccatcgcagcctctagattcttccgatcgttactgacgacggtgtgaatcgcgcggtcgaagatctcgtcgacgccgaccatgtccttggacgagcactccatgtactgcgcgttcatctttcgcgcgactgcttcgccctgttgcgtcgtaaccggtgtcagaccttgtgttttgagcatctcgatgcaggtctttttgtgtcgtaggtcggacttgaggcccacgaggattaggggcgtgtagggacagaaatggaggacttctgggtaccact

SEQ ID NO: 1914 - DNA, 1473 bp, Muscodor strobelii
  misc_feature: SGI cDNA ID NO. 560253
  misc_feature: Encodes the peptide sequence at SEQ ID NO 1915
atggatttacagtgctacgacgctcccgccgaccaacttcactatccccacgccgatgtaccagcaccagcaccattaccaccaacaccccaactaaataacagcacagcgacaaccagccaccctcccgctacgcctcccgacgactcccctcgacggccctcccaccatcgccgtcgtcataccgccctctcctctcccgtccagttgaccatacccccgactcctcctccgcctccgcgtccgactgcaggtatggcgtcgtcgtccgcccgtgccgcagtgcccaagccaggcccggccaagctgacctcgggcgccggcctcgacgagtggctcgaggaggccaagcaatgccactatctgcctgagcctgtcatgaaggagctctgtgagatggttaaggaagtcctcatggaagaatccaacatacagcccgtagtcactccagttacagtgtgcggcgatatccatggccaattctatgacctgttggagctattccgagtcagcggcggcatgcccggccagcctgccaccgaggccccccagacagtcaccaccgtcatcacctccgacgacatcgagccccccgagatcaccaagcccaagcttatgaagaagatcaagcagaccaagaagcccgacgacagcgccggctccgactcggccgccgctgacgatgaggacgacgataccaccgagattgccgagtcctcacgcatcacctccaccgaggtcaccacatctaccaacggcgccgatacccggtttgtcttcttgggggactttgtcgatcgaggctacttcagtctggagacattcacgctgctgatgtgtctgaaagccaaatatcctgatcgaatcattcttgtccggggtaatcacgagtcgagacagatcacccaagtatatggattttacgaggaatgccagcaaaagtacggaaatgcgtcagtatggaaagcatgctgccaggtattcgacttcctggttcttgccgccatcgtcgatggtgagatcctctgtgtgcatggcggtctgagtccggagatcagaaccattgaccagatccgcgtcgtggcccgagcccaggagatacctcatgagggtgccttttgcgatcttgtttggagcgaccccgaagacgtcgagacctgggctattagcccccgaggtgctggatggctgttcggtgacaaggtggcgaccgagttcaatcatgtcaatggtctcaaactcattgcccgtgctcatcagctggtaaacgagggctacaagtatcatttcccacaaaactcagtagtcaccgtctggtcagcacccaactactgttaccgctgcggcaacgttgcctcgattatgaccgtggataagaacctcgatcctaaattcagcatcttctctgccgttccggacgatatgcggcatgtccccgccggcagacgcggcccgtcggactatttcctgtaa

SEQ ID NO: 1915 - protein, 490 aa, Muscodor strobelii
  misc_feature: SGI Peptide ID NO. 560253
  misc_feature (149)..(423): Pfam Id: PF00149 Pfam Desc: Calcineurin-like phosphoesterase
  misc_feature (93)..(490): NCBI GI: 115353396 Blast Desc: protein phosphatase 2A [Gibberella moniliformis]
  misc_feature (93)..(490): NCBI GI: 46109164 Blast Desc: FG01464.1 [Gibberella zeae PH-1]
  misc_feature (93)..(490): NCBI GI: 256730824 Blast Desc: [Nectria haematococca mpVI 77-13-4]
  misc_feature (93)..(490): NCBI GI: 85081445 Blast Desc: serine/threonine-protein phosphatase ppe1 [Neurospora crassa OR74A] gi|16944524|emb|CAB98214.2| cell shape control protein phosphatase ppe1 [Neurospora crassa] phosphatase ppe1
  misc_feature (94)..(490): NCBI GI: 171690102 Blast Desc: protein product [Podospora anserina] gi|170945006|emb|CAP71117.1| protein product [Podospora anserina]
  misc_feature (93)..(490): NCBI GI: 145606997 Blast Desc: conserved [Magnaporthe grisea 70-15] gi|145014614|gb|EDJ99182.1| conserved [Magnaporthe grisea 70-15]
  misc_feature (95)..(490): NCBI GI: 116200011 Blast Desc: conserved [Chaetomium globosum CBS 148.51] gi|88179440|gb|EAQ86908.1| conserved [Chaetomium globosum CBS 148.51]
  misc_feature (93)..(490): NCBI GI: 156034342 Blast Desc: conserved [Sclerotinia sclerotiorum 1980] gi|154698877|gb|EDN98615.1| conserved [Sclerotinia sclerotiorum 1980]
  misc_feature (95)..(490): NCBI GI: 154310973 Blast Desc: conserved [Botryotinia fuckeliana B05.10] gi|150851264|gb|EDN26457.1| conserved [Botryotinia fuckeliana B05.10]
  misc_feature (127)..(490): NCBI GI: 261352997 Blast Desc: serine/threonine-protein phosphatase PP1-1 [Verticillium albo-atrum VaMs.102]
MDLQCYDAPADQLHYPHADVPAPAPLPPTPQLNNSTATTSHPPATPPDDSPRRPSHHRRRHTALSSPVQLTIPPTPPPPPRPTAGMASSSARAAVPKPGPAKLTSGAGLDEWLEEAKQCHYLPEPVMKELCEMVKEVLMEESNIQPVVTPVTVCGDIHGQFYDLLELFRVSGGMPGQPATEAPQTVTTVITSDDIEPPEITKPKLMKKIKQTKKPDDSAGSDSAAADDEDDDTTEIAESSRITSTEVTTSTNGADTRFVFLGDFVDRGYFSLETFTLLMCLKAKYPDRIILVRGNHESRQITQVYGFYEECQQKYGNASVWKACCQVFDFLVLAAIVDGEILCVHGGLSPEIRTIDQIRVVARAQEIPHEGAFCDLVWSDPEDVETWAISPRGAGWLFGDKVATEFNHVNGLKLIARAHQLVNEGYKYHFPQNSVVTVWSAPNYCYRCGNVASIMTVDKNLDPKFSIFSAVPDDMRHVPAGRRGPSDYFL

SEQ ID NO: 1916 - DNA, 3943 bp, Muscodor strobelii; identical to SEQ ID NO: 1913
  misc_feature: SGI EST ID NO. CUFF.5179.1
  misc_feature: Variant of the nucleotide sequence at SEQ ID NO 1914

SEQ ID NO: 1917 - DNA, 1824 bp, Muscodor strobelii
  misc_feature: SGI cDNA ID NO. 560254
  misc_feature: Encodes the peptide sequence at SEQ ID NO 1918
atggctaagcaacctgctgagggcaagaaggtggtggtccgccgactgcccccaggcatgaccgaggaggagttttggaagatccttggagacgagtggaaggtcggcaatggcaaggtcgactgggcgcactacgacgatggcgagatcgcctacgaggcatccgactactctacgcccgctgccgcctggctgcatctcctcaagaacgacttcattcccctcctcggcgatgctgtctcccagctgaagtgggaggatgccaaacagacccagaacgaccctgccctcatcgccccgccgtgtgtcgagttcgccctcaaccagagaattcctactcataagaagcgcaccgatccccgccagggtaccatcgacaccgatcccgagttcatggccttcctcgagagcttgacctcgccaaaccctcccaaggaggccgacccggatcagcttgcagaggagactaacaaggcagagaccaaagtcaccactacgcccttggtggaggctgttaaggagaagcgagctgccaaggcaaaggaagcggctctggctaagagcgctaagcacgcacgtcacgagtcgcagggcaaaggaaaggaagacgccaagaagaagggcaaggaggctaagggcgacaagaccgacaagtctggcgagaaggacacagagaagggcaagcagccagtgaagctcctgactaagaaggcggcagcgcaggaagcggccgaggctatcaaggcagcggccagttccagcgcttctacgtctaataagactgcagaagaagcagcacccaagagtcgacgcgccaacatcgcagcggcagccaagatcctgcagcgggacttaggtctcagccctggcagtgcgcataggaaggctcgccaggatgctgccaaggcagacgccgtcaagcccgatgccgcgaaggagactaaggaagctgagcccaaggagacgactgcaaaatccccagcaagccagaaccagcctggttctgctacctcgagcagtatcccgacggcgccaaaggcacagctagctgagacgtctcgacggaatcgtggtgccaagggtgcgaagcaagcctcttccagcggttccggcaaggccaaggagagcgagtcggctaccacaggcaaagcacctcccatgaccatgacacccgtgatcctcaagcgaaaggatgactcgacaactccagcaggtccttcaacacccacggccaacgctgccacggtccccaccccgactcctcctactgcacccaaggccatattgggcaaggctgcaagtagtgggaaaccaacgcctgcaggccagaagaaaagcactgcaggtccttctgtcacagctggagctacacgaggatttgtcaagcacgcaaacccgtcgcaaggtgtcacagaaccgctactcaaacaggccatggaagtttttggacccgtcacgtttgttgagatcgacaagcgcaaaggcttcgcctacgttgacttccgagatcacgatggcctgctgaaggccatcactgctagtcccatctcagtagcacaaggaacggtccaggttctcgagaggaaggagaccaagaaagctgcggctgcttccgccagtgctgcccagaccccgacacctgcaacccctacccagcctgctaccgacaagaaagcggccgaggcctcggtggggagctccaagcgaggtggacgtggcagaggacgaagaggaggtgctaatgctagtggtgccggtggatcatcagagggagctggttcatctcctactgtctctgtcccttctgctgctcccgctggatga

SEQ ID NO: 1918 - protein, 607 aa, Muscodor strobelii
  misc_feature: SGI Peptide ID NO. 560254
  misc_feature (2)..(179): Pfam Id: PF03467 Pfam Desc: Smg-4/UPF3 family
  misc_feature (84)..(179): Pfam Id: PF03467 Pfam Desc: Smg-4/UPF3 family
  misc_feature (2)..(46): Pfam Id: PF03467 Pfam Desc: Smg-4/UPF3 family
  misc_feature (7)..(532): NCBI GI: 46109162 Blast Desc: FG01463.1 [Gibberella zeae PH-1]
  misc_feature (7)..(548): NCBI GI: 256730607 Blast Desc: NECHADRAFT_89796 [Nectria haematococca mpVI 77-13-4]
  misc_feature (3)..(544): NCBI GI: 145606999 Blast Desc: MGG_03912 [Magnaporthe grisea 70-15] gi|145014615|gb|EDJ99183.1| MGG_03912 [Magnaporthe grisea 70-15]
  misc_feature (10)..(530): NCBI GI: 189188818 Blast Desc: conserved [Pyrenophora tritici-repentis Pt-1C-BFP] gi|187972354|gb|EDU39853.1| conserved [Pyrenophora tritici-repentis Pt-1C-BFP]
  misc_feature (6)..(529): NCBI GI: 85081441 Blast Desc: NCU03435 [Neurospora crassa OR74A] gi|9368552|emb|CAB98213.1| related to nucleolar phosphoprotein [Neurospora crassa] gi|28917796|gb|EAA27485.1| [Neurospora crassa
  misc_feature (2)..(529): NCBI GI: 154310975 Blast Desc: BC1G_06466 [Botryotinia fuckeliana B05.10] gi|150851265|gb|EDN26458.1| BC1G_06466 [Botryotinia fuckeliana B05.10]
  misc_feature (10)..(575): NCBI GI: 226278641 Blast Desc: conserved [Paracoccidioides brasiliensis Pb01]
  misc_feature (3)..(472): NCBI GI: 116200009 Blast Desc: CHGG_08160 [Chaetomium globosum CBS 148.51] gi|88179439|gb|EAQ86907.1| CHGG_08160 [Chaetomium globosum CBS 148.51]
  misc_feature (3)..(546): NCBI GI: 242803385 Blast Desc: nonsense-mediated mRNA decay protein Upf3, [Talaromyces stipitatus ATCC 10500] gi|242803390|ref|XP_002484164.1| nonsense-mediated mRNA decay
  misc_feature (10)..(549): NCBI GI: 226293588 Blast Desc: conserved [Paracoccidioides brasiliensis Pb18]
MAKQPAEGKKVVVRRLPPGMTEEEFWKILGDEWKVGNGKVDWAHYDDGEIAYEASDYSTPAAAWLHLLKNDFIPLLGDAVSQLKWEDAKQTQNDPALIAPPCVEFALNQRIPTHKKRTDPRQGTIDTDPEFMAFLESLTSPNPPKEADPDQLAEETNKAETKVTTTPLVEAVKEKRAAKAKEAALAKSAKHARHESQGKGKEDAKKKGKEAKGDKTDKSGEKDTEKGKQPVKLLTKKAAAQEAAEAIKAAASSSASTSNKTAEEAAPKSRRANIAAAAKILQRDLGLSPGSAHRKARQDAAKADAVKPDAAKETKEAEPKETTAKSPASQNQPGSATSSSIPTAPKAQLAETSRRNRGAKGAKQASSSGSGKAKESESATTGKAPPMTMTPVILKRKDDSTTPAGPSTPTANAATVPTPTPPTAPKAILGKAASSGKPTPAGQKKSTAGPSVTAGATRGFVKHANPSQGVTEPLLKQAMEVFGPVTFVEIDKRKGFAYVDFRDHDGLLKAITASPISVAQGTVQVLERKETKKAAAASASAAQTPTPATPTQPATDKKAAEASVGSSKRGGRGRGRRGGANASGAGGSSEGAGSSPTVSVPSAAPAG

SEQ ID NO: 1919 - DNA, 1434 bp, Muscodor strobelii
  misc_feature: SGI cDNA ID NO. 560255
  misc_feature: Reduced expression when VOC is produced
  misc_feature: Encodes the peptide sequence at SEQ ID NO 1920
atgtccgcgcctacggaccagcccgtggtgacgaacacggccacttccaccgagttcttcgagtcgatcgggcagaaggctggccagcttgccccctccaccaacggcgcaaatggtgttgtagacggagctgacgatgagaaagttgtagaggagatagagtctctttgtatgaactgccacgaaaatggcgtcacgcgcatgctcctcactgccattccctacttccgcgaagtcatcctcatgtccttcaactgcgaccactgccacttttccaactccgagatccagtccgccggcaccatccagcccaagggcaccagctacctactacgcctcacagccatgggcgacttcgagcgacaagtcgtcaagtccgacaccgccatcgtcaagttcatcgagttggacctcgaggtccccgccggtcgcggccagctcacaaacgtcgagggtatcctgtccagcatcatggacgacctcgagctcggacaagaagcgcgcaaagaacagacacccgaggtattcgagaagataagcgagatcatcactaagggccgcgcaatgttggcaggcgacgcgttccccttcagactctccgtcgacgacccagcaggcaactcctggatctcgcctaacatgcgggacggcatcggcaaatgggagaagcgcgactacgagcggacaccggaacaaaacgaagccctcggtctcgcagccaccgaccagaacggcgacaacccatacgaagacgaggacatcgtacccgaccaagtctacgagttccccgcctcctgcccaggctgcatgcacgcctgcaccacaaagatgaccatggtcgacataccgcacttcaaagccgtagtcctcatgtccaccgtatgcgacgactgcggctacaagtccaacgacgtgaagaccggcggtgaaattcccgaattagggaagaagatcacgcttcgggtaaacagcgccgaagatctagcgcgcgatatcctcaaatccgagacctgcgccctcgaatcgccagagctaaacctgcaagtcaacccgggcaccctaggcggccgcttcacaaccgtcgaaggcctaataacacaaatccggaacgacctgcacaaccagatcttcgagacggggtcaggcgaaggcggtgactccctagcatcgcaagaacgcgagacgtggcggacgttcttcgacggactagatagtgcgatagccggctcaaagccattcaccatcatactcactgatccgttggcaagcagctatgtgcagaaagctgttgatcccgatcaggacgatccccagatgaggtttgaggattataccaggactgaggaagaagaggaggatttggggctgaaggatatgaaggttgaggggtatgaacaggatcatcacgacactgctgctgctcctgggccatag

SEQ ID NO: 1920 - protein, 477 aa, Muscodor strobelii
  misc_feature: SGI Peptide ID NO. 560255
  misc_feature (263)..(428): Pfam Id: PF03367 Pfam Desc: ZPR1 zinc-finger domain
  misc_feature (54)..(212): Pfam Id: PF03367 Pfam Desc: ZPR1 zinc-finger domain
  misc_feature (15)..(464): NCBI GI: 46109176 Blast Desc: FG01470.1 [Gibberella zeae PH-1]
  misc_feature (1)..(477): NCBI GI: 261352988 Blast Desc: zinc finger protein zpr1 [Verticillium albo-atrum VaMs.102]
  misc_feature (17)..(467): NCBI GI: 116204585 Blast Desc: CHGG_10176 [Chaetomium globosum CBS 148.51] gi|88176304|gb|EAQ83772.1| CHGG_10176 [Chaetomium globosum CBS 148.51]
  misc_feature (3)..(464): NCBI GI: 154315463 Blast Desc: BC1G_04304 [Botryotinia fuckeliana B05.10] gi|150847244|gb|EDN22437.1| BC1G_04304 [Botryotinia fuckeliana B05.10]
  misc_feature (14)..(464): NCBI GI: 156060139 Blast Desc: SS1G_02208 [Sclerotinia sclerotiorum 1980] gi|154699616|gb|EDN99354.1| SS1G_02208 [Sclerotinia sclerotiorum 1980]
  misc_feature (50)..(468): NCBI GI: 85110390 Blast Desc: NCU08507 [Neurospora crassa OR74A] gi|28925116|gb|EAA34200.1| NCU08507 [Neurospora crassa OR74A] gi|38524212|emb|CAE75679.1| zinc finger protein ZPR1 [Neurospora
  misc_feature (17)..(467): NCBI GI: 171689232 Blast Desc: protein product [Podospora anserina] gi|170944578|emb|CAP70689.1| protein product [Podospora anserina]
  misc_feature (18)..(474): NCBI GI: 169608191 Blast Desc: SNOG_07163 [Phaeosphaeria nodorum SN15] gi|160701586|gb|EAT85814.2| SNOG_07163 [Phaeosphaeria nodorum SN15]
  misc_feature (16)..(471): NCBI GI: 189189582 Blast Desc: zinc finger protein zpr1 [Pyrenophora tritici-repentis Pt-1C-BFP] gi|187972736|gb|EDU40235.1| zinc finger protein zpr1 [Pyrenophora tritici-repentis Pt-1C-BFP]
  misc_feature (12)..(470): NCBI GI: 212530294 Blast Desc: zinc finger protein ZPR1 [Penicillium marneffei ATCC 18224] gi|210074702|gb|EEA28789.1| zinc finger protein ZPR1 [Penicillium marneffei ATCC 18224]
  misc_feature: Useful for introducing or modulating the production of volatile compounds
MSAPTDQPVVTNTATSTEFFESIGQKAGQLAPSTNGANGVVDGADDEKVVEEIESLCMNCHENGVTRMLLTAIPYFREVILMSFNCDHCHFSNSEIQSAGTIQPKGTSYLLRLTAMGDFERQVVKSDTAIVKFIELDLEVPAGRGQLTNVEGILSSIMDDLELGQEARKEQTPEVFEKISEIITKGRAMLAGDAFPFRLSVDDPAGNSWISPNMRDGIGKWEKRDYERTPEQNEALGLAATDQNGDNPYEDEDIVPDQVYEFPASCPGCMHACTTKMTMVDIPHFKAVVLMSTVCDDCGYKSNDVKTGGEIPELGKKITLRVNSAEDLARDILKSETCALESPELNLQVNPGTLGGRFTTVEGLITQIRNDLHNQIFETGSGEGGDSLASQERETWRTFFDGLDSAIAGSKPFTIILTDPLASSYVQKAVDPDQDDPQMRFEDYTRTEEEEEDLGLKDMKVEGYEQDHHDTAAAPGP

SEQ ID NO: 1921 - DNA, 5304 bp, Muscodor strobelii
  misc_feature: SGI EST ID NO. CUFF.5019.0
  misc_feature: Variant of the nucleotide sequence at SEQ ID NO 1919
caaaaaacaaccacctgtggcagctgtggtcgctataccaagattagccttccaccaccacctaagatctcttggcgaaagcatttgcgacaaatccctaaacctaaggttcctggcgacgttgttaccaaaggtcgtgttgccagtaatttgttgggcggagccgcgacaacaggcgttcaaacatccaaatcttcagctaatgcgagcagcaagaagagggccaaaaacagaaaacagggtctacaggcgctgcttcaacagtctgcaaactctaaaccgcaatccggactcggtctgagcttatcagacttcatgaaaaactagtcacaccgagggctctgactcaaatcagactcgaagacgagacgatgcgagagaactatcacatacattactgccctatcttaggtatcatcaggtgtcgcactccgaaatgtagaggtaggcgaagatgcgcccatccctgtcgggctagactcatggccgaggcgatggaagcttctgcagcccactataagatatgtcataaccccgccatccactggggagttgcccctccaaatttttttggaaacgggaaagcgacatctttttgcgccgcccactcccgtcactcgtcaccccattgctcgacattgtctatctcttgttgaaacagcctttgcaacagggttaatacatagttgcgacaacatcacaacctactcaagatgtccgcgcctacggaccagcccgtggtgacgaacacggccacttccaccgagttcttcgagtcgatcgggcagaaggctggccagcttgccccctccaccaacggcgcaaatggtgttgtagacggagctgacgatgagaaagttgtagaggagatagagtctctttgtatgaactgccacgaaaatggcgtcacgcgcatgctcctcactgccattccctacttccgcgaagtcatcctcatgtccttcaactgcgaccactgccacttttccaactccgagatccagtccgccggcaccatccagcccaagggcaccagctacctactacgcctcacagccatgggcgacttcgagcgacaagtcgtcaagtccgacaccgccatcgtcaagttcatcgagttggacctcgaggtccccgccggtcgcggccagctcacaaacgtcgagggtatcctgtccagcatcatggacgacctcgagctcggacaagaagcgcgcaaagaacagacacccgaggtattcgagaagataagcgagatcatcactaagggccgcgcaatgttggcaggcgacgcgttccccttcagactctccgtcgacgacccagcaggcaactcctggatctcgcctaacatgcgggacggcatcggcaaatgggagaagcgcgactacgagcggacaccggaacaaaacgaagccctcggtctcgcagccaccgaccagaacggcgacaacccatacgaagacgaggacatcgtacccgaccaagtctacgagttccccgcctcctgcccaggctgcatgcacgcctgcaccacaaagatgaccatggtcgacataccgcacttcaaagccgtagtcctcatgtccaccgtatgcgacgactgcggctacaagtccaacgacgtgaagaccggcggtgaaattcccgaattagggaagaagatcacgcttcgggtaaacagcgccgaagatctagcgcgcgatatcctcaaatccgagacctgcgccctcgaatcgccagagctaaacctgcaagtcaacccgggcaccctaggcggccgcttcacaaccgtcgaaggcctaataacacaaatccggaacgacctgcacaaccagatcttcgagacggggtcaggcgaaggcggtgactccctagcatcgcaagaacgcgagacgtggcggacgttcttcgacggactagatagtgcgatagccggctcaaagccattcaccatcatactcactgatccgttggcaagcagctatgtgcagaaagctgttgatcccgatcaggacgatccccagatgaggtttgaggattataccaggactgaggaagaagaggaggatttggggctgaaggatatgaaggttgaggggtatgaacaggatcatcacgacactgctgctgctcctgggccatagcaggagggtgatgatgggtgtagagacacaagggcgatgaaatgaagatattgataccactgttactgtcggattacactcgcgccacgcaaaagatgtatacgtggcactacgcacacgacttgactgagaagttgtcagcttaaatttgtcaatcaccatcacagagctaaatgcgtctacaaaggcagttgctttcttataacaagaacatgggcgagacaaccactataccacgcgagacattgacatcggcacagacactgtatatccttatctgtatcttaattactggacttactgtataaccacctactgtatgcgagagcaggctcggatgcgcacgcatttcgtacgcattttgaataaggaataagacactatgaacatcggcacagttatagttcaagcaatgggaacagtagcccggatattagggttgtgtgagcctggaattatgaagcactgagtacggtaagctaaagcacatctttgatcaggacctgctctgcgccatcaatcttcagcaactcccatcggcattacgtcttctgccgggaagtccacgctctgattggtttcttcctcggccaaatctacctgctcataccaaactataggtagtgatatatgcaagaagttacgacttcactctccaaggtctctcctccagttttctttagttttgccgtcaaacctctcgatacaagtcttgagcggtcagtctccgaacactatggttccctgatggacgttttcgtcgcttagtcgctcatttgtcgacgatgctttgagatactgcaacgatactgtctgatttcgctgaggacaggagctcgatgatattgctcttgctcgagaactcaatcaatagatccgcaatatatgcaattcctggtctgtgccggattgaatgcaattgagcactcagcagaatcgagacccggatgaggcgcatcatacgagccatgtgggttatgttgatgcgctggggacacgcatgtcgatatgtcagattgcaccaatatagaaaagctgttagcttcatccagcgggagcagcagaagggacagagacagtaggagatgaaccagctccctctgatgatccaccggcaccactagcattagcacctcctcttcgtcctctgccacgtccacctcgcttggagctccccaccgaggcctcggccgctttcttgtcggtagcaggctgggtaggggttgcaggtgtcggggtctgggcagcactggcggaagcagccgcagctttcttggtctccttcctctcgagaacctggaccgttccttgtgctactgagatgggactagcagtgatggccttcagcaggccatcgtgatctcggaagtcaacgtaggcgaagcctttgcgcttgtcgatctcaacaaacgtgacgggtccaaaaacttccatggcctgtttgagtagcggttctgtgacaccttgcgacgggtttgcgtgcttgacaaatcctcgtgtagctccagctgtgacagaaggacctgcagtgcttttcttctggcctgcaggcgttggtttcccactacttgcagccttgcccaatatggccttgggtgcagtaggaggagtcggggtggggaccgtggcagcgttggccgtgggtgttgaaggacctgctggagttgtcgagtcatcctttcgcttgaggatcacgggtgtcatggtcatgggaggtgctttgcctgtggtagccgactcgctctccttggccttgccggaaccgctggaagaggcttgcttcgcacccttggcaccacgattccgtcgagacgtctcagctagctgtgcctttggcgccgtcgggatactgctcgaggtagcagaaccaggctggttctggcttgctggggattttgcagtcgtctccttgggctcagcttccttagtctccttcgcggcatcgggcttgacggcgtctgccttggcagcatcctggcgagccttcctatgcgcactgccagggctgagacctaagtcccgctgcaggatcttggctgccgctgcgatgttggcgcgtcgactcttgggtgctgcttcttctgcagtcttattagacgtagaagcgctggaactggccgctgccttgatagcctcggccgcttcctgcgctgccgccttcttagtcaggagcttcactggctgcttgcccttctctgtgtccttctcgccagacttgtcggtcttgtcgcccttagcctccttgcccttcttcttggcgtcttcctttcctttgccctgcgactcgtgacgtgcgtgcttagcgctcttagccagagccgcttcctttgccttggcagctcgcttctccttaacagcctccaccaagggcgtagtggtgactttggtctctgccttgttagtctcctctgcaagctgatccgggtcggcctccttgggagggtttggcgaggtcaagctctcgaggaaggccatgaactcgggatcggtgtcgatggtaccctggcggggatcggtgcgcttcttatgagtaggaattctctggttgagggcgaactcgacacacggcggggcgatgagggcagggtcgttctgggtctgtttggcatcctcccacttcagctgggagacagcatcgccgaggaggggaatgaagtcgttcttgaggagatgcagccaggcggcagcgggcgtagagtagtcggatgcctcgtaggcgatctcgccatcgtcgtagtgcgcccagtcgaccttgccattgccgaccttccactcgtctccaaggatcttccaaaactcctcctcggtcatgcctgggggcagtcggcggaccaccaccttcttgccctcagcaggttgcttagccatgctgggaagccgaaggccggcgtgtcagctgagccaagagtaggaattggggaaatagtaacaagtgattgtctcggaaataattctggggtgttgaataatgcagctgcacggaaattggtagaggatggacaagtggatgtggccctagattgtagatttgaatgtaattaggatgaaatggtgtcacattaggtagactaagaaagagactcgaggtggccttgtggccctcaagcttagatagcgtcgtggcaatggacgacgagtattggaagtaacacagcga

SEQ ID NO: 1922 - DNA, 630 bp, Muscodor strobelii
  misc_feature: SGI cDNA ID NO. 560256
  misc_feature: Encodes the peptide sequence at SEQ ID NO 1923
atggctaccgacgcgctccctgctacattgagctttctcacagatgccgctcatctgctgtatgcggattcgcccgaagtgtcagcgcatctcatgtcgcagcgaaactcgttgatgttcaacaacagcattgaccaatccgacgtgcagagacagcatgtctgtggctgctgtggtcatatcatggttgctggtcaaggtgacgctctcaaaatagaggcaatcaaaagtatcaagagggcgaagagtagaaagacgccgcgtagtggagagaaggccaaggtgctattgagcaaaggatgtcaaaaaacaaccacctgtggcagctgtggtcgctataccaagattagccttccaccaccacctaagatctcttggcgaaagcatttgcgacaaatccctaaacctaaggttcctggcgacgttgttaccaaaggtcgtgttgccagtaatttgttgggcggagccgcgacaacaggcgttcaaacatccaaatcttcagctaatgcgagcagcaagaagagggccaaaaacagaaaacagggtctacaggcgctgcttcaacagtctgcaaactctaaaccgcaatccggactcggtctgagcttatcagacttcatgaaaaactag

SEQ ID NO: 1923 - protein, 209 aa, Muscodor strobelii
  misc_feature: SGI Peptide ID NO. 560256
  misc_feature (8)..(112): Pfam Id: PF04032 Pfam Desc: RNAse P Rpr2/Rpp21/SNM1 subunit domain
  misc_feature (6)..(208): NCBI GI: 85110388 Blast Desc: NCU08506 [Neurospora crassa OR74A] gi|28925115|gb|EAA34199.1| conserved [Neurospora crassa OR74A] gi|38524211|emb|CAE75678.1| [Neurospora crassa]
  misc_feature (1)..(208): NCBI GI: 256730820 Blast Desc: NECHADRAFT_30079 [Nectria haematococca mpVI 77-13-4]
  misc_feature (2)..(207): NCBI GI: 171689230 Blast Desc: protein product [Podospora anserina] gi|170944577|emb|CAP70688.1| protein product [Podospora anserina]
  misc_feature (1)..(208): NCBI GI: 46109178 Blast Desc: FG01471.1 [Gibberella zeae PH-1]
  misc_feature (10)..(206): NCBI GI: 261352987 Blast Desc: conserved [Verticillium albo-atrum VaMs.102]
  misc_feature (1)..(208): NCBI GI: 156060137 Blast Desc: SS1G_02207 [Sclerotinia sclerotiorum 1980] gi|154699615|gb|EDN99353.1| SS1G_02207 [Sclerotinia sclerotiorum 1980]
  misc_feature (1)..(208): NCBI GI: 154315461 Blast Desc: BC1G_04303 [Botryotinia fuckeliana B05.10] gi|150847243|gb|EDN22436.1| BC1G_04303 [Botryotinia fuckeliana B05.10]
  misc_feature (3)..(128): NCBI GI: 145606026 Blast Desc: MGG_06710 [Magnaporthe grisea 70-15] gi|145013772|gb|EDJ98413.1| MGG_06710 [Magnaporthe grisea 70-15]
  misc_feature (8)..(209): NCBI GI: 239614844 Blast Desc: conserved [Ajellomyces dermatitidis ER-3]
  misc_feature (6)..(209): NCBI GI: 261190650 Blast Desc: conserved [Ajellomyces dermatitidis SLH14081] gi|239591157|gb|EEQ73738.1| conserved [Ajellomyces dermatitidis SLH14081]
MATDALPATLSFLTDAAHLLYADSPEVSAHLMSQRNSLMFNNSIDQSDVQRQHVCGCCGHIMVAGQGDALKIEAIKSIKRAKSRKTPRSGEKAKVLLSKGCQKTTTCGSCGRYTKISLPPPPKISWRKHLRQIPKPKVPGDVVTKGRVASNLLGGAATTGVQTSKSSANASSKKRAKNRKQGLQALLQQSANSKPQSGLGLSLSDFMKN

SEQ ID NO: 1924 - DNA, 5304 bp, Muscodor strobelii; identical to SEQ ID NO: 1921
  misc_feature: SGI EST ID NO. CUFF.5019.0
  misc_feature: Variant of the nucleotide sequence at SEQ ID NO 1922

SEQ ID NO: 1925 - DNA, 567 bp, Muscodor strobelii
  misc_feature: SGI cDNA ID NO. 560257
  misc_feature: Encodes the peptide sequence at SEQ ID NO 1926
atgggtacacgcgggctcatcgtgtttgtcttcggtggagtgaccaaaggttactataaccaattcgattcttacccgaaagttctcggtgtcgagattgtcaagttcatcaaatcgctcacggacgagcagatccaacagatgatccagcgccttgggaagattgagtggatcgataacattaatgatgtagcgccccaagagattcagcagcgctacaccgcagccggatttcatatcaaacgacgaggtcaactgaatttcaccgcagccagtctcacaggccccgatgaaggttttgaacagggcccatgcacttgggccgccttgctttggggtattcaaggagctcttgcccttcctcacatcctcgacggtaccctcgagcatctcgacgacagcacttccttcgccgaagataccacatggtgcgagtgggcctactatatcgattgggacaagaaggagcttcgcgtcacaactcctgctatcatggcgaagaacgtagatgagacggcaagcttcgaggatatgaccgaagaatggatgaatgagcttaactgctag

SEQ ID NO: 1926 - protein, 188 aa, Muscodor strobelii
  misc_feature: SGI Peptide ID NO. 560257
MGTRGLIVFVFGGVTKGYYNQFDSYPKVLGVEIVKFIKSLTDEQIQQMIQRLGKIEWIDNINDVAPQEIQQRYTAAGFHIKRRGQLNFTAASLTGPDEGFEQGPCTWAALLWGIQGALALPHILDGTLEHLDDSTSFAEDTTWCEWAYYIDWDKKELRVTTPAIMAKNVDETASFEDMTEEWMNELNC

SEQ ID NO: 1927 - DNA, 1025 bp, Muscodor strobelii
  misc_feature: SGI EST ID NO. CUFF.5025.0
  misc_feature: Variant of the nucleotide sequence at SEQ ID NO 1925
caaatattcaatctctcattgtcataggcaacaaattggcggcataacgtagcttccaggtcgcagtctcaactgacctctttctttcatcctcactcttcagtcatccggcgatttgttgcttcttcggagttcgtgcgagccaaacggacaagcacgtaaataaccttctccatcgctcatcccagactttgcatcaacatcagatcacagaaccaggtactcatcacgatgggtacacgcgggctcatcgtgtttgtcttcggtggagtgaccaaaggttactataaccaattcgattcttacccgaaagttctcggtgtcgagattgtcaagttcatcaaatcgctcacggacgagcagatccaacagatgatccagcgccttgggaagattgagtggtgagtaatctgacaagcagaggcatagcagcagtagctaactacattcaggatcgataacattaatgatgtagcgccccaagagattcagcagcgctacaccgcagccggatttcatatcaaacgacgaggtcaactgaatttcaccgcagccagtctcacaggccccgatgaaggttttgaacagggcccatgcacttgggccgccttgctttggggtattcaaggagctcttgcccttcctcacatcctcgacggtaccctcgagcatctcgacgacagcacttccttcgccgaagataccacatggtgcgagtgggcctactatatcgattgggacaagaaggagcttcgcgtcacaactcctgctatcatggcgaagaacgtagatgagacggcaagcttcgaggatatgaccgaagaatggatgaatgagcttaactgctaggggatatccgaagtgcgatacgggtaaatgtgatcacgaggggtttcgccgcatgggccggagaacaatgtctctgtagtaggcactccatgtcttctcaaggagaagaacagtctcatcactaatagatcttttgaccaaggaagtttctttcatacctacacataggtggggat

SEQ ID NO: 1928 - DNA, 1764 bp, Muscodor strobelii
  misc_feature: SGI cDNA ID NO. 560258
  misc_feature: Encodes the peptide sequence at SEQ ID NO 1929
atgtcgatagctacgctgtccgaagctcagatgaagcttttgttgggattgctagatgcagtcgtgcccgcaattgcaccagatgcgccgtcattagttgaggaggaccgtctggtcattcctaaagaggagcttcaatccttgtttcggaatatgatgggagacaacaacgagaatcgcttcagcttcgatgacttccttgattatatggcctcacgaccatccgacgacccaatttcggtcttcattactcttggcaaagcatgctggagccaaacaaacaagagttatcttcagcttaacggctacgaagactatggactagacatgatgcctggacctgcttttgatttcaaattccttcagttcgaggaagctccggagccagccatcgtcgaaacagatgtcgttatcgttggctctggctgcggcggtgcggtttgcgcaaaggttctcgccgaagctggactgcaagtccttgtgacggataagggctattatttcccaccgactgagtttccgatggcacttgaccgtctcggtaacatttttcaaggaggggctggcctggcttctattgatggttctacattggtaacagccggtatgtgttggggcggaggaggcactgtcaactggtgcgcgagtcttcagacgccgtcgtatgtccgacaagaatgggctgaggctggccttgacttcttcctagaagctgagtaccaggagagccttgaccgcgtctgtgaggcgatggatgtgagtgatagcgcaattgatgagaacctcagtaaccaagtattacgagaaggttcacgcaaactaaactggagagtggatagcgtgccacagaatactggaggcacctctcatgcctgtggaagcaattgtggtcggggatgccgtacaggagagaagcaaagcactagcacctattggctccctgccgcagctcgcgctgattcgtcgcactccgaacgtgagcaaatcatagaagcacgcgcgaaaacagtcatactggctgctggcacactgaacacgccaataattctccagagaagtggtatcaagaagaatgagaatatcggaaagaacctgtttttacacccagtcatcaatgtggccgcaacgtggaacgaagacgtccagccttggaaagttgctattttcaagccttatgtagcgatgattctcttcccctggcagaacggtgctgattataaggccgccgcgctacagtaccgcaacatgacctgccatatctctctatgtcgcgacaagcagtctggcagtgtaacacctgagccgagtgacgggagcccagtaatagactacagtccgtccaaattcgatcgcacacatatcatcacgggagtagtcacaattgcaaagctgctttacatatctggtgctcgggccattttcccagcggtgcccggagtgtctccgtttcgttgtgcaaaagctactgctaaccgcagcgtccaagacgatgagtttatcggatggcttcgcacactagagagctcagctttggatcccatcaaggccactttcaactccgcacatcagatgggaacttcacgtatgggaaacaaccctgaaacaagcgttgtagataaggatggcaaggtttgggggtacgatgggctatatgtcgcggacgcaagtgttttcccgtccgcgagcggcgtcaacccaatgatcacagtgatggctctagccgatcgtatctctaggggtatcgcgatgcattacttacagtaa

SEQ ID NO: 1929 - protein, 587 aa, Muscodor strobelii
  misc_feature: SGI Peptide ID NO. 560258
  misc_feature (418)..(577): Pfam Id: PF05199 Pfam Desc: GMC oxidoreductase
  misc_feature (180)..(383): Pfam Id: PF00732 Pfam Desc: GMC oxidoreductase
  misc_feature (135)..(165): Pfam Id: PF01266 Pfam Desc: FAD dependent oxidoreductase
  misc_feature (135)..(168): Pfam Id: PF00890 Pfam Desc: FAD binding domain
  misc_feature (133)..(164): Pfam Id: PF01494 Pfam Desc: FAD binding domain
  misc_feature (522)..(577): Pfam Id: PF05199 Pfam Desc: GMC oxidoreductase
  misc_feature (180)..(323): Pfam Id: PF00732 Pfam Desc: GMC oxidoreductase
  misc_feature (334)..(383): Pfam Id: PF00732 Pfam Desc: GMC oxidoreductase
  misc_feature (135)..(161): Pfam Id: PF07992 Pfam Desc: Pyridine nucleotide-disulphide oxidoreductase
  misc_feature (131)..(161): Pfam Id: PF01946 Pfam Desc: Thi4 family
  misc_feature (85)..(582): NCBI GI: 154309784 Blast Desc: BC1G_07362 [Botryotinia fuckeliana B05.10] gi|150851823|gb|EDN27016.1| BC1G_07362 [Botryotinia fuckeliana B05.10]
  misc_feature (85)..(582): NCBI GI: 156052058 Blast Desc: SS1G_07437 [Sclerotinia sclerotiorum 1980] gi|154705214|gb|EDO04953.1| SS1G_07437 [Sclerotinia sclerotiorum 1980]
  misc_feature (81)..(582): NCBI GI: 85091650 Blast Desc: NCU08977 [Neurospora crassa OR74A] gi|28920401|gb|EAA29769.1| [Neurospora crassa OR74A]
  misc_feature (6)..(582): NCBI GI: 115397345 Blast Desc: conserved [Aspergillus terreus NIH2624] gi|114192455|gb|EAU34155.1| conserved [Aspergillus terreus NIH2624]
  misc_feature (82)..(582): NCBI GI: 121700595 Blast Desc: long chain fatty alcohol oxidase, [Aspergillus clavatus NRRL 1] gi|119396705|gb|EAW07136.1| long chain fatty alcohol oxidase, [Aspergillus clavatus NRRL 1]
  misc_feature (87)..(582): NCBI GI: 67516683 Blast Desc: AN0623.2 [Aspergillus nidulans FGSC A4] gi|40746010|gb|EAA65166.1| AN0623.2 [Aspergillus nidulans FGSC A4] gi|259489111|tpe|CBF89112.1| TPA: long chain fatty alcohol
  misc_feature (82)..(581): NCBI GI: 70996648 Blast Desc: long chain fatty alcohol oxidase [Aspergillus fumigatus Af293] gi|66850714|gb|EAL91041.1| long chain fatty alcohol oxidase, [Aspergillus fumigatus Af293] long chain fatty
  misc_feature (2)..(582): NCBI GI: 255957169 Blast Desc: Pc21g23700 [Penicillium chrysogenum Wisconsin 54-1255] gi|211591048|emb|CAP97267.1| Pc21g23700 [Penicillium chrysogenum Wisconsin 54-1255]
  misc_feature (82)..(581): NCBI GI: 119494301 Blast Desc: long chain fatty alcohol oxidase, [Neosartorya fischeri NRRL 181] gi|119412208|gb|EAW22149.1| long chain fatty alcohol oxidase, [Neosartorya fischeri NRRL 181]
  misc_feature (85)..(582): NCBI GI: 189208306 Blast Desc: long chain fatty alcohol oxidase [Pyrenophora tritici-repentis Pt-1C-BFP] gi|187976579|gb|EDU43205.1| long chain fatty alcohol oxidase [Pyrenophora tritici-repentis
  misc_feature (131)..(565): SWISSPROT Homolog: EC 1.1.99.1 Choline dehydrogenase
MSIATLSEAQMKLLLGLLDAVVPAIAPDAPSLVEEDRLVIPKEELQSLFRNMMGDNNENRFSFDDFLDYMASRPSDDPISVFITLGKACWSQTNKSYLQLNGYEDYGLDMMPGPAFDFKFLQFEEAPEPAIVETDVVIVGSGCGGAVCAKVLAEAGLQVLVTDKGYYFPPTEFPMALDRLGNIFQGGAGLASIDGSTLVTAGMCWGGGGTVNWCASLQTPSYVRQEWAEAGLDFFLEAEYQESLDRVCEAMDVSDSAIDENLSNQVLREGSRKLNWRVDSVPQNTGGTSHACGSNCGRGCRTGEKQSTSTYWLPAAARADSSHSEREQIIEARAKTVILAAGTLNTPIILQRSGIKKNENIGKNLFLHPVINVAATWNEDVQPWKVAIFKPYVAMILFPWQNGADYKAAALQYRNMTCHISLCRDKQSGSVTPEPSDGSPVIDYSPSKFDRTHIITGVVTIAKLLYISGARAIFPAVPGVSPFRCAKATANRSVQDDEFIGWLRTLESSALDPIKATFNSAHQMGTSRMGNNPETSVVDKDGKVWGYDGLYVADASVFPSASGVNPMITVMALADRISRGIAMHYLQ

SEQ ID NO: 1930 - DNA, 1896 bp, Muscodor strobelii
  misc_feature: SGI EST ID NO. CUFF.5034.0
  misc_feature: Variant of the nucleotide sequence at SEQ ID NO 1928
actgtcaactggtgcgcgagtcttcagacgccgtcgtatgtccgacaagaatgggctgaggctggccttgacttcttcctagaagctgagtaccaggagagccttgaccgcgtctgtgaggcgatggatgtgagtgatagcgcaattgatgagaacctcagtaaccaagtattacgagaaggttcacgcaaactaaactggagagtggatagcgtgccacagaatactggaggcacctctcatgcctgtggaagcaattgtggtcggggatgccgtacaggagagaagcaaagcactagcacctattggctccctgccgcagctcgcgctggtgcgcgtttcatcgaaggctttgacgtttccaacgtgctggtgcaatacggccgatcgccgaaggccgtaggggtgactggactttagaaatctcaaggagctgatggcattccagattcgtcgcactccgaacgtgagcaaatcatagaagcacgcgcgaaaacagtcatactggctgctggcacactgaacacgccaataattctccagagaagtggtatcaagaatgagaatatcggaaagaacctgtttttacacccagtcatcaatgtggccgcaacgtggaacgaagacgtccagccttggaaaggggacattctctccagtgtcgtgaccgaatttgagaatctggacggacttgggcatggtgtgaagcttgagtaaaccgtgatgcagtaccgcaacatgacctgccatatctctctatgtcgcgacaagcagtctggcagtgtaacacctgagccgagtgacgggagcccagtaatagactacagtccgtccaaattcgatcgcacacatatcatcacgggagtagtcacaattgcaaagctgctttacatatctggtgctcgggccattttcccagcggtgcccggagtgtctccgtttcgttgtgcaaaagctactgctaaccgcagcgtccaagacgatgagtttatcggatggcttcgcacactagagagctcagctttggatcccatcaaggccactttcaactccgcacatcagatgggaacttcacgtatgggaaacaaccctgaaacaagcgttgtagataaggatggcaaggtttgggggtacgatgggctatatgtcgcggacgcaagtgttttcccgtccgcgagcggcgtcaacccaatgatcacagtgatggctctagccgatcgtatctctaggggtatcgcgatgcattacttacagtaaggtgctgtgattagatggagaagtgaatcgtggctttgtataagtcgggaaattacactttctatttcaggtcagtttgtcaagtttacctcgttggaggaagagcaaattttattccaattcgtctcaaattggtaaatattttcatctgcacgtgctgataacttttgagtttcccatgccaccctaggttaggaagagctaggcagtgtatggacttgaactgtcgagagggatgctttgttatcgcatcacgaacgtgtaccaaccggcctaaagcccaccatgtaaggacagcgcagtataaacacaagtcaaatcttgagcgaggtacttcgagttatgtcgtcttcatagatcttcgtaaattccgataggaagtgtcttaagtctaagtctccaaccattcagagtaagagcattttgcacataggctatgggttgaaatcattgagtcttcgctgattatgatgtgaattccgcataacacgctccctttacattcaaattaattatcaaatccattcatcctcaagcattcaaccatacataaaatcatagaacctcaaacagcaatttgtgagttaccaactcattacagtgacgcgggtatagaactcctcgcaaactcaaccgtcc

SEQ ID NO: 1931 - DNA, 1740 bp, Muscodor strobelii
  misc_feature: SGI cDNA ID NO. 560259
  misc_feature: Encodes the peptide sequence at SEQ ID NO 1932
atgtcgatagctacgctgtccgaagctcagatgaagcttttgttgggattgctagatgcagtcgtgcccgcaattgcaccagatgcgccgtcattagttgaggaggaccgtctggtcattcctaaagaggagcttcaatccttgtttcggaatatgatgggagacaacaacgagaatcgcttcagcttcgatgacttccttgattatatggcctcacgaccatccgacgacccaatttcggtcttcattactcttggcaaagcatgctggagccaaacaaacaagagttatcttcagcttaacggctacgaagactatggactagacatgatgcctggacctgcttttgatttcaaattccttcagttcgaggaagctccggagccagccatcgtcgaaacagatgtcgttatcgttggctctggctgcggcggtgcggtttgcgcaaaggttctcgccgaagctggactgcaagtccttgtgacggataagggctattatttcccaccgactgagtttccgatggcacttgaccgtctcggtaacatttttcaaggaggggctggcctggcttctattgatggttctacattggtaacagccggtatgtgttggggcggaggaggcactgtcaactggtgcgcgagtcttcagacgccgtcgtatgtccgacaagaatgggctgaggctggccttgacttcttcctagaagctgagtaccaggagagccttgaccgcgtctgtgaggcgatggatgtgagtgatagcgcaattgatgagaacctcagtaaccaagtattacgagaaggttcacgcaaactaaactggagagtggatagcgtgccacagaatactggaggcacctctcatgcctgtggaagcaattgtggtcggggatgccgtacaggagagaagcaaagcactagcacctattggctccctgccgcagctcgcgctgattcgtcgcactccgaacgtgagcaaatcatagaagcacgcgcgaaaacagtcatactggctgctggcacactgaacacgccaataattctccagagaagtggtatcaagaagaatgagaatatcggaaagaacctgtttttacacccagtcatcaatgtggccgcaacgtggaacgaagacgtccagccttggaaagcgatgattctcttcccctggcagaacggtgctgattataaggccgccgcgctacagtaccgcaacatgacctgccatatctctctatgtcgcgacaagcagtctggcagtgtaacacctgagccgagtgacgggagcccagtaatagactacagtccgtccaaattcgatcgcacacatatcatcacgggagtagtcacaattgcaaagctgctttacatatctggtgctcgggccattttcccagcggtgcccggagtgtctccgtttcgttgtgcaaaagctactgctaaccgcagcgtccaagacgatgagtttatcggatggcttcgcacactagagagctcagctttggatcccatcaaggccactttcaactccgcacatcagatgggaacttcacgtatgggaaacaaccctgaaacaagcgttgtagataaggatggcaaggtttgggggtacgatgggctatatgtcgcggacgcaagtgttttcccgtccgcgagcggcgtcaacccaatgatcacagtgatggctctagccgatcgtatctctaggggtatcgcgatgcattacttacagtaa

SEQ ID NO: 1932 - protein, 579 aa, Muscodor strobelii
  misc_feature: SGI Peptide ID NO. 560259
  misc_feature (410)..(569): Pfam Id: PF05199 Pfam Desc: GMC oxidoreductase
  misc_feature (180)..(383): Pfam Id: PF00732 Pfam Desc: GMC oxidoreductase
  misc_feature (135)..(165): Pfam Id: PF01266 Pfam Desc: FAD dependent oxidoreductase
  misc_feature (135)..(168): Pfam Id: PF00890 Pfam Desc: FAD binding domain
  misc_feature (133)..(164): Pfam Id: PF01494 Pfam Desc: FAD binding domain
  misc_feature (514)..(569): Pfam Id: PF05199 Pfam Desc: GMC oxidoreductase
  misc_feature (180)..(323): Pfam Id: PF00732 Pfam Desc: GMC oxidoreductase
  misc_feature (334)..(383): Pfam Id: PF00732 Pfam Desc: GMC oxidoreductase
  misc_feature (135)..(161): Pfam Id: PF07992 Pfam Desc: Pyridine nucleotide-disulphide oxidoreductase
  misc_feature (131)..(161): Pfam Id: PF01946 Pfam Desc: Thi4 family
  misc_feature (85)..(574): NCBI GI: 154309784 Blast Desc: BC1G_07362 [Botryotinia fuckeliana B05.10] gi|150851823|gb|EDN27016.1| BC1G_07362 [Botryotinia fuckeliana B05.10]
  misc_feature (85)..(574): NCBI GI: 156052058 Blast Desc: SS1G_07437 [Sclerotinia sclerotiorum 1980] gi|154705214|gb|EDO04953.1| SS1G_07437 [Sclerotinia sclerotiorum 1980]
  misc_feature (81)..(574): NCBI GI: 85091650 Blast Desc: NCU08977 [Neurospora crassa OR74A] gi|28920401|gb|EAA29769.1| [Neurospora crassa OR74A]
  misc_feature (6)..(574): NCBI GI: 115397345 Blast Desc: conserved [Aspergillus terreus NIH2624] gi|114192455|gb|EAU34155.1| conserved [Aspergillus terreus NIH2624]
  misc_feature (82)..(574): NCBI GI: 121700595 Blast Desc: long chain fatty alcohol oxidase, [Aspergillus clavatus NRRL 1] gi|119396705|gb|EAW07136.1| long chain fatty alcohol oxidase, [Aspergillus clavatus NRRL 1]
  misc_feature (82)..(573): NCBI GI: 70996648 Blast Desc: long chain fatty alcohol oxidase [Aspergillus fumigatus Af293] gi|66850714|gb|EAL91041.1| long chain fatty alcohol oxidase, [Aspergillus fumigatus Af293] long chain fatty
  misc_feature (87)..(574): NCBI GI: 67516683 Blast Desc: AN0623.2 [Aspergillus nidulans FGSC A4] gi|40746010|gb|EAA65166.1| AN0623.2 [Aspergillus nidulans FGSC A4] gi|259489111|tpe|CBF89112.1| TPA: long chain fatty alcohol
  misc_feature (2)..(574): NCBI GI: 255957169 Blast Desc: Pc21g23700 [Penicillium chrysogenum Wisconsin 54-1255] gi|211591048|emb|CAP97267.1| Pc21g23700 [Penicillium chrysogenum Wisconsin 54-1255]
  misc_feature (82)..(573): NCBI GI: 119494301 Blast Desc: long chain fatty alcohol oxidase, [Neosartorya fischeri NRRL 181] gi|119412208|gb|EAW22149.1| long chain fatty alcohol oxidase, [Neosartorya fischeri NRRL 181]
  misc_feature (85)..(574): NCBI GI: 189208306 Blast Desc: long chain fatty alcohol oxidase [Pyrenophora tritici-repentis Pt-1C-BFP] gi|187976579|gb|EDU43205.1| long chain fatty alcohol oxidase [Pyrenophora tritici-repentis
  misc_feature (131)..(557): SWISSPROT Homolog: EC 1.1.99.1 Choline dehydrogenase
MSIATLSEAQMKLLLGLLDAVVPAIAPDAPSLVEEDRLVIPKEELQSLFRNMMGDNNENRFSFDDFLDYMASRPSDDPISVFITLGKACWSQTNKSYLQLNGYEDYGLDMMPGPAFDFKFLQFEEAPEPAIVETDVVIVGSGCGGAVCAKVLAEAGLQVLVTDKGYYFPPTEFPMALDRLGNIFQGGAGLASIDGSTLVTAGMCWGGGGTVNWCASLQTPSYVRQEWAEAGLDFFLEAEYQESLDRVCEAMDVSDSAIDENLSNQVLREGSRKLNWRVDSVPQNTGGTSHACGSNCGRGCRTGEKQSTSTYWLPAAARADSSHSEREQIIEARAKTVILAAGTLNTPIILQRSGIKKNENIGKNLFLHPVINVAATWNEDVQPWKAMILFPWQNGADYKAAALQYRNMTCHISLCRDKQSGSVTPEPSDGSPVIDYSPSKFDRTHIITGVVTIAKLLYISGARAIFPAVPGVSPFRCAKATANRSVQDDEFIGWLRTLESSALDPIKATFNSAHQMGTSRMGNNPETSVVDKDGKVWGYDGLYVADASVFPSASGVNPMITVMALADRISRGIAMHYLQ

SEQ ID NO: 1933 - DNA, 1896 bp, Muscodor strobelii; identical to SEQ ID NO: 1930
  misc_feature: SGI EST ID NO. CUFF.5034.0
  misc_feature: Variant of the nucleotide sequence at SEQ ID NO 1931

SEQ ID NO: 1934 - DNA, 1092 bp, Muscodor strobelii
  misc_feature: SGI cDNA ID NO. 560260
  misc_feature: Elevated expression when VOC is produced
  misc_feature: Encodes the peptide sequence at SEQ ID NO 1935
atgcagctattgctatctcttttcttggtctctctgaccgcggcgggcggcgttgttgctgctgctggacctggcgatgccgatacggttgttgcagctatcactgcactgaacaccttttataatacttcgaccggactttggggaaatgagacgaccccatggtggcatagtgctgtatctcttcgtgtccttgccgagtacatgcttacaacggggtcgaaagactacgttgaccaggctgcttatgtcgtcagcaacaaccgggccccattgaattggtggcccgaaggcgacggtgactttcgcgctgacagcacggacgacactggctggtgggcaatggctcttgttgacctgtaccaggtcactggcaacgagacgtatctggatatcgcaaaagaggacgaagcctacatgtatagctattggaacacgacgacctgtgacggcgggttgatatgggctattcctactcggacatatcacaacgcaatctctaacgagttgtacctggagcttacagcaactctccacaacgtcatttcaggtgacacgcattatctggaccaagcaatggaggagtggaagtggttcaacgcaagcggcatgatcaacgaccagtggcttgtcaatgatggcttgacggacaatagtgcctgtacgaacaacgggcagacggtatggtcgtataaccagggtgttctcatcgcaggtctcgtccagctcgctaaggcgactagcgatgcgacatatctcgatattgcacagaacattgcagacgccgtcgtcaacagcgataccctatctcccggcggcattctgaccgaagcaggatgtcccaatgaatccgactgcgaacctaacggcacgtccttcaaggggacattcattcgcggtcttgccaagctgaatgcagcactaggcggtgacccgtatacctcgtacatcaacaacaacgcgcagtcgctgtatgataatgccagacaaagctcgactaactactatgggtttacctggcagggcccttttgatggccaagagacgggaaaacaagcttctgctataaatcttctaatgtctactttgtaa

SEQ ID NO: 1935 - protein, 363 aa, Muscodor strobelii
  misc_feature: SGI Peptide ID NO. 560260
  misc_feature (18)..(363): Pfam Id: PF03663 Pfam Desc: Glycosyl hydrolase family 76
  misc_feature (108)..(309): Pfam Id: PF03663 Pfam Desc: Glycosyl hydrolase family 76
  misc_feature (40)..(363): NCBI GI: 256773449 Blast Desc: glycosyl hydrolase [Streptomyces hygroscopicus ATCC 53653]
  misc_feature (8)..(363): NCBI GI: 85083916 Blast Desc: NCU00086 [Neurospora crassa OR74A] gi|28918298|gb|EAA27974.1| [Neurospora crassa OR74A]
  misc_feature (37)..(363): NCBI GI: 116192165 Blast Desc: CHGG_05800 [Chaetomium globosum CBS 148.51] gi|88181713|gb|EAQ89181.1| CHGG_05800 [Chaetomium globosum CBS 148.51]
  misc_feature (28)..(363): NCBI GI: 284044020 Blast Desc: glycoside hydrolase family 76 [Conexibacter woesei DSM 14684] gi|283948241|gb|ADB50985.1| glycoside hydrolase family 76 [Conexibacter woesei DSM 14684]
  misc_feature (30)..(363): NCBI GI: 71023981 Blast Desc: UM06073.1 [Ustilago maydis 521] gi|46101663|gb|EAK86896.1| UM06073.1 [Ustilago maydis 521]
  misc_feature (31)..(359): NCBI GI: 29827168 Blast Desc: glycosyl hydrolase [Streptomyces avermitilis MA-4680] gi|29604266|dbj|BAC68337.1| glycosyl hydrolase, secreted [Streptomyces avermitilis MA-4680]
  misc_feature (28)..(362): NCBI GI: 284029634 Blast Desc: glycoside hydrolase family 76 [Kribbella flavida DSM 17836] gi|283808927|gb|ADB30766.1| glycoside hydrolase family 76 [Kribbella flavida DSM 17836]
  misc_feature (28)..(359): NCBI GI: 115374487 Blast Desc: glycosyl hydrolase [Stigmatella aurantiaca DW4/3-1] gi|115368466|gb|EAU67420.1| glycosyl hydrolase [Stigmatella aurantiaca DW4/3-1]
  misc_feature (31)..(359): NCBI GI: 256679903 Blast Desc: glycosyl hydrolase [Streptomyces sp. SPB78]
  misc_feature (55)..(359): NCBI GI: 254375291 Blast Desc: glycosyl hydrolase [Streptomyces sp. SPB74] gi|197695111|gb|EDY42044.1| glycosyl hydrolase [Streptomyces sp. SPB74]
  misc_feature (52)..(301): SWISSPROT Homolog: EC 3.2.1.101 Mannan endo-1,6-alpha-mannosidase
  misc_feature: Useful for introducing or modulating the production of volatile compounds
MQLLLSLFLVSLTAAGGVVAAAGPGDADTVVAAITALNTFYNTSTGLWGNETTPWWHSAVSLRVLAEYMLTTGSKDYVDQAAYVVSNNRAPLNWWPEGDGDFRADSTDDTGWWAMALVDLYQVTGNETYLDIAKEDEAYMYSYWNTTTCDGGLIWAIPTRTYHNAISNELYLELTATLHNVISGDTHYLDQAMEEWKWFNASGMINDQWLVNDGLTDNSACTNNGQTVWSYNQGVLIAGLVQLAKATSDATYLDIAQNIADAVVNSDTLSPGGILTEAGCPNESDCEPNGTSFKGTFIRGLAKLNAALGGDPYTSYINNNAQSLYDNARQSSTNYYGFTWQGPFDGQETGKQASAINLLMSTL

SEQ ID NO: 1936 - DNA, 1798 bp, Muscodor strobelii
  misc_feature: SGI EST ID NO. CUFF.5051.0
  misc_feature: Variant of the nucleotide sequence at SEQ ID NO 1934
cgatgcacgtctcaccaatactttcaaattcaggcgtgtcccggtcttgcatgacgggcgtgacttcctgcatggcgtcccgttcctgacacaaataccatgcggttcatgctgtattacgtcagagagggcgcttaagctacgttgtgtctttgactgatgaaatgaccctaaccaggacatttattgattccattttcagacctactatcatctaacatggcactcaagacggaacgagatcctcgtttcagcttcgcgcgcggccgttctccggacttcacccgttccgagacatgatcgagagcccacgagatagctcaccatgccgggccatgtgcctaaattgaccttctcaacctcacactccagtctttcttttatcttttacaagaaaacaacatcgctttcggcatcgctactccgatgctagttcaagagaaccaccgtatcacgtaaagtgcacggaggaacaggagtataagatcatgtctcaagatttggaataagtcaattgggttccttcttcgctattccttcactcttagttcttggtcgttctttaggctatctacgacttggagccatctatcaagatgcagctattgctatctcttttcttggtctctctgaccgcggcgggcggcgttgttgctgctgctggacctggcgatgccgatacggttgttgcagctatcactgcactgaacaccttttataatacttcgaccggactttggggaaatgagacgaccccatggtggcatagtgctgtatctcttcgtgtccttgccgagtacatgcttacaacggggtcgaaagactacgttgaccaggctgcttatgtcgtcagcaacaaccgggccccattgaattggtggcccgaaggcgacggtgactttcgcgctgacagcacggacgacactggctggtgggcaatggctcttgttgacctgtaccaggtcactggcaacgagacgtatctggatatcgcaaaagaggacgaagcctacatgtatagctattggaacacgacgacctgtgacggcgggttgatatgggctattcctactcggacatatcacaacgcaatctctaacgagttgtacctggagcttacagcaactctccacaacgtcatttcaggtgacacgcattatctggaccaagcaatggaggagtggaagtggttcaacgcaagcggcatgatcaacgaccagtggcttgtcaatgatggcttgacggacaatagtgcctgtacgaacaacgggcagacggtatggtcgtataaccagggtgttctcatcgcaggtctcgtccagctcgctaaggcgactagcgatgcgacatatctcgatattgcacagaacattgcagacgccgtcgtcaacagcgataccctatctcccggcggcattctgaccgaagcaggatgtcccaatgaatccgactgcgaacctaacggcacgtccttcaaggggacattcattcgcggtcttgccaagctgaatgcagcactaggcggtgacccgtatacctcgtacatcaacaacaacgcgcagtcgctgtatgataatgccagacaaagctcgactaactactatgggtttacctggcagggcccttttgatggccaagagacgggaaaacaagcttctgctataaatcttctaatgtctactttgtaaatatttctcaagcagaccttatggcagttgatatcattataatagtcgtgaaagcacacctgaacagaacactgctcgtcggcatcggagaccttctcatgatcggctcg

SEQ ID NO: 1937 - DNA, 498 bp, Muscodor strobelii
  misc_feature: SGI cDNA ID NO. 560261
  misc_feature: Elevated expression when VOC is produced
  misc_feature: Encodes the peptide sequence at SEQ ID NO 1938
atgaaactacttctcgtcctttctatttttgggtttcaagccagtctacagtcatctgagcttccgggaagcgatctaaatcactgctataaagttgggtacgtctttgaaggagggaaattctgggtcgtcgccgattgctacggtggtgcacctattccaggaccagatgccggtacctatagtgcaatggacttaaaccgctgtatcgccaactctgagggcaacttggtcgggcaagaaaatggcaactttgctcaatcttgcagcgaaatcatgttgtcgggcaccaaccttacagcgctctgccctactgggacaaaggccccggcccaagagacttcaattgatatcaacgatattgttaaagtggcgtacggaggacagccagggtgctttggtcagtccgcctgcatgtacgactttggctgttcggatggcccatctctttcgtctactgattgggtttacgacattgagaataaaacgatggtctag

SEQ ID NO: 1938 - protein, 165 aa, Muscodor strobelii
  misc_feature: SGI Peptide ID NO. 560261
  misc_feature (65)..(106): Pfam Id: PF08881 Pfam Desc: CVNH domain
  misc_feature: Useful for introducing or modulating the production of volatile compounds
MKLLLVLSIFGFQASLQSSELPGSDLNHCYKVGYVFEGGKFWVVADCYGGAPIPGPDAGTYSAMDLNRCIANSEGNLVGQENGNFAQSCSEIMLSGTNLTALCPTGTKAPAQETSIDINDIVKVAYGGQPGCFGQSACMYDFGCSDGPSLSSTDWVYDIENKTMV

SEQ ID NO: 1939 - DNA, 1447 bp, Muscodor strobelii
  misc_feature: SGI EST ID NO. CUFF.5054.0
  misc_feature: Variant of the nucleotide sequence at SEQ ID NO 1937
ctacttcataattttcatatgtttcgttccatagttgattattaattgttaacacgtcaagatgaaactacttctcgtcctttctatttttgggtttcaagccagtctacagtcatctgagcttccgggaagcgatctaaatcactgctataaagttgggtacgtctttgaaggagggaaattctgggtcgtcgccgattgctacggtggtgcacctattccaggaccagatgccggtacctatagtgcaatggacttaaaccgctgtatcgccaactctgagggcaacttggtcgggcaagaaaatggcaactttgctcaatcttgcagcgaaatcatgttgtcgggcaccaaccttacagcgctctgccctactgggacaaaggccccggcccaagagacttcaattgatatcaacgatattgttaaagtggcgtacggaggacagccagggtgctttggtcagtccgcctgcatgtacgactttggctgttcggatggcccatctctttcgtctactgattgggtttacgacattgagaataaaacgatggtctagacaaggcagatgttcatgtaatcatcaggtgatcaatcttgtatcttgtctgcaattgcatagacagtagtatagtggttttttgaagcgcttggtcatcgaagtcgtcaagttgaacattcaagtatcaggcacttgctatgttgtatttcagggaacgtatgttagtttcggggtatttgattgccgatcacggcgtagcgtgcgtagtctacgtcacacagagtcaaagtcatatgatatacacgcaatggtgatatgtgaatttctgttatatatcagctgcctagtccacgccgcaaacacagctacaaagtcttctagcgtatctcttcctgtccgtcttatattatccttgtggtcgcaccgacttctatttctagatatgacctgatcgtacatccttagagtcgaggaagacaacatgatcagagtattataagtttatgaaaggattgttgcagctccccgagtcttacgtccccaaagtcaagaatagaactcctgtttcacagttgaccacgaagcgtggtcgacattggcaggttaagattcaagattggggaacgactgtctattggctctcttgttctgatggcgagcagagaaacgacagaacggtggactatcacccgcgtataaaagggtggtcatctctcccatagtcagagctagccatcctcattgtcaccatcgtactggtaacagaaatagaaatctcaatcggaagtcaatcaattcgcctcgtattttatgcgagtataattgccacctattcttctactactaccactcaccatcactcaaaatgcgatcttcccaggcaatcttcattggtttagcagcagctgcaactcaggttcaggctggctgttatactagcggtaa

SEQ ID NO: 1940 - DNA, 366 bp, Muscodor strobelii
  misc_feature: SGI cDNA ID NO. 560262
  misc_feature: Encodes the peptide sequence at SEQ ID NO 1941
atgcgatcttcccaggcaatcttcattggtttagcagcagctgcaactcaggttcaggctggctgttatactagcggtaatttatggggtccaaatgcgcaagaagctgccgaacaggcatgtgccgaactcagcggtgattatggtccgcaggacaccgtcagcggttcgaaatccatatgtatcgataaggacgatcaaaagaacgaattcttcatctggcatatccaggaaggagacaggactttgaggcctgacgagtgcctcgatggcctactgaaagagatcactgggtgcgaccacggtggtgacacctcttacacaaattggagatataaggccgacccaaatgcgggagcttgttga

SEQ ID NO: 1941 - protein, 121 aa, Muscodor strobelii
  misc_feature: SGI Peptide ID NO. 560262
  misc_feature (15)..(121): NCBI GI: 226282594 Blast Desc: PAAG_01081 [Paracoccidioides brasiliensis Pb01]
  misc_feature (19)..(121): NCBI GI: 225681061 Blast Desc: [Paracoccidioides brasiliensis Pb03]
  misc_feature (19)..(121): NCBI GI: 226292240 Blast Desc: PADG_03744 [Paracoccidioides brasiliensis Pb18]
  misc_feature (11)..(121): NCBI GI: 169618764 Blast Desc: SNOG_12574 [Phaeosphaeria nodorum SN15] gi|111058752|gb|EAT79872.1| SNOG_12574 [Phaeosphaeria nodorum SN15]
  misc_feature (7)..(121): NCBI GI: 171693607 Blast Desc: protein product [Podospora anserina] gi|170946752|emb|CAP73556.1| protein product [Podospora anserina]
  misc_feature (18)..(114): NCBI GI: 145609782 Blast Desc: [Magnaporthe grisea 70-15] gi|145017172|gb|EDK01535.1| [Magnaporthe grisea 70-15]
  misc_feature (18)..(113): NCBI GI: 149210593 Blast Desc: [Magnaporthe grisea 70-15]
  misc_feature (6)..(113): NCBI GI: 169618744 Blast Desc: SNOG_12564 [Phaeosphaeria nodorum SN15] gi|160703670|gb|EAT79862.2| SNOG_12564 [Phaeosphaeria nodorum SN15]
  misc_feature (21)..(121): NCBI GI: 171682124 Blast Desc: protein product [Podospora anserina] gi|170941021|emb|CAP66671.1| protein product [Podospora anserina]
MRSSQAIFIGLAAAATQVQAGCYTSGNLWGPNAQEAAEQACAELSGDYGPQDTVSGSKSICIDKDDQKNEFFIWHIQEGDRTLRPDECLDGLLKEITGCDHGGDTSYTNWRYKADPNAGAC

SEQ ID NO: 1942 - DNA, 384 bp, Muscodor strobelii
  misc_feature: SGI EST ID NO. CUFF.5057.0
  misc_feature: Variant of the nucleotide sequence at SEQ ID NO 1940
tctggcatatccaggaaggagacaggactttgaggcctgacgagtgcctcgatggcctactgaaagagatcactgggtgcgaccacggtggtgacacctcttacacaaattggagatataaggccgacccaaatgcgggagcttgttgaaagctatgctaaaaaaatcaaatcgcctggtgtaacctgagaagaaggcaggatagttcgctgttatttgcgggcattggtcaaatagtgagaacagtgtcgaggtcgagcataatctatcgtgttcggaaactgtagcttctattctatgcggggttcttcaactggctttactttgctttgtttgtcctagtcgttagctttcgatcatcgaagcatcgatccattcgttagt

SEQ ID NO: 1943 - DNA, 1596 bp, Muscodor strobelii
  misc_feature: SGI cDNA ID NO. 560263
  misc_feature: Encodes the peptide sequence at SEQ ID NO 1944
atgaagacccttgctgcattatcgtcgtttatgtttgcgtcgttgtctgcaactgcactcggcgaatccatccctcgctactttcagcgtgaacccttcacgcggcgcgacttgaacgtcaagcgtgtgcagacggaacttagtgcgttgctgtctccgaggaccaccatctttgggccgaaagatccgcgcttcgctgaggcaacattgcggtatagcaactatggtgcacccgatgtcgaagtgcttgtcgtggtaggggcagagagcgatgtcgcgaagatcgtgaaatattcgaatgagaatagtattgagtttatggccgccaaccgtcgtcatggacatacttacgccacttcaacattcaaaggtctaatcatcgagatgggtatgctgcaggatatccaaattcaagctggcaaccagtcggcatggtttcagggaggcacttacgatggtcgagtcatggagtacttgtgggacaaggggtttgttgccagtaagtgtaaccatctacggatatgggtattattgctcatcttcatatcagctaccggtagttgcgactgtgtcggcatgatgggacctggtctgggtggcgggcacggtcgtaacgaaggcctgtacggcctgatcagcgacaatatcatcaatctcaacgttgtccttgcaaatggaaaagaaatccgtgtcaatgaaactggccacgctgatctattctggggcatgcagggagctggccataactttggcattgtgaccagtttcgagttgaagatccatccgcgtctagtcgactcatggtactaccacaactacatctatactgaggacaagcttgagcaactctttgaggaagcgaggaagtttcaccgctctgataacggaactacgcctgtcaacatggctttcaactacgccaccttcgcgctcaatacaactattagcacggataaggctgtcatccaatggtacttctcataccgcggctccggcgaagaggccgaagttttgctggaaccattcaacgcgattccggctgtctggaatgaaatgggtgatacgaccttcccgggcatctctgtcatccaagccacagacctagcctcggccgcgtgctcccaaaaccatacctggatctcgtccacgtcaacactggtcgagtacaacgtcacggcagagcgccagttgtatgagctattcaatgacttcctgcgactgtatcctgagttacaggcaagtgttacccatgagggctatgccaacgccgccatgcatgccgttccatccaaggactcggcttatccatggcgggactacaatcacaacaacatcgtcaacatcctagtgcctccggaattcgctaatatgaccaacattgcgcaccagtgggcggccgacatgcgcgacgtgtggaacgccgggcaacccagtgttctgccagccaactacgtcaattacgccaacggcagcgagtcggtgccgtcgatttatgggtatgagcactggcggatacaccgactaaccacgctgaaggaaaagtatgatccgcataaccggtttcgcttctataaccctatctttccgtcccaatag

SEQ ID NO: 1944 - protein, 531 aa, Muscodor strobelii
  misc_feature: SGI Peptide ID NO. 560263
  misc_feature (80)..(232): Pfam Id: PF01565 Pfam Desc: FAD binding domain
  misc_feature (185)..(232): Pfam Id: PF01565 Pfam Desc: FAD binding domain
  misc_feature (80)..(166): Pfam Id: PF01565 Pfam Desc: FAD binding domain
  misc_feature (1)..(527): NCBI GI: 85089908 Blast Desc: NCU09635 [Neurospora crassa OR74A] gi|28919498|gb|EAA28930.1| conserved [Neurospora crassa OR74A]
  misc_feature (1)..(527): NCBI GI: 39970897 Blast Desc: MGG_02915 [Magnaporthe grisea 70-15] gi|149210401|ref|XP_001522575.1| MGCH7_ch7g678 [Magnaporthe grisea 70-15] gi|86196633|gb|EAQ71271.1| MGCH7_ch7g678 grisea
  misc_feature (19)..(527): NCBI GI: 261358233 Blast Desc: FAD binding domain-containing protein [Verticillium albo-atrum VaMs.102]
  misc_feature (5)..(527): NCBI GI: 170940309 Blast Desc: protein product [Podospora anserina]
  misc_feature (1)..(527): NCBI GI: 39943374 Blast Desc: MGG_10907 [Magnaporthe grisea 70-15] gi|145010943|gb|EDJ95599.1| MGG_10907 [Magnaporthe grisea 70-15]
  misc_feature (33)..(530): NCBI GI: 85119273 Blast Desc: NCU02927 [Neurospora crassa OR74A] gi|28927420|gb|EAA36373.1| [Neurospora crassa OR74A]
  misc_feature (7)..(530): NCBI GI: 67528330 Blast Desc: AN4363.2 [Aspergillus nidulans FGSC A4] gi|40741334|gb|EAA60524.1| AN4363.2 [Aspergillus nidulans FGSC A4] gi|259482827|tpe|CBF77678.1| TPA: conserved [Aspergillus FGSC
  misc_feature (42)..(527): NCBI GI: 149211333 Blast Desc: MGCH7_ch7g1123 [Magnaporthe grisea 70-15] gi|86197078|gb|EAQ71716.1| MGCH7_ch7g1123 [Magnaporthe grisea 70-15]
  misc_feature (1)..(529): NCBI GI: 171681662 Blast Desc: protein product [Podospora anserina] gi|170940790|emb|CAP66439.1| protein product [Podospora anserina]
  misc_feature (93)..(530): NCBI GI: 226885245 Blast Desc: dehydrogenase [Sordaria macrospora]
MKTLAALSSFMFASLSATALGESIPRYFQREPFTRRDLNVKRVQTELSALLSPRTTIFGPKDPRFAEATLRYSNYGAPDVEVLVVVGAESDVAKIVKYSNENSIEFMAANRRHGHTYATSTFKGLIIEMGMLQDIQIQAGNQSAWFQGGTYDGRVMEYLWDKGFVASKCNHLRIWVLLLIFISATGSCDCVGMMGPGLGGGHGRNEGLYGLISDNIINLNVVLANGKEIRVNETGHADLFWGMQGAGHNFGIVTSFELKIHPRLVDSWYYHNYIYTEDKLEQLFEEARKFHRSDNGTTPVNMAFNYATFALNTTISTDKAVIQWYFSYRGSGEEAEVLLEPFNAIPAVWNEMGDTTFPGISVIQATDLASAACSQNHTWISSTSTLVEYNVTAERQLYELFNDFLRLYPELQASVTHEGYANAAMHAVPSKDSAYPWRDYNHNNIVNILVPPEFANMTNIAHQWAADMRDVWNAGQPSVLPANYVNYANGSESVPSIYGYEHWRIHRLTTLKEKYDPHNRFRFYNPIFPSQ

SEQ ID NO: 1945 - DNA, 480 bp, Muscodor strobelii
  misc_feature: SGI cDNA ID NO. 560264
  misc_feature: Encodes the peptide sequence at SEQ ID NO 1946
atggccgacccaactgagctcatattggatctccagcgccgacttcaactgctcgaagacaatcaagccatcacctctctcttacaccgctactgccgtatggccgacagccaacaatggacatcatacgccgcatgtttcaccacagacggcgtggtacgcttcgaggactggaacgaaacggtaggccgcgaccagatcgccgcgctcattggcggcggtctggggcgcttccaaggcctgcagcactcgctgactaacatcgacttggccgtcagcggcgacatcgccacgggaacgtgctacctctcgtttgcggcgaccatcaacacaaccaagccgcacgagttccagggcttcggcgggccgtacgagatgacattccgccgtacggaagaggggtggaggattgcgaccctgaagttgcgcaagatatgggcacatgggaatgatggtgaaggggctattggtggcgagtga

SEQ ID NO: 1946 - protein, 159 aa, Muscodor strobelii
  misc_feature: SGI Peptide ID NO. 560264
  misc_feature (4)..(151): NCBI GI: 254389640 Blast Desc: GdmX [Streptomyces clavuligerus ATCC 27064] gi|197703353|gb|EDY49165.1| GdmX [Streptomyces clavuligerus ATCC 27064]
  misc_feature (11)..(151): NCBI GI: 63033850 Blast Desc: HbmX [Streptomyces hygroscopicus]
  misc_feature (11)..(151): NCBI GI: 28192600 Blast Desc: GdmX [Streptomyces hygroscopicus]
  misc_feature (10)..(146): NCBI GI: 284043552 Blast Desc: Cwoe_2092 [Conexibacter woesei DSM 14684] gi|283947773|gb|ADB50517.1| conserved [Conexibacter woesei DSM 14684]
  misc_feature (10)..(155): NCBI GI: 256771947 Blast Desc: StreC_35918 [Streptomyces sp. C]
  misc_feature (9)..(146): NCBI GI: 254820499 Blast Desc: MintA_11251 [Mycobacterium intracellulare ATCC 13950]
  misc_feature (15)..(152): NCBI GI: 158316368 Blast Desc: Franean1_4599 [Frankia sp. EAN1pec] gi|158111773|gb|ABW13970.1| conserved [Frankia sp. EAN1pec]
  misc_feature (20)..(146): NCBI GI: 126434575 Blast Desc: Mjls_1988 [Mycobacterium sp. JLS] gi|126234375|gb|ABN97775.1| conserved [Mycobacterium sp. JLS]
  misc_feature (20)..(146): NCBI GI: 108798975 Blast Desc: Mmcs_2007 [Mycobacterium sp. MCS] gi|119868090|ref|YP_938042.1| Mkms_2053 [Mycobacterium sp. KMS] gi|108769394|gb|ABG08116.1| conserved [Mycobacterium sp. MCS] sp.
  misc_feature (15)..(137): NCBI GI: 94495177 Blast Desc: SKA58_01750 [Sphingomonas sp. SKA58] gi|94425443|gb|EAT10463.1| SKA58_01750 [Sphingomonas sp. SKA58]
MADPTELILDLQRRLQLLEDNQAITSLLHRYCRMADSQQWTSYAACFTTDGVVRFEDWNETVGRDQIAALIGGGLGRFQGLQHSLTNIDLAVSGDIATGTCYLSFAATINTTKPHEFQGFGGPYEMTFRRTEEGWRIATLKLRKIWAHGNDGEGAIGGE

SEQ ID NO: 1947 - DNA, 225 bp, Muscodor strobelii
  misc_feature: SGI EST ID NO. CUFF.5063.0
  misc_feature: Variant of the nucleotide sequence at SEQ ID NO 1945
tggcgagtgaggatcggtgagttatgatagcgaagctgccagaatatctcacgtagctgtctaatccataagctgtggtggcgccacgcttgagaatgagaatcgccggatctatcggataaggagtatagacacatcctctctggatcaagcatcagtgggcacgactgtgatttactggtagtctgaggttgtgatttgggtgacacagcacgctctgcaaac

SEQ ID NO: 1948 - DNA, 1536 bp, Muscodor strobelii
  misc_feature: SGI cDNA ID NO. 560265
  misc_feature: Elevated expression when VOC is produced
  misc_feature: Encodes the peptide sequence at SEQ ID NO 1949
atgttcatgagctggaagctctcgcgacatgggggttccgggactctaacgaagcgccccgtcgtctttgacccggtcacggcgcggacaactgggctgcaagcctgctcgagatgccgggcaaaaaaagttaagtgtatctgggtcctcgggggctgcgaccgttgcaaaatatcgggttccgagtgcatctacgagacaacgacaggcagcactggcaaaagtagtgagcggaaatcgaagcctgtccctgatattggccctagtcctggcacgggccgcgcaatcactgcgccagcggaccagaccgagaatgttagtattgcgcccccagcatcgccagggtcaagcgggggatcatcggccatggatgcgcttctaagtcccatgggtcaagaagtgatggagacagatgacttgtccgagattcggtccttggttgagactcctttgtccgatttgttatctgttggcatgatgagagagatggcaacagtgccgacaccatccccgacagacacagatttggtggatccggatatagcagacgccgacttcacgatgccgttcatggagtcgctaagcggtagtaatatgggtatactaagctcgtcaatgacggatccggacgggacgataccagatgattcctttggagacatttacaaccgcactacatccctggcatcgatgcattttggcccgtcggtcgcctgcgacagcgaaccaagcaacgaactcactggcctggatccatgggcgacgttagagatgtggcagaccaatacatgggcagtcgcatcccaaacaccccatatgccatctttatctacgccaaccatggctagatttcagacaggcgttttcacgaagcgaggcgccgcggagagcaatgtcgaaaaggggcacagtgacaacgcaggagcaccttgcaggtgcttgcgccgtcttgttgtgctggtcgacgagatagagtcggttgtcgacgggcacagtctgatgcggctggaccgagccatggcagctcataaagaggcgctcagacgcggcatcgccatgctgcagtgcgagacgtgtaagggtcgcgttgagaatatgatgattttgacactccttgtggataagctggtccgcgtatgccgccatgtaggcgacgagtgcgccactgtgctcaccaatagccatggcaacacttctagtagcagcggcgacgacgctagggctgtggtttcagacaaggtactcagtctatcgcttcaagaaggacacgctgttgtaccaaacacacctggcagcgaaaatggacgcacgtataacatagacgcacccgacgagtacctgtttgttgtggccgggctgctgcgcttccagctgcttcagctactcagattgacagagcagctgcagcatgtgaccgtgtgcgcgacgtcaggaccaatgagcagacggctaagcgcatgcaacgaggcattgcagatcatggtgcaagaggcagcgctggtcctttcgaaggagagcgacaggccgttgatctga

SEQ ID NO: 1949 - protein, 511 aa, Muscodor strobelii
  misc_feature: SGI Peptide ID NO. 560265
  misc_feature (34)..(72): Pfam Id: PF00172 Pfam Desc: Fungal Zn(2)-Cys(6) binuclear cluster domain
  misc_feature (308)..(471): NCBI GI: 240106732 Blast Desc: Fungal Zn binuclear cluster domain containing protein [Coccidioides posadasii C735 delta SOWgp]
  misc_feature (308)..(471): NCBI GI: 119174210 Blast Desc: [Coccidioides immitis RS]
  misc_feature (23)..(80): NCBI GI: 46109574 Blast Desc: FG01669.1 [Gibberella zeae PH-1]
  misc_feature (1)..(68): NCBI GI: 256730738 Blast Desc: NECHADRAFT_29856 [Nectria haematococca mpVI 77-13-4]
  misc_feature (295)..(472): NCBI GI: 39966972 Blast Desc: [Magnaporthe grisea 70-15] gi|145012817|gb|EDJ97458.1| [Magnaporthe grisea 70-15]
  misc_feature (16)..(105): NCBI GI: 261353696 Blast Desc: conserved [Verticillium albo-atrum VaMs.102]
  misc_feature (34)..(102): NCBI GI: 116200486 Blast Desc: CHGG_10788 [Chaetomium globosum CBS 148.51] gi|88175502|gb|EAQ82970.1| CHGG_10788 [Chaetomium globosum CBS 148.51]
  misc_feature (311)..(385): NCBI GI: 121712477 Blast Desc: C6 zinc finger domain protein [Aspergillus clavatus NRRL 1] gi|119402002|gb|EAW12424.1| C6 zinc finger domain protein [Aspergillus clavatus NRRL 1]
  misc_feature (311)..(385): NCBI GI: 67525645 Blast Desc: AN3280.2 [Aspergillus nidulans FGSC A4] gi|40744068|gb|EAA63248.1| [Aspergillus nidulans FGSC A4]
  misc_feature (311)..(385): NCBI GI: 259485753 Blast Desc: TPA: Zn(II)2Cys6 transcription factor (Eurofung) [Aspergillus nidulans FGSC A4]
  misc_feature: Useful for introducing or modulating the production of volatile compounds
MFMSWKLSRHGGSGTLTKRPVVFDPVTARTTGLQACSRCRAKKVKCIWVLGGCDRCKISGSECIYETTTGSTGKSSERKSKPVPDIGPSPGTGRAITAPADQTENVSIAPPASPGSSGGSSAMDALLSPMGQEVMETDDLSEIRSLVETPLSDLLSVGMMREMATVPTPSPTDTDLVDPDIADADFTMPFMESLSGSNMGILSSSMTDPDGTIPDDSFGDIYNRTTSLASMHFGPSVACDSEPSNELTGLDPWATLEMWQTNTWAVASQTPHMPSLSTPTMARFQTGVFTKRGAAESNVEKGHSDNAGAPCRCLRRLVVLVDEIESVVDGHSLMRLDRAMAAHKEALRRGIAMLQCETCKGRVENMMILTLLVDKLVRVCRHVGDECATVLTNSHGNTSSSSGDDARAVVSDKVLSLSLQEGHAVVPNTPGSENGRTYNIDAPDEYLFVVAGLLRFQLLQLLRLTEQLQHVTVCATSGPMSRRLSACNEALQIMVQEAALVLSKESDRPLI

SEQ ID NO: 1950 - DNA, 1020 bp, Muscodor strobelii
  misc_feature: SGI cDNA ID NO. 560266
  misc_feature: Elevated expression when VOC is produced
  misc_feature: Encodes the peptide sequence at SEQ ID NO 1951
atgtctcgcatcacgccatacgcggagctgttcacggaccccaaaggccctggcgacatccgtcccactgcaaccaagatcgtggaagaccaaggcctcatcgatagccccgagtggaaaggtagagttgctcttatcactggatgctcgcccggcggtcttggtcccgagacggccaaggcgcttcgcctcaccggcgcagatgtttatatcaccgtccgcgagcttaacaaaggcaaacaaattgccgacgatctcttggccgatggcaagccaggcaaggtagaagtcatcgaaatggacctgagctcgcttgagagcattaaggccgctgcacaagagttcctcagacggagtggcaacaagctcaatgtgctgatcaacaatgctggcgtcatggcaccgccctactctaagaccaaggatggcttcgaacttcagtttggcacaaatcacttgggccacttttacctcttcaatctagtcaaggacgctctcctcgcctcagcaacgcccgctttcaactcgcgcgtcgtcgcgctgtcctcgagcgggcatcgccgcggcggactcgacttctctgacctcaactgggagaagcgcgagttcgacactatcacagcctacggcgcgtccaaactggccaacgtgtatttcaccaccgagctggaccggcgcttctcggcgcagaacctccatggactcagtgttaatcccggcggtatcctgactccgctcgcgcgctacttaccgcgcgaggcaagcgaggggctcaaggatatccccgaggtctattgtattctcatgaatccagatcagggcgcttcaactagtgtctgggcggctgtggcgaaggagctcgaggggaagggtggcttgtatctagatcagtgtggcgaggcggaacaggtcgagcctgagccgtaccacctgccgggctacggacctgagtcgtttgacccgccgaccgagaagaagctgtgggaagtcagctgtgagttggtgggaatcaaggattaa

SEQ ID NO: 1951 - protein, 339 aa, Muscodor strobelii
  misc_feature: SGI Peptide ID NO. 560266
  misc_feature (42)..(190): Pfam Id: PF00106 Pfam Desc: short chain dehydrogenase
  misc_feature (1)..(339): NCBI GI: 256722555 Blast Desc: NECHADRAFT_49798 [Nectria haematococca mpVI 77-13-4]
  misc_feature (7)..(337): NCBI GI: 256734856 Blast Desc: NECHADRAFT_75545 [Nectria haematococca mpVI 77-13-4]
  misc_feature (2)..(336): NCBI GI: 242823231 Blast Desc: short-chain dehydrogenase, [Talaromyces stipitatus ATCC 10500] gi|218712964|gb|EED12389.1| short-chain dehydrogenase, [Talaromyces stipitatus ATCC 10500]
  misc_feature (4)..(338): NCBI GI: 212546469 Blast Desc: short-chain dehydrogenase/reductase, [Penicillium marneffei ATCC 18224] gi|210064908|gb|EEA19003.1| short-chain dehydrogenase/reductase, [Penicillium marneffei ATCC 18224]
  misc_feature (2)..(335): NCBI GI: 256732344 Blast Desc: NECHADRAFT_41010 [Nectria haematococca mpVI 77-13-4]
  misc_feature (1)..(337): NCBI GI: 256721804 Blast Desc: NECHADRAFT_97586 [Nectria haematococca mpVI 77-13-4]
  misc_feature (1)..(339): NCBI GI: 256734990 Blast Desc: NECHADRAFT_75805 [Nectria haematococca mpVI 77-13-4]
  misc_feature (1)..(339): NCBI GI: 154304821 Blast Desc: BC1G_08996 [Botryotinia fuckeliana B05.10] gi|150853858|gb|EDN29050.1| BC1G_08996 [Botryotinia fuckeliana B05.10]
  misc_feature (1)..(339): NCBI GI: 156061353 Blast Desc: SS1G_02819 [Sclerotinia sclerotiorum 1980] gi|154700223|gb|EDN99961.1| SS1G_02819 [Sclerotinia sclerotiorum 1980]
  misc_feature (7)..(339): NCBI GI: 145236972 Blast Desc: An07g00400 [Aspergillus niger] gi|134075598|emb|CAK39264.1| protein product [Aspergillus niger]
  misc_feature (44)..(337): SWISSPROT Homolog: EC 1.3.1.33 Protochlorophyllide reductase
  misc_feature: Useful for introducing or modulating the production of volatile compounds
MSRITPYAELFTDPKGPGDIRPTATKIVEDQGLIDSPEWKGRVALITGCSPGGLGPETAKALRLTGADVYITVRELNKGKQIADDLLADGKPGKVEVIEMDLSSLESIKAAAQEFLRRSGNKLNVLINNAGVMAPPYSKTKDGFELQFGTNHLGHFYLFNLVKDALLASATPAFNSRVVALSSSGHRRGGLDFSDLNWEKREFDTITAYGASKLANVYFTTELDRRFSAQNLHGLSVNPGGILTPLARYLPREASEGLKDIPEVYCILMNPDQGASTSVWAAVAKELEGKGGLYLDQCGEAEQVEPEPYHLPGYGPESFDPPTEKKLWEVSCELVGIKD

SEQ ID NO: 1952 - DNA, 4155 bp, Muscodor strobelii
  misc_feature: SGI EST ID NO. CUFF.5077.1
  misc_feature: Variant of the nucleotide sequence at SEQ ID NO 1950
cctaagcatatctattcacccctaaatatgtgtcttccaagtttcaatgtagacttggtgcactcattctctacactagcttcacacctaagaccttcagccgtaaaagtcccttcctcgccatgtctcgcatcacgccatacgcggagctgttcacggaccccaaaggccctggcgacatccgtcccactgcaaccaagatcgtggaagaccaaggcctcatcgatagccccgagtggaaaggtagagttgctcttatcactggatgctcgcccggcggtcttggtcccgagacggccaaggcgcttcgcctcaccggcgcagatgtttatatcaccgtccgcgagcttaacaaaggcaaacaaattgccgacgatctcttggccgatggcaagccaggcaaggtagaagtcatcgaaatggacctgagctcgcttgagagcattaaggccgctgcacaagagttcctcagacggagtggcaacaagctcaatgtgctgatcaacaatgctggcgtcatggcaccgccctactctaagaccaaggatggcttcgaacttcagtttggcacaaatcacttgggtatgtacctctccaggcgcggcattcaaggcagacattaactcttttccaggccacttttacctcttcaatctagtcaaggacgctctcctcgcctcagcaacgcccgctttcaactcgcgcgtcgtcgcgctgtcctcgagcgggcatcgccgcggcggactcgacttctctgacctcaactgggagaagcgcgagttcgacactatcacagcctacggcgcgtccaaactggccaacgtgtatttcaccaccgagctggaccggcgcttctcggcgcagaacctccatggactcagtgttaatcccggcggtatcctgactccgctcgcgcgctacttaccgcgcgaggcaagcgaggggctcaaggatatccccgaggtctattgtattctcatgaatccagatcagggcgcttcaactagtgtctgggcggctgtggcgaaggagctcgaggggaagggtggcttgtatctagatcagtgtggcgaggcggaacaggtcgagcctgagccgtaccacctgccgggctacggacctgagtcgtttgacccgccgaccgagaagaagctgtgggaagtcagctgtgagttggtgggaatcaaggattaaaaacttcctttcaaggaatacctactatcggcacggttcggagcttaaccgtgggtgccgtgaaaatggatgcattgatcgggtggtactgttggctcctgcgtgtgggttaccccggagcaaagttagacgccttaagcaccaatgaacagcacccagcaaaggggcccatgacaccccactgtattcaaccctatatttcgtgacctccgcccttccaaggtgcctctcctccatcaatcaaccaccatcaatttatacataacgcatgtacgcaacgtgaccgtaaatacgacacaacaggtatatatcttctgtattgttttcaaacaagcgcttgatctatcgcgcatcttcgctctatgccaaacatgaaacatcgaagtattatatacatactcttctagtgtagttgcaggttgcctcatatacctgaggcgcaagctcaatgctatgcacaattgagtcaaggcaatcctatctctaacggggacaaagcattggtttcctcaagggatgccttcattcttcgtacctttgaatctaaccagccagttttgacctgtcttccactaccgggtcagatcaacggcctgtcgctctccttcgaaaggaccagcgctgcctcttgcaccatgatctgcaatgcctcgttgcatgcgcttagccgtctgctcattggtcctgacgtcgcgcacacggtcacatgctgcagctgctctgtcaatctgagtagctgaagcagctggaagcgcagcagcccggccacaacaaacaggtactcgtcgggtgcgtctatgttatacgtgcgtccattttcgctgccaggtgtgtttggtacaacagcgtgtccttcttgaagcgatagactgagtaccttgtctgaaaccacagccctagcgtcgtcgccgctgctactagaagtgttgccatggctattggtgagcacagtggcgcactcgtcgcctacatggcggcatacgcggaccagcttatccacaaggagtgtcaaaatcatcatattctcaacgcgacccttacacgtctcgcactgcagcatggcgatgccgcgtctgagcgcctctttatgagctgccatggctcggtccagccgcatcagactgtgcccgtcgacaaccgactctatctcgtcgaccagcacaacaagacggcgcaagcacctgcaaggtgctcctgcgttgtcactgtgccccttttcgacattgctctccgcggcgcctcgcttcgtgaaaacgcctgtctgaaatctagccatggttggcgtagataaagatggcatatggggtgtttgggatgcgactgcccatgtattggtctgccacatctctaacgtcgcccatggatccaggccagtgagttcgttgcttggttcgctgtcgcaggcgaccgacgggccaaaatgcatcgatgccagggatgtagtgcggttgtaaatgtctccaaaggaatcatctggtatcgtcccgtccggatccgtcattgacgagcttagtatacccatattactaccgcttagcgactccatgaacggcatcgtgaagtcggcgtctgctatatccggatccaccaaatctgtgtctgtcggggatggtgtcggcactgttgccatctctctcatcatgccaacagataacaaatcggacaaaggagtctcaaccaaggaccgaatctcggacaagtcatctgtctccatcacttcttgacccatgggacttagaagcgcatccatggccgatgatcccccgcttgaccctggcgatgctgggggcgcaatactaacattctcggtctggtccgctggcgcagtgattgcgcggcccgtgccaggactagggccaatatcagggacaggcttcgatttccgctcactacttttgccagtgctgcctgtcgttgtctcgtagatgcactcggaaccctaccaacgtggcactcggattagattgcggttcacgagaccatcacacggcgtacgacacttgacacaaaaggaaacatccgcggatcgcccaggtttatgcatttgttatgaaaacgtaccgatattttgcaacggtcgcagcccccgaggacccagatacacttaactttttttgcccggcatctcgagcaggcttgcagcccagttgtccgcgccgtgaccgggtcaaagacgacggggcgcttcgttagagtcccggaacccccatgtcgcgagagcttccagctcatgaacatgggtcgcgtcaatgtcgcttctgctaggagctgtagcggaaatggcactcaattggggataagtattaagacgatgtatgtagtcggtgtatacaagcggtgttggcgccgtataatattattctgatccgtcgactcagagggcttaggctttcaaggcgtctagaccaaattcgtcatcgtcgaaaaagagaaaaccgaccttcctacgcaccgaatataatatgcgtgaagtttcttactaactacctaagtcaagcggcagtggcgatcatggatcactgaggttggcatatcataagccacaagttaagatgaccaattagcatgctatatgctgcagttgcgtgccacagccttgctgattcgcatgcatgatgtgatgaaggaacaatagaatctgggtcgaaaaggcgaggcgaatccggtcgtcgggccgcgaggatatacgcagagaaccatctttaggacagcccccaacagcatgcgatgcccatataaacttttttaagatattaccggaaaattctttaataatcatacaactgggaactcacaactacttcgaagccctgaagtctgaaacctcactccatctgtagtccaggaacgaatccttgtagatgggaggcgctcacttcgaagtcgccctacgacagagtgccgtatcacacctctagatacgcgtgcggctcggaattttagctcgtctgttgagagcct

SEQ ID NO: 1953 - DNA, 1554 bp, Muscodor strobelii
  misc_feature: SGI cDNA ID NO. 560267
  misc_feature: Encodes the peptide sequence at SEQ ID NO 1954
atgggatccgatttcaccttcggccacgcggagcaacttggatatcgcgtgcttagctcacacatagtcgccatattacaggcggcgcttggccttggcatagtctttgtcgtggttcaaagcctttaccgtctgttcttgcaccccctatcccacgttcccgggccaaagttggcagctatcagccacgcctatgagttctactatgacgtgatacggggtggcatgtatatctgggaggtggaaaaaatgcacgacaaatacggccctgttgtgcgcatcaatccccgcgaggtacacatcaaagatccgcatttctacgatgaagtatatgcccccgcatcacgaaggcgtgagaaagatgggcacttcgtgggcgtgttcggcttccctctgtccatgatcgcgaccgtcggccacgagcagcatcgtataaggcgctccctgctcaacgccttttttagcaagaagtcggtgcagacgcttgcggcgtccgtgttagctgagcaagaggcaaaactggtggcgcggctggcagacgcgcatgctgatggcagggttgtgcgtctcgacgacgcgtatgcggccctaacggccgacaccatctcgcagtactcgtggggccgcagcgcaggctttcttgacgatccggccttcaagaatgacatccgagctgcgctcgatgagatctcacagtttgtccacgtcgcgcgcttcattcccatccttacagctatctcgcgcgccctaccgcgggaagtgctgcgctggctgcgaccagccgccacggctgtgctggacatgcaggacatggtcacgcattccagtgaggaaaaggctgtgacaaatggccgcggtaccgtattcgacgcgctgcgtgacgagaacgtctcgccacaggaacggtctaaagcccggctcgagcaggaaggtttgattttggttgtcgcaggcaccgaaaccacagcgcgcacactaaccatcgcctcataccaccttttcaataaccgaccgctactactacgcctacgcgaagagctccgaacggtaatgccatcgcctgatattgaagcatcttggtcgaagctcgagcagttgccgcttttgaacggagtagtcaatgaggcgatccgtctctcgtttggtcccatttttcgctccacgagagtcgcgccaacggaggcactgacgtacaaaaaactggttattccacctgggacccccgtaagcatgtcaacttacttcgtccacatggacgaggaaatctttcccgagccttcgtgcttcaagcctgagcgttggattgagtcgcagggccagcacctgactaagtttatcactgctttcagcaagggaagcagaaattgtctcggaatgaacttggcttatgcggaattgtacctcacgctggcggccatggtccgccgcttcgagattgagctttgcgacacagaggacgggagtctccgcattgaacgtgagatggggatagggcagcccctgaaaggcgacttcgtggtgaaggctaggatcaccaagatcctcaccgaatag

SEQ ID NO: 1954 - protein, 517 aa, Muscodor strobelii
  misc_feature: SGI Peptide ID NO. 560267
  misc_feature (56)..(507): Pfam Id: PF00067 Pfam Desc: Cytochrome P450
  misc_feature (309)..(507): Pfam Id: PF00067 Pfam Desc: Cytochrome P450
  misc_feature (26)..(517): NCBI GI: 119472265 Blast Desc: benzoate 4-monooxygenase cytochrome P450 [Neosartorya fischeri NRRL 181] gi|119406456|gb|EAW16407.1| benzoate 4-monooxygenase cytochrome P450 [Neosartorya fischeri NRRL 181]
  misc_feature (29)..(517): NCBI GI: 238497800 Blast Desc: cytochrome P450, [Aspergillus flavus NRRL3357] gi|220693409|gb|EED49754.1| cytochrome P450, [Aspergillus flavus NRRL3357]
  misc_feature (26)..(517): NCBI GI: 238494890 Blast Desc: benzoate 4-monooxygenase cytochrome P450, [Aspergillus flavus NRRL3357] gi|220695331|gb|EED51674.1| benzoate 4-monooxygenase cytochrome P450, [Aspergillus flavus NRRL3357]
  misc_feature (42)..(517): NCBI GI: 121713434 Blast Desc: benzoate 4-monooxygenase cytochrome P450 [Aspergillus clavatus NRRL 1] gi|119402481|gb|EAW12902.1| benzoate 4-monooxygenase cytochrome P450 [Aspergillus clavatus NRRL 1]
  misc_feature (40)..(503): NCBI GI: 255954549 Blast Desc: Pc21g09910 [Penicillium chrysogenum Wisconsin 54-1255] gi|211589738|emb|CAP95888.1| Pc21g09910 [Penicillium chrysogenum Wisconsin 54-1255]
  misc_feature (19)..(517): NCBI GI: 238501248 Blast Desc: cytochrome P450, [Aspergillus flavus NRRL3357] gi|220692095|gb|EED48442.1| cytochrome P450, [Aspergillus flavus NRRL3357]
  misc_feature (34)..(517): NCBI GI: 115391483 Blast Desc: [Aspergillus terreus NIH2624] gi|114194170|gb|EAU35870.1| [Aspergillus terreus NIH2624]
  misc_feature (26)..(517): NCBI GI: 169781396 Blast Desc: [Aspergillus oryzae RIB40] gi|83773903|dbj|BAE64028.1| protein product [Aspergillus oryzae]
  misc_feature (36)..(481): NCBI GI: 145249340 Blast Desc: An14g03850 [Aspergillus niger] gi|134081687|emb|CAK46621.1| protein product [Aspergillus niger]
  misc_feature (32)..(517): NCBI GI: 259488148 Blast Desc: TPA: cytochrome P450, (Eurofung) [Aspergillus nidulans FGSC A4]
  misc_feature (30)..(500): SWISSPROT Homolog: EC 1.14.13.94 Lithocholate 6-beta-hydroxylase
MGSDFTFGHAEQLGYRVLSSHIVAILQAALGLGIVFVVVQSLYRLFLHPLSHVPGPKLAAISHAYEFYYDVIRGGMYIWEVEKMHDKYGPVVRINPREVHIKDPHFYDEVYAPASRRREKDGHFVGVFGFPLSMIATVGHEQHRIRRSLLNAFFSKKSVQTLAASVLAEQEAKLVARLADAHADGRVVRLDDAYAALTADTISQYSWGRSAGFLDDPAFKNDIRAALDEISQFVHVARFIPILTAISRALPREVLRWLRPAATAVLDMQDMVTHSSEEKAVTNGRGTVFDALRDENVSPQERSKARLEQEGLILVVAGTETTARTLTIASYHLFNNRPLLLRLREELRTVMPSPDIEASWSKLEQLPLLNGVVNEAIRLSFGPIFRSTRVAPTEALTYKKLVIPPGTPVSMSTYFVHMDEEIFPEPSCFKPERWIESQGQHLTKFITAFSKGSRNCLGMNLAYAELYLTLAAMVRRFEIELCDTEDGSLRIEREMGIGQPLKGDFVVKARITKILTE

SEQ ID NO: 1955 - DNA, 1503 bp, Muscodor strobelii
  misc_feature: SGI cDNA ID NO. 560268
  misc_feature: Encodes the peptide sequence at SEQ ID NO 1956
atgcatttctggtacgctttggtgctggcattcgtcttctggcgtctgatcaaggtcgtttacaacctttattttcatccgctagccaaatttcctgggccaaggctcgccgccgcgtcgcacctctttgagttctactggtctattgttcgcgacggcgagctaatatgggagatcgagcggatgcacaagaaattcgggcccatcgtccgcatcaccccccatgaactgcacattagtgacccagctttctacggcgaaatctacgccgggaaccccaggcgcgtcaatggcgaccaccgcttcacccgttccacgggggtaacggaatccatgtttgccgctgtcgagcacgagcttcacgaggcacgccggaagcccttgaccaagttcttctccaagcgctccatcgccaacatccagcccattattcaggacaaagttgagcgcctgatacttcgcatgcgggaggctgccgacgcccacaagcccgtcagcctgacggcactgtccgccgccttcacggccgacactatctcgcactacgcctacggcgtctctatcggctgtctcgacgacgcttccggccgcaatcttctgtctgaggcgacccagtccgtgttagctatgggccactggctcaagttcatccctgtccgcttctcgaacgccaagaagatgcccccaggtctcgttgcgtggatgtcgtctggagccgccacggtgctgcggacgcaccggaccatcagtgagctcgcgctaggcgtactcaacgcagctgagcccaaggcgcctcacgagaacatgtttgccgcgctggccaatccggagctgccgcccgaacaacgaacgctcggccgcctcgaggacgagggcttcgtcgttctggcggccggaacggagacgacagcgtacagcctcagcgtcactatgttctacttgctggacaacccggcagtcttcgatagcttgtttgccgagattaagaccgtcatgccgaacccgaccgactgtccgccactctcagtgctggagagcctgccgttactaagaggtgtcgtcaacgaaggccttcggctttcgatgggcaccatgacgcgccatccgcgtgtggctccagaccgcgtccttcactacaaggactgggctattccacccgggactccgtgcagcacggccacgtactttgtgcacaccaatcccgagctattccccgacccgtggcgcttcgatccccaacgctggattcgtgctgccgagcgaggcgagcacctagagagccatctcgccctcttcctcaaggggaaccgcgcgtgtttgggtattaacatggcgactgcagagatgtttattctcacggccagcctggtccgtcgtgtacagatgaagctacatgaggatacgaatgtcgactgtgttattcccgcaaaagaccataccattgtagtgccgaagaatacatccggtatcaaggcttatgtactgggattcaatacttcgtaa

SEQ ID NO: 1956 - protein, 500 aa, Muscodor strobelii
  misc_feature: SGI Peptide ID NO. 560268
  misc_feature (34)..(492): Pfam Id: PF00067 Pfam Desc: Cytochrome P450
  misc_feature (293)..(492): Pfam Id: PF00067 Pfam Desc: Cytochrome P450
  misc_feature (7)..(489): NCBI GI: 255945617 Blast Desc: Pc20g10870 [Penicillium chrysogenum Wisconsin 54-1255] gi|211588311|emb|CAP86416.1| Pc20g10870 [Penicillium chrysogenum Wisconsin 54-1255]
  misc_feature (18)..(485): NCBI GI: 255954549 Blast Desc: Pc21g09910 [Penicillium chrysogenum Wisconsin 54-1255] gi|211589738|emb|CAP95888.1| Pc21g09910 [Penicillium chrysogenum Wisconsin 54-1255]
  misc_feature (4)..(486): NCBI GI: 119472265 Blast Desc: benzoate 4-monooxygenase cytochrome P450 [Neosartorya fischeri NRRL 181] gi|119406456|gb|EAW16407.1| benzoate 4-monooxygenase cytochrome P450 [Neosartorya fischeri NRRL 181]
  misc_feature (19)..(474): NCBI GI: 121713434 Blast Desc: benzoate 4-monooxygenase cytochrome P450 [Aspergillus clavatus NRRL 1] gi|119402481|gb|EAW12902.1| benzoate 4-monooxygenase cytochrome P450 [Aspergillus clavatus NRRL 1]
  misc_feature (5)..(471): NCBI GI: 115390408 Blast Desc: [Aspergillus terreus NIH2624] gi|114195105|gb|EAU36805.1| [Aspergillus terreus NIH2624]
  misc_feature (17)..(499): NCBI GI: 238497800 Blast Desc: cytochrome P450, [Aspergillus flavus NRRL3357] gi|220693409|gb|EED49754.1| cytochrome P450, [Aspergillus flavus NRRL3357]
  misc_feature (1)..(496): NCBI GI: 238501248 Blast Desc: cytochrome P450, [Aspergillus flavus NRRL3357] gi|220692095|gb|EED48442.1| cytochrome P450, [Aspergillus flavus NRRL3357]
  misc_feature (1)..(496): NCBI GI: 169781396 Blast Desc: [Aspergillus oryzae RIB40] gi|83773903|dbj|BAE64028.1| protein product [Aspergillus oryzae]
  misc_feature (10)..(494): NCBI GI: 115391483 Blast Desc: [Aspergillus terreus NIH2624] gi|114194170|gb|EAU35870.1| [Aspergillus terreus NIH2624]
  misc_feature (2)..(464): NCBI GI: 145249340 Blast Desc: An14g03850 [Aspergillus niger] gi|134081687|emb|CAK46621.1| protein product [Aspergillus niger]
  misc_feature (28)..(467): SWISSPROT Homolog: EC 1.14.13.12 Benzoate 4-monooxygenase
MHFWYALVLAFVFWRLIKVVYNLYFHPLAKFPGPRLAAASHLFEFYWSIVRDGELIWEIERMHKKFGPIVRITPHELHISDPAFYGEIYAGNPRRVNGDHRFTRSTGVTESMFAAVEHELHEARRKPLTKFFSKRSIANIQPIIQDKVERLILRMREAADAHKPVSLTALSAAFTADTISHYAYGVSIGCLDDASGRNLLSEATQSVLAMGHWLKFIPVRFSNAKKMPPGLVAWMSSGAATVLRTHRTISELALGVLNAAEPKAPHENMFAALANPELPPEQRTLGRLEDEGFVVLAAGTETTAYSLSVTMFYLLDNPAVFDSLFAEIKTVMPNPTDCPPLSVLESLPLLRGVVNEGLRLSMGTMTRHPRVAPDRVLHYKDWAIPPGTPCSTATYFVHTNPELFPDPWRFDPQRWIRAAERGEHLESHLALFLKGNRACLGINMATAEMFILTASLVRRVQMKLHEDTNVDCVIPAKDHTIVVPKNTSGIKAYVLGFNTS

SEQ ID NO: 1957 - DNA, 4613 bp, Muscodor strobelii
  misc_feature: SGI EST ID NO. CUFF.5110.0
  misc_feature: Variant of the nucleotide sequence at SEQ ID NO 1955
aggagatagcgcgccgtgtctcatccgtatctgatgcatcatgtcccgccaaggccgagccgctgacgtccacccgcatcactcttcggatacattcccattctgttcgtaggactacgcttccatccggcgcatcataaggtacaaataagtagtcagccggaggacaggaagtagacgatgattgtcagaagttgcaataccgcaaccttttcccgcagctcactactctactcaatagattagcgtcagccacgtggtcaaaaactgtaatgcgtcctcagaactccatggtatgtactgttaaagtgattacctaatgatcacatgactacgtgcacataccactatcttggcagatgcttcttgtacaaggaaaacagacgcacattattactgcttcaccacagtacgcttgaacacagtccagccaacagtatatttacatgtcatggcttactagctacgatgcattgtctttctcatctgcctaggcgtagccctatggaatgatctatgtagtattccgtggatatctaagatgtctattcggtgaggatcttggtgatcctagccttcaccacgaagtcgcctttcaggggctgccctatccccatctcacgttcaatgcggagactcccgtcctctgtgtcgcaaagctcaatctcgaagcggcggaccatggccgccagcgtgaggtacaattccgcataagccaagctgcgaacgggcgtgatagttaggcagccatctctaaagctcataaggatatgggctcatgcacttacttcattccgagacaatttctgcttcccttgctgaaagcagtgataaacttagtcaggtgctggccctgcgactcaatccaacgctcaggcttgaagcacgaaggctcgggaaagatttcctcgtccatgtggacgaagtaagttgacatgcttacgggggtctacgattgaagtgcgcatggtcagtcaagggtacgacaacggcgatggaaggtagtggtcaaggaacaaacctaccccaggtggaataaccagttttttgtacgtcagtgcctccgttggcgcgactctcgtggagcgaaaaatgggaccaaacgagagacggatcgcctcattgactactccgttctgcgattacctaatcagcaagtgttttaactttgattctcagacctagctgcaagggaagaggcaaaggggctgctctcaccaaaagcggcaactgctcgagcttcgaccaagatgcttcaatatcaggcgatggcattaccgttcggagctcttcgcgtaggcgtagtagtagcggtcggttattgaaaaggtggtatgaggcgatggttagtgtgcgcgctgtggtttcggtgcctgcgacaaccaaaatcaaaccttcctgctcgagccgggctttagaccgttcctgtggcgagacgttctcgtcacgcagcgcgtcgaatacggtaccgcggccatttgtcacagccttttcctcactggaatgcgtgaccatgtcctgcatgtccagcacagccgtggcggctggtcgcagccagcgcagcacttcccgcggtagggcgcgcgagatagctgtaaggatgggaatgaagcgcgcgacgtggacaaactgtgagatctcatcgagcgcagctcggatgtcattcttgaaggccggatcgtcaagaaagcctgcgctgcggccccacgagtactgcgagatggtgtcggccgttagggccgcatacgcgtcgtcgagacgcacaaccctgccatcagcatgcgcgtctgccagccgcgccaccagttttgcctcttgctcagctaacacggacgccgcaagcgtctgcaccgacttcttgctaaaaaaggcgttgagcagggagcgccttatacgatgctgctcgtggccgacggtcgcgatcatggacagagggaagccgaacacgcccacgaagtgcccatctttctcacgccttcgtgatgcgggggcatatacttcatcgtagaaatgcggatctttgatgtgtacctcgcggggattgatgcgcacaacagggcctagggaatgttggtaagtatggtggatgatactcgatactaaggatcaacatcctgttgcagtgcgtaccgtatttgtcgtgcattttttccacctcccagatatacatgccaccccgtatcacgtcatagtagaactcataggcgtggctgatagctgccaactttggcccgggaacgtgggatagggggtgcaagaacagacggtaaaggctttgaaccacgacaaagactatgccaaggccaagcgccgcctgtaatatggcgactatgtgtgagctaagcacgcgatatccaagttgctccgcgtggccgaaggtgaaatcggatcccatttccaggtgagttcagggtctactagggaacgcaggaaagtcaagttgttgacgatgatcctagaagaaggaatagaatgactaagtatgaattaagtcacgaatgtggcagcaaagccttcatcgtcatacacaggtatcagttcatgagtagagaagaaaagaggaggctaggcgtgcttgcaagcacgtatcaagagcttattgaaaggtcttacagccagtgtcgtcttacgttacctcatacgcagcttggatagagctgcagaaccgccgggttactactactttggtctctgtagggtgcttacattttacctctcggtgccactcacctgggcgagatgcagagctgaggtctccggcctgcagtcgggccaagcggccggtttgctcatgttcttttgtgtcgtgaagccttcaactagattacactggaacagcttgtcatactcgggtctggtgtggccttatgctcccacacatcggcaggatgcatttctggtacgctttggtgctggcattcgtcttctggcgtctgatcaaggtcgtttacaacctttattttcatccgctagccaaatttcctgggccaaggctcgccgccgcgtcgcacctctttgagttctactggtctattgttcgcgacggcgagctaatatgggagatcgagcggatgcacaagaaattcgggcccatcgtccgcatcaccccccatgaactgcacattagtgacccagctttctacggcgaaatctacgccgggaaccccaggcgcgtcaatggcgaccaccgcttcacccgttccacgggggtaacggaatccatgtttgccgctgtcgagcacgagcttcacgaggcacgccggaagcccttgaccaagttcttctccaagcgctccatcgccaacatccagcccattattcaggacaaagttgagcgcctgatacttcgcatgcgggaggctgccgacgcccacaagcccgtcagcctgacggcactgtccgccgccttcacggccgacactatctcgcactacgcctacggcgtctctatcggctgtctcgacgacgcttccggccgcaatcttctgtctgaggcgacccagtccgtgttagctatgggccactggctcaagttcatccctgtccgcttctcgaacgccaagaagatgcccccaggtctcgttgcgtggatgtcgtctggagccgccacggtgctgcggacgcaccggaccatcagtgagctcgcgctaggcgtactcaacgcagctgagcccaaggcgcctcacgagaacatgtttgccgcgctggccaatccggagctgccgcccgaacaacgaacgctcggccgcctcgaggacgagggcttcgtcgttctggcggccggaacggagacgacagcgtacagcctcagcgtcactatgttctacttgctggacaacccggcagtcttcgatagcttgtttgccgagattaagaccgtcatgccgaacccgaccgactgtccgccactctcagtgctggagagcctgccgttactaagaggtgtcgtcaacgaaggccttcggctttcgatgggcaccatgacgcgccatccgcgtgtggctccagaccgcgtccttcactacaaggactgggctattccacccgggactccgtgcagcacggccacgtactttgtgcacaccaatcccgagctattccccgacccgtggcgcttcgatccccaacgctggattcgtgctgccgagcgaggcgagcacctagagagccatctcgccctcttcctcaaggggaaccgcgcgtgtttgggtattaacatggcgactgcagagatgtttattctcacggccagcctggtccgtcgtgtacagatgaagctacatgaggatacgaatgtcgactgtgttattcccgcaaaagaccataccattgtagtgccgaagaatacatccggtatcaaggcttatgtactgggattcaatacttcgtaatgagtgcgagaagctacgcagataaatgagtatctcataaggctcagtgatcaactgtggaggcgattccgttctgtgttaaatttcaactttgatccggccctggctcagcttcggaaaactgccgctattgcttaccacatagctatagacgtagttactagagcatgaagcgaaagcacagcttgtagtctagtaccaacagaatgaacacacactagg

SEQ ID NO: 1958 - DNA, 1116 bp, Muscodor strobelii
  misc_feature: SGI cDNA ID NO. 560269
  misc_feature: Encodes the peptide sequence at SEQ ID NO 1959
atgtctgagattgccgccgcccacgcaccacgcaggatcactgtgtcgctaccggacatgttcaagagctttctgataaaggagccggtcgtcaacagccattatgacactgtgcgacccgagtcagaggagtggcttcgcagcatcatgagtcttacgccaaagcagcaccgtcgggtcaacctatgtgacttctcctacttctgcgctgtgctggttccgtcctgcccaagggacaacctgcgcatcatttctgactggggcaactgggtcttcctcttcgatgacatgttcgacgagggcgagctcaccgaagacccgattgcttcggaacgtatcatcaacaacctgctgtcagccatgatacccgatttatcccgtacgtcacagcagcccgtagtaacagctcatgacgacatctttagacgattagctgctagttcgacaccaggcgtcttgaatcgctacatccgcgccacggaatcctactgcgccggcgccctcaaacacgtccaggaccatgcttcggaaaaagtcctctcgatccaggagatggtcgacacgcgccgcatgtccatcggcgtcttccccatgtacccgctggtcgagttcgcgtacagccttaacttgccggatgaggtgttcgaacaccccgctatacgagtgctagaggatttgggggccgagtttgttatgatgatgaacgatatcctatcttaccgaaaggaagagagtgaaaactgccccttcaacatggttgccgtctgccgcatgaatgggtcttccgcccaggccgctttcgaccagatcgcagccatggtcgacgcgcgcttcgtgctgtgggacaaagccgtccgtgagctcccatcttggggcgccgatgtcgacgtgcaggttcgacagtacgtccaaggtatacaaaatattgtccaggctaatctgagctggagcttccggtcagggcgctacttcggcagcaaaggtgacgaggttctattgatgagaaaaattgatgtgcttatgcatccttcattcttggtacacgctcctctgaacaacgcccccccgacaaacaccttcgacagcaactgtcttgggaaacctgtcacggtgtga

SEQ ID NO: 1959 - protein, 371 aa, Muscodor strobelii
  misc_feature: SGI Peptide ID NO. 560269
  misc_feature (12)..(346): NCBI GI: 46126591 Blast Desc: FG07673.1 [Gibberella zeae PH-1]
  misc_feature (13)..(331): NCBI GI: 238495510 Blast Desc: pentalenene synthase, [Aspergillus flavus NRRL3357] gi|220695641|gb|EED51984.1| pentalenene synthase, [Aspergillus flavus NRRL3357]
  misc_feature (13)..(339): NCBI GI: 121710890 Blast Desc: terpene synthase metal binding domain protein [Aspergillus clavatus NRRL 1] gi|119401211|gb|EAW11635.1| terpene synthase metal binding domain protein [Aspergillus clavatus NRRL
  misc_feature (13)..(341): NCBI GI: 115433376 Blast Desc: conserved [Aspergillus terreus NIH2624] gi|114189677|gb|EAU31377.1| conserved [Aspergillus terreus NIH2624]
  misc_feature (13)..(331): NCBI GI: 119497923 Blast Desc: terpene synthase metal binding domain protein [Neosartorya fischeri NRRL 181] gi|119413883|gb|EAW23822.1| terpene synthase metal binding domain protein [Neosartorya NRRL
  misc_feature (58)..(331): NCBI GI: 145235443 Blast Desc: An03g04890 [Aspergillus niger] gi|134058052|emb|CAK38281.1| protein product [Aspergillus niger]
  misc_feature (58)..(340): NCBI GI: 145242696 Blast Desc: An09g06090 [Aspergillus niger] gi|134078476|emb|CAL00339.1| protein product [Aspergillus niger]
  misc_feature (15)..(370): NCBI GI: 145604190 Blast Desc: MGG_10671 [Magnaporthe grisea 70-15] gi|145012237|gb|EDJ96893.1| MGG_10671 [Magnaporthe grisea 70-15]
  misc_feature (15)..(331): NCBI GI: 33357703 Blast Desc: CND15p [Botryotinia fuckeliana]
  misc_feature (15)..(335): NCBI GI: 46139625 Blast Desc: FG11327.1 [Gibberella zeae PH-1]
  misc_feature (18)..(332): SWISSPROT Homolog: EC 4.2.3.22 Germacradienol synthase
MSEIAAAHAPRRITVSLPDMFKSFLIKEPVVNSHYDTVRPESEEWLRSIMSLTPKQHRRVNLCDFSYFCAVLVPSCPRDNLRIISDWGNWVFLFDDMFDEGELTEDPIASERIINNLLSAMIPDLSRTSQQPVVTAHDDIFRRLAASSTPGVLNRYIRATESYCAGALKHVQDHASEKVLSIQEMVDTRRMSIGVFPMYPLVEFAYSLNLPDEVFEHPAIRVLEDLGAEFVMMMNDILSYRKEESENCPFNMVAVCRMNGSSAQAAFDQIAAMVDARFVLWDKAVRELPSWGADVDVQVRQYVQGIQNIVQANLSWSFRSGRYFGSKGDEVLLMRKIDVLMHPSFLVHAPLNNAPPTNTFDSNCLGKPVTV

SEQ ID NO: 1960 - DNA, 266 bp, Muscodor strobelii
  misc_feature: SGI EST ID NO. CUFF.5089.0
  misc_feature: Variant of the nucleotide sequence at SEQ ID NO 1958
atgaacgatatcctatcttaccgaaaggaagagagtgaaaactgccccttcaacatggttgccgtctgccgcatgaatgggtcttccgcccaggccgctttcgaccagatcgcagccatggtcgacgcgcgcttcgtgctgtgggacaaagccgtccgtgagctcccatcttggggcgccgatgtcgacgtgcaggttcgacagtacgtccaaggtatacaaaatattgtccaggctaatctgagctggagcttccggtcagggcg

SEQ ID NO: 1961 - DNA, 1581 bp, Muscodor strobelii
  misc_feature: SGI cDNA ID NO. 560270
  misc_feature: Encodes the peptide sequence at SEQ ID NO 1962
atggcactcttacagcaggtacaagagagcggcaatacgctgcttgcactcgtcctctctcacatcattccagtcacatgcattgctgtagcccttgtctttgtgttactacgtctcaccatactctcaccagaagcccgactacgcgcgcgtcttgcccaattccctgttctgaacgacgacgctaccaccgatgagaagcgcaaggcatttctagaaacggcacaccagctgtaccagactgggtaccagaagttcaaagatcaggtgtatcgtatgccgacgtcggatgatgttgaaaatgtcgttattccacccaagttcatgcgagacattagacaattacccgagtcggatctaagcttctacccggcggctgagaagctcctcgagagcaagtacaccggcgctctgaccaatatggctgaagtcgcccactcagtccgggctgagcttacacctgccctcgcccgcctgaaccctctcgtctacgacgaagccgacttcgctctcaaagtcgacatgcccgaatgcttcgaatggacgcctgtgcccatgtacatgacaatcgccaacatggtcgctaaggttaccggacgcgtattcgttggcgagggcgtatgccgtagccgtgagtacctcgataatgcaatatactacgttgtagacgtgcatcgtgcgcaggttgaggtcaagcacatgcaccccttgctacgaccgttctttgcgcctcgactggcatcggtgcgtcggctgcgggagcgcgaggccgcagctgcacgcttctttgagcccctgatacagaagagactagacgctgagaagaccggcggaccagactggcatgcaccggaagatatgctatcggcgctaatgcgcaagagcgagggtcgcgggcttgtatccgctgaggagatggccaagatccagctgggcatcatctttgcatcggtgcacacaacgagcgacatgtacgacctcgccgtacgacctgagtacatggcgccactgcgtgaagagatccgcagtatagtagccgagcatggcaacgagatgagcacagccgccctaaataagatgcttaagctagacagcttcatgaaggagtctcttcgtctcagcccgccactgacgacgacgttccatcgggtggtcggacctcgtgggctggcactgccgcagggtcaacaagtgccgcctggcgcgacggtggtgctgccatcacgggcgatcatgtgcgacccggcgcatcacaagctcgacgacgcggacgccgacacattcgacgggctgcggcactatcggcggcggactcgagctggcaaaagtgcagcagatcatgcgcgccatctgtttgtcgcgagcaacgaggagagcttgttctttgggtatgggcgccacgcttgccctgggcgtttcttcgcgacgcaggagatgaaggtgcttctcgctagattaatccttgagtttgacttcaagaatgccgacggcactactcagcgctatcctaatatcgagacgggacctctcataacaccagatgagcgcagagatctattatttagacgggttatgacttag

SEQ ID NO: 1962 - protein, 526 aa, Muscodor strobelii
  misc_feature: SGI Peptide ID NO. 560270
  misc_feature (65)..(521): Pfam Id: PF00067 Pfam Desc: Cytochrome P450
  misc_feature (462)..(521): Pfam Id: PF00067 Pfam Desc: Cytochrome P450
  misc_feature (286)..(417): Pfam Id: PF00067 Pfam Desc: Cytochrome P450
  misc_feature (26)..(524): NCBI GI: 189211769 Blast Desc: ent-kaurene oxidase [Pyrenophora tritici-repentis Pt-1C-BFP] gi|187979412|gb|EDU46038.1| ent-kaurene oxidase [Pyrenophora tritici-repentis Pt-1C-BFP]
  misc_feature (28)..(523): NCBI GI: 169784614 Blast Desc: [Aspergillus oryzae RIB40] gi|83775515|dbj|BAE65635.1| protein product [Aspergillus oryzae]
  misc_feature (13)..(524): NCBI GI: 256724873 Blast Desc: NECHADRAFT_77014 [Nectria haematococca mpVI 77-13-4]
  misc_feature (44)..(525): NCBI GI: 189200316 Blast Desc: ent-kaurene oxidase [Pyrenophora tritici-repentis Pt-1C-BFP] gi|187983594|gb|EDU49082.1| ent-kaurene oxidase [Pyrenophora tritici-repentis Pt-1C-BFP]
  misc_feature (52)..(508): NCBI GI: 171679136 Blast Desc: protein product [Podospora anserina] gi|170937639|emb|CAP62298.1| protein product [Podospora anserina]
  misc_feature (42)..(524): NCBI GI: 46140043 Blast Desc: FG11536.1 [Gibberella zeae PH-1]
  misc_feature (130)..(513): NCBI GI: 169609220 Blast Desc: SNOG_07696 [Phaeosphaeria nodorum SN15] gi|160701803|gb|EAT85162.2| SNOG_07696 [Phaeosphaeria nodorum SN15]
  misc_feature (52)..(508): NCBI GI: 116178810 Blast Desc: CHGG_00033 [Chaetomium globosum CBS 148.51] gi|88184330|gb|EAQ91798.1| CHGG_00033 [Chaetomium globosum CBS 148.51]
  misc_feature (12)..(522): NCBI GI: 145613752 Blast Desc: conserved [Magnaporthe grisea 70-15] gi|145020779|gb|EDK04908.1| conserved [Magnaporthe grisea 70-15]
  misc_feature (13)..(522): NCBI GI: 58257423 Blast Desc: cytochrome P450-like protein [Magnaporthe grisea]
  misc_feature (68)..(523): SWISSPROT Homolog: EC 1.14.13.78 Ent-kaurene oxidase
MALLQQVQESGNTLLALVLSHIIPVTCIAVALVFVLLRLTILSPEARLRARLAQFPVLNDDATTDEKRKAFLETAHQLYQTGYQKFKDQVYRMPTSDDVENVVIPPKFMRDIRQLPESDLSFYPAAEKLLESKYTGALTNMAEVAHSVRAELTPALARLNPLVYDEADFALKVDMPECFEWTPVPMYMTIANMVAKVTGRVFVGEGVCRSREYLDNAIYYVVDVHRAQVEVKHMHPLLRPFFAPRLASVRRLREREAAAARFFEPLIQKRLDAEKTGGPDWHAPEDMLSALMRKSEGRGLVSAEEMAKIQLGIIFASVHTTSDMYDLAVRPEYMAPLREEIRSIVAEHGNEMSTAALNKMLKLDSFMKESLRLSPPLTTTFHRVVGPRGLALPQGQQVPPGATVVLPSRAIMCDPAHHKLDDADADTFDGLRHYRRRTRAGKSAADHARHLFVASNEESLFFGYGRHACPGRFFATQEMKVLLARLILEFDFKNADGTTQRYPNIETGPLITPDERRDLLFRRVMT

SEQ ID NO: 1963 - DNA, 462 bp, Muscodor strobelii
  misc_feature: SGI cDNA ID NO. 560271
  misc_feature: Elevated expression when VOC is produced
  misc_feature: Encodes the peptide sequence at SEQ ID NO 1964
atgaaattctcaagcattctatcagctatctccgttatggtggccacggttcatgctgtgcccaatcctcttccagatatcaagcgcgattattctggttgttacaatgtctccctaagcggtacatcctggatccaatcaatttgcccagccactctacattttactggaggagtgttgaactggttgaatctcaaccactgtttgataaactccgacggtgacttggtcgctcaggcggatgggaacttcgcgggctcatgcagcaacctagcattgtctggtacgatcctcacggctgactgtagcactaagtctatgacgactaaaacgagctctatagacctcagcaaggtagtcaatctagatgaggacggtgtcctcgaatgcttcgacgctatcgcttgcaatgacttacgtaatggtccagcaggtgactgcggtggtagtcctttgcgatag

SEQ ID NO: 1964 - protein, 153 aa, Muscodor strobelii
  misc_feature: SGI Peptide ID NO. 560271
  misc_feature (30)..(130): Pfam Id: PF08881 Pfam Desc: CVNH domain
  misc_feature (63)..(130): Pfam Id: PF08881 Pfam Desc: CVNH domain
  misc_feature: Useful for introducing or modulating the production of volatile compounds
MKFSSILSAISVMVATVHAVPNPLPDIKRDYSGCYNVSLSGTSWIQSICPATLHFTGGVLNWLNLNHCLINSDGDLVAQADGNFAGSCSNLALSGTILTADCSTKSMTTKTSSIDLSKVVNLDEDGVLECFDAIACNDLRNGPAGDCGGSPLR

SEQ ID NO: 1965 - DNA, 943 bp, Muscodor strobelii
  misc_feature: SGI EST ID NO. CUFF.5116.0
  misc_feature: Variant of the nucleotide sequence at SEQ ID NO 1963
ccgacggtgacttggtcgctcaggcggatgggaacttcgcgggctcatgcagcaacctagcattgtctggtacgatcctcacggctgactgtagcactaagtctatgacgactaaaacgagctctatagacctcagcaaggtagtcaatctagatgaggacggtgtcctcgaatgcttcgacgctatcgcttgcaatgacttacgtaatggtccagcaggtgactgcggtggtagtcctttgcgatagttctggatcagtttagcgcaggcatgaaagtgtcagaagaagactcgatccatagtactaatcagggctgggcggcaagaacctgaagaaatctatttgtatacatgagaaccaatctcgtagagctcatggtcccagaacaatatcctctgagcatgtgggtgcgagttctcttcttgtcttatgctgctgagctggattgtcctcgtaatgagaaatgaagtaactattggttgtattacagtataataaacatggctggaccttgactactgaattatatgctttgcagaaagttgcgatgaagctactgtttcttagactaatgatccgaccatgccgctatatcactcgctctccttagctggtgtcttgatctgctccaagaccccccatccattcttcagttagatcgtcgaagctcttgacgacatcaacattccaaacgtcactgctcttgacgtgaatctccttcttctcccaatcaatgaagtaggcccattcgcaccaaaaattcttgccgaagtctccgctgtctataagatgctttagtgtgccatcgagaacatgttgaagtgcaccaactccttgcatgttcctcagcaagcagtaccattcgctcgcctttccggtgctcacgccgagatcagcaaacccggcgtctaagtagcgcttctgcagatcctcgggcgctt

SEQ ID NO: 1966 - DNA, 381 bp, Muscodor strobelii
  misc_feature: SGI cDNA ID NO. 560272
  misc_feature: Encodes the peptide sequence at SEQ ID NO 1967
atggccaaacgctacgaagagattgagtgggttgatcaagacacagaagcgcccgaggatctgcagaagcgctacttagacgccgggtttgctgatctcggcgtgagcaccggaaaggcgagcgaatggtactgcttgctgaggaacatgcaaggagttggtgcacttcaacatgttctcgatggcacactaaagcatcttatagacagcggagacttcggcaagaatttttggtgcgaatgggcctacttcattgattgggagaagaaggagattcacgtcaagagcagtgacgtttggaatgttgatgtcgtcaagagcttcgacgatctaactgaagaatggatggggggtcttggagcagatcaagacaccagctaa

SEQ ID NO: 1967 - protein, 126 aa, Muscodor strobelii
  misc_feature: SGI Peptide ID NO. 560272
MAKRYEEIEWVDQDTEAPEDLQKRYLDAGFADLGVSTGKASEWYCLLRNMQGVGALQHVLDGTLKHLIDSGDFGKNFWCEWAYFIDWEKKEIHVKSSDVWNVDVVKSFDDLTEEWMGGLGADQDTS

SEQ ID NO: 1968 - DNA, 1092 bp, Muscodor strobelii
  misc_feature: SGI EST ID NO. CUFF.5117.1
  misc_feature: Variant of the nucleotide sequence at SEQ ID NO 1966
acttaacatactatcccgcattagatccggaatatcttggtgtgagaatcattaggtttatcaagtctcttacggatgagcaaatagaggagatggccaaacgctacgaagagattgagtgggttgatcaagacacagaagcgcccgaggatctgcagaagcgctacttagacgccgggtttgctgatctcggcgtgagcaccggaaaggcgagcgaatggtactgcttgctgaggaacatgcaaggagttggtgcacttcaacatgttctcgatggcacactaaagcatcttatagacagcggagacttcggcaagaatttttggtgcgaatgggcctacttcattgattgggagaagaaggagattcacgtcaagagcagtgacgtttggaatgttgatgtcgtcaagagcttcgacgatctaactgaagaatggatggggggtcttggagcagatcaagacaccagctaaggagagcgagtgatatagcggcatggtcggatcattagtctaagaaacagtagcttcatcgcaactttctgcaaagcatataattcagtagtcaaggtccagccatgtttattatactgtaatacaaccaatagttacttcatttctcattacgaggacaatccagctcagcagcataagacaagaagagaactcgcacccacatgctcagaggatattgttctgggaccatgagctctacgagattggttctcatgtatacaaatagatttcttcaggttcttgccgcccagccctgattagtactatggatcgagtcttcttctgacactttcatgcctgcgctaaactgatccagaactatcgcaaaggactaccaccgcagtcacctgctggaccattacgtaagtcattgcaagcgatagcgtcgaagcattcgaggacaccgtcctcatctagattgactaccttgcctaaccaagagtcagcatcgcttcttatacacttggatacatctactagcaacttactgaggtctatagagctcgttttagtcgtcatagacttagtgctacagtcagccgtgaggatcgtaccagacaatgctaggttgctgcat

SEQ ID NO: 1969 - DNA, 1968 bp, Muscodor strobelii
  misc_feature: SGI cDNA ID NO. 560273
  misc_feature: Reduced expression when VOC is produced
  misc_feature: Encodes the peptide sequence at SEQ ID NO 1970
atggcgtataatacttatagcactggaagctcagatatatcaacccctcgctcgtcatctccctcctctatcttttccggccgctcatctcatacttccgccgctagcaaacggctttccttgtccttacaacgaagacagtctgcttttaatcccatgtcatctgttgacgttgccgccattgaacaacaaataaaaatgacttcccttgacggactcagaggctacgcccaagaccactatggcgaggtcaagcagtatagaacgactgactatgtaccaaagtcggccgctggcggctatcaggtcctgcgggagcctctatggaacaaaggtctttctttcactcccgaggagcgcgtttctaagaacttgaccggtttaataccacatgccatggagagccccagtacgcaggtagagagatgtatgaagatgatcaactcgagacagacacctatcgacaagtatctgtatctgtcttctcttaaggatcaaaacgtggacctcttctaccgagtactcatcgacaatgttcgcgagctgatgccattggtctacactccaacaattggcgatgtctgcttgcaatactcgaccctttacactcgccctgaagccctatatatctccatcaagcagcgaaagtccatcaggaccatcctccggaattggccatacccaagcccgcagatctgtgtcgtcacggacggctcgcgtattcttggattgggtgatctgggtgttaacggcgtgggaatttccatagggaagctggcattgtacaccggtgccgctggtattcatcccgaaaagacgctccccatcgttctcgatgctggtactgccaacgagggcaacctgaaagacccgctctacctcggtctgcgagcgaggcgtccctctcccgccgttatggaggaattcgtagacgagttcatggaagcggccagggatgtcttccctgacatgctcatacaattcgaagatttcgaaactgaaaaggctttcaactacctggatcgctaccgaaacgattacaaatgtttcaatgacgatatccagggaactggtgccgtcgttcttggaggttacatcggcgctgtcaacctgtcaaatgtgcctattgaagatcaacgtcttgtcttcatgggtgctggctctgcaggtgtgggtgtcgctaagcagatggtcgagtactacactcgtcgtgggctgtcagaaaaggctgccagagacaagttttggcttgttgataccaaaggtctcgtcacatgggaccgcggtgacacactgccagagcacaagaagtatttcgctcgctcagacaacaacggtcatcaattccgtaccttggaggaggtgattgagtacgtcaggccttcagccctcgtcggcctgactgccacgttcggtgttttcaccgagtcggttgtccgtgctctgaaggcatcggttgatgccggcggctcaggtcgtcgtcccatcttgtttcctctcagcaaccctcttaccaaggctgagtgtacatttgaacaagctgttcaatggaccgaaggcaccgtcatctttgcgtctggctctcctttctcgccatttgccgtaaagtcgggcgaccatgccgttacgtattggcccaaccagggtaacaacgtttacgtctttcccggccttggtttgggtgccattttggctaaagcgtcgaagatcaccgatgagatggtctacatctctgcccaagcactgtcggaatctctcaatgccgaagaaatccagaagggattgatctaccctcgcatcgaacgagtccgggatgctagcatcaacgtcgctcgtgaagtgatgaaggcggcccgcagagaaggcgtcagtactctcgccgaagaacagtgggttgaatgggaagaatggggcgacgtcgctcttgagagatacattaaggacagggtctacgatcctcttaagtaa

SEQ ID NO: 1970 - protein, 655 aa, Muscodor strobelii
  misc_feature: SGI Peptide ID NO. 560273
  misc_feature (164)..(352): Pfam Id: PF00390 Pfam Desc: Malic enzyme, N-terminal domain
  misc_feature (354)..(619): Pfam Id: PF03949 Pfam Desc: Malic enzyme, NAD binding domain
  misc_feature (37)..(653): NCBI GI: 171693999 Blast Desc: protein product [Podospora anserina] gi|170946948|emb|CAP73752.1| protein product [Podospora anserina]
  misc_feature (45)..(653): NCBI GI: 116197989 Blast Desc: CHGG_07150 [Chaetomium globosum CBS 148.51] gi|88178429|gb|EAQ85897.1| CHGG_07150 [Chaetomium globosum CBS 148.51]
  misc_feature (34)..(653): NCBI GI: 164426796 Blast Desc: NCU03651 [Neurospora crassa OR74A] gi|157071481|gb|EAA31495.2| conserved [Neurospora crassa OR74A]
  misc_feature (67)..(654): NCBI GI: 46125627 Blast Desc: FG07191.1 [Gibberella zeae PH-1]
  misc_feature (67)..(654): NCBI GI: 256730968 Blast Desc: [Nectria haematococca mpVI 77-13-4]
  misc_feature (34)..(653): NCBI GI: 16944467 Blast Desc: related to malate dehydrogenase (oxaloacetate-decarboxylating) (NADP+) [Neurospora crassa]
  misc_feature (52)..(655): NCBI GI: 39946106 Blast Desc: MGG_08173 [Magnaporthe grisea 70-15] gi|145019429|gb|EDK03657.1| MGG_08173 [Magnaporthe grisea 70-15]
  misc_feature (15)..(521): NCBI GI: 154296927 Blast Desc: BC1G_12552 [Botryotinia fuckeliana B05.10] gi|150843079|gb|EDN18272.1| BC1G_12552 [Botryotinia fuckeliana B05.10]
  misc_feature (127)..(652): NCBI GI: 115442968 Blast Desc: ATEG_09669 [Aspergillus terreus NIH2624] gi|114188160|gb|EAU29860.1| ATEG_09669 [Aspergillus terreus NIH2624]
  misc_feature (127)..(653): NCBI GI: 119480619 Blast Desc: malic enzyme [Neosartorya fischeri NRRL 181] gi|119408492|gb|EAW18441.1| malic enzyme [Neosartorya fischeri NRRL 181]
  misc_feature (103)..(633): SWISSPROT Homolog: EC 1.1.1.40 Malate dehydrogenase (oxaloacetate-decarboxylating) (NADP(+))
  misc_feature: Useful for introducing or modulating the production of volatile compounds
MAYNTYSTGSSDISTPRSSSPSSIFSGRSSHTSAASKRLSLSLQRRQSAFNPMSSVDVAAIEQQIKMTSLDGLRGYAQDHYGEVKQYRTTDYVPKSAAGGYQVLREPLWNKGLSFTPEERVSKNLTGLIPHAMESPSTQVERCMKMINSRQTPIDKYLYLSSLKDQNVDLFYRVLIDNVRELMPLVYTPTIGDVCLQYSTLYTRPEALYISIKQRKSIRTILRNWPYPSPQICVVTDGSRILGLGDLGVNGVGISIGKLALYTGAAGIHPEKTLPIVLDAGTANEGNLKDPLYLGLRARRPSPAVMEEFVDEFMEAARDVFPDMLIQFEDFETEKAFNYLDRYRNDYKCFNDDIQGTGAVVLGGYIGAVNLSNVPIEDQRLVFMGAGSAGVGVAKQMVEYYTRRGLSEKAARDKFWLVDTKGLVTWDRGDTLPEHKKYFARSDNNGHQFRTLEEVIEYVRPSALVGLTATFGVFTESVVRALKASVDAGGSGRRPILFPLSNPLTKAECTFEQAVQWTEGTVIFASGSPFSPFAVKSGDHAVTYWPNQGNNVYVFPGLGLGAILAKASKITDEMVYISAQALSESLNAEEIQKGLIYPRIERVRDASINVAREVMKAARREGVSTLAEEQWVEWEEWGDVALERYIKDRVYDPLK

SEQ ID NO: 1971 - DNA, 3919 bp, Muscodor strobelii
  misc_feature: SGI EST ID NO. CUFF.5175.0
  misc_feature: Variant of the nucleotide sequence at SEQ ID NO 1969
ttttgttcttctccaattcagtgattcacttttttctacacgaccccgactttcccataggggtagaaatcaagctttgcccgtctaggacaaactcgacccggagctgcaccctgttgggcaaggcagtcgaacacgcgacatcgaagctgacttttgtttggactgttgcaatttgatacttgacggtcctcgagtacagtacttcgccgtactccttcgaattactctgtctcagctagctttggctctgaaatagaaatattactgatattactgcacgggttggaaactgcctgccaattgcgtgtcgaatggtcttacattttcgttccgattttcgccggttatactttcacacgccttaacggatcccggcgatctggaccgggtttgtgtttgttagtattgcgagggcttttgaaaccccaacgaaactcccgggctgtctgcctgtcacagcgtattattacattccttgtcgtaggatcgatggccaaacttcacagtctcacagccaaagcaggggtgctcggtccgccacctcgtactgcaactggacttcgtttattaagaagcccaccggcacatgcgcctggaattgccatcgatattaccggactctccgttggacgacacaacgaccatctcgcgccaatccaacttcctggaccttgttcctctcattccggacccttcccgtgcagaaacactactggtagtggcactgttgttggcctaaagtgggaaacttcgctgtcgtctccaagctcccccggcttatgcacaatacctgtaggctcatcagccatcggcggtcttagtggcactagtgccggtgcgactagttcaacaagcatctcattacgtccacgatcaacagccattttactaccacacgccctgagacgaccaatggcgtataatacttatagcactggaagctcagatatatcaacccctcgctcgtcatctccctcctctatcttttccggccgctcatctcatacttccgccgctagcaaacggctttccttgtccttacaacgaagacagtctgcttttaatcccatgtcatctgttgacgttgccgccattgaacaacaaataaaaatgacttcccttgacggactcagaggctacgcccaagaccactatggcgaggtcaagcagtatagaacgactgactatgtaccaaagtcggccgctggcggctatcaggtcctgcgggagcctctatggaacaaaggtctttctttcactcccgaggagcgcgtttctaagaacttgaccggtttaataccacatgccatggagagccccagtacgcaggtagagagatgtatgaagatgatcaactcgagacagacacctatcgacaagtatctgtatctgtcttctcttaaggatcaaaacgtggacctcttctaccgagtactcatcgacaatgttcgcgagctgatgccattggtctacactccaacaattggcgatgtctgcttgcaatactcgaccctttacactcgccctgaagccctatatatctccatcaagcagcgaaagtccatcaggaccatcctccggaattggccatacccaagcccgcagatctgtgtcgtcacggacggctcgcgtattcttggattgggtgatctgggtgttaacggcgtgggaatttccatagggaagctggcattgtacaccggtgccgctggtattcatcccgaaaagacgctccccatcgttctcgatgctggtactgccaacgagggcaacctgaaagacccgctctacctcggtctgcgagcgaggcgtccctctcccgccgttatggaggaattcgtagacgagttcatggaagcggccagggatgtcttccctgacatgctcatacaattcgaagatttcgaaactgaaaaggctttcaactacctggatcgctaccgaaacgattacaaatgtttcaatgacgatatccagggaactggtgccgtcgttcttggaggttacatcggcgctgtcaacctgtcaaatgtgcctattgaagatcaacgtcttgtcttcatgggtgctggctctgcaggtgtgggtgtcgctaagcagatggtcgagtactacactcgtcgtgggctgtcagaaaaggctgccagagacaagttttggcttgttgataccaaaggtctcgtcacatgggaccgcggtgacacactgccagagcacaagaagtatttcgctcgctcagacaacaacggtcatcaattccgtaccttggaggaggtgattgagtacgtcaggccttcagccctcgtcggcctgactgccacgttcggtgttttcaccgagtcggttgtccgtgctctgaaggcatcggttgatgccggcggctcaggtcgtcgtcccatcttgtttcctctcagcaaccctcttaccaaggctgagtgtacatttgaacaagctgttcaatggaccgaaggcaccgtcatctttgcgtctggctctcctttctcgccatttgccgtaaagtcgggcgaccatgccgttacgtattggcccaaccagggtaacaacgtttacgtctttcccggccttggtttgggtgccattttggctaaagcgtcgaagatcaccgatgagatggtctacatctctgcccaagcactgtcggaatctctcaatgccgaagaaatccagaagggattgatctaccctcgcatcgaacgagtccgggatgctagcatcaacgtcgctcgtgaagtgatgaaggcggcccgcagagaaggcgtcagtactctcgccgaagaacagtgggttgaatgggaagaatggggcgacgtcgctcttgagagatacattaaggacagggtctacgatcctcttaagtaagctctccagcgtgcattgcattcagcgttgcgattgatttgaaggcaacatgcatttggatcatgacgttatttataccatgagcatcatcggagtttgggttgaattccgttcagtgtttgatttggcgttatcgtcttctcttcgaactccatggttgaccttaacttgcttcaaggtcagcaccagatgatatacaaggtccacaaaacaagacgacgaagcacatcatacagacaggcactaatacaacagcggttgcgcaatgaaacgagatgagacagtaatataggaaataaggataggaaaaggctaccaccacatttagaaggaccttgcaattcttagagacggcatagatgatgagcgttcatgcgcaatggataccaatacatatgctttaccaacatcattgtttactttgtgcatctgcatgacactctctcttgtgtttctatggaaagttgaagatgacttctgtgccttcaggtacatgggtttcctgtcgccaactcccgctaccccgacactacgacccaaccatataattcttgctccgcttccccaactttcccaaatcgtccacgaagacactttacaaccaataggagtttactctacgcaggccctcgtcttgaatctattctagggtcgtgtatgagaacgactccatatatcctaattaccagaacgtgcgaatctcatattagccgagcaagagctgtcacgattggttggcgtcattgagcctctatgtggtcgctttcctcatggtcatactaatgtaattataagacgtaaagctgagttacggccacacatttttgtccttaaggtgtgattgccaagatgtttttcctctccgtttcctgtcttggtaaacacctcgctgtagttcatgtagatgtcgccactatgcgcgtgggaaacagatgagtgtctagatagattcagatcattcatttttcaaatgtatctatcggatttgtaagtagtcgcggccgacaatttttttggcacaatttacgtattttcg

SEQ ID NO: 1972 - DNA, 2055 bp, Muscodor strobelii
  misc_feature: SGI cDNA ID NO. 560274
  misc_feature: Reduced expression when VOC is produced
  misc_feature: Encodes the peptide sequence at SEQ ID NO 1973
atggcgtataatacttatagcactggaagctcagatatatcaacccctcgctcgtcatctccctcctctatcttttccggccgctcatctcatacttccgccgctagcaaacggctttccttgtccttacaacgaagacagtctgcttttaatcccatgtcatctgttgacgttgccgccattgaacaacaaataaaaatgacttcccttgacggactcagaggctacgcccaagaccactatggcgaggtcaagcagtatagaacgactgactatgtaccaaagtcggccgctggcggctatcaggtcctgcgggagcctctatggaacaaaggtctttctttcactcccgaggagcgcgtttctaagaacttgaccggtttaataccacatgccatggagagccccagtacgcaggtagagagatgtatgaagatgatcaactcgagacagacacctatcgacaagtatctgtatctgtcttctcttaaggatcaaaacgtggacctcttctaccgagtactcatcgacaatgttcgcgagctgatgccattggtctacactccaacaattggcgatgtctgcttgcaatactcgaccctttacactcgccctgaagccctatatatctccatcaagcagcgaaagtccatcaggaccatcctccggaattggccatacccaagcccgcagatctgtgtcgtcacggacggctcgcgtattcttggattgggtgatctgggtgttaacggcgtgggaatttccatagggaagctggcattgtacaccggtgccgctggtattcatcccgaaaagacgctccccatcgttctcgatgctggtactgccaacgagggcaacctgaaagacccgctctacctcggtctgcgagcgaggcgtccctctcccgccgttatggaggaattcgtagacgagttcatggaagcggccagggatgtcttccctgacatgctcatacaattcgaagatttcgaaactgaaaaggctttcaactacctggatcgctaccgaaacgattacaaatgtttcaatgacgatatccagggaactggtgccgtcgttcttggaggttacatcggcgctgtcaacctgtcaaatgtgcctattgaagatcaacgtcttgtcttcatgggtgctggctctgcaggtgtgggtgtcgctaagcagatggtcgagtactacactcgtcgtgggctgtcagaaaaggctgccagagacaagttttggcttgttgataccaaaggtctcgtcacatgggaccgcggtgacacactgccagagcacaagaagtatttcgctcgctcagacaacaacggtcatcaattccgtaccttggaggaggtgattgagtacgtcaggccttcagccctcgtcggcctgactgccacgttcggtgttttcaccgagtcggttgtccgtgctctgaaggcatcggttgatgccggcggctcaggtcgtcgtcccatcttgtttcctctcagcaaccctcttaccaaggctgagtgtacatttgaacaagctgttcaatggaccgaaggcaccgtcatctttgcgtctggctctcctttctcgccatttgccgtaaagtcgggcgaccatgccgttacgtattggcccaaccagggtaacaacgtttacgtctttcccggccttggtttgggtgccattttggctaaagcgtcgaagatcaccgatgagatggtctacatctctgcccaagcactgtcggaatctctcaatgccgaagaaatccagaagggattgatctaccctcgcatcgaacgagtccgggatgctagcatcaacgtcgctcgtgaagtgatgaaggcggcccgcagagaaggcgtcagtactctcgccgaagaacagtgggttgaatgggaagaatggggcgacgtcgctcttgagagatacattaaggacagggtctacgatcctcttaagtcagcaccagatgatatacaaggtccacaaaacaagacgacgaagcacatcatacagacaggcactaatacaacagcggttgcgcaatga

SEQ ID NO: 1973 - protein, 684 aa, Muscodor strobelii
  misc_feature: SGI Peptide ID NO. 560274
  misc_feature (164)..(352): Pfam Id: PF00390 Pfam Desc: Malic enzyme, N-terminal domain
  misc_feature (354)..(619): Pfam Id: PF03949 Pfam Desc: Malic enzyme, NAD binding domain
  misc_feature (37)..(653): NCBI GI: 171693999 Blast Desc: protein product [Podospora anserina] gi|170946948|emb|CAP73752.1| protein product [Podospora anserina]
  misc_feature (45)..(653): NCBI GI: 116197989 Blast Desc: CHGG_07150 [Chaetomium globosum CBS 148.51] gi|88178429|gb|EAQ85897.1| CHGG_07150 [Chaetomium globosum CBS 148.51]
  misc_feature (34)..(653): NCBI GI: 164426796 Blast Desc: NCU03651 [Neurospora crassa OR74A] gi|157071481|gb|EAA31495.2| conserved [Neurospora crassa OR74A]
  misc_feature (67)..(654): NCBI GI: 46125627 Blast Desc: FG07191.1 [Gibberella zeae PH-1]
  misc_feature (67)..(654): NCBI GI: 256730968 Blast Desc: [Nectria haematococca mpVI 77-13-4]
  misc_feature (34)..(653): NCBI GI: 16944467 Blast Desc: related to malate dehydrogenase (oxaloacetate-decarboxylating) (NADP+) [Neurospora crassa]
  misc_feature (52)..(655): NCBI GI: 39946106 Blast Desc: MGG_08173 [Magnaporthe grisea 70-15] gi|145019429|gb|EDK03657.1| MGG_08173 [Magnaporthe grisea 70-15]
  misc_feature (15)..(521): NCBI GI: 154296927 Blast Desc: BC1G_12552 [Botryotinia fuckeliana B05.10] gi|150843079|gb|EDN18272.1| BC1G_12552 [Botryotinia fuckeliana B05.10]
  misc_feature (127)..(652): NCBI GI: 115442968 Blast Desc: ATEG_09669 [Aspergillus terreus NIH2624] gi|114188160|gb|EAU29860.1| ATEG_09669 [Aspergillus terreus NIH2624]
  misc_feature (127)..(653): NCBI GI: 119480619 Blast Desc: malic enzyme [Neosartorya fischeri NRRL 181] gi|119408492|gb|EAW18441.1| malic enzyme [Neosartorya fischeri NRRL 181]
  misc_feature (103)..(633): SWISSPROT Homolog: EC 1.1.1.40 Malate dehydrogenase (oxaloacetate-decarboxylating) (NADP(+))
  misc_feature: Useful for introducing or modulating the production of volatile compounds
MAYNTYSTGSSDISTPRSSSPSSIFSGRSSHTSAASKRLSLSLQRRQSAFNPMSSVDVAAIEQQIKMTSLDGLRGYAQDHYGEVKQYRTTDYVPKSAAGGYQVLREPLWNKGLSFTPEERVSKNLTGLIPHAMESPSTQVERCMKMINSRQTPIDKYLYLSSLKDQNVDLFYRVLIDNVRELMPLVYTPTIGDVCLQYSTLYTRPEALYISIKQRKSIRTILRNWPYPSPQICVVTDGSRILGLGDLGVNGVGISIGKLALYTGAAGIHPEKTLPIVLDAGTANEGNLKDPLYLGLRARRPSPAVMEEFVDEFMEAARDVFPDMLIQFEDFETEKAFNYLDRYRNDYKCFNDDIQGTGAVVLGGYIGAVNLSNVPIEDQRLVFMGAGSAGVGVAKQMVEYYTRRGLSEKAARDKFWLVDTKGLVTWDRGDTLPEHKKYFARSDNNGHQFRTLEEVIEYVRPSALVGLTATFGVFTESVVRALKASVDAGGSGRRPILFPLSNPLTKAECTFEQAVQWTEGTVIFASGSPFSPFAVKSGDHAVTYWPNQGNNVYVFPGLGLGAILAKASKITDEMVYISAQALSESLNAEEIQKGLIYPRIERVRDASINVAREVMKAARREGVSTLAEEQWVEWEEWGDVALERYIKDRVYDPLKSAPDDIQGPQNKTTKHIIQTGTNTTAVAQ

SEQ ID NO: 1974 - DNA, 3919 bp, Muscodor strobelii; identical to SEQ ID NO: 1971
  misc_feature: SGI EST ID NO. CUFF.5175.0
  misc_feature: Variant of the nucleotide sequence at SEQ ID NO 1972

SEQ ID NO: 1975 - DNA, 1068 bp, Muscodor strobelii
  misc_feature: SGI cDNA ID NO. 560275
  misc_feature: Encodes the peptide sequence at SEQ ID NO 1976
atgaagctttcaattgtgcttataacctgtgttgtgggctttgctcgagcagcgctcaacgtaacgggctcaacatgcaccgtgacgcccttaccgacaacatcgggcggcaaagagccagatgatacgcctcaaatcctccaagcgttcaaaacatgcgggacgaacgggaaaattgtattgagtgaagggctcttccacatcggccaagtgatggacacgcttaccttcaacaacgtcgatatcgagatctatggaaccttgcgatggtcttccgacatccaatattggctgcgcagtagcttgccggtaacatatgctggacggagtacggcgtggagaatcggaggtactgatattcggatccgaggatttggcaaggcgctatttgatggacagggtcagttgtggtacgatgagaataggaatgggagcaatcagaatggacggccgatcagcttcacgctttggcatgcgaagaatgtgcttgttgatgggattacttggcggcagagccagttttggcatacgttcgtcgcatatagcgaaaacattaccatgacgaatctagatatgaattctacgagtagtagtcagtggaatacggtcaacacggatggcattgacacgtggaactcgaaagacatcgtattaacaaactggaccgtaacatgtggcgatgactgcatctccatgaaaggcaacagcacaaacgtccaagtctccaacgtacactgctacgaatcaggttgcgcctgtatcggatcaatggggtccaatgccggacaaccagactatgtcgacaacgtctacttcaacaatgtgacctgcacgcattcttcaaacgcggcctggatcaagacgtattctggaacaggtcatgtgaagaacgtcacattcgcgaatttcaacattcaggatgttaatcagcctatctatgtcacgccatgtatctatggtagctccgggtgtgatagttcgaggttgaagattagtgatgttcattggcacaagtcgctacaacatcgcagccgggattcactgttcgtccgccgcgccatgcgataa

SEQ ID NO: 1976 - protein, 355 aa, Muscodor strobelii
  misc_feature: SGI Peptide ID NO. 560275
  misc_feature (53)..(355): Pfam Id: PF00295 Pfam Desc: Glycosyl hydrolases family 28
  misc_feature (125)..(314): Pfam Id: PF00295 Pfam Desc: Glycosyl hydrolases family 28
  misc_feature (15)..(337): NCBI GI: 169620742 Blast Desc: SNOG_13575 [Phaeosphaeria nodorum SN15] gi|111057902|gb|EAT79022.1| SNOG_13575 [Phaeosphaeria nodorum SN15]
  misc_feature (17)..(337): NCBI GI: 169854315 Blast Desc: CC1G_01509 [Coprinopsis cinerea okayama7#130] gi|116504967|gb|EAU87862.1| CC1G_01509 [Coprinopsis cinerea okayama7#130]
  misc_feature (32)..(322): NCBI GI: 116198123 Blast Desc: CHGG_07217 [Chaetomium globosum CBS 148.51] gi|88178496|gb|EAQ85964.1| CHGG_07217 [Chaetomium globosum CBS 148.51]
  misc_feature (8)..(337): NCBI GI: 115436800 Blast Desc: [Aspergillus terreus NIH2624] gi|114188462|gb|EAU30162.1| [Aspergillus terreus NIH2624]
  misc_feature (23)..(337): NCBI GI: 169779817 Blast Desc: [Aspergillus oryzae RIB40] gi|83773112|dbj|BAE63240.1| protein product [Aspergillus oryzae]
  misc_feature (23)..(337): NCBI GI: 238500507 Blast Desc: exopolygalacturonase precursor, [Aspergillus flavus NRRL3357] gi|220693241|gb|EED49587.1| exopolygalacturonase precursor, [Aspergillus flavus NRRL3357]
  misc_feature (4)..(336): NCBI GI: 242762775 Blast Desc: exo-polygalacturonase, [Talaromyces stipitatus ATCC 10500] gi|218723642|gb|EED23059.1| exo-polygalacturonase, [Talaromyces stipitatus ATCC 10500]
  misc_feature (26)..(338): NCBI GI: 261358727 Blast Desc: exo-rhamnogalacturonase B [Verticillium albo-atrum VaMs.102]
  misc_feature (7)..(290): NCBI GI: 259487591 Blast Desc: TPA: exo-polygalacturonase, (AFU_orthologue; AFUA_7G06410) [Aspergillus nidulans FGSC A4]
  misc_feature (1)..(290): NCBI GI: 67523501 Blast Desc: AN2206.2 [Aspergillus nidulans FGSC A4] gi|40744707|gb|EAA63863.1| AN2206.2 [Aspergillus nidulans FGSC A4]
  misc_feature (18)..(334): SWISSPROT Homolog: EC 3.2.1.67 Galacturan 1,4-alpha-galacturonidase
MKLSIVLITCVVGFARAALNVTGSTCTVTPLPTTSGGKEPDDTPQILQAFKTCGTNGKIVLSEGLFHIGQVMDTLTFNNVDIEIYGTLRWSSDIQYWLRSSLPVTYAGRSTAWRIGGTDIRIRGFGKALFDGQGQLWYDENRNGSNQNGRPISFTLWHAKNVLVDGITWRQSQFWHTFVAYSENITMTNLDMNSTSSSQWNTVNTDGIDTWNSKDIVLTNWTVTCGDDCISMKGNSTNVQVSNVHCYESGCACIGSMGSNAGQPDYVDNVYFNNVTCTHSSNAAWIKTYSGTGHVKNVTFANFNIQDVNQPIYVTPCIYGSSGCDSSRLKISDVHWHKSLQHRSRDSLFVRRAMR

SEQ ID NO: 1977 - DNA, 381 bp, Muscodor strobelii
  misc_feature: SGI EST ID NO. CUFF.5123.0
  misc_feature: Variant of the nucleotide sequence at SEQ ID NO 1975
ccgggtgtgatagttcgaggttgaagattagtgatgttcattggataaacataacaggcacaagtcgctacaacatcgcagccgggattcactgttcgtccgccgcgccatgcgataacttcacttttcaaaatatcgacatcaaagacaaagatggaaaaacgcctgtgaagtatctttgctccggcatttcgaatcaggcttcgtctggtattccttgcacggggacatgtccggcgaattggccgcagcagttatcagggaataactaggggcaggcattgggttatatcgttgatagcagagagtttctagtaccggcaatattgagtgtatatatcggatctttggaactacgttaccaaatatgatgatctgcgt

SEQ ID NO: 1978 - DNA, 2766 bp, Muscodor strobelii
  misc_feature: SGI cDNA ID NO. 560276
  misc_feature: Encodes the peptide sequence at SEQ ID NO 1979
atgggtgaacttgacgttgatacactgttgcaaaatggctactggccaaattcaagggcacggagcccagatcctcgggctatagaaagtcctcacagatctaactactcatcatatcccgaccggacggttccgagaaaagccctagccattacggatttgaaacatccaagatcactccctccaccgccgccgagcgtcgaggacgaagttgacgcagccacgaaggaggccgactatcgccaggacgaggctccatctgaacaacccaaaaaccgtggcgagattgatcagcatacattgattgaagatgtttttgaagaaaatcccgagaggcgatttgtaatagtgcaaaacaaggactctgaatcttctggagaaacctccggcacagatagccgaccaaaggtccgaccacatagaccacgagaggcatcgcccaagaagcggcccgattccaaacccgacattgaaattgagccagttccatatgaagcgaacacatgccgcaaatatgtacaggtttcctcacgagacgagccgccggccagaaaggagactcagcctgatcgtgaccgcaatcgcgataaccgacggcggagtagacttgaggacttgcctcctatagtcacagagtccagtaccgaggaacggccgtatgattcgcgacgggccaagtctacatcgcgaagagaaagtcgcggtgctgattacttctctccacagaccgctccttctggtcctagaaaaccacgtgacagtttgctaacaccagaggttatcgagcacgcaacaaatgggcgagatcgaccatactacaaaggcgggtcaaatttagactccctaggtcgcaatcgctcagcgcatccaaatgatcaatacagccggacgcccgcaaatgatcgtacttccagagagaaagctacaaaaccggctcactctgcaagtccgacgttccagaaaagacatacagcggatctgccgaaatatacgaggcgaaattcaaaagaggcatccgaatctcgcccgtatgtccaagtgtcacccaccaaaactgagcacaagccgccagcgtcagcatacgtctaccccgatcgtaacattgtaacgcagtcttctccacgaccgagggaaaaacgggatggtcaacatcgtgaaacagtctcctcaagtgaggatgagaaaagatccgatgacgcatcccgtcgcagacagtccggcttgccatctaggagacccgggtatctcaacccttctgttgatctacgtccagtagatcaacgccaatccagggtgccttccccagtagcagcgtcaaagccgtctcagaattcgggttcagatcaatcggcgtcgagtagtcctagaagcagcacgttccccagggaattaaagcctcgagacgatcgcaatgagcgcccgttatctcgggcgaggactgccagaggctctttcactgtgcccgaaaccaacatcattcctggagctgccgctgcaacaattgcagctatagctactcccacttctagcaccccggccgatcctcgtcgaccattgccgcctccacctagagcaagcacttttgcaacctcgcgtccttcggcttcactgtctacttcgacctcgacagggccaagttgggcaccgccaaaatttgaaccttctcggaatggcacaagttctggcccgccaatatcttcttataggcgctattcgcttgaggttaaacatggcgagctacctgatattccccattgccctcggacacgagaagaagctggtcatatggattggctgacgctaccacgctgcgacaactttaacatttgcccgtcatgctacagcgccaatttctcaactacagaatttgctcatcactttgttccagtcccttttcgaccgcgtgaccgaccactagcctgcgactttggcacttcagagtattaccgtattgcatggttatttacacgaaaatatgggaagcctgaccttggcctcctcttaagtctgactcaaatagctgccaagagccaaccttgtactgggcatcgcgaggcgtcgcgcatctggtattcgatcaaggatcctcgtgctaagcgacctgtcgacgactttactgtgtgccattcctgcgcgaaaacagtggaaacactcctccccagcttgacggggctcttcgtcccgcttgactcgcccgctgagccggctcgcggtatatgtgccatgcatcaggatcgcggccatgatcgtgggcgtttcctactatactttgatgtgctcgaaggcgctgcagaccgtgctctggaaaaacaatcggcgcctaacgttcaagctctcgctgatcgaatccgcgaacttgctgtcgtcccaccgtgtcccgaaggccgtccattgcgcaatgctttgtggcacacgatgcgttccgttccagatctaatcgtgtgcccagagtgtttcatgatcatcgttcgacctctgctagactcacgtcgtgaggatctaacgattgtaggagatttcttccacgacccgactcgcatggcacatggtgactgcatgctgtactcggaacgcatgcgcagcatctttgatcgcgcggttagacgtagagatatcgcatatcttgcggccaaagcacgagagcgcaatgataaggaacgtgagtgcaccgaccagctcaaggttcttcagcgacaaggcttgagccctgctcagactgatgccgaggcaaagcgtatcaagaatgaatggaggaagtgggaataa

SEQ ID NO: 1979 - protein, 921 aa, Muscodor strobelii
  misc_feature: SGI Peptide ID NO. 560276
  misc_feature (151)..(921): NCBI GI: 261355574 Blast Desc: conserved [Verticillium albo-atrum VaMs.102]
  misc_feature (532)..(921): NCBI GI: 256730965 Blast Desc: NECHADRAFT_49584 [Nectria haematococca mpVI 77-13-4]
  misc_feature (518)..(921): NCBI GI: 39946144 Blast Desc: MGG_08192 [Magnaporthe grisea 70-15] gi|145019450|gb|EDK03678.1| MGG_08192 [Magnaporthe grisea 70-15]
  misc_feature (515)..(921): NCBI GI: 46125615 Blast Desc: FG07185.1 [Gibberella zeae PH-1]
  misc_feature (3)..(921): NCBI GI: 154322741 Blast Desc: BC1G_00713 [Botryotinia fuckeliana B05.10] gi|150848047|gb|EDN23240.1| BC1G_00713 [Botryotinia fuckeliana B05.10]
  misc_feature (564)..(921): NCBI GI: 156064795 Blast Desc: SS1G_00405 [Sclerotinia sclerotiorum 1980] gi|154691267|gb|EDN91005.1| SS1G_00405 [Sclerotinia sclerotiorum 1980]
  misc_feature (447)..(915): NCBI GI: 116198125 Blast Desc: CHGG_07218 [Chaetomium globosum CBS 148.51] gi|88178497|gb|EAQ85965.1| CHGG_07218 [Chaetomium globosum CBS 148.51]
  misc_feature (528)..(882): NCBI GI: 85101204 Blast Desc: NCU03758 [Neurospora crassa OR74A] gi|16944628|emb|CAC28666.2| related to ser/arg-related nuclear matrix protein [Neurospora crassa] gi|28922644|gb|EAA31869.1|
  misc_feature (503)..(921): NCBI GI: 119479045 Blast Desc: NFIA_075840 [Neosartorya fischeri NRRL 181] gi|119407705|gb|EAW17654.1| conserved [Neosartorya fischeri NRRL 181]
  misc_feature (555)..(921): NCBI GI: 121713656 Blast Desc: conserved [Aspergillus clavatus NRRL 1] gi|119402592|gb|EAW13013.1| conserved [Aspergillus clavatus NRRL 1]
MGELDVDTLLQNGYWPNSRARSPDPRAIESPHRSNYSSYPDRTVPRKALAITDLKHPRSLPPPPPSVEDEVDAATKEADYRQDEAPSEQPKNRGEIDQHTLIEDVFEENPERRFVIVQNKDSESSGETSGTDSRPKVRPHRPREASPKKRPDSKPDIEIEPVPYEANTCRKYVQVSSRDEPPARKETQPDRDRNRDNRRRSRLEDLPPIVTESSTEERPYDSRRAKSTSRRESRGADYFSPQTAPSGPRKPRDSLLTPEVIEHATNGRDRPYYKGGSNLDSLGRNRSAHPNDQYSRTPANDRTSREKATKPAHSASPTFQKRHTADLPKYTRRNSKEASESRPYVQVSPTKTEHKPPASAYVYPDRNIVTQSSPRPREKRDGQHRETVSSSEDEKRSDDASRRRQSGLPSRRPGYLNPSVDLRPVDQRQSRVPSPVAASKPSQNSGSDQSASSSPRSSTFPRELKPRDDRNERPLSRARTARGSFTVPETNIIPGAAAATIAAIATPTSSTPADPRRPLPPPPRASTFATSRPSASLSTSTSTGPSWAPPKFEPSRNGTSSGPPISSYRRYSLEVKHGELPDIPHCPRTREEAGHMDWLTLPRCDNFNICPSCYSANFSTTEFAHHFVPVPFRPRDRPLACDFGTSEYYRIAWLFTRKYGKPDLGLLLSLTQIAAKSQPCTGHREASRIWYSIKDPRAKRPVDDFTVCHSCAKTVETLLPSLTGLFVPLDSPAEPARGICAMHQDRGHDRGRFLLYFDVLEGAADRALEKQSAPNVQALADRIRELAVVPPCPEGRPLRNALWHTMRSVPDLIVCPECFMIIVRPLLDSRREDLTIVGDFFHDPTRMAHGDCMLYSERMRSIFDRAVRRRDIAYLAAKARERNDKERECTDQLKVLQRQGLSPAQTDAEAKRIKNEWRKWE

SEQ ID NO: 1980 - DNA, 3788 bp, Muscodor strobelii
  misc_feature: SGI EST ID NO. CUFF.5130.0
  misc_feature: Variant of the nucleotide sequence at SEQ ID NO 1978
attatatttcaactgataacgccctcataacaagccgtctttcagtcttgcattctgtaaacattgtcttgtttgggaaccctaggactttgttgacctcagcctctcttgtatcgttgtctttactgcgtcgcattttggcatctctcgcttgtcttcagcttgtgcctttcggtcccccctccattacaaaataccacctccatctgcaaccagatccctctccccacttgaatgcatgatactacgctctacagtccctggcttgcttcttttacatcattcagatccatataatcttgcccgattacatacctcgttcaattgcggctgctctacaatcattgtcttccttacagtcctaccggcagactcgtaatacgtttcggaaccttacacaaccatcagcaaccggggttctgcgccgtacagcgtcactcgcctcttctcagctttccttgcgtatttctgcctggtgctcttgaacggagcattgtactgtgcatcggcgttggtggccacttgacttgaagagcaaacaagcaagcagaagtcagcctctccttcagtgaggctgtgtattgggaaagccgaagtgcttggggctgtccatctagttccaccgtccatatccagatatcatgtcctgaggccgtcttctggctcccacgagtgaatcttgcgcaattatgggtgaacttgacgttgatacactgttgcaaaatggctactggccaaattcaagggcacggagcccagatcctcgggctatagaaagtcctcacagatctaactactcatcatatcccgaccggacggttccgagaaaagccctagccattacggatttgaaacatccaagatcactccctccaccgccgccgagcgtcgaggacgaagttgacgcagccacgaaggaggccgactatcgccaggacgaggctccatctgaacaacccaaaaaccgtggcgagattgatcagcatacattgattgaagatgtttttgaagaaaatcccgagaggcgatttgtaatagtgcaaaacaaggactctgaatcttctggagaaacctccggcacagatagccgaccaaaggtccgaccacatagaccacgagaggcatcgcccaagaagcggcccgattccaaacccgacattgaaattgagccagttccatatgaagcgaacacatgccgcaaatatgtacaggtttcctcacgagacgagccgccggccagaaaggagactcagcctgatcgtgaccgcaatcgcgataaccgacggcggagtagacttgaggacttgcctcctatagtcacagagtccagtaccgaggaacggccgtatgattcgcgacgggccaagtctacatcgcgaagagaaagtcgcggtgctgattacttctctccacagaccgctccttctggtcctagaaaaccacgtgacagtttgctaacaccagaggttatcgagcacgcaacaaatgggcgagatcgaccatactacaaaggcgggtcaaatttagactccctaggtcgcaatcgctcagcgcatccaaatgatcaatacagccggacgcccgcaaatgatcgtacttccagagagaaagctacaaaaccggctcactctgcaagtccgacgttccagaaaagacatacagcggatctgccgaaatatacgaggcgaaattcaaaagaggcatccgaatctcgcccgtatgtccaagtgtcacccaccaaaactgagcacaagccgccagcgtcagcatacgtctaccccgatcgtaacattgtaacgcagtcttctccacgaccgagggaaaaacgggatggtcaacatcgtgaaacagtctcctcaagtgaggatgagaaaagatccgatgacgcatcccgtcgcagacagtccggcttgccatctaggagacccgggtatctcaacccttctgttgatctacgtccagtagatcaacgccaatccagggtgccttccccagtagcagcgtcaaagccgtctcagaattcgggttcagatcaatcggcgtcgagtagtcctagaagcagcacgttccccagggaattaaagcctcgagacgatcgcaatgagcgcccgttatctcgggcgaggactgccagaggctctttcactgtgcccgaaaccaacatcattcctggagctgccgctgcaacaattgcagctatagctactcccacttctagcaccccggccgatcctcgtcgaccattgccgcctccacctagagcaagcacttttgcaacctcgcgtccttcggcttcactgtctacttcgacctcgacagggccaagttgggcaccgccaaaatttgaaccttctcggaatggcacaagttctggcccgccaatatcttcttataggcgctattcgcttgaggttaaacatggcgagctacctgatattccccattgccctcggacacgagaagaagctggtcatatggattggctgacgctaccacgctgcgacaactttaacatttgcccgtcatgctacagcgccaatttctcaactacagaatttgctcatcactttgttccagtcccttttcgaccgcgtgaccgaccactagcctgcgactttggcacttcagagtattaccgtattgcatggttatttacacgaaaatatgggaagcctgaccttggcctcctcttaagtctgactcaaatagctgccaagagccaaccttgtactgggcatcgcgaggcgtcgcgcatctggtattcgatcaaggatcctcgtgctaagcgacctgtcgacgactttactgtgtgccattcctgcgcgaaaacagtggaaacactcctccccagcttgacggggctcttcgtcccgcttgactcgcccgctgagccggctcgcggtatatgtgccatgcatcaggatcgcggccatgatcgtgggcgtttcctactatactttgatgtgctcgaaggcgctgcagaccgtgctctggaaaaacaatcggcgcctaacgttcaagctctcgctgatcgaatccgcgaacttgctgtcgtcccaccgtgtcccgaaggccgtccattgcgcaatgctttgtggcacacgatgcgttccgttccagatctaatcgtgtgcccagagtgtttcatgatcatcgttcgacctctgctagactcacgtcgtgaggatctaacgattgtaggagatttcttccacgacccgactcgcatggcacatggtgactgcatgctgtactcggaacgcatgcgcagcatctttgatcgcgcggttagacgtagagatatcgcatatcttgcggccaaagcacgagagcgcaatgataaggaacgtgagtgcaccgaccagctcaaggttcttcagcgacaaggcttgagccctgctcagactgatgccgaggcaaagcgtatcaagaatgaatggaggaagtgggaataatgccgcgtgctttataatgtatgagggtgatctgaactgacttgagaaatattcatgaagggaacactggcgtatcggccctcggtttgccaatgagagatgaaaatggaagggaaatccggcgctataccatgatacaatagtctagggcttacctggaaatcggagcattgcatctactggctacgattgacgtgtgcttcaaacatgagctcagggttgtcagcggctaaaaatttaggacggttgggaagagtccaatgagctacgagaaacgagaaacggaaattagtaaacattcgctaatatgaatacacaaccttttatacgact

SEQ ID NO: 1981 - DNA, 1296 bp, Muscodor strobelii
  misc_feature: SGI cDNA ID NO. 560277
  misc_feature: Encodes the peptide sequence at SEQ ID NO 1982
atgccaggttccatttcgggctccttcggaaccgatctgcatgacgatgagacagaagaacaccctgctaccgtgagctccgagctccttcgcccggcaagcggggaggaacaccggcgcaaagggccgttgttgactgtactgaacggcttggccttagtaataggtctccagattggatctggtatcttctcggcgcctagtctaatcagtcagcacgtcggctcacccgctgagggactcctcgtctttattacagcgggcctgcttgtctggacaggcgctgcatcgttcattgaattagggttacttgtgccgtccaatggcggaatacaagagtacttgcgtgccagctggggcgattatgctggttatctcttcacctggatctgggtcggtatagcgagaccagtcggaaacgcagtgatctctacgattttcgcggactatatcctaaaaagcctgttgtcgtccagtccgatctcaccttggacgaccaaagtcgtagctctaggctgtgtagcgacgctaaccatcatcaattgcctcggcgcaacagccggagcaaaagctgctaatgcgtttctattactaaaattcagtgccttaggcagtatcattgtcatcggtttcgtaaacttgacattcggcagtggcggcggtgtgcccgcctcaagtgatggatggttcggaagcggtcgagacacacctcgtgatgatacaaacatatggacgtggttcggtgagcttactacggcgctgtttgccgctctcttctgctacggaggatgggaaacggcgagtttcattgctggtgatttgaaagacccgagtagagacattccactagtcatcaatggcgcaatgacgctggtgatcataggattcttcctcatgaacgtatccctttacatctgcttaccgttcgatgtcatcagagaaagcacaacagtggcggtggagttcgcgaggcaaacgcttggggcttggggtggtgtcatattttctgtcgtggttgcaatctcagccatgggcgctgtgaatgccaatatgtttgctgtcgcaaaacttacggttgtagccgcgcagcgtgcttacgttccgcctatactggcaaacatacattacgagacatcttcagacgaggcagtgtacttgcgtcggacgttgccttcgctgtttcaactccctcttcgggtcttcgcgaagcaaacccgaaagtggcggtgggatcagtctgtaccagtgtctgtttatgtccagctgattataccggcttacttacaaacaagctga

SEQ ID NO: 1982 - protein, 431 aa, Muscodor strobelii
  misc_feature: SGI Peptide ID NO. 560277
  misc_feature (22)..(374): NCBI GI: 119467802 Blast Desc: amino acid transporter, [Neosartorya fischeri NRRL 181] gi|119405859|gb|EAW15810.1| amino acid transporter, [Neosartorya fischeri NRRL 181]
  misc_feature (33)..(374): NCBI GI: 115398536 Blast Desc: conserved [Aspergillus terreus NIH2624] gi|114191740|gb|EAU33440.1| conserved [Aspergillus terreus NIH2624]
  misc_feature (22)..(374): NCBI GI: 70984118 Blast Desc: amino acid transporter [Aspergillus fumigatus Af293] gi|66845206|gb|EAL85541.1| amino acid transporter, [Aspergillus fumigatus Af293] gi|159122365|gb|EDP47486.1| amino acid fumigatus
  misc_feature (33)..(406): NCBI GI: 169776935 Blast Desc: [Aspergillus oryzae RIB40] gi|238494016|ref|XP_002378244.1| amino acid transporter, [Aspergillus flavus NRRL3357] gi|83771670|dbj|BAE61800.1| protein
  misc_feature (31)..(405): NCBI GI: 255931503 Blast Desc: Pc12g04390 [Penicillium chrysogenum Wisconsin 54-1255] gi|211581927|emb|CAP80066.1| Pc12g04390 [Penicillium chrysogenum Wisconsin 54-1255]
  misc_feature (20)..(374): NCBI GI: 189195434 Blast Desc: large neutral amino acids transporter small subunit 2 [Pyrenophora tritici-repentis Pt-1C-BFP] gi|187979934|gb|EDU46560.1| large neutral amino acids transporter
  misc_feature (40)..(383): NCBI GI: 261355551 Blast Desc: large neutral amino acids transporter small subunit 1 [Verticillium albo-atrum VaMs.102]
  misc_feature (40)..(405): NCBI GI: 259480090 Blast Desc: TPA: amino acid transporter, (AFU_orthologue; AFUA_6G04990) [Aspergillus nidulans FGSC A4]
  misc_feature (36)..(389): NCBI GI: 171693669 Blast Desc: protein product [Podospora anserina] gi|170946783|emb|CAP73587.1| protein product [Podospora anserina]
  misc_feature (36)..(374): NCBI GI: 116198215 Blast Desc: CHGG_07263 [Chaetomium globosum CBS 148.51] gi|88178542|gb|EAQ86010.1| CHGG_07263 [Chaetomium globosum CBS 148.51]
MPGSISGSFGTDLHDDETEEHPATVSSELLRPASGEEHRRKGPLLTVLNGLALVIGLQIGSGIFSAPSLISQHVGSPAEGLLVFITAGLLVWTGAASFIELGLLVPSNGGIQEYLRASWGDYAGYLFTWIWVGIARPVGNAVISTIFADYILKSLLSSSPISPWTTKVVALGCVATLTIINCLGATAGAKAANAFLLLKFSALGSIIVIGFVNLTFGSGGGVPASSDGWFGSGRDTPRDDTNIWTWFGELTTALFAALFCYGGWETASFIAGDLKDPSRDIPLVINGAMTLVIIGFFLMNVSLYICLPFDVIRESTTVAVEFARQTLGAWGGVIFSVVVAISAMGAVNANMFAVAKLTVVAAQRAYVPPILANIHYETSSDEAVYLRRTLPSLFQLPLRVFAKQTRKWRWDQSVPVSVYVQLIIPAYLQTS

SEQ ID NO: 1983 - DNA, 4053 bp, Muscodor strobelii
  misc_feature: SGI EST ID NO. CUFF.5133.0
  misc_feature: Variant of the nucleotide sequence at SEQ ID NO 1981
cttaaatgttgtcaaattcattatgtgactactgatacgataaaatacatgcgaatttgacgtgtcagtcgcgtcgatctctgcatattaggctcggttctagtatagcgacattgacgtcttatcactcatccctgcgcccaccatgtgtaacgcaccatgagcacagaataccaataacccaagttttccaagtcttcgccttacaaaaaaaacattagataacagattgggaaccaacggccacatcgaagagcgatcatcgctgtcttcctacccaacgagtgttcattgacccgaacagcatcggaaagcgggtagtctccaaatcagtccattacaccacgccagtgtggcccatatcgggtgcataggatcgtcaacgggcaaccgtcaagacatgaaccgctgtctgtagcggtccgctccgctagatatgccaggttccatttcgggctccttcggaaccgatctgcatgacgatgagacagaagaacaccctgctaccgtgagctccgagctccttcgcccggcaagcggggaggaacaccggcgcaaagggccgttgttgactgtactgaacggcttggccttagtaataggtctccagattggatctggtatcttctcggcgcctagtctaatcagtcagcacgtcggctcacccgctgagggactcctcgtctttattacagcgggcctgcttgtctggacaggcgctgcatcgttcattgaattagggttacttgtgccgtccaatggcggaatacaagagtacttgcgtgccagctggggcgattatgctggttatctcttcacctggatctgggtcggtatagcgagaccagtcggaaacgcagtgatctctacgattttcgcggactatatcctaaaaagcctgttgtcgtccagtccgatctcaccttggacgaccaaagtcgtagctctaggctgtgtagcgacgctaaccatcatcaattgcctcggcgcaacagccggagcaaaagctgctaatgcgtttctattactaaaattcagtgccttaggcagtatcattgtcatcggtttcgtaaacttgacattcggcagtggcggcggtgtgcccgcctcaagtgatggatggttcggaagcggtcgagacacacctcgtgatgatacaaacatatggacgtggttcggtgagcttactacggcgctgtttgccgctctcttctgctacggaggatgggaaacggcgagtttcattgctggtgatttgaaagacccgagtagagacattccactagtcatcaatggcgcaatgacgctggtgatcataggattcttcctcatgaacgtatccctttacatctgcttaccgttcgatgtcatcagagaaagcacaacagtggcggtggagttcgcgaggcaaacgcttggggcttggggtggtgtcatattttctgtcgtggttgcaatctcagccatgggcgctgtgaatgccaatatgtttgctgtcgcaaaacttacggttgtagccgcgcagcgtgcttacgttccgcctatactggcaaacatacattacgagacatcttcagacgaggcagtgtacttgcgtcggacgttgccttcgctgtttcaactccctcttcgggtcttcgcgaagcaaacccgaaagtggcggtgggatcagtctgtaccagtattcgccctgttactacacggaattttgacatcgttgtttatactggtcggaacttttagcggtttaattgctcttctagaaatgaccaaagcgttttgttatatgtggtcagttctagggctattcattctacggcgagccgatagtcaaaagcccgctgaattgcagacaagacacagaacgtggtcgggcaaccctgtcatatttgcatccgttagtgcactgttgatcgttcgagaaatgttatccgcaccacttcaagtatcatcggttgttttgtttgctaccttacttggactagctgtgctctacaggagattcggacctcgggctaaccagctctctgcctccgtatgagctgggtgtcggaagctttacgtatgcatccatagttacactaacaacttaccatcgaggcaactctgtcacattgcctattgatcgactatgcgtattgcgttgccagggttcgagacatatagtgttgcgtgaattggcggcaccacatcgaagtcacgtaatggttgaacactcgtaagacgtcccagaaatgcgggatcccatagtgccttacatatcgcccgtcggcttttgcactcggtcgacgacccatccgcaggcgagcaaagaagctatttccaggggccatcaggagtgcggtcttccgaggctctcggagtgtctttaaaagggatgccgtatgacctttgggcatcaagacgttggtgcaacggcagaaaaagaaaagccgtttcgccatgcgaaacagtcatacattgtatgacactcaagcgtggccgttcgatacgtgagatagtctttacgccccgggcggaaagcttggcaatagtccaacacccgatattatcataattgcacaccgtgttcggcgtctgctgcactcttctgaattaatcgattaacttgccgtattcactggtatcaccagaccagactctgccgcaaaatctgagtggcgttggttcgcggctcttccccgtgttcgatggacatggacaactgcatctagcatgttgcctgctgtagaccctttggccccagggccaaattattgatagtcttcggtgaagttgtggactctgcatgtggctagcaaccgttataaccaagctatgcagcagctaccgttgtatctagccgcaggtgggccataccctactttagtagttgtagctgattaggtataaataacgacaatgcgtcagtggcaagctgtcaaaggcctgccaaggcaggcttgatgcgtgtgtgcaagcagccggagtactgcgtaacccatcctgagcccctcaaccaatatagggcgcggctactcacatgagtttcgtgggagatcagggcagttggcatcacgtcggtgacaccatctccaactcgaaagatcaagctacgacactacggtctgctgtggagcctcgcccgactgatactcggatgaggaccttgaggttgcagatggcgaccgcggcgtcgtccaagccaatgctgggcaacactagggctcagccggacctgaaaataaggttaaggtagatggatctcaacgttgcggcacatgttatctgctttgtactagacagcacacgatgattagtattgtcctagcaacctatctttgtagcagcgatcatccttgaagcacgtgggaattataccgcagtttttacaggctcgataagctggctgatgccaaagaaaagaagacattggcggtaaacaaccactcgatatgcggctcaagggcagtttgaatacaatacacaaccagtatattgaaatcagagcctcgtatgcagatttatgtaggacgcgtatgtatccagctgtaaggtaagcaaaccgcatcaaaccccctggctctcagctgcaggccagtccccttccagagggtaacgagacaagggcaagagagaccctccacgtcaaaatgtgcaattttgatgcagattgatgacgaacatattgtcccctctcaccaataccctctcttcaatggcgtgtgaggttgtcatgccatcgacagtccatctcgtaaagtttcgacacttggttattcttagccctgatcttagtctggctggtggatatggctggcgccactctccgatcgcacaagagagcaaccagaaacggctctcgcgcaccgacgtaacggcccagatcagatgcagattagatggagagagtgtgtgcctggagccgggtctgtatgcaaatcataaatgcattcaagcaatgctcataggctcggtcattgacggtcgccccccacggagcgtagcgggcaatatgactgaaagggaaatgcacgatcactccaggccgtgcgttggttggttgtgtcgccg

SEQ ID NO: 1984 - DNA, 477 bp, Muscodor strobelii
  misc_feature: SGI cDNA ID NO. 560278
  misc_feature: Reduced expression when VOC is produced
  misc_feature: Encodes the peptide sequence at SEQ ID NO 1985
atggcggacgagttgaccgacctcatctaccacctggtggactcatgcattcagctcttcaaccttctgaaagaacgcgtcgtcaccaatgttggtggaacacttggtcagatgacaaaatacacaccgcagcagtggatccgcatcattgctgttgtcggcgcctacatcctcttccgaccctacgtgctcagacacgctgccagataccaagagaagcaaatgcagaagcatagcgcagacaaagccgagatctctccgaatcagctgcgtggagaacagacctacatccccgatgacaccgacgacgaagaagaggccgacgtgggccaggcaagcgcttctgactggggcaagaaggcacgcaggagacagcgacaggtgctcaagaagctgatcgacgaccaggagaagagattacaggagaccaaggacgaagaggaggataaggacatcgaggagtttcttaccggatag

SEQ ID NO: 1985 - protein, 158 aa, Muscodor strobelii
  misc_feature: SGI Peptide ID NO. 560278
  misc_feature (27)..(158): Pfam Id: PF07543 Pfam Desc: Protein trafficking PGA2
  misc_feature (13)..(141): NCBI GI: 171693615 Blast Desc: protein product [Podospora anserina] gi|170946756|emb|CAP73560.1| protein product [Podospora anserina]
  misc_feature (13)..(141): NCBI GI: 85102566 Blast Desc: NCU03630 [Neurospora crassa OR74A] gi|12718387|emb|CAC28695.1| conserved [Neurospora crassa] gi|28922901|gb|EAA32121.1| [Neurospora crassa OR74A]
  misc_feature (12)..(156): NCBI GI: 154322743 Blast Desc: [Botryotinia fuckeliana B05.10] gi|150848048|gb|EDN23241.1| [Botryotinia fuckeliana B05.10]
  misc_feature (30)..(156): NCBI GI: 156064793 Blast Desc: SS1G_00404 [Sclerotinia sclerotiorum 1980] gi|154691266|gb|EDN91004.1| SS1G_00404 [Sclerotinia sclerotiorum 1980]
  misc_feature (26)..(140): NCBI GI: 261355573 Blast Desc: conserved [Verticillium albo-atrum VaMs.102]
  misc_feature (19)..(157): NCBI GI: 39946150 Blast Desc: MGG_08195 [Magnaporthe grisea 70-15] gi|145019453|gb|EDK03681.1| MGG_08195 [Magnaporthe grisea 70-15]
  misc_feature (44)..(156): NCBI GI: 46125611 Blast Desc: FG07183.1 [Gibberella zeae PH-1]
  misc_feature (59)..(156): NCBI GI: 116206424 Blast Desc: CHGG_02505 [Chaetomium globosum CBS 148.51] gi|88183102|gb|EAQ90570.1| CHGG_02505 [Chaetomium globosum CBS 148.51]
  misc_feature (29)..(156): NCBI GI: 256730964 Blast Desc: NECHADRAFT_101594 [Nectria haematococca mpVI 77-13-4]
  misc_feature (1)..(147): NCBI GI: 119471787 Blast Desc: NFIA_056710 [Neosartorya fischeri NRRL 181] gi|119406371|gb|EAW16322.1| conserved [Neosartorya fischeri NRRL 181]
  misc_feature: Useful for introducing or modulating the production of volatile compounds
MADELTDLIYHLVDSCIQLFNLLKERVVTNVGGTLGQMTKYTPQQWIRIIAVVGAYILFRPYVLRHAARYQEKQMQKHSADKAEISPNQLRGEQTYIPDDTDDEEEADVGQASASDWGKKARRRQRQVLKKLIDDQEKRLQETKDEEEDKDIEEFLTG

SEQ ID NO: 1986 - DNA, 330 bp, Muscodor strobelii
  misc_feature: SGI cDNA ID NO. 560279
  misc_feature: Encodes the peptide sequence at SEQ ID NO 1987
atggctgattctcctggtgaagacaatgttcaggagcaactaaaagctgcattatggtatgcagtgggccagatggtggatgaggagtcgcttcgcagaaataggaatgcaagccctcacttcattgccgtattgactgagatggtttggactcagattgagaatgtcgctcttgacctcgagagcttcagtcgtcatgctggacgctccactatcaccactgacgacgttttactacttgcaagacgaaatatggatctcaacaagatcatcaaggactccattgacaaagagaaggccgcaaaagcaagcgggaagtcaaagcgctga

SEQ ID NO: 1987 - protein, 109 aa, Muscodor strobelii
  misc_feature: SGI Peptide ID NO. 560279
  misc_feature (1)..(109): NCBI GI: 46125567 Blast Desc: FG07161.1 [Gibberella zeae PH-1]
  misc_feature (1)..(108): NCBI GI: 164426771 Blast Desc: NCU03629 [Neurospora crassa OR74A] gi|157071471|gb|EAA32120.2| conserved [Neurospora crassa OR74A]
  misc_feature (1)..(108): NCBI GI: 12718388 Blast Desc: conserved [Neurospora crassa]
  misc_feature (1)..(98): NCBI GI: 116206422 Blast Desc: CHGG_02504 [Chaetomium globosum CBS 148.51] gi|88183101|gb|EAQ90569.1| CHGG_02504 [Chaetomium globosum CBS 148.51]
  misc_feature (1)..(108): NCBI GI: 256730956 Blast Desc: [Nectria haematococca mpVI 77-13-4]
  misc_feature (5)..(108): NCBI GI: 154322745 Blast Desc: BC1G_00715 [Botryotinia fuckeliana B05.10] gi|150848049|gb|EDN23242.1| BC1G_00715 [Botryotinia fuckeliana B05.10]
  misc_feature (9)..(108): NCBI GI: 156064791 Blast Desc: SS1G_00403 [Sclerotinia sclerotiorum 1980] gi|154691265|gb|EDN91003.1| SS1G_00403 [Sclerotinia sclerotiorum 1980]
  misc_feature (10)..(101): NCBI GI: 212545885 Blast Desc: apoptosis-inducing TAF9-like domain 1 family protein, [Penicillium marneffei ATCC 18224] gi|210064616|gb|EEA18711.1| apoptosis-inducing TAF9-like domain 1 family protein, marneffei
  misc_feature (3)..(103): NCBI GI: 121699862 Blast Desc: conserved [Aspergillus clavatus NRRL 1] gi|119396338|gb|EAW06770.1| conserved [Aspergillus clavatus NRRL 1]
  misc_feature (5)..(99): NCBI GI: 115397307 Blast Desc: [Aspergillus terreus NIH2624] gi|114192436|gb|EAU34136.1| [Aspergillus terreus NIH2624]
MADSPGEDNVQEQLKAALWYAVGQMVDEESLRRNRNASPHFIAVLTEMVWTQIENVALDLESFSRHAGRSTITTDDVLLLARRNMDLNKIIKDSIDKEKAAKASGKSKR

SEQ ID NO: 1988 - DNA, 2246 bp, Muscodor strobelii
  misc_feature: SGI EST ID NO. CUFF.5138.0
  misc_feature: Variant of the nucleotide sequence at SEQ ID NO 1986
gtattatggtagttgaacgaatgatccgaagtaaatgtggcgatatatgcaaccccaatatcggcttgaggtacgaaatactgcatccttctagcggagaagaccgtggctcaagaggcggtaagcgaaagcttcaagccgacagcaatgatattatttgtgttttaactgattattgtagtccccatccatcatactccgtcatatcagggtcctatccggtaagaaactcctcgatgtccttatcctcctcttcgtccttggtctcctgtaatctcttctcctggtcgtcgatcagcttcttgagcacctgtcgctgtctcctgcgtgccttcttgccccagtcagaagcgcttgcctggcccacgtcggcctcttcttcgtcgtcggtgtcatcggggatgtaggtctgttctccacgcagctgattcggagagatctcggctttgtctgcgctatgcttctgcatttgcttctcttggtatctggcagcgtgtctgagcacgtagggtcggaagaggatgtaggcgccgacaacagcaatgatgcggatccactgctgcggtgtgtattttgtcatctgaccaagtgttccaccaacattggtgacgacgcgttctttcagaaggttgaagagctgaatgcatgagtccaccaggtggtagatgaggtcggtcaactcgtccgccattttgggcaggaacgttgtcgattgcgaggctttggttgctgttgttatcaattgcgcatgttttaggagcgacgaggcgttcggcgattagctctctgctgagtcgggatgcgaaatcgtcaacgggcacaggtaggtgatgtgaggggcttgtaggaatcgccgttgaacttggaagacgggatgcgagtgaatgggattaggtagagtagagtagaggcggcgaggggttttctcgtctgataattgtgataatacagttttgatttcccgcaaaaagttttggaaactcgttcacgcggcataaaatgtttagcgccggcaggcacggcgaaaggtacaggcagaggtccccacatctctgatgacctacggaggtacctaggcctgcgatgccgtttcgccccaccacagatagcaaatcacctgcaactctacgcgacttcaggtactttacgcgttatttcggctatctagacgtgaccttcgctagaactgccatcatggctgattctcctggtgaagacaatgttcaggagcaactaaaagctgcattatggtatgcagtgggccagatggtggatgaggagtcgcttcgcagaaataggaatgcaagccctcacttcattgccgtattgactgagatggtttggactcagattgagaatgtcgctcttgacctcgagagcttcagtcgtcatgctggacgctccactatcaccactgacgacgttttactacttgcaagacgaaatatggatctcaacaagatcatcaaggactccattgacaaagagaaggccgcaaaagcaagcgggaagtcaaagcgctgaagttttgtgccgatactctcacctgctcagcaaaatggctctagaaggccctgaaagatgcatctcagcttgatagtacgagccacgagaatggctggatttactctgcagggtcctacttgagtagatcgcaggcctagaaatacaggcagtagatatcatctggtttcgctgagcctctagcaagaacaaaggggtcccggcaaagtgctatgcaggcatgatatggctaccctgatgccacgctcccgacaagttctcaccatcagtgattcaaagtctggagatgtcatacatccgtcgcaaggttgtgaagacaaagcagatgcatggcacagatactgagtttctgcgactgaacattgcaggatagtggacaagcggacacaggggtagtgagcaatgatatatcttaaggtactgtcacaaccgccaattactttgtaatggttatctatcaacccaagactgaactcactgaatgtgcaaatatgagaagggcgaggcaagttgtgtttattcaggtatcgaacaattctgccaagtcagtgctgagacagttgttgagtcaaatgagtaacgtctgttgttgagtcaaatgagtaacgtctgttaaacgtttgacagaggttaatgttgcagctacgatgctctgctcctcgagctctctccaaattttcctgctaggtagtttattgttggtctacagggcagtggaattg

SEQ ID NO: 1989 - DNA, 831 bp, Muscodor strobelii
  misc_feature: SGI cDNA ID NO. 560280
  misc_feature: Reduced expression when VOC is produced
  misc_feature: Encodes the peptide sequence at SEQ ID NO 1990
atgggagccaaatcaggtttcgccctcaagggcctccagtggtttgtccgcggtattcagttcggagcttgcgctgtgacgcttgccctcttctcgtatatccttgcacttggttcctcgcgccatatcacccttccaacgtacacgcgagcggtcgagggcatctcgggtataggcgtcgtctacactgtgctcggcttactactcctgtgttgtctcgctggacatccattcacctccttcatcgctatcgtacttgatatcgccttcgttggcgcattcatctatgtcgcacaggccgtccgtggcggcgccggctcatgcacgggcaccgtcgacacaccctttggcaatcgccctgccaacgacgatatcagcaatggtgaaagcccaacgtttggtaccatctgcaagatgcagagtgctgttctggccgtttccatcgttgccataattttcttcatcatctcagcactcctagagtttgttctcgtccgccaccgccgcaaggaagctcgctttggccctagccctgccaacaactacacttccggctacggcaagcgacgtggattgttcggcatgttccgacgcaagaaggctgatgaggaagccatgaaccccaacgccttgcctgagcacacccatcctaaccaggttcgccagagctacaatactgagtccacagccgtcgctggtactgagttgaacaactacaacaagtatgacaacggcagattctcccatgatggccagacggcataccctgagaccaatccctacactggcggaggccattacggcgacggaacttacaacacaactcgataa

SEQ ID NO: 1990 - protein, 276 aa, Muscodor strobelii
  misc_feature: SGI Peptide ID NO. 560280
  misc_feature (1)..(257): NCBI GI: 46125565 Blast Desc: FG07160.1 [Gibberella zeae PH-1]
  misc_feature (1)..(276): NCBI GI: 256731328 Blast Desc: NECHADRAFT_105281 [Nectria haematococca mpVI 77-13-4]
  misc_feature (1)..(255): NCBI GI: 85103393 Blast Desc: NCU03735 [Neurospora crassa OR74A] gi|12718273|emb|CAC28835.1| conserved [Neurospora crassa] gi|28923057|gb|EAA32275.1| NCU03735 [Neurospora crassa OR74A]
  misc_feature (1)..(231): NCBI GI: 39974241 Blast Desc: MGG_00733 [Magnaporthe grisea 70-15] gi|145018336|gb|EDK02615.1| MGG_00733 [Magnaporthe grisea 70-15]
  misc_feature (1)..(235): NCBI GI: 171693667 Blast Desc: protein product [Podospora anserina] gi|170946782|emb|CAP73586.1| protein product [Podospora anserina]
  misc_feature (5)..(273): NCBI GI: 261355685 Blast Desc: conserved [Verticillium albo-atrum VaMs.102]
  misc_feature (6)..(235): NCBI GI: 154298882 Blast Desc: BC1G_11688 [Botryotinia fuckeliana B05.10] gi|150857593|gb|EDN32785.1| BC1G_11688 [Botryotinia fuckeliana B05.10]
  misc_feature (43)..(231): NCBI GI: 116206452 Blast Desc: CHGG_02519 [Chaetomium globosum CBS 148.51] gi|88183116|gb|EAQ90584.1| CHGG_02519 [Chaetomium globosum CBS 148.51]
  misc_feature (6)..(229): NCBI GI: 156064061 Blast Desc: SS1G_00038 [Sclerotinia sclerotiorum 1980] gi|154690900|gb|EDN90638.1| SS1G_00038 [Sclerotinia sclerotiorum 1980]
  misc_feature (6)..(240): NCBI GI: 145236603 Blast Desc: An06g01260 [Aspergillus niger] gi|134075408|emb|CAK39195.1| protein product [Aspergillus niger]
  misc_feature: Useful for introducing or modulating the production of volatile compounds
MGAKSGFALKGLQWFVRGIQFGACAVTLALFSYILALGSSRHITLPTYTRAVEGISGIGVVYTVLGLLLLCCLAGHPFTSFIAIVLDIAFVGAFIYVAQAVRGGAGSCTGTVDTPFGNRPANDDISNGESPTFGTICKMQSAVLAVSIVAIIFFIISALLEFVLVRHRRKEARFGPSPANNYTSGYGKRRGLFGMFRRKKADEEAMNPNALPEHTHPNQVRQSYNTESTAVAGTELNNYNKYDNGRFSHDGQTAYPETNPYTGGGHYGDGTYNTTR

SEQ ID NO: 1991 - DNA, 1556 bp, Muscodor strobelii
  misc_feature: SGI EST ID NO. CUFF.5297.2
  misc_feature: Variant of the nucleotide sequence at SEQ ID NO 1989
ggcccctcgacctggtttgcttggtaaggaaggcattcgtcatgatagatgcaagactaaaactgatctggttcctgcgaatgtgctgccagaccccggtattttcgatcagttacgggtagagtaggataactgtaaatcatcatcgtacccgccaagccttcgattcgctgcgacacaggctagagaataagatccctgatttgtgtccatgatcgacggcttaaggccctgccgctgttccgatcttcaatatttgaacacctcccacccactcttccgttgattatcatactactcggcaacccatttcgacactcaagttgttcgagaataaggatcccaagatctgatctatcagcattgcacagcatcccgaacatcctaccagacacagacaacatagcaacacaaacacacattgtacactcatcacacacgcacgaatctacccgacagctcgcctgaggatccgtcgccatgggagccaaatcaggtttcgccctcaagggcctccagtggtttgtccgcggtattcagttcggagcttgcgctgtgacgcttgccctcttctcgtatatccttgcacttggttcctcgcgccatatcacccttccaacgtacacgcgagcggtcgagggcatctcgggtataggcgtcgtctacactgtgctcggcttactactcctgtgttgtctcgctggacatccattcacctccttcatcgctatcgtacttgatatcgccttcgttggcgcattcatctatgtcgcacaggccgtccgtggcggcgccggctcatgcacgggcaccgtcgacacaccctttggcaatcgccctgccaacgacgatatcagcaatggtgaaagcccaacgtttggtaccatctgcaagatgcagagtgctgttctggccgtttccatcgttgccataattttcttcatcatctcagcactcctagagtttgttctcgtccgccaccgccgcaaggaagctcgctttggccctagccctgccaacaactacacttccggctacggcaagcgacgtggattgttcggcatgttccgacgcaagaaggctgatgaggaagccatgaaccccaacgccttgcctgagcacacccatcctaaccaggttcgccagagctacaatactgagtccacagccgtcgctggtactgagttgaacaactacaacaagtatgacaacggcagattctcccatgatggccagacggcataccctgagaccaatccctacactggcggaggccattacggcgacggaacttacaacacaactcgataaatcagtcatcaggagtgtggaattgcaagattctaagggcgagagggagtaatgtatcaatacgaaacgacggcactgtatcactgaggagagagagaccgaaatatgagtctcgccgttgttggtattataatcatgagacctgctacttggtctctgcttgtacaaaaaaaaaattaagctgtgatggttcagcattgcattaagatacctataataaacctaattgacaataatatgcgaca

SEQ ID NO: 1992 - DNA, 873 bp, Muscodor strobelii
  misc_feature: SGI cDNA ID NO. 560281
  misc_feature: Encodes the peptide sequence at SEQ ID NO 1993
atggcggctagcttgacacgtcccgtacggtctctcaaaggccgagtggccatagtcacaggtgctggcgcgctaccgggtggaataggcaatggccgcgcggcagcaattatgcttgctgaagataggtgcagcgttgtttgtgtcgacctgaagctgcatctggctcaggagactgttgatatgatcgaccaagaggggctaggtgccgggcttgcaatcgccgcagacgtgaccaaagccgacgaatgtcagcgagttgtagatatgactatctcacgattcggccgcctagatatccttgttaataatgtcggcatcatcggcgccaaaggcaatgctgtcgaagtggacatggcagatttcttgaagggtctcgaggtcaacgtcggctccatggtccagatggccaaagcaagcatacccaaaatgaaaatcaatgagggtcaatgggctggaagtattgtgaatatgggtagtgtggctggactgagaggcggcggtcccaatctgttatatcccactagcaaaggtgccgtcgtgaacatgacgcgcgcaatggcagccaatcatgctccagaccgcatccgtgtgaactgcgtctgtccaggcatggtctatactccgatgatgtacggggccaatgaagcaggcatgggagaggccgagcgtgaggcacgcagaaaccgtagcttattgaagactgaaggaaatggatgggatgtgggtgcggccatcaggtttttggcaggggatgaggctcgttggatgacaggtaccgtcttgactctagacgccggagctacctgtgctacaggtatcggcatggagggcctgaatgcatcaactactttaaatgatgcgacgaggtaa

SEQ ID NO: 1993 - protein, 290 aa, Muscodor strobelii
  misc_feature: SGI Peptide ID NO. 560281
  misc_feature (15)..(192): Pfam Id: PF00106 Pfam Desc: short chain dehydrogenase
  misc_feature (6)..(273): NCBI GI: 258577741 Blast Desc: conserved [Uncinocarpus reesii 1704] gi|237903318|gb|EEP77719.1| conserved [Uncinocarpus reesii 1704]
  misc_feature (7)..(273): NCBI GI: 240110129 Blast Desc: short-chain type dehydrogenase, [Coccidioides posadasii C735 delta SOWgp]
  misc_feature (7)..(273): NCBI GI: 119179502 Blast Desc: CIMG_08496 [Coccidioides immitis RS]
  misc_feature (8)..(276): NCBI GI: 255956395 Blast Desc: Pc21g19590 [Penicillium chrysogenum Wisconsin 54-1255] gi|211590661|emb|CAP96856.1| Pc21g19590 [Penicillium chrysogenum Wisconsin 54-1255]
  misc_feature (5)..(273): NCBI GI: 115390424 Blast Desc: conserved [Aspergillus terreus NIH2624] gi|114195113|gb|EAU36813.1| conserved [Aspergillus terreus NIH2624]
  misc_feature (8)..(276): NCBI GI: 169624196 Blast Desc: SNOG_15354 [Phaeosphaeria nodorum SN15] gi|111056167|gb|EAT77287.1| SNOG_15354 [Phaeosphaeria nodorum SN15]
  misc_feature (8)..(286): NCBI GI: 256722386 Blast Desc: NECHADRAFT_44380 [Nectria haematococca mpVI 77-13-4]
  misc_feature (1)..(276): NCBI GI: 169774161 Blast Desc: [Aspergillus oryzae RIB40] gi|238497343|ref|XP_002379907.1| tropinone reductase, [Aspergillus flavus NRRL3357] gi|83769411|dbj|BAE59546.1| protein
  misc_feature (8)..(277): NCBI GI: 261360919 Blast Desc: 2-(S)-hydroxypropyl-CoM dehydrogenase [Verticillium albo-atrum VaMs.102]
  misc_feature (8)..(274): NCBI GI: 145611884 Blast Desc: MGG_00056 [Magnaporthe grisea 70-15] gi|145019111|gb|EDK03390.1| MGG_00056 [Magnaporthe grisea 70-15]
  misc_feature (56)..(270): SWISSPROT Homolog: EC 1.1.1.47 Glucose 1-dehydrogenase
MAASLTRPVRSLKGRVAIVTGAGALPGGIGNGRAAAIMLAEDRCSVVCVDLKLHLAQETVDMIDQEGLGAGLAIAADVTKADECQRVVDMTISRFGRLDILVNNVGIIGAKGNAVEVDMADFLKGLEVNVGSMVQMAKASIPKMKINEGQWAGSIVNMGSVAGLRGGGPNLLYPTSKGAVVNMTRAMAANHAPDRIRVNCVCPGMVYTPMMYGANEAGMGEAEREARRNRSLLKTEGNGWDVGAAIRFLAGDEARWMTGTVLTLDAGATCATGIGMEGLNASTTLNDATR

SEQ ID NO: 1994 - DNA, 1430 bp, Muscodor strobelii
  misc_feature: SGI EST ID NO. CUFF.5142.0
  misc_feature: Variant of the nucleotide sequence at SEQ ID NO 1992
gcggggtgtgcggagtagtggatagtcacctcggtcatgtccatcctcatgagttaactacaactggccccaataagtcccccattgattcttcaaacatgtgcataggaagtactggttgtacaagttattttcacctcctagcctatttgtcatttgcagactcaccgcttcaaaactacagaacagcatcgtatccggatcctgtcactcttagagacttatactccggggtttgtcccgtagcggctatggaattcaatgattagaatacgctacgtttcagtcgattcttgttccttactcaacactcaaaatggcggctagcttgacacgtcccgtacggtctctcaaaggccgagtggccatagtcacaggtgctggcgcgctaccgggtggaataggcaatggccgcgcggcagcaattatgcttgctgaagataggtgcagcgttgtttgtgtcgacctgaagctgcatctggctcaggagactgttgatatgatcgaccaagaggggctaggtgccgggcttgcaatcgccgcagacgtgaccaaagccgacgaatgtcagcgagttgtagatatgactatctcacgattcggccgcctagatatccttgttaataatgtcggcatcatcggcgccaaaggcaatgctgtcgaagtggacatggcagatttcttgaagggtctcgaggtcaacgtcggctccatggtccagatggccaaagcaagcatacccaaaatgaaaatcaatgagggtcaatgggctggaagtattgtgaatatgggtagtgtggctggactgagaggcggcggtcccaatctgttatatcccactagcaaaggtgccgtcgtgaacatgacgcgcgcaatggcagccaatcatgctccagaccgcatccgtgtgaactgcgtctgtccaggcatggtctatactccgatgatgtacggggccaatgaagcaggcatgggagaggccgagcgtgaggcacgcagaaaccgtagcttattgaagactgaaggaaatggatgggatgtgggtgcggccatcaggtttttggcaggggatgaggctcgttggatgacaggtaccgtcttgactctagacgccggagctacctgtgctacaggtatcggcatggagggcctgaatgcatcaactactttaaatgatgcgacgaggtaaaaaagagcatgtccataaaatccaaacccgactctgggcaataaggagacgcctgattcctgattcattatagacgatctcgaggcaagacggagagcagcaccctaaatgagtcccacatttggcacttctatgaaagaggcaaaacgaaagatgtcagaaatcagaaaacaggacattgctgagttgttgcttattcctcgccaaaatgagctaaaaggagcaaagctgtagtaatccg

SEQ ID NO: 1995 - DNA, 645 bp, Muscodor strobelii
  misc_feature: SGI cDNA ID NO. 560282
  misc_feature: Encodes the peptide sequence at SEQ ID NO 1996
atgccgttagcaaatataaacctcggagacgaacgatggcggggcgttgctactgcggcggcctgtatcgcccaatttgccctttggattataggcttcgcgctgatacccgtgaaactctcctctgaggacgtttttccctctaagggtgattttaagtttgaggctaggccaagacacgtcggcttgtatgtcgcggtctcagttctaggcttcttctcttttctagctaggctctttacgtctggctccatgaaagcaatcgatgcagccggcgcgaaaattcatatcgatgatttcgctcgcaaaacgtgtctcgtgttcgctatcgtcatttgctctggacttttgcttgccgaaatcacatctgctatcttgatagtcaccaacggcaagactctagacgtggtttcatttttaattactatgattgctgctctgttcctgggtgcatccgtagttgccgatatcctcaggttccgatcaatagcccgacaaagtgctcaagatggggagtacatgttagcctctcaagaagataccgacttaccagatgttcctccttacagcgaggatgaaccgccaaagtccccgaatcagtttgctgagaataacttagataggaactacgatggtgggctatga

SEQ ID NO: 1996 - protein, 214 aa, Muscodor strobelii
  misc_feature: SGI Peptide ID NO. 560282
MPLANINLGDERWRGVATAAACIAQFALWIIGFALIPVKLSSEDVFPSKGDFKFEARPRHVGLYVAVSVLGFFSFLARLFTSGSMKAIDAAGAKIHIDDFARKTCLVFAIVICSGLLLAEITSAILIVTNGKTLDVVSFLITMIAALFLGASVVADILRFRSIARQSAQDGEYMLASQEDTDLPDVPPYSEDEPPKSPNQFAENNLDRNYDGGL

SEQ ID NO: 1997 - DNA, 1098 bp, Muscodor strobelii
  misc_feature: SGI EST ID NO. CUFF.5151.0
  misc_feature: Variant of the nucleotide sequence at SEQ ID NO 1995
gccgttagcaaatataaacctcggagacgaacgatggcggggcgttgctactgcggcggcctgtatcgcccaatttgccctttggattataggcttcgcgctgatacccgtgaaactctcctctgaggacgtttttccctctaagggtgattttaagtttgaggctaggccaagacacgtcggcttgtatgtcgcggtctcagttctaggcttcttctcttttctagctaggctctttacgtctggctccatgaaagcaatcgatgcagccggcgcgaaaattcatatcgatgatttcgctcgcaaaacgtgtctcgtgttcgctatcgtcatttgctctggacttttgcttgccgaaatcacatctgctatcttgatagtcaccaacggcaagactctagacgtggtttcatttttaattactatgattgctgctctgttcctgggtgcatccgtagttgccgatatcctcaggttccgatcaatagcccgacaaagtgctcaagatggggagtacatgttagcctctcaagaagataccgacttaccagatgttcctccttacagcgaggatgaaccgccaaagtccccgaatcagtttgctgagaataacttagataggaactacgatggtgggctatgagtgcgcactctttgatgctatactactagtgacgtcaccaaatctacgacgcaacgcgcaagtccaaatgagaaaagaaatgctattaagagatggtgtcaggtttagattatatattgaggacttgatcacaaatatgtcgccttattatgtgtgccgaacacagggagagacataggatagataaatttctccgctgcttccaacaaataggggtttgatggtgaggctgcgtgaattcacggcttgcccacgtccaacgtgattgcatttgtacaatacgtgtatacaaatatgtccgacaggaatattgcggccgcgatttgaatgcatttttagacgtgattgtttctgtttgacattgtaactagggtgcaaacattcaaatttatgaccgaagagaaacagtcgtcactatacctaagctctaacactgatcagaaggacaattttcc

SEQ ID NO: 1998 - DNA, 315 bp, Muscodor strobelii
  misc_feature: SGI cDNA ID NO. 560283
  misc_feature: Encodes the peptide sequence at SEQ ID NO 1999
atgaagctcgtcagattcttgatgaaatgcgccaacgagacggtgaccattgagctgaagaatggcaccatcgtccacggcacaatcacatcgacccccatctccctcgacaccatgaacatccgcggctcgaccatccgctacttcatcctgcccgactccctacccctcgacacactgctcatcgacgactccgtcaagcccaagaacaaggcacgcaaggaggttgctgaccgtggtggacgtggtggaccccgcggaagaggaagaggacgaggtcgtgggatgggccgtggcagaggctttggtcggtag

SEQ ID NO: 1999 - protein, 104 aa, Muscodor strobelii
  misc_feature: SGI Peptide ID NO. 560283
  misc_feature (5)..(31): Pfam Id: PF01423 Pfam Desc: LSM domain
  misc_feature (1)..(78): NCBI GI: 46105460 Blast Desc: FG00358.1 [Gibberella zeae PH-1]
  misc_feature (1)..(81): NCBI GI: 85112250 Blast Desc: small nuclear ribonucleoprotein Sm D1 [Neurospora crassa OR74A] gi|28926086|gb|EAA35073.1| small nuclear ribonucleoprotein Sm D1 [Neurospora crassa OR74A]
  misc_feature (1)..(75): NCBI GI: 145243932 Blast Desc: An11g04870 [Aspergillus niger] gi|134079163|emb|CAK40691.1| protein product [Aspergillus niger]
  misc_feature (1)..(75): NCBI GI: 67523297 Blast Desc: AN2105.2 [Aspergillus nidulans FGSC A4] gi|40745781|gb|EAA64937.1| conserved [Aspergillus nidulans FGSC A4] gi|259487477|tpe|CBF86187.1| TPA: small nuclear SmD1, FGSC
  misc_feature (1)..(75): NCBI GI: 225681042 Blast Desc: small nuclear ribonucleoprotein Sm D1 [Paracoccidioides brasiliensis Pb03] gi|226282575|gb|EEH38141.1| small nuclear ribonucleoprotein Sm D1 [Paracoccidioides Pb01] Sm
  misc_feature (1)..(75): NCBI GI: 261195138 Blast Desc: small nuclear ribonucleoprotein Sm D1 [Ajellomyces dermatitidis SLH14081] gi|239587845|gb|EEQ70488.1| small nuclear ribonucleoprotein Sm D1 [Ajellomyces dermatitidis SLH14081] small
  misc_feature (1)..(75): NCBI GI: 115399152 Blast Desc: small nuclear ribonucleoprotein Sm D1 [Aspergillus terreus NIH2624] gi|114192048|gb|EAU33748.1| small nuclear ribonucleoprotein Sm D1 [Aspergillus terreus NIH2624]
  misc_feature (1)..(75): NCBI GI: 169770091 Blast Desc: [Aspergillus oryzae RIB40] gi|238487546|ref|XP_002375011.1| small nuclear ribonucleoprotein SmD1, [Aspergillus flavus NRRL3357] gi|83767374|dbj|BAE57513.1|
  misc_feature (1)..(75): NCBI GI: 261357333 Blast Desc: small nuclear ribonucleoprotein Sm D1 [Verticillium albo-atrum VaMs.102]
  misc_feature (1)..(75): NCBI GI: 119193324 Blast Desc: CIMG_01039 [Coccidioides immitis RS] gi|258574579|ref|XP_002541471.1| UREG_00987 [Uncinocarpus reesii 1704] gi|237901737|gb|EEP76138.1| UREG_00987 [Uncinocarpus reesii
MKLVRFLMKCANETVTIELKNGTIVHGTITSTPISLDTMNIRGSTIRYFILPDSLPLDTLLIDDSVKPKNKARKEVADRGGRGGPRGRGRGRGRGMGRGRGFGR

SEQ ID NO: 2000 - DNA, 1991 bp, Muscodor strobelii
  misc_feature: SGI EST ID NO. CUFF.5157.0
  misc_feature: Variant of the nucleotide sequence at SEQ ID NO 1998
catcactgtttaatttccctgcaaggtacatacggaccaggcaaaacttcagttttctagattctaagtgacattgctgtctgtagcctcaccactgccaaccttgacacaaatacaccacatccgcggctgcgacaacacaataccaaagttccgcgtcaacctcgccagcgcccaactcatcaactcaaaacccaatatctctccgctggcgcgttagccagaccacagcaaacatgaagctcgtcagattcttgatgaaatgcgccaacgagacggtgaccattgagctgaagaatggcaccatcgtccacggcacaatcacatcggtgtccccacagatgaacaccgcactgcgcaccgtcaagatgacgccccgtggccaagacccccatctccctcgacaccatgaacatccgcggctcgaccatccgctacttcatcctgcccgactccctacccctcgacacactgctcatcgacgactccgtcaagcccaagaacaaggcacgcaaggaggttgctgaccgtggtggacgtggtggaccccgcggaagaggaagaggacgaggtcgtgggatgggccgtggcagaggctttggtcggtagagggacagccatcgaccggctacatctcagagggagggaaacaagagaggcgagggaagtggcagtcctctcaaggaggagagagtgttaccatgccaaagttcgtgatgcttggtcgttgctgagagggctgactatctgtgtgtgacgtgcagcatacagaagtatggacgacagaaaaggagacaagaaaggaatcctctgcagcgttagaggtcggaacgatgcagaactacgacagtgcatttggaatccgtaaagttagtagctggtgtcgggttcgttacccacgctgattcatgggcctacggagaaaacatagcatcagagcatgcacaaataaagacagtatcactacatcacgcccatttcttgactacgttgcttgtaagactcgtatgtgctccgtgtgatattttgttcacctttaatttattgctcctaagattatctccatatccttatgatctgcagcttctcccaaccagcctgttttccactcgagccaacagtctcaaccttccagccctcatccccacctccctccatgctgcgcacccgttgtttgacttcttccggtttattctgagcacaaagcagtatgtatgcacaccctctttccgaaagcacacgcggtaagctgtcaagtagccgatctgtagtctccataccgtctctgccgccagcatacgacaatgccaaaagatatgaatcctcctcatatgtctggctgcctcggtctggctctaactcttctctgactgggagatctggtgttggaacatatggtggattgaaaatgagcacatcaacgcatccgtctcttaacggtgctgtgagatctccttgtgctgtgctgatgaaagacgccgttgtatctgggtgagaagacgatgcccgacgagcagtttcatgagttgcaatacatgcatgggcgttcatgtctatggctgctgtacatacttcttttgtaccgaatattgtctttgcgtgtgctgtgatgaatgctatgacgactccggatcctggcccgatctcgacaaccagtggtgctggcgatgaggatggcttggaaaattgggattggagaaatgctgattctgattctgaagacagtgtgtcaagaagtaggaaagaatcttctgctggctcgtaaattcgctcgtaggctacgtgcgatgtatctggtgttgggagcatcttttactggtattcgtagagtgttgtgtgttggtggtatttgtgtaagctttttggtgagaacttttggtgaccagtgtcgaagctctcataagaggggggaacagggttggtacatggatgtacttgtacaggtatatgagcagcgttgctgtcgcatcgattccgtgatcaaatagaaa

SEQ ID NO: 2001 - DNA, 753 bp, Muscodor strobelii
  misc_feature: SGI cDNA ID NO. 560284
  misc_feature: Encodes the peptide sequence at SEQ ID NO 2002
atgctcccaacaccagatacatcgcacgtagcctacgagcgaatttacgagccagcagaagattctttcctacttcttgacacactgtcttcagaatcagaatcagcatttctccaatcccaattttccaagccatcctcatcgccagcaccactggttgtcgagatcgggccaggatccggagtcgtcatagcattcatcacagcacacgcaaagacaatattcggtacaaaagaagtatgtacagcagccatagacatgaacgcccatgcatgtattgcaactcatgaaactgctcgtcgggcatcgtcttctcacccagatacaacggcgtctttcatcagcacagcacaaggagatctcacagcaccgttaagagacggatgcgttgatgtgctcattttcaatccaccatatgttccaacaccagatctcccagtcagagaagagttagagccagaccgaggcagccagacatatgaggaggattcatatcttttggcattgtcgtatgctggcggcagagacggtatggagactacagatcggctacttgacagcttaccgcgtgtgctttcggaaagagggtgtgcatacatactgctttgtgctcagaataaaccggaagaagtcaaacaacgggtgcgcagcatggagggaggtggggatgagggctggaaggttgagactgttggctcgagtggaaaacaggctggttgggagaagctgcagatcataaggatatggagataa

SEQ ID NO: 2002 - protein, 250 aa, Muscodor strobelii
  misc_feature: SGI Peptide ID NO. 560284
  misc_feature (1)..(250): NCBI GI: 46105458 Blast Desc: FG00357.1 [Gibberella zeae PH-1]
  misc_feature (1)..(250): NCBI GI: 256735324 Blast Desc: [Nectria haematococca mpVI 77-13-4]
  misc_feature (1)..(250): NCBI GI: 171684871 Blast Desc: protein product [Podospora anserina] gi|170942396|emb|CAP68048.1| protein product [Podospora anserina]
  misc_feature (1)..(250): NCBI GI: 261357332 Blast Desc: N(5)-glutamine methyltransferase MTQ2 [Verticillium albo-atrum VaMs.102]
  misc_feature (1)..(250): NCBI GI: 156030961 Blast Desc: SS1G_14261 [Sclerotinia sclerotiorum 1980] gi|154700652|gb|EDO00391.1| SS1G_14261 [Sclerotinia sclerotiorum 1980]
  misc_feature (1)..(250): NCBI GI: 154297622 Blast Desc: BC1G_12656 [Botryotinia fuckeliana B05.10] gi|150858479|gb|EDN33671.1| BC1G_12656 [Botryotinia fuckeliana B05.10]
  misc_feature (1)..(250): NCBI GI: 39945520 Blast Desc: MGG_04742 [Magnaporthe grisea 70-15] gi|145021372|gb|EDK05501.1| MGG_04742 [Magnaporthe grisea 70-15]
  misc_feature (1)..(250): NCBI GI: 212528970 Blast Desc: conserved [Penicillium marneffei ATCC 18224] gi|210074040|gb|EEA28127.1| conserved [Penicillium marneffei ATCC 18224]
  misc_feature (1)..(250): NCBI GI: 116192451 Blast Desc: CHGG_05943 [Chaetomium globosum CBS 148.51] gi|88181856|gb|EAQ89324.1| CHGG_05943 [Chaetomium globosum CBS 148.51]
  misc_feature (1)..(250): NCBI GI: 85112247 Blast Desc: NCU00504 [Neurospora crassa OR74A] gi|28926085|gb|EAA35072.1| conserved [Neurospora crassa OR74A]
MLPTPDTSHVAYERIYEPAEDSFLLLDTLSSESESAFLQSQFSKPSSSPAPLVVEIGPGSGVVIAFITAHAKTIFGTKEVCTAAIDMNAHACIATHETARRASSSHPDTTASFISTAQGDLTAPLRDGCVDVLIFNPPYVPTPDLPVREELEPDRGSQTYEEDSYLLALSYAGGRDGMETTDRLLDSLPRVLSERGCAYILLCAQNKPEEVKQRVRSMEGGGDEGWKVETVGSSGKQAGWEKLQIIRIWR

SEQ ID NO: 2003 - DNA, 2091 bp, Muscodor strobelii
  misc_feature: SGI cDNA ID NO. 560285
  misc_feature: Reduced expression when VOC is produced
  misc_feature: Encodes the peptide sequence at SEQ ID NO 2004
atggaagacggtccgttcttcagttgcgctcccaatgctcacgcccatctgcctgtgtacacaaacatccacaggattcggagagatgtcaagagtatagtcgaagattacctcactttcgaacagttgcgagacctacgactgaacatttccgtcgttcgtccatgggtcgataaactttacgagcttgacgatatatctatcgtatactgcttacttgttaatcggtcgcaattcctacacgagcaggagcatatgagcaataggcaaaacgtctattatacccgagcaatgttatgtgaggttgtggcaacgcgtattcttcggcgttttggtgaggataatcctggttcccaaggattgttgcttctagccaacatcctcgttgctgggttcgagccttttcagaacgcgcctgaagaggtccgtcgcgaggcatcactagactcgagatggaatcataatagaacactgcctgctctagagatcgcaattcttaccggaagcaggtacttcctaagctcaacgtactgccaagcagtcatcgacgccatatatatcggacagatcgtctatacgccatcgacgtttctagacttgatcccggataaatacaaacgaaagccgatatcattgtatcaaccacataaggaaccgctactgaatcaatatcgattaatcgtaccacgcaccaggaactttatggaaatcgtgcaatttgtcattctcttcgttttgtatctattgttcatgatggaacgagatccaagctatctgagtatttacgaatttgcgttttcagtatacgccttcggttggggtctcgaccaatttgccacaatcctagagcatggatggacggtctatacccaaaatctttggtcatttctagacgtgatgttcgtcttggtttattgggtatatcttattctgcgccttcatggttggaggactggtactctgggccctgctcagcaagctcttgacgtattagccatgggtgcgcccgttctcgtcccaagactagcctttaacctgctgtccggaaacattgtctttctatcttttcgcgccatgatgaccaatttcattattttgacgtttctggctgcttggtgtttttgcgggtttctactctccatgctgtggcttgcagagggccgacacgatctcataactatcagtaaatggatgttatggatctggtttgggttagatggcactggcgtctcgaaatcgacggatttccactggctgttggggccaattttaatgatcacctttgcgttcctcggcaatacgttgttcttgacgatccttgtatcgctactcacaaatacattcagtacggtcgtcgacaatgcaacagccgaggtccactttcgtaaggcagtcttgacactcgagggtgtcaagagcgacgctatttttgcataccaaccaccattcaacatcatagctctgttcgtgctcgttccgatgaagtttctcgtcagcccacgctggtttcacaaaattcatgtagcaactgttcggactattaatctcccagtgcttttgttgattgccgttctggagcgtcggctcctctgggcggaatatgcaggtgagcagaaagaacggccgaagaagaagaagcgaaactggttctgggagaggtggcgaatcacgagccatggcgatctccacaccgtttttgatataacgccaccagactcagtcgaagaagacattgcagttgacgatgagttgacacatcacatgattcggaggcaatttattcggcatcagagctcagtcggtgagccacagcggggtcgacaaacgccagcagaggcaagcaaggaaccgccgataaaaccaccaagcagaagggattcgattgctccctacggtatgttgcctgagcaagttcgcaacatgatgaacgaggcaagcgaggttgaagacttaaccacaaggctgagtaatctcgagcggagcacctcaagaattgaagaaatactagagaagatgtctggcgaatatgacggcgacgatgggctcggcgaagaagaacaaaaagccaatgagattgactctatgaattga

SEQ ID NO: 2004 - protein, 696 aa, Muscodor strobelii
  misc_feature: SGI Peptide ID NO. 560285
  misc_feature (5)..(680): NCBI GI: 39945446 Blast Desc: MGG_04705 [Magnaporthe grisea 70-15] gi|145021388|gb|EDK05517.1| MGG_04705 [Magnaporthe grisea 70-15]
  misc_feature (6)..(667): NCBI GI: 261357331 Blast Desc: conserved [Verticillium albo-atrum VaMs.102]
  misc_feature (7)..(686): NCBI GI: 256735325 Blast Desc: [Nectria haematococca mpVI 77-13-4]
  misc_feature (3)..(684): NCBI GI: 171684869 Blast Desc: protein product [Podospora anserina] gi|170942395|emb|CAP68047.1| protein product [Podospora anserina]
  misc_feature (6)..(686): NCBI GI: 46105456 Blast Desc: FG00356.1 [Gibberella zeae PH-1]
  misc_feature (9)..(687): NCBI GI: 154318070 Blast Desc: BC1G_03018 [Botryotinia fuckeliana B05.10] gi|150843676|gb|EDN18869.1| BC1G_03018 [Botryotinia fuckeliana B05.10]
  misc_feature (17)..(574): NCBI GI: 116192453 Blast Desc: CHGG_05944 [Chaetomium globosum CBS 148.51] gi|88181857|gb|EAQ89325.1| CHGG_05944 [Chaetomium globosum CBS 148.51]
  misc_feature (16)..(593): NCBI GI: 189200821 Blast Desc: nonselective cation channel [Pyrenophora tritici-repentis Pt-1C-BFP] gi|187983846|gb|EDU49334.1| nonselective cation channel [Pyrenophora tritici-repentis
  misc_feature (10)..(584): NCBI GI: 85083047 Blast Desc: NCU04465 [Neurospora crassa OR74A] gi|28918118|gb|EAA27798.1| conserved [Neurospora crassa OR74A]
  misc_feature (15)..(604): NCBI GI: 46128329 Blast Desc: FG08542.1 [Gibberella zeae PH-1]
  misc_feature: Useful for introducing or modulating the production of volatile compounds
MEDGPFFSCAPNAHAHLPVYTNIHRIRRDVKSIVEDYLTFEQLRDLRLNISVVRPWVDKLYELDDISIVYCLLVNRSQFLHEQEHMSNRQNVYYTRAMLCEVVATRILRRFGEDNPGSQGLLLLANILVAGFEPFQNAPEEVRREASLDSRWNHNRTLPALEIAILTGSRYFLSSTYCQAVIDAIYIGQIVYTPSTFLDLIPDKYKRKPISLYQPHKEPLLNQYRLIVPRTRNFMEIVQFVILFVLYLLFMMERDPSYLSIYEFAFSVYAFGWGLDQFATILEHGWTVYTQNLWSFLDVMFVLVYWVYLILRLHGWRTGTLGPAQQALDVLAMGAPVLVPRLAFNLLSGNIVFLSFRAMMTNFIILTFLAAWCFCGFLLSMLWLAEGRHDLITISKWMLWIWFGLDGTGVSKSTDFHWLLGPILMITFAFLGNTLFLTILVSLLTNTFSTVVDNATAEVHFRKAVLTLEGVKSDAIFAYQPPFNIIALFVLVPMKFLVSPRWFHKIHVATVRTINLPVLLLIAVLERRLLWAEYAGEQKERPKKKKRNWFWERWRITSHGDLHTVFDITPPDSVEEDIAVDDELTHHMIRRQFIRHQSSVGEPQRGRQTPAEASKEPPIKPPSRRDSIAPYGMLPEQVRNMMNEASEVEDLTTRLSNLERSTSRIEEILEKMSGEYDGDDGLGEEEQKANEIDSMN

SEQ ID NO: 2005 - DNA, 2753 bp, Muscodor strobelii
  misc_feature: SGI EST ID NO. CUFF.5173.0
  misc_feature: Variant of the nucleotide sequence at SEQ ID NO 2003
tgcatttccacctatataattaataacatggcattttgaataccgagccgatcaagtgcatgcagtgaagctgtacccaccttctgcttttatctcactgcaacgaagatacgcgacccgttgcggttccatacccacttgcttggtgcatgaagacggacatgcactacatgtactaagctatttcatgccctagagacctgcatgtagcgtttctgcacctctatataggccctcatccgtatcgagatctacgacgccatttggatccgatcggccgtgaagtattcgtggcgggtacacgacatactgtattcattgatccagaatcctaacgtagggcaaggtgatgctcaagcacctctattatattcgccactggatctgtgcaggaatcaatatcaatgcaagagcatctcgacaatctttcgacagagaaagcattaggacggcgcaggtagtatggcggaccttgcgaataggagcgtccgtgtagaagagcctgagcggcggccgctcctcacccgcgctcatttcagccacgcaatggaagacggtccgttcttcagttgcgctcccaatgctcacgcccatctgcctgtgtacacaaacatccacaggattcggagagatgtcaagagtatagtcgaagattacctcactttcgaacagttgcgagacctacgactgaacatttccgtcgttcgtccatgggtcgataaactttacgagcttgacgatatatctatcgtatactgcttacttgttaatcggtcgcaattcctacacgagcaggagcatatgagcaataggcaaaacgtctattatacccgagcaatgttatgtgaggttgtggcaacgcgtattcttcggcgttttggtgaggataatcctggttcccaaggattgttgcttctagccaacatcctcgttgctgggttcgagccttttcagaacgcgcctgaagaggtccgtcgcgaggcatcactagactcgagatggaatcataatagaacactgcctgctctagagatcgcaattcttaccggaagcaggtacttcctaagctcaacgtactgccaagcagtcatcgacgccatatatatcggacagatcgtctatacgccatcgacgtttctagacttgatcccggataaatacaaacgaaagccgatatcattgtatcaaccacataaggaaccgctactgaatcaatatcgattaatcgtaccacgcaccaggaactttatggaaatcgtgcaatttgtcattctcttcgttttgtatctattgttcatgatggaacgagatccaagctatctgagtatttacgaatttgcgttttcagtatacgccttcggttggggtctcgaccaatttgccacaatcctagagcatggatggacggtctatacccaaaatctttggtcatttctagacgtgatgttcgtcttggtttattgggtatatcttattctgcgccttcatggttggaggactggtactctgggccctgctcagcaagctcttgacgtattagccatgggtgcgcccgttctcgtcccaagactagcctttaacctgctgtccggaaacattgtctttctatcttttcgcgccatgatgaccaatttcattattttgacgtttctggctgcttggtgtttttgcgggtttctactctccatgctgtggcttgcagagggccgacacgatctcataactatcagtaaatggatgttatggatctggtttgggttagatggcactggcgtctcgaaatcgacggatttccactggctgttggggccaattttaatgatcacctttgcgttcctcggcaatacgttgttcttgacgatccttgtatcgctactcacaaatacattcagtacggtcgtcgacaatgcaacagccgaggtccactttcgtaaggcagtcttgacactcgagggtgtcaagagcgacgctatttttgcataccaaccaccattcaacatcatagctctgttcgtgctcgttccgatgaagtttctcgtcagcccacgctggtttcacaaaattcatgtagcaactgttcggactattaatctcccagtgcttttgttgattgccgttctggagcgtcggctcctctgggcggaatatgcaggtgagcagaaagaacggccgaagaagaagaagcgaaactggttctgggagaggtggcgaatcacgagccatggcgatctccacaccgtttttgatataacgccaccagactcagtcgaagaagacattgcagttgacgatgagttgacacatcacatgattcggaggcaatttattcggcatcagagctcagtcggtgagccacagcggggtcgacaaacgccagcagaggcaagcaaggaaccgccgataaaaccaccaagcagaagggattcgattgctccctacggtatgttgcctgagcaagttcgcaacatgatgaacgaggcaagcgaggttgaagacttaaccacaaggctgagtaatctcgagcggagcacctcaagaattgaagaaatactagagaagatgtctggcgaatatgacggcgacgatgggctcggcgaagaagaacaaaaagccaatgagattgactctatgaattgaaccatcaaacttcaagcagatacttgaaaatgaaaattgatgcatctgctaaaatgtcttctctgaaatctcttaatgatactgcaatagtggtctcgtcgtgctctagcccgatc

SEQ ID NO: 2006 - DNA, 783 bp, Muscodor strobelii
  misc_feature: SGI cDNA ID NO. 560286
  misc_feature: Reduced expression when VOC is produced
  misc_feature: Encodes the peptide sequence at SEQ ID NO 2007
atgccatggtggccgttcagttccagctcggccgcctcgtccaaagatgacccgccgcctcgtcgcgccgtctcgtggaccgacagcctgaacggcaccgactgggaacactacaaagacccgaggaactgggttccgacgctgctcgtcaccaccactgtcttggtctcgctgcagatctaccgctcctaccttcgacgcatccccggcgctgtctacgtccagcccggtttctaccgcaagcgctccctgttcggcaaagtcaccagcgtcggagacggcgacaacttccacctcttccacaccccgggcggccgcctggcgggatggggctggctccggaccgtgccttcgaagcgggcagagctcaagaacaggacgatacccatacgccttgctggcatcgacgcgccagaaggggcccatttcggtaaacctgcacagcccttttcggcagacgccctgaaatggctgtctgactacgtcctcgaccggagagtgcgagccaagatctataaacgcgaccaatacgaccgcattgtggccaccgtttacgtccgaagattcctcatccgccgcgatgtcggattagagatgctcaaaatgggcctggctacaacctacgaggcaaagtctggcgctgagtttggtggcttggaggagagatacaaagccgctgaagtcaaagccaaggcaaagaagcgtgggatctggggtggcaagcccgatcagtttgaaagtccccgcgactacaagacccgagttgggaatcttctcgagtag

SEQ ID NO: 2007 - protein, 260 aa, Muscodor strobelii
  misc_feature: SGI Peptide ID NO. 560286
  misc_feature (82)..(240): Pfam Id: PF00565 Pfam Desc: Staphylococcal nuclease homologue
  misc_feature (1)..(257): NCBI GI: 154319438 Blast Desc: BC1G_02200 [Botryotinia fuckeliana B05.10] gi|150855858|gb|EDN31050.1| BC1G_02200 [Botryotinia fuckeliana B05.10]
  misc_feature (4)..(254): NCBI GI: 256733050 Blast Desc: NECHADRAFT_78963 [Nectria haematococca mpVI 77-13-4]
  misc_feature (4)..(254): NCBI GI: 39945440 Blast Desc: MGG_04702 [Magnaporthe grisea 70-15] gi|145021392|gb|EDK05521.1| MGG_04702 [Magnaporthe grisea 70-15]
  misc_feature (1)..(256): NCBI GI: 156061667 Blast Desc: SS1G_02979 [Sclerotinia sclerotiorum 1980] gi|154700380|gb|EDO00119.1| SS1G_02979 [Sclerotinia sclerotiorum 1980]
  misc_feature (12)..(255): NCBI GI: 240111199 Blast Desc: nuclease domain containing protein [Coccidioides posadasii C735 delta SOWgp]
  misc_feature (9)..(256): NCBI GI: 258565985 Blast Desc: conserved [Uncinocarpus reesii 1704] gi|237907438|gb|EEP81839.1| conserved [Uncinocarpus reesii 1704]
  misc_feature (5)..(258): NCBI GI: 225677792 Blast Desc: conserved [Paracoccidioides brasiliensis Pb03]
  misc_feature (5)..(258): NCBI GI: 226287474 Blast Desc: conserved [Paracoccidioides brasiliensis Pb18]
  misc_feature (7)..(258): NCBI GI: 238843455 Blast Desc: conserved [Microsporum canis CBS 113480]
  misc_feature (7)..(258): NCBI GI: 226278970 Blast Desc: conserved [Paracoccidioides brasiliensis Pb01]
  misc_feature: Useful for introducing or modulating the production of volatile compounds
MPWWPFSSSSAASSKDDPPPRRAVSWTDSLNGTDWEHYKDPRNWVPTLLVTTTVLVSLQIYRSYLRRIPGAVYVQPGFYRKRSLFGKVTSVGDGDNFHLFHTPGGRLAGWGWLRTVPSKRAELKNRTIPIRLAGIDAPEGAHFGKPAQPFSADALKWLSDYVLDRRVRAKIYKRDQYDRIVATVYVRRFLIRRDVGLEMLKMGLATTYEAKSGAEFGGLEERYKAAEVKAKAKKRGIWGGKPDQFESPRDYKTRVGNLLE

SEQ ID NO: 2008 - DNA, 2265 bp, Muscodor strobelii
  misc_feature: SGI EST ID NO. CUFF.5200.0
  misc_feature: Variant of the nucleotide sequence at SEQ ID NO 2006
gctttatcggcgttatcgcgacaccacctgcaccggtgacggcccagagcaagcttcaatttcctacgccagagagacgacaggcgtgcgcaaggctcagcgaacttgccaccgtgttctgtgtctctccgcgctgtccctttcgcgccgtcgcgacgatgccatggtggccgttcagttccagctcggccgcctcgtccaaagatgacccgccgcctcgtcgcgccgtctcgtggaccgacagcctgaacggcaccgactgggaacactacaaagacccgaggaactgggttccgacgctgctcgtcaccaccactgtcttggtctcgctgcagatctaccgctcctaccttcgacgcatccccggcgctgtctacgtccagcccggtttctaccgcaagcgctccctgttcggcaaagtcaccagcgtcggagacggcgacaacttccacctcttccacaccccgggcggccgcctggcgggatggggctggctccggaccgtgccttcgaagcgggcagagctcaagaacaggacgatacccatacgccttgctggcatcgacgcgccagaaggggcccatttcggtaaacctgcacagcccttttcggcagacgccctgaaatggctgtctgactacgtcctcgaccggagagtgcgagccaagatctataaacgcgaccaatacgaccgcattgtggccaccgtttacgtccgaagattcctcatccgccgcgatgtcggattagagatgctcaaaatgggcctggctacaacctacgaggcaaagtctggcgctgagtttggtggcttggaggagagatacaaagccgctgaagtcaaagccaaggcaaagaagcgtgggatctggggtggcaagcccgatcagtttgaaagtccccgcgactacaagacccgagttgggaatcttctcgagtagtcacagaacacaagtgagacatgctgcatcaacaccaaatggaacctcactcattgcgcaaatgatgcgatagcctggccaatttgattgcatccactatgcgtgataatacgacgtttccacaaacgtgggatagccagatacgactgaccttcatatcaatgtattgaggatactatcatgtccgttgcgaaacgctacagacactactgccgaactacgatttgtttgatcaccgtcggtcggggtacagaatccttgcgttgatcctcttcggggaataacacatgctaaatgtgattctacaatactagagcttggtagcaaaagcactgaaatactggacattcacttgtctccaagccggtgtgagtctgcgatggtaattggaccaggaaggccaagaagtatgcagccaattattggactagttgaccagcaagtacctagctgtgttggcattctaccaccgtttgtggatgagatctgtcgaaacaatacctaatagacagattccagtcgcctgtgacaagggcaaatgcatccgtactatttctcgacacgtagctgcggtatctccttgacaatgagtggcggagcattacaccgtacaagccagcctttcaggtagcatacagagactgagcaaatcaaatattcatcttcataatgattgcaatgacctatgtttgtacatcgtaaagatccagcgtatggcgatcagatcaaatcatgtactgggttttagaatacataggtatgttgagttgattgccatgtacggctggtgatagcatgtgtggtcgtgatacactagggcggtgacatctgttctgtcaaccgctgccaaggatggatttgtatggcccaagaatggtaatcagatgattgataggaaaccacaaatgtagtatccttcgcacgagatcctttgcgcgccgcccagggtatcatttccgcaggagcccatgcataaaagatgcggaaaagaacggatacctagtaggatctcaagaaatggttgatatctttgagctgatatgatgtgatattccaacattatacttacgtctatgcttttatctggtaaggagtatcttcacgatgatgcccttgcttctaggatggatgccaacaagcgctggtgtagtcattgccatacatacatgtagtcacagatctgccatccgtctaaaattaggtgaactcgtacggccctaatgtagggaaggagagattgcatccagatgagggatgctaccttgtaagaggtctgtgagagtctgcgatcgatatcatgttggacgtcatttgtcgctcgcaa

SEQ ID NO: 2009 - DNA, 3711 bp, Muscodor strobelii
  misc_feature: SGI cDNA ID NO. 560287
  misc_feature: Reduced expression when VOC is produced
  misc_feature: Encodes the peptide sequence at SEQ ID NO 2010
atgcggccactttcgtcgactcgttctgccatgcgcagcactctttcgccgttatggctactcacgttttgttcgtccacgatggtgtcgcacgccttatcgttcaatgctgtcccgaacgcgaatctcgatgtcagtggactgggtcaaatggggttcgctggtcaattcagcggcatttccctttacgaatttgaagcccagcaagaacaggcattctcatccaatggctcatcacagctcatgaccagccttcccaacagtgtcatggtcaatctcgttgacgccgatgcatctatcaagtccatgtgtgtgttccaagggatggttatcttggggggcaatttcaccagtcttggcggaaagagttcaactgcagtcgctgcattcaaccctaatacaaccgaaatcaccccactggatggtgtcaacggacaagtcaacagtttgctatgtgatgacgaggcaggcatggtttacgttggcggaaactttcaggctgcaggttcgctcaatgccataacctggctgaaatcttcaaattgggcgagcttgccgtttgctggattcaatggcgccgtcacttcgataacaaaagcgccttctggacatatcatatttggcggcagcttcacggggttgggcaacgcgaccacatcgtcgagtacgaacacaacagaggatcaacagaccatcaatctcgcatcggcgaatatttctacatatcaaggcagcagcactgacggattcaacgaccccaagaacataatttgcaacacagatagctctggaggcgctggaaagacatggcttctggaagatggtgttccagggaattgggcagcagaatttggtttcggctttcggcccagaatacttcgattgcgaaacacatttcaagatggtcgggggactaagacctggagcttcacagcccgaccgaacaatggcctcatgaacttcaccttcatcgatcccgggactggaaaaaacatgagttgcacaaacgcatgccctcttagcaacgattccagcgtccaataccaagactttgagttcgtcagtggtattggcatgaatgcgttccgaatcgacatctcagactggtatggaaaggggggcgggttggatggcatccagctattttcggaagacgtatattcatacgccgtcagcgatttcaacgagccgagttgttccaattccagtccttcatctagttcggaaactacgggatcatggtctgttacccctgcagggagaagttcggcagattacctcacggccgtattgccagggcctatagctgccgatgctgctagtgttaccttttttcccgatatcagggaaagtggtgaataccttgtcatactatacaccccgggttgccaacaagacgatacatgctcacgtcgtggacaagtcaacgtgacaggcacagtgaactcaactagcggagtccaagtgctgaatggtggccagacgacataccaaagtaatgaattcgacaagatcgagttcatttataccgggaatttggaggcctcgtcgagtggcttccgcccgagcattacgctgtctccagtcgctggacaagcactgtcttctgacgacctggttatggtggctcaaaagataagcttccaacagatgaatgcatccaatacgaccgatctaaatggattatttgaatatgacccaaccaaaaccactatcacgacatctgatattaacgcctcccccttcaataagctagcaaagtctttcagggcacgttccgccgttcggtcactcgctgcttctgacagtcagacttacatcgctggaaatttcacaaccagcagcatgaacaatattgtttcgctcgacaaggatgggaagacatcaactcttgatggcggccttaacggggacgttctatcaatgtacttctccaatggacagctatttgtcggcggcgcgttcaataacactcaaaaagcagacgctacgggtctatccaatgttgctgtgtacgacgaacaggacagcaagtgggcagctctcggcgctggtgttgatggaaccgtcaacaatgttgtcccgatgacactcaacctgacgggcaatgccaccgaagtagtgactctgtcgggtaccttttcacaaattttcgcatttgccaataacacagctattgatgtagctggttttgcagtctgggtgaaatcacagaacaactggcttcaaaacctagatgtgccggtgcccctattcgacggacatttgaccacttcgctgctcgatacatccgatggtactgccctgtatgcaggttcaatctcgtcacaagctctcagtgccaatggtgttgtgtcaactgacggtacactcggcgacttccccattaaagtggaatcttcttccaccccttcctcgacaggtgttactaaacgtgcgtctcttgctagcaatacagacaacatatcaggcatcgttactggtgctttcgagacaaataacggacaaaacgtcactattctcgctggacgtttcactgctagcgcaacaaatggatcgagtattcacaacctcgcgttcattgaccggaaaaactcagataccgtcactggccttggcaccgaactgccgactgactcaatcttcttggccctggccataaatggcgacgatgtcttcgctggaggacaattgaacggtaccatccaagaatcgtcggtcaacggcctcatctcgtataatattccatcggcctcgttcaacacacagcctcccgtgcttgctggagacgatgtcattgtgacatccattgcagttcgacctgagtcaagcgatgtctatgttgccggctccttcggcacggctggttccctcccttgccctggcgtctgcgtcctatccactggtgacaatcactggtctcggccaggttttctcgacggaactgtcaatactatgctctggtcgagtaaatcccttctcttcgttggtggcaatttgactgtcaatgacaccaatatctatttggcttcctacgatgtctctggagacagctggactgaatttgccgattcatccgcactcccaggtccagtcgaggctatgaccgctgcaaatgtgaatcaggatcaaatatgggtttcaggtacccagcccgacggcactgtgtatttgatgaagtatgacggatcttggaaatctcctaacctgaccttgggccaagaaaccgttgtgagcagcctgcaattattttcattgaccaaggaccatgacaagacagacctcgtaggcaataaggaggcactactactcaccggatccatcaacattccaggcttcggtactacttcgagcgccatctataacggcacaaacctgacgccctttctcctgacggctagcctggatggcacaggagatcacggctcggtctcgaaacttttcgtcgagaagcagaatttcttgacaagcgagtcaagcggacatctggctgtcggctttgtcgtactcattgctctggctatttccctaggtctaatgctcctcatcgtagctgcgggtctcgccctggatcgatatcgaaagaagcgggatggatatgtacctgcgcccacttcgatgtttgaccgcggccacggcttacaacgcgtacccccggctgagctccttgagtctttgagccaaggacgatccggcgcacctcaagtctga

SEQ ID NO: 2010 - protein, 1236 aa, Muscodor strobelii
  misc_feature: SGI Peptide ID NO. 560287
  misc_feature (33)..(1236): NCBI GI: 171684573 Blast Desc: protein product [Podospora anserina] gi|170942247|emb|CAP67899.1| protein product [Podospora anserina]
  misc_feature (1)..(1236): NCBI GI: 85111343 Blast Desc: NCU03045 [Neurospora crassa OR74A] gi|28925638|gb|EAA34655.1| conserved [Neurospora crassa OR74A]
  misc_feature (20)..(1236): NCBI GI: 39945442 Blast Desc: MGG_04703 [Magnaporthe grisea 70-15] gi|145021390|gb|EDK05519.1| MGG_04703 [Magnaporthe grisea 70-15]
  misc_feature (3)..(1236): NCBI GI: 256733049 Blast Desc: NECHADRAFT_78962 [Nectria haematococca mpVI 77-13-4]
  misc_feature (12)..(1234): NCBI GI: 46125351 Blast Desc: FG07053.1 [Gibberella zeae PH-1]
  misc_feature (82)..(1235): NCBI GI: 156061673 Blast Desc: SS1G_02982 [Sclerotinia sclerotiorum 1980] gi|154700383|gb|EDO00122.1| SS1G_02982 [Sclerotinia sclerotiorum 1980]
  misc_feature (32)..(1236): NCBI GI: 261356182 Blast Desc: conserved [Verticillium albo-atrum VaMs.102]
  misc_feature (1)..(1236): NCBI GI: 212539796 Blast Desc: cellular morphogenesis protein (Rax2), [Penicillium marneffei ATCC 18224] gi|210067352|gb|EEA21444.1| cellular morphogenesis protein (Rax2), [Penicillium marneffei ATCC 18224]
  misc_feature (31)..(1236): NCBI GI: 261196614 Blast Desc: cellular morphogenesis protein [Ajellomyces dermatitidis SLH14081] gi|239595955|gb|EEQ78536.1| cellular morphogenesis protein [Ajellomyces dermatitidis SLH14081]
  misc_feature (16)..(1236): NCBI GI: 239609532 Blast Desc: cellular morphogenesis protein [Ajellomyces dermatitidis ER-3]
  misc_feature: Useful for introducing or modulating the production of volatile compounds
MRPLSSTRSAMRSTLSPLWLLTFCSSTMVSHALSFNAVPNANLDVSGLGQMGFAGQFSGISLYEFEAQQEQAFSSNGSSQLMTSLPNSVMVNLVDADASIKSMCVFQGMVILGGNFTSLGGKSSTAVAAFNPNTTEITPLDGVNGQVNSLLCDDEAGMVYVGGNFQAAGSLNAITWLKSSNWASLPFAGFNGAVTSITKAPSGHIIFGGSFTGLGNATTSSSTNTTEDQQTINLASANISTYQGSSTDGFNDPKNIICNTDSSGGAGKTWLLEDGVPGNWAAEFGFGFRPRILRLRNTFQDGRGTKTWSFTARPNNGLMNFTFIDPGTGKNMSCTNACPLSNDSSVQYQDFEFVSGIGMNAFRIDISDWYGKGGGLDGIQLFSEDVYSYAVSDFNEPSCSNSSPSSSSETTGSWSVTPAGRSSADYLTAVLPGPIAADAASVTFFPDIRESGEYLVILYTPGCQQDDTCSRRGQVNVTGTVNSTSGVQVLNGGQTTYQSNEFDKIEFIYTGNLEASSSGFRPSITLSPVAGQALSSDDLVMVAQKISFQQMNASNTTDLNGLFEYDPTKTTITTSDINASPFNKLAKSFRARSAVRSLAASDSQTYIAGNFTTSSMNNIVSLDKDGKTSTLDGGLNGDVLSMYFSNGQLFVGGAFNNTQKADATGLSNVAVYDEQDSKWAALGAGVDGTVNNVVPMTLNLTGNATEVVTLSGTFSQIFAFANNTAIDVAGFAVWVKSQNNWLQNLDVPVPLFDGHLTTSLLDTSDGTALYAGSISSQALSANGVVSTDGTLGDFPIKVESSSTPSSTGVTKRASLASNTDNISGIVTGAFETNNGQNVTILAGRFTASATNGSSIHNLAFIDRKNSDTVTGLGTELPTDSIFLALAINGDDVFAGGQLNGTIQESSVNGLISYNIPSASFNTQPPVLAGDDVIVTSIAVRPESSDVYVAGSFGTAGSLPCPGVCVLSTGDNHWSRPGFLDGTVNTMLWSSKSLLFVGGNLTVNDTNIYLASYDVSGDSWTEFADSSALPGPVEAMTAANVNQDQIWVSGTQPDGTVYLMKYDGSWKSPNLTLGQETVVSSLQLFSLTKDHDKTDLVGNKEALLLTGSINIPGFGTTSSAIYNGTNLTPFLLTASLDGTGDHGSVSKLFVEKQNFLTSESSGHLAVGFVVLIALAISLGLMLLIVAAGLALDRYRKKRDGYVPAPTSMFDRGHGLQRVPPAELLESLSQGRSGAPQV

SEQ ID NO: 2011 - DNA, 4841 bp, Muscodor strobelii
  misc_feature: SGI EST ID NO. CUFF.5341.2
  misc_feature: Variant of the nucleotide sequence at SEQ ID NO 2009
tacccgtatttgtatgactccagcctagcaccgcccaatcccaaccaccacccaaattatcatcatcgcctgcctctcatactgtatcaccgctccttcctcgaccttgatgcagcacacatttcctaaacaaccacaaaactcaattgatgctaagcacaggtcaaattcttgtttcgccatatgcgctcaaaagtccatcgtttgcttttctaacttttaataactcaatagtcaatcactgcagcatcaatttaccgcgagtccaggtgcctgtcaagatttcacgctgtctcgcaatttgttattgtcgccgcacaattagtacgccaaacacgacctacttcatatctcttcgcaataattcctaggccaacagaattaattttcacagctatggactgttgttgattttggactttgcccgccgaatttagggagacaggagcagatcaatcgttgcgactgccacggtcgcgtggctaaccacgccatgcggccactttcgtcgactcgttctgccatgcgcagcactctttcgccgttatggctactcacgttttgttcgtccacgatggtgtcgcacgccttatcgttcaatgctgtcccgaacgcgaatctcgatgtcagtggactgggtcaaatggggttcgctggtcaattcagcggcatttccctttacgaatttgaagcccagcaagaacaggcattctcatccaatggctcatcacagctcatgaccagccttcccaacagtgtcatggtcaatctcgttgacgccgatgcatctatcaagtccatgtgtgtgttccaagggatggttatcttggggggcaatttcaccagtcttggcggaaagagttcaactgcagtcgctgcattcaaccctaatacaaccgaaatcaccccactggatggtgtcaacggacaagtcaacagtttgctatgtgatgacgaggcaggcatggtttacgttggcggaaactttcaggctgcaggttcgctcaatgccataacctggctgaaatcttcaaattgggcgagcttgccgtttgctggattcaatggcgccgtcacttcgataacaaaagcgccttctggacatatcatatttggcggcagcttcacggggttgggcaacgcgaccacatcgtcgagtacgaacacaacagaggatcaacagaccatcaatctcgcatcggcgaatatttctacatatcaaggcagcagcactgacggattcaacgaccccaagaacataatttgcaacacagatagctctggaggcgctggaaagacatggcttctggaagatggtgttccagggaattgggcagcagaatttggtttcggctttcggcccagaatacttcgattgcgaaacacatttcaagatggtcgggggactaagacctggagcttcacagcccgaccgaacaatggcctcatgaacttcaccttcatcgatcccgggactggaaaaaacatgagttgcacaaacgcatgccctcttagcaacgattccagcgtccaataccaagactttgagttcgtcagtggtattggcatgaatgcgttccgaatcgacatctcagactggtatggaaaggggggcgggttggatggcatccagctattttcggaagacgtatattcatacgccgtcagcgatttcaacgagccgagttgttccaattccagtccttcatctagttcggaaactacgggatcatggtctgttacccctgcagggagaagttcggcagattacctcacggccgtattgccagggcctatagctgccgatgctgctagtgttaccttttttcccgatatcagggaaagtggtgaataccttgtcatactatacaccccgggttgccaacaagacgatacatgctcacgtcgtggacaagtcaacgtgacaggcacagtgaactcaactagcggagtccaagtgctgaatggtggccagacgacataccaaagtaatgaattcgacaagatcgagttcatttataccgggaatttggaggcctcgtcgagtggcttccgcccgagcattacgctgtctccagtcgctggacaagcactgtcttctgacgacctggttatggtggctcaaaagataagcttccaacagatgaatgcatccaatacgaccgatctaaatggattatttgaatatgacccaaccaaaaccactatcacgacatctgatattaacgcctcccccttcaataagctagcaaagtctttcagggcacgttccgccgttcggtcactcgctgcttctgacagtcagacttacatcgctggaaatttcacaaccagcagcatgaacaatattgtttcgctcgacaaggatgggaagacatcaactcttgatggcggccttaacggggacgttctatcaatgtacttctccaatggacagctatttgtcggcggcgcgttcaataacactcaaaaagcagacgctacgggtctatccaatgttgctgtgtacgacgaacaggacagcaagtgggcagctctcggcgctggtgttgatggaaccgtcaacaatgttgtcccgatgacactcaacctgacgggcaatgccaccgaagtagtgactctgtcgggtaccttttcacaaattttcgcatttgccaataacacagctattgatgtagctggttttgcagtctgggtgaaatcacagaacaactggcttcaaaacctagatgtgccggtgcccctattcgacggacatttgaccacttcgctgctcgatacatccgatggtactgccctgtatgcaggttcaatctcgtcacaagctctcagtgccaatggtgttgtgtcaactgacggtacactcggcgacttccccattaaagtggaatcttcttccaccccttcctcgacaggtgttactaaacgtgcgtctcttgctagcaatacagacaacatatcaggcatcgttactggtgctttcgagacaaataacggacaaaacgtcactattctcgctggacgtttcactgctagcgcaacaaatggatcgagtattcacaacctcgcgttcattgaccggaaaaactcagataccgtcactggccttggcaccgaactgccgactgactcaatcttcttggccctggccataaatggcgacgatgtcttcgctggaggacaattgaacggtaccatccaagaatcgtcggtcaacggcctcatctcgtataatattccatcggcctcgttcaacacacagcctcccgtgcttgctggagacgatgtcattgtgacatccattgcagttcgacctgagtcaagcgatgtctatgttgccggctccttcggcacggctggttccctcccttgccctggcgtctgcgtcctatccactggtgacaatcactggtctcggccaggttttctcgacggaactgtcaatactatgctctggtcgagtaaatcccttctcttcgttggtggcaatttgactgtcaatgacaccaatatctatttggcttcctacgatgtctctggagacagctggactgaatttgccgattcatccgcactcccaggtccagtcgaggctatgaccgctgcaaatgtgaatcaggatcaaatatgggtttcaggtacccagcccgacggcactgtgtatttgatgaagtatgacggatcttggaaatctcctaacctgaccttgggccaagaaaccgttgtgagcagcctgcaattattttcattgaccaaggaccatgacaagacagacctcgtaggcaataaggaggcactactactcaccggatccatcaacattccaggcttcggtactacttcgagcgccatctataacggcacaaacctgacgccctttctcctgacggctagcctggatggcacaggagatcacggctcggtctcgaaacttttcgtcgagaagcagaatttcttgacaagcgagtcaagcggacatctggctgtcggctttgtcgtactcattgctctggctatttccctaggtctaatgctcctcatcgtagctgcgggtctcgccctggatcgatatcgaaagaagcgggatggatatgtacctgcgcccacttcgatgtttgaccgcggccacggcttacaacgcgtacccccggctgagctccttgagtctttgagccaaggacgatccggcgcacctcaagtctgaggggctgaatgtgtagtgtacaaatgtgcgcatgaataaagaaggagatggccatatctggatatggtggccaagaaaatcacccaaaagtcgtcttgaatggacacaccagtgtgcgactatggataaggaccagaggcaacagggccagatagaggatggatgttgatctggtcgagcaggtacagcctgtgatgttgggggaagcgatacccagtggcgataaagtgccgaggcttggcccagcctcgaggctttcgaccacgcattaatgtttacttgtctatttttttctccacccaaatactgtattaaaggcagcactcaccccctttcatgtacatttaactcagcccgccggttccgtcccccttcgcggcaatggcaattcgaggtttgggatctaggaaggacgccgactgaaagtgtcggttacggatgttgggtggatggatgacagtcgagagtatcagtggaaagatgttccaatgtgtggatgaatggatcacgttgtggtaatgtcaaggagaaagtaggagccatacattgactgactgtagttgagcctcggattagatgtccagacgagggaaataatagctagtccttgtaaaatgagatgccttacaaagtgata

SEQ ID NO: 2012 - DNA, 3663 bp, Muscodor strobelii
  misc_feature: SGI cDNA ID NO. 560288
  misc_feature: Reduced expression when VOC is produced
  misc_feature: Encodes the peptide sequence at SEQ ID NO 2013
atgtcggattctgatttcgatgcagtgcgaaagctccaggctgagcgcaatgccgccgccgccaagaagggctcgggcgcgcgcaacggcgaccagcgcgcccagcaccccaccaaggccaagctgaccgactccttcgacaccgacctctactcgcgcgacggccgcgacaagtacgccggctacctgacctccatccccaccgccgacggagacggagacgatgacatggaagatgtcgacgactcgcgccgcctcgtcggccagtacaccgccacccgcgcccagatcgacgagtttgcccacggcaacggtgtcgaggaggacgacccctttgccggacgcggcgagcacagcaccaggatcgccgatcgcgagaccgactaccagaagcgccgattcgaccgtgtcctcaccccgactcgcgccgatgccttcgccgccaaccgacaggccggtgccaccgacggcgctacctatcgcgacatcatggagcgtcaagagcttgagaaggaggaagagcgcgtccaccgggctatccaggccaaacaacgcgaggcacgagacggcggcgtcgagcatcaagccacactcaaggacggtgacaaggaaaacgccgaagctggctcaactgaagcagtcgctgcgggccgtaagcgaaagaagagatgggacgtatcttcaacagctgtcgacgaacccgagactgcggccgccgatgccaaatcaaagcgttcgagatgggatcaggcgccagcacttccggtccctggtgcagcagacacctccaagaaacgctcgcgatgggaccaagcgccatccgcaacgcccatcggaaacaacggccttgtcactcccatgcacacgtcccaggtgggtggaggcgcagttccgtcgtttgggacagacatctccggcccaagtggcatgctcagtgatgatgatctcgacacgcttcttcccggagaggctcagggctttgctattgcccagcccccatccagctacccgactgggcgagcgcccatgcatcgagtctctgccacaccactgcctgcaaactatggaggcttcatgatgcaagatcctgagagtcacaggttgagtggaagtcagatgccaaaagagatccccggagttggtgagctgcagttcttcaaacaggaggatatggcttacttcggcaagcttgcagacggctcagacgaagccagtctcagcgtagacgagctaaaagaacgcaagatcatgcggcttctactcaagatcaagaacggcacgcctccaatgcgaaagactgcgctcaggcagcttacggacaatgcaagacagttcggcgccggccctctgttcaatcaaattttaccacttctcatggaaaagactctagaagaccaggaacgtcatttacttgtcaaggttatcgaccgtattctctggaagctagatgacctcgttcgcccctacgtccataaaattctagttgtcatcgaaccgctgctgatcgaccaagactactatgcacgggtggaagggcgtgaaatcatctccaatctgagtaaggcagctggccttgctacgatgatcagtgtgatgagacctgatatcgaccacgttgacgaatatgtacgaaatacgactgcgagagctttcgccgtagtggcatctgctcttggcatcccagctttgcttcccttcttgcgagctgtgtgtcgcagcaagaaatcgtggcaagcacgacatactggcgtcaagattgtgcagcagatccccatcctgatgggatgtgccgttctgcctcaccttaagggtctagtagattgcatagggcccaacttgaacgatgaacaaacaaaagtacgaacagtcacaagtttagcaattgccgcgttggctgaggcgtccaacccctacggtatcgagagcttcgacgacatcctcaaccctctgtggactggcgctcggaaacagcgcggcaaaggtctagcaggtttcttgaaggccgttggctacatcattccgctcatggacgaagaatatgctaattactatacctcacaagttatggatattctgctcagagagttctcttcgccggatgaggaaatgaagaaagtagtcttgaaggtcgtttcccagtgcgcaggcactgaaggtgtaacagctggctatctgaaggagcacgtcctcgacgaattctttaagagtttctgggttcgcaggatggctctggataagagaaattatcgacaggtcgttgagacaacggtcgatattggccaaaaggttggcgtgagcgaaatccttgagcgaatcgtcgggaatctcaaggatgaaagcgaagcctaccgcaaaatgacggtagagacggtagaaaaggtcgtggctagtctaggagctgccgatatcagcgaaaggttagaagagcgacttatcgatggtattttgcattcgttccaggagcagagcgtcgaagacatcatcatgttgaatggtttcggaaccgtggtcaacgctctgggcacacgatgcaagccatatattccccagattgtgtcgactatcttatggcgtctcaataacaaatcggcaactatccgtcaacaagctgcagatctcatctcccgtattgccatggttatgaagcaatgtggtgaagatgcgctcatgggcaaattgggtgtcgtactttacgaatatcttggtgaggagtatccggaagtactgggctccattctttctgcacttcgtgctattgttactgtcgtcggtatcagtcaaatgcagccacctatcaaggatttgcttcctcgccttactcccattcttagaaaccgtcacgaaaaggtgcaagaaaacaccatcgatctcgtcggccgtattgctgatcgcggcccggaaagcatcaacgccagagaatggatgcgaatctgtttcgagctattggacatgctcaaggctcacaaaaagggtatccgtcgagccgctaacaatacattcggtttcatcgcaaaggcaatcggcccacaggatgttctagcgacgcttcttaataatctccgtgtgcaggaacgtcaatcccgtgtctgtacggcggtcgctattgggattgttgcagagacttgcgctcctttcaccgtcctgccggctctcatgaacgagtatagagtgcccgaactgaatgtgcagaacggtgtgctcaagtcgctttccttccttttcgaatacataggagagatggccaaggactacgtctacgccgtgacgcctcttctcgaagacgcgttaattgaccgtgatcaagtccatcgacagactgcggcttcggtcgtaaagcacattgcgctcggagttgtcggtctcggttgcgaggacgccatggttcatctcttgaatgtcatctttccgaacatcttcgaaaccagcccacacgtcatcgatcgtattgtagaggccatcgaagccatccgtgtggctgtaggcccgggtctggtcatgaactacgtgtgggctggtctctttcaccccgcccgcaaggtcagacagccctactggcggttgtataacgatgcatatgtgtatcaagctgatgccctcgtcccctactatccgaacttgaacgaggatggcatcgacaggtcggaactggcgattgtgctatag

SEQ ID NO: 2013 - protein, 1220 aa, Muscodor strobelii
  misc_feature: SGI Peptide ID NO. 560288
  misc_feature (235)..(373): Pfam Id: PF08920 Pfam Desc: Splicing factor 3B subunit 1
  misc_feature (1)..(1220): NCBI GI: 85111669 Blast Desc: U2 snRNP component prp10 [Neurospora crassa OR74A] gi|28925808|gb|EAA34811.1| U2 snRNP component prp10 [Neurospora crassa OR74A]
  misc_feature (1)..(1220): NCBI GI: 46125347 Blast Desc: FG07051.1 [Gibberella zeae PH-1]
  misc_feature (1)..(1220): NCBI GI: 116192495 Blast Desc: conserved [Chaetomium globosum CBS 148.51] gi|88181878|gb|EAQ89346.1| conserved [Chaetomium globosum CBS 148.51]
  misc_feature (1)..(1220): NCBI GI: 256732604 Blast Desc: [Nectria haematococca mpVI 77-13-4]
  misc_feature (1)..(1220): NCBI GI: 67523929 Blast Desc: AN2420.2 [Aspergillus nidulans FGSC A4] gi|40745375|gb|EAA64531.1| conserved [Aspergillus nidulans FGSC A4] gi|259487828|tpe|CBF86811.1| TPA: splicing factor 3B subunit
  misc_feature (1)..(1220): NCBI GI: 154311740 Blast Desc: conserved [Botryotinia fuckeliana B05.10] gi|150850840|gb|EDN26033.1| conserved [Botryotinia fuckeliana B05.10]
  misc_feature (1)..(1220): NCBI GI: 261356186 Blast Desc: splicing factor 3B subunit 1 [Verticillium albo-atrum VaMs.102]
  misc_feature (1)..(1220): NCBI GI: 171684577 Blast Desc: protein product [Podospora anserina] gi|170942249|emb|CAP67901.1| protein product [Podospora anserina]
  misc_feature (1)..(1220): NCBI GI: 169774443 Blast Desc: [Aspergillus oryzae RIB40] gi|238497013|ref|XP_002379742.1| splicing factor 3B subunit 1, [Aspergillus flavus NRRL3357] gi|83769552|dbj|BAE59687.1| protein
  misc_feature (1)..(1220): NCBI GI: 39974995 Blast Desc: conserved [Magnaporthe grisea 70-15] gi|145018754|gb|EDK03033.1| conserved [Magnaporthe grisea 70-15]
  misc_feature: Useful for introducing or modulating the production of volatile compounds
MSDSDFDAVRKLQAERNAAAAKKGSGARNGDQRAQHPTKAKLTDSFDTDLYSRDGRDKYAGYLTSIPTADGDGDDDMEDVDDSRRLVGQYTATRAQIDEFAHGNGVEEDDPFAGRGEHSTRIADRETDYQKRRFDRVLTPTRADAFAANRQAGATDGATYRDIMERQELEKEEERVHRAIQAKQREARDGGVEHQATLKDGDKENAEAGSTEAVAAGRKRKKRWDVSSTAVDEPETAAADAKSKRSRWDQAPALPVPGAADTSKKRSRWDQAPSATPIGNNGLVTPMHTSQVGGGAVPSFGTDISGPSGMLSDDDLDTLLPGEAQGFAIAQPPSSYPTGRAPMHRVSATPLPANYGGFMMQDPESHRLSGSQMPKEIPGVGELQFFKQEDMAYFGKLADGSDEASLSVDELKERKIMRLLLKIKNGTPPMRKTALRQLTDNARQFGAGPLFNQILPLLMEKTLEDQERHLLVKVIDRILWKLDDLVRPYVHKILVVIEPLLIDQDYYARVEGREIISNLSKAAGLATMISVMRPDIDHVDEYVRNTTARAFAVVASALGIPALLPFLRAVCRSKKSWQARHTGVKIVQQIPILMGCAVLPHLKGLVDCIGPNLNDEQTKVRTVTSLAIAALAEASNPYGIESFDDILNPLWTGARKQRGKGLAGFLKAVGYIIPLMDEEYANYYTSQVMDILLREFSSPDEEMKKVVLKVVSQCAGTEGVTAGYLKEHVLDEFFKSFWVRRMALDKRNYRQVVETTVDIGQKVGVSEILERIVGNLKDESEAYRKMTVETVEKVVASLGAADISERLEERLIDGILHSFQEQSVEDIIMLNGFGTVVNALGTRCKPYIPQIVSTILWRLNNKSATIRQQAADLISRIAMVMKQCGEDALMGKLGVVLYEYLGEEYPEVLGSILSALRAIVTVVGISQMQPPIKDLLPRLTPILRNRHEKVQENTIDLVGRIADRGPESINAREWMRICFELLDMLKAHKKGIRRAANNTFGFIAKAIGPQDVLATLLNNLRVQERQSRVCTAVAIGIVAETCAPFTVLPALMNEYRVPELNVQNGVLKSLSFLFEYIGEMAKDYVYAVTPLLEDALIDRDQVHRQTAASVVKHIALGVVGLGCEDAMVHLLNVIFPNIFETSPHVIDRIVEAIEAIRVAVGPGLVMNYVWAGLFHPARKVRQPYWRLYNDAYVYQADALVPYYPNLNEDGIDRSELAIVL

SEQ ID NO: 2014 - DNA, 4060 bp, Muscodor strobelii
  misc_feature: SGI EST ID NO. CUFF.5182.0
  misc_feature: Variant of the nucleotide sequence at SEQ ID NO 2012
cgcaaagtcgcctcaatccacgttcatcttcatcccggtcgaatcatcgtcctttcctcggcccctcattcaacgtcgtcgctgcaacgccgccttgccggtctattcctgctcgcatatccgacttagaagtgcatgggacatcatcaaccaccttagacggcgctccccccatccgactcagccttgactgctcgggacttgggacatggtcgcgtagggaactgccaacgtagcccagcaagcagcccaccatgtcggattctgatttcgatgcagtgcgaaagctccaggctgagcgcaatgccgccgccgccaagaagggctcgggcgcgcgcaacggcgaccagcgcgcccagcaccccaccaaggccaagctgaccgactccttcgacaccgacctctactcgcgcgacggccgcgacaagtacgccggctacctgacctccatccccaccgccgacggagacggagacgatgacatggaagatgtcgacgactcgcgccgcctcgtcggccagtacaccgccacccgcgcccagatcgacgagtttgcccacggcaacggtgtcgaggaggacgacccctttgccggacgcggcgagcacagcaccaggatcgccgatcgcgagaccgactaccagaagcgccgattcgaccgtgtcctcaccccgactcgcgccgatgccttcgccgccaaccgacaggccggtgccaccgacggcgctacctatcgcgacatcatggagcgtcaagagcttgagaaggaggaagagcgcgtccaccgggctatccaggccaaacaacgcgaggcacgagacggcggcgtcgagcatcaagccacactcaaggacggtgacaaggaaaacgccgaagctggctcaactgaagcagtcgctgcgggccgtaagcgaaagaagagatgggacgtatcttcaacagctgtcgacgaacccgagactgcggccgccgatgccaaatcaaagcgttcgagatgggatcaggcgccagcacttccggtccctggtgcagcagacacctccaagaaacgctcgcgatgggaccaagcgccatccgcaacgcccatcggaaacaacggccttgtcactcccatgcacacgtcccaggtgggtggaggcgcagttccgtcgtttgggacagacatctccggcccaagtggcatgctcagtgatgatgatctcgacacgcttcttcccggagaggctcagggctttgctattgcccagcccccatccagctacccgactgggcgagcgcccatgcatcgagtctctgccacaccactgcctgcaaactatggaggcttcatgatgcaagatcctgagagtcacaggttgagtggaagtcagatgccaaaagagatccccggagttggtgagctgcagttcttcaaacaggaggatatggcttacttcggcaagcttgcagacggctcagacgaagccagtctcagcgtagacgagctaaaagaacgcaagatcatgcggcttctactcaagatcaagaacggcacgcctccaatgcgaaagactgcgctcaggcagcttacggacaatgcaagacagttcggcgccggccctctgttcaatcaaattttaccacttctcatggaaaagactctagaagaccaggaacgtcatttacttgtcaaggttatcgaccgtattctctggaagctagatgacctcgttcgcccctacgtccataaaattctagttgtcatcgaaccgctgctgatcgaccaagactactatgcacgggtggaagggcgtgaaatcatctccaatctgagtaaggcagctggccttgctacgatgatcagtgtgatgagacctgatatcgaccacgttgacgaatatgtacgaaatacgactgcgagagctttcgccgtagtggcatctgctcttggcatcccagctttgcttcccttcttgcgagctgtgtgtcgcagcaagaaatcgtggcaagcacgacatactggcgtcaagattgtgcagcagatccccatcctgatgggatgtgccgttctgcctcaccttaagggtctagtagattgcatagggcccaacttgaacgatgaacaaacaaaagtacgaacagtcacaagtttagcaattgccgcgttggctgaggcgtccaacccctacggtatcgagagcttcgacgacatcctcaaccctctgtggactggcgctcggaaacagcgcggcaaaggtctagcaggtttcttgaaggccgttggctacatcattccgctcatggacgaagaatatgctaattactatacctcacaagttatggatattctgctcagagagttctcttcgccggatgaggaaatgaagaaagtagtcttgaaggtcgtttcccagtgcgcaggcactgaaggtgtaacagctggctatctgaaggagcacgtcctcgacgaattctttaagagtttctgggttcgcaggatggctctggataagagaaattatcgacaggtcgttgagacaacggtcgatattggccaaaaggttggcgtgagcgaaatccttgagcgaatcgtcgggaatctcaaggatgaaagcgaagcctaccgcaaaatgacggtagagacggtagaaaaggtcgtggctagtctaggagctgccgatatcagcgaaaggttagaagagcgacttatcgatggtattttgcattcgttccaggagcagagcgtcgaagacatcatcatgttgaatggtttcggaaccgtggtcaacgctctgggcacacgatgcaagccatatattccccagattgtgtcgactatcttatggcgtctcaataacaaatcggcaactatccgtcaacaagctgcagatctcatctcccgtattgccatggttatgaagcaatgtggtgaagatgcgctcatgggcaaattgggtgtcgtactttacgaatatcttggtgaggagtatccggaagtactgggctccattctttctgcacttcgtgctattgttactgtcgtcggtatcagtcaaatgcagccacctatcaaggatttgcttcctcgccttactcccattcttagaaaccgtcacgaaaaggtgcaagaaaacaccatcgatctcgtcggccgtattgctgatcgcggcccggaaagcatcaacgccagagaatggatgcgaatctgtttcgagctattggacatgctcaaggctcacaaaaagggtatccgtcgagccgctaacaatacattcggtttcatcgcaaaggcaatcggcccacaggatgttctagcgacgcttcttaataatctccgtgtgcaggaacgtcaatcccgtgtctgtacggcggtcgctattgggattgttgcagagacttgcgctcctttcaccgtcctgccggctctcatgaacgagtatagagtgcccgaactgaatgtgcagaacggtgtgctcaagtcgctttccttccttttcgaatacataggagagatggccaaggactacgtctacgccgtgacgcctcttctcgaagacgcgttaattgaccgtgatcaagtccatcgacagactgcggcttcggtcgtaaagcacattgcgctcggagttgtcggtctcggttgcgaggacgccatggttcatctcttgaatgtcatctttccgaacatcttcgaaaccagcccacacgtcatcgatcgtattgtagaggccatcgaagccatccgtgtggctgtaggcccgggtctggtcatgaactacgtgtgggctggtctctttcaccccgcccgcaaggtcagacagccctactggcggttgtataacgatgcatatgtgtatcaagctgatgccctcgtcccctactatccgaacttgaacgaggatggcatcgacaggtcggaactggcgattgtgctatagataatatttgcttatgatcgctgaactacatttattacttacgcgtatcctgggttgggactgggaacctcggcgttggtggcgattcgttgtacagtagattggacaatatcatcatgctttgacttaatttgaaaccgtta

SEQ ID NO: 2015 - DNA, 1209 bp, Muscodor strobelii
  misc_feature: SGI cDNA ID NO. 560289
  misc_feature: Reduced expression when VOC is produced
  misc_feature: Encodes the peptide sequence at SEQ ID NO 2016
atgactatgaccctcgacaatcaatcacgactcggagctcttaacttcgatcacatgtcttcctattccaaccctccgcacttcaccaacccatgggcttcgggctcatcgggacaacatggccatcagggcatgtattcgcaaggtggcctgcctacgaacttgagcgccctcgattctatggcaaagcacccaacgagtaggccaagtgccaatcacagtgcctcaatggcaccatatggaagcatcccagttgcgacgtcttcctcagcaggtagcactctcatggcggacgtatatggacagcaagacttactcaatatgccccaagatctcatgagtctcaacagaatgcagacctcgtcggctgcatatggagagccctcctacgctacggcctcgcccgttcacgcaacatattcggcctcgcccagttcttatgatagtgtatccggctacgcgccggctccgatgcgctcgactttcgctcttgctccagaacacgacagccgaaggtattcccaatcgtcaatttcctctctatcatcagtcgacactggcccacgcgacatacttcgatctcatccaggttcattgattgacataaatcacagaggtgttcagcatccagacgaccgaaggactttcgcagatgctctcgacgcaggtcaaggcatgctggcgatgagccaggagacgccgcgagctatctacccacctaacaatcgaggcagggggtccgctgattcgtacgggtttccgtcgacacattcgaacagctcgtcgatctcttcagcaagcaattacggcaatccttactacgctgcttccgttgattcagtcagcgattactcgaccgcaggatcagacattgagtcggttacatcgcgaacattacctcggccaaatttgatgacacaacccccaccagcgccccagtcgatgatgggtcaattcagttcaaaggtttcatcgagcacacaaaagaaacataaatgtaaggtttgcgacaagcgctttacacgaccaagctctttgcaaacccatatgtatagccatactggtgaaaagcctttttgttgcgaggtagagggctgtggacgtcatttttctgttgtgtctaatctccggcgtcatcgcaaagtgcacaaaaacgacgctagatcagatgccggatcagaagaccatcaagacgaccactccgattaa

SEQ ID NO: 2016 - protein, 402 aa, Muscodor strobelii
  misc_feature: SGI Peptide ID NO. 560289
  misc_feature (331)..(353): Pfam Id: PF00096 Pfam Desc: Zinc finger, C2H2 type
  misc_feature (359)..(383): Pfam Id: PF00096 Pfam Desc: Zinc finger, C2H2 type
  misc_feature (1)..(399): NCBI GI: 261356180 Blast Desc: C2H2 finger domain containing protein FlbC [Verticillium albo-atrum VaMs.102]
  misc_feature (1)..(399): NCBI GI: 171684575 Blast Desc: protein product [Podospora anserina] gi|18077657|emb|CAD12881.1| C2H2 zinc finger protein [Podospora anserina] gi|170942248|emb|CAP67900.1| protein product [Podospora
  misc_feature (1)..(397): NCBI GI: 116192493 Blast Desc: CHGG_05964 [Chaetomium globosum CBS 148.51] gi|88181877|gb|EAQ89345.1| CHGG_05964 [Chaetomium globosum CBS 148.51]
  misc_feature (1)..(399): NCBI GI: 256733048 Blast Desc: NECHADRAFT_78961 [Nectria haematococca mpVI 77-13-4]
  misc_feature (107)..(399): NCBI GI: 46125349 Blast Desc: FG07052.1 [Gibberella zeae PH-1]
  misc_feature (45)..(399): NCBI GI: 145614474 Blast Desc: MGG_04699 [Magnaporthe grisea 70-15] gi|145021395|gb|EDK05524.1| MGG_04699 [Magnaporthe grisea 70-15]
  misc_feature (86)..(397): NCBI GI: 85111671 Blast Desc: NCU03043 [Neurospora crassa OR74A] gi|28925809|gb|EAA34812.1| conserved [Neurospora crassa OR74A]
  misc_feature (1)..(397): NCBI GI: 156061657 Blast Desc: SS1G_02974 [Sclerotinia sclerotiorum 1980] gi|154700375|gb|EDO00114.1| SS1G_02974 [Sclerotinia sclerotiorum 1980]
  misc_feature (1)..(400): NCBI GI: 154319456 Blast Desc: BC1G_02209 [Botryotinia fuckeliana B05.10] gi|150855867|gb|EDN31059.1| BC1G_02209 [Botryotinia fuckeliana B05.10]
  misc_feature (1)..(395): NCBI GI: 121716339 Blast Desc: C2H2 finger domain protein FlbC [Aspergillus clavatus NRRL 1] gi|119403934|gb|EAW14351.1| C2H2 finger domain protein FlbC [Aspergillus clavatus NRRL 1]
  misc_feature: Useful for introducing or modulating the production of volatile compounds
MTMTLDNQSRLGALNFDHMSSYSNPPHFTNPWASGSSGQHGHQGMYSQGGLPTNLSALDSMAKHPTSRPSANHSASMAPYGSIPVATSSSAGSTLMADVYGQQDLLNMPQDLMSLNRMQTSSAAYGEPSYATASPVHATYSASPSSYDSVSGYAPAPMRSTFALAPEHDSRRYSQSSISSLSSVDTGPRDILRSHPGSLIDINHRGVQHPDDRRTFADALDAGQGMLAMSQETPRAIYPPNNRGRGSADSYGFPSTHSNSSSISSASNYGNPYYAASVDSVSDYSTAGSDIESVTSRTLPRPNLMTQPPPAPQSMMGQFSSKVSSSTQKKHKCKVCDKRFTRPSSLQTHMYSHTGEKPFCCEVEGCGRHFSVVSNLRRHRKVHKNDARSDAGSEDHQDDHSD

SEQ ID NO: 2017 - DNA, 3269 bp, Muscodor strobelii
  misc_feature: SGI EST ID NO. CUFF.5284.0
  misc_feature: Variant of the nucleotide sequence at SEQ ID NO 2015
cccacacgtaatagtccctcttgtcttggctcttctgcatcttctgcgtcgaattatgatgtctagtggatgaaaggatacgggtttgcccccgtatgataccattagatctaaaccccggcagttctgttcaagtgttgtcattgttccgcccaatcactagtcccattacgtccgacctggaaaggaagaggaccctgacgccgtcctcgctgaatcagagtccgtcgtacccctagccttgcaacgccgcccacttggggcatcggatggtcagcatactactcgtagaacgaatctgtcagttgacgtatccgaccattccatcatagggaacctcacttcaagttgcaggtccatctaaaggctgcctcgcccctcccgtatgccctgtttgcttttcaacttctactacttcaaaaaagtatcttcagccttgagatagacaagactcttcaccaacaaaaagtgagcaacaagaacaacaccagccttgttgccagattagactcccgtcgacttaccatcacttatatgcaagtcctagttcagtgtacagtgcccgtcttacacggacatatattggacctaccagatatctggcttgcttgctgatctttaactcttcggtcttgaaacgagccactacactccacactctcatgatcagtcgtcacctaaaacggcttctgtcaaattggacaccatctttccctcactccgccccggaacgaggctgctgttcgacctgggactttatcacagtaccgttgaaccctgctaccctctggtgttcatctagcgctagatattgggactgtcgatctgtctcttgaccgtcgtcacgctgctgtgcgaaaccagacggtacccacctattcccgattactggacgctgttaagctttggataattggtctgcttttgaagtacctaccagcatcccgtgtgtacctgtgctcacttgtcggggttcctggtttgtgtctttattagacacacatacacccagaacacacacacttaaggaacgctgatccccctccgcgagtcgcaacggatcttcctctactggatcttgaaagataagtcaccgtctcggcaaggtgacacgaatctgcttcctccgggatcttgcatttgatcagcaaaccattaggccttttcttcaagagcaagacgaggccattgttgcaatatcggcgtcgttttctaggacggcgtcaagtctttaccctggcgacttaatcatcttcaactcgttttgtcaaagatgactatgaccctcgacaatcaatcacgactcggagctcttaacttcgatcacatgtcttcctattccaaccctccgcacttcaccaacccatgggcttcgggctcatcgggacaacatggccatcagggcatgtattcgcaaggtggcctgcctacgaacttgagcgccctcgattctatggcaaagcacccaacgagtaggccaagtgccaatcacagtgcctcaatggcaccatatggaagcatcccagttgcgacgtcttcctcagcaggtagcactctcatggcggacgtatatggacagcaagacttactcaatatgccccaagatctcatgagtctcaacagaatgcagacctcgtcggctgcatatggagagccctcctacgctacggcctcgcccgttcacgcaacatattcggcctcgcccagttcttatgatagtgtatccggctacgcgccggctccgatgcgctcgactttcgctcttgctccagaacacgacagccgaaggtattcccaatcgtcaatttcctctctatcatcagtcgacactggcccacgcgacatacttcgatctcatccaggttcattgattgacataaatcacagaggtgttcagcatccagacgaccgaaggactttcgcagatgctctcgacgcaggtcaaggcatgctggcgatgagccaggagacgccgcgagctatctacccacctaacaatcgaggcagggggtccgctgattcgtacgggtttccgtcgacacattcgaacagctcgtcgatctcttcagcaagcaattacggcaatccttactacgctgcttccgttgattcagtcagcgattactcgaccgcaggatcagacattgagtcggttacatcgcgaacattacctcggccaaatttgatgacacaacccccaccagcgccccagtcgatgatgggtcaattcagttcaaaggtttcatcgagcacacaaaagaaacataaatgtaaggtttgcgacaagcgctttacacgaccaagctctttgcaaacccatatgtatagccatactggtgaaaagcctttttgttgcgaggtagagggctgtggacgtcatttttctgttgtgtctaatctccggcgtcatcgcaaagtgcacaaaaacgacgctagatcagatgccggatcagaagaccatcaagacgaccactccgattaaagacttgataacacgaatgacaaaaatactgggcaagaattttttttggataacgatatagattatcttgacgacagcggatttgcggcatacatgatcagcattcgcaacatttgcaggtcattgtctgtcagcgcattgacgtcttttggggactagagcagacttttcaacattgagtagtcgaggtcacagcagcattctcggagcgtcgaatatgtgaagcgacgcgtcgaagtcacattgtctggtgtgaagacaatgtcaaaagttaagcatggggattttagttactgaggcataacgcaatttgccgcctatcgtttatgaacaccaccttatgacacaggggctgggttgggcttgggttcattcaaagagataccctcttaccatttaggcgttcaggagttggaaacgaacgaattggattgacttacacatcatatcacctgatgatctggaagcttgatgcgcagcttacaagcagaatgaatgatggagcaacaaaatcatgtggaacaccacgttgtatcattagacttaccatatgtatacccagtggaggaatgagacgaaagctgagaacagtttggctccgaggtccgacaatagaccaggaccaggaacggaaaagaaaataacgttcgttgttgcacatgtaatcttacttgggttagagtgcgacactggcaatatagaaagaaacgccagacttgggtagaaatccaataccttagaattcgaacatgccgaataaacctgtctgcaacccacgcataatgcg

SEQ ID NO: 2018 - DNA, 1110 bp, Muscodor strobelii
  misc_feature: SGI cDNA ID NO. 560290
  misc_feature: Reduced expression when VOC is produced
  misc_feature: Encodes the peptide sequence at SEQ ID NO 2019
atgactatgaccctcgacaatcaatcacgactcggagctcttaacttcgatcacatgtcttcctattccaaccctccgcacttcaccaacccatgggcttcgggctcatcgggacaacatggccatcagggcatgtattcgcaaggtggcctgcctacgaacttgagcgccctcgattctatggcaaagcacccaacgagtaggccaagtgccaatcacagtgcctcaatggcaccatatggaagcatcccagttgcgacgtcttcctcagcaggtagcactctcatggcggacgtatatggacagcaagacttactcaatatgccccaagatctcatgagtctcaacagaatgcagacctcgtcggctgcatatggagagccctcctacgctacggcctcgcccgttcacgcaacatattcggcctcgcccagttcttatgatagtgtatccggctacgcgccggctccgatgcgctcgactttcgctcttgctccagaacacgacagccgaagaggtgttcagcatccagacgaccgaaggactttcgcagatgctctcgacgcaggtcaaggcatgctggcgatgagccaggagacgccgcgagctatctacccacctaacaatcgaggcagggggtccgctgattcgtacgggtttccgtcgacacattcgaacagctcgtcgatctcttcagcaagcaattacggcaatccttactacgctgcttccgttgattcagtcagcgattactcgaccgcaggatcagacattgagtcggttacatcgcgaacattacctcggccaaatttgatgacacaacccccaccagcgccccagtcgatgatgggtcaattcagttcaaaggtttcatcgagcacacaaaagaaacataaatgtaaggtttgcgacaagcgctttacacgaccaagctctttgcaaacccatatgtatagccatactggtgaaaagcctttttgttgcgaggtagagggctgtggacgtcatttttctgttgtgtctaatctccggcgtcatcgcaaagtgcacaaaaacgacgctagatcagatgccggatcagaagaccatcaagacgaccactccgattaa

SEQ ID NO: 2019 - protein, 369 aa, Muscodor strobelii
  misc_feature: SGI Peptide ID NO. 560290
  misc_feature (298)..(320): Pfam Id: PF00096 Pfam Desc: Zinc finger, C2H2 type
  misc_feature (326)..(350): Pfam Id: PF00096 Pfam Desc: Zinc finger, C2H2 type
  misc_feature (1)..(366): NCBI GI: 171684575 Blast Desc: protein product [Podospora anserina] gi|18077657|emb|CAD12881.1| C2H2 zinc finger protein [Podospora anserina] gi|170942248|emb|CAP67900.1| protein product [Podospora
  misc_feature (1)..(366): NCBI GI: 261356180 Blast Desc: C2H2 finger domain containing protein FlbC [Verticillium albo-atrum VaMs.102]
  misc_feature (1)..(364): NCBI GI: 116192493 Blast Desc: CHGG_05964 [Chaetomium globosum CBS 148.51] gi|88181877|gb|EAQ89345.1| CHGG_05964 [Chaetomium globosum CBS 148.51]
  misc_feature (1)..(366): NCBI GI: 256733048 Blast Desc: NECHADRAFT_78961 [Nectria haematococca mpVI 77-13-4]
  misc_feature (107)..(366): NCBI GI: 46125349 Blast Desc: FG07052.1 [Gibberella zeae PH-1]
  misc_feature (45)..(366): NCBI GI: 145614474 Blast Desc: MGG_04699 [Magnaporthe grisea 70-15] gi|145021395|gb|EDK05524.1| MGG_04699 [Magnaporthe grisea 70-15]
  misc_feature (86)..(364): NCBI GI: 85111671 Blast Desc: NCU03043 [Neurospora crassa OR74A] gi|28925809|gb|EAA34812.1| conserved [Neurospora crassa OR74A]
  misc_feature (1)..(367): NCBI GI: 154319456 Blast Desc: BC1G_02209 [Botryotinia fuckeliana B05.10] gi|150855867|gb|EDN31059.1| BC1G_02209 [Botryotinia fuckeliana B05.10]
  misc_feature (1)..(362): NCBI GI: 121716339 Blast Desc: C2H2 finger domain protein FlbC [Aspergillus clavatus NRRL 1] gi|119403934|gb|EAW14351.1| C2H2 finger domain protein FlbC [Aspergillus clavatus NRRL 1]
  misc_feature (1)..(362): NCBI GI: 255933127 Blast Desc: Pc12g12190 [Penicillium chrysogenum Wisconsin 54-1255] gi|211582653|emb|CAP80846.1| Pc12g12190 [Penicillium chrysogenum Wisconsin 54-1255]
  misc_feature: Useful for introducing or modulating the production of volatile compounds
MTMTLDNQSRLGALNFDHMSSYSNPPHFTNPWASGSSGQHGHQGMYSQGGLPTNLSALDSMAKHPTSRPSANHSASMAPYGSIPVATSSSAGSTLMADVYGQQDLLNMPQDLMSLNRMQTSSAAYGEPSYATASPVHATYSASPSSYDSVSGYAPAPMRSTFALAPEHDSRRGVQHPDDRRTFADALDAGQGMLAMSQETPRAIYPPNNRGRGSADSYGFPSTHSNSSSISSASNYGNPYYAASVDSVSDYSTAGSDIESVTSRTLPRPNLMTQPPPAPQSMMGQFSSKVSSSTQKKHKCKVCDKRFTRPSSLQTHMYSHTGEKPFCCEVEGCGRHFSVVSNLRRHRKVHKNDARSDAGSEDHQDDHSD

SEQ ID NO: 2020 - DNA, 3269 bp, Muscodor strobelii; identical to SEQ ID NO: 2017
  misc_feature: SGI EST ID NO. CUFF.5284.0
  misc_feature: Variant of the nucleotide sequence at SEQ ID NO 2018

SEQ ID NO: 2021 - DNA, 1227 bp, Muscodor strobelii
  misc_feature: SGI cDNA ID NO. 560291
  misc_feature: Encodes the peptide sequence at SEQ ID NO 2022
atgccagccatcccagccatccgagtatctgaatggcgaaagctacccctgagcttatctgagctttgcattgaaacaactcttcgctgtgggcaatcatttcgatggcgcaaagtcaacgatgaatggaattgtgtgctacacgggcgccttttatcattaaagcaggaccctgagttcttgcactacaaagttacttggccgaagcccgcttcagcctcaccaaagtctgctgcatcgtgcaaggaggagaccttatcagatgatccaaaatatacagacgacactgaaggtcttctaagacattattttagcctgagacacgacttggccgctctgtatgatcagtggtcagaatctgatcctaattttcggaagaaggcacccaagtttacaggaattcgcatcctaagtcaagatgcctgggaagcgttgataggtttcatatgcagtagcaacaacaatatttcgcgtatctcacaaatggtatataaactttgtatacactatggtccctttatagcgcatgtggatggcgagccatttcatgactttccctcgcctcaagctttggccgggaagaaagtggaagcccatctacgtgagttgggatttggctatagagccaagtatattgctgagacggcaagactcgtcgccgaggagaagcccgaagggtggttagagagcttggctaatcctgagaatccaacatggggtgtatcagtcaaagttgaaaatgaggaaccaccgacataccaacgagctcatgagcagcttctacttctctctggtgttggaccgaaagtggcggactgcgtgtgtctaatgggcctgggatggggcgaggcagtgccagtggacacccacgtgtggcaaatcgcccaaagagactacagcttcggaaagacgaagtcgaagacgttttcaaaggctatgtacgattcggtcggtgaccattttcgcaagatatgggggccacaagcaggctgggcgcagtccgttttattcactgccaatctcaagtccttttcggagcagctcgcaggcaagaacgagcccgtcgccgtcatcaaaggggaagtcacggaggaagtgaccgttactcctacctccaagattaggaagcgccagatatcagccgtcgtcgagccaattgacactaaggacagtgtttcatcggagaccagaaactcgagccgaaagaggacgagagcgcgaacctga

SEQ ID NO: 2022 - protein, 408 aa, Muscodor strobelii
  misc_feature: SGI Peptide ID NO. 560291
  misc_feature (146)..(319): Pfam Id: PF00730 Pfam Desc: HhH-GPD superfamily base excision DNA repair protein
  misc_feature (14)..(145): Pfam Id: PF07934 Pfam Desc: 8-oxoguanine DNA glycosylase, N-terminal domain
  misc_feature (146)..(300): Pfam Id: PF00730 Pfam Desc: HhH-GPD superfamily base excision DNA repair protein
  misc_feature (7)..(407): NCBI GI: 261356187 Blast Desc: N-glycosylase/DNA lyase [Verticillium albo-atrum VaMs.102]
  misc_feature (12)..(384): NCBI GI: 256732603 Blast Desc: NECHADRAFT_5326 [Nectria haematococca mpVI 77-13-4]
  misc_feature (10)..(395): NCBI GI: 119189251 Blast Desc: CIMG_04673 [Coccidioides immitis RS]
  misc_feature (10)..(395): NCBI GI: 240111309 Blast Desc: HhH-GPD family base excision DNA repair protein [Coccidioides posadasii C735 delta SOWgp]
  misc_feature (10)..(407): NCBI GI: 225562834 Blast Desc: 8-oxoguanine DNA glycosylase [Ajellomyces capsulatus G186AR]
  misc_feature (10)..(392): NCBI GI: 242803785 Blast Desc: DNA N-glycosylase, [Talaromyces stipitatus ATCC 10500] gi|218717589|gb|EED17010.1| DNA N-glycosylase, [Talaromyces stipitatus ATCC 10500]
  misc_feature (10)..(390): NCBI GI: 226287344 Blast Desc: N-glycosylase/DNA lyase [Paracoccidioides brasiliensis Pb18]
  misc_feature (10)..(407): NCBI GI: 240279649 Blast Desc: 8-oxoguanine DNA glycosylase [Ajellomyces capsulatus H143]
  misc_feature (6)..(405): NCBI GI: 189204131 Blast Desc: N-glycosylase/DNA lyase [Pyrenophora tritici-repentis Pt-1C-BFP] gi|187985500|gb|EDU50988.1| N-glycosylase/DNA lyase [Pyrenophora tritici-repentis Pt-1C-BFP]
  misc_feature (10)..(390): NCBI GI: 226279097 Blast Desc: N-glycosylase/DNA lyase [Paracoccidioides brasiliensis Pb01]
  misc_feature (12)..(342): SWISSPROT Homolog: EC 4.2.99.18 DNA-(apurinic or apyrimidinic site) lyase
MPAIPAIRVSEWRKLPLSLSELCIETTLRCGQSFRWRKVNDEWNCVLHGRLLSLKQDPEFLHYKVTWPKPASASPKSAASCKEETLSDDPKYTDDTEGLLRHYFSLRHDLAALYDQWSESDPNFRKKAPKFTGIRILSQDAWEALIGFICSSNNNISRISQMVYKLCIHYGPFIAHVDGEPFHDFPSPQALAGKKVEAHLRELGFGYRAKYIAETARLVAEEKPEGWLESLANPENPTWGVSVKVENEEPPTYQRAHEQLLLLSGVGPKVADCVCLMGLGWGEAVPVDTHVWQIAQRDYSFGKTKSKTFSKAMYDSVGDHFRKIWGPQAGWAQSVLFTANLKSFSEQLAGKNEPVAVIKGEVTEEVTVTPTSKIRKRQISAVVEPIDTKDSVSSETRNSSRKRTRART

SEQ ID NO: 2023 - DNA, 1863 bp, Muscodor strobelii
  misc_feature: SGI EST ID NO. CUFF.5225.0
  misc_feature: Variant of the nucleotide sequence at SEQ ID NO 2021
agacttttgatttcatccatccgtccatttcaatcgtttctttcctctttgtatcccatccaacagtttgaggaatgcagagtggtatgtcgtctgacagatttcgtcctttcgtatgaccaacagccatgccagccatcccagccatccgagtatctgaatggcgaaagctacccctgagcttatctgagctttgcattgaaacaactcttcgctgtgggcaatcatttcgatggcgcaaagtcaacgatgaatggaattgtgtgctacacgggcgccttttatcattaaagcaggaccctgagttcttgcactacaaagttacttggccgaagcccgcttcagcctcaccaaagtctgctgcatcgtgcaaggaggagaccttatcagatgatccaaaatatacagacgacactgaaggtcttctaagacattattttagcctgagacacgacttggccgctctgtatgatcagtggtcagaatctgatcctaattttcggaagaaggcacccaagtttacaggaattcgcatcctaagtcaagatgcctgggaagcgttgataggtttcatatgcagtagcaacaacaatatttcgcgtatctcacaaatggtatataaactttgtatacactatggtccctttatagcgcatgtggatggcgagccatttcatgactttccctcgcctcaagctttggccgggaagaaagtggaagcccatctacgtgagttgggatttggctatagagccaagtatattgctgagacggcaagactcgtcgccgaggagaagcccgaagggtggttagagagcttggctaatcctgagaatccaacatggggtgtatcagtcaaagttgaaaatgaggaaccaccgacataccaacgagctcatgagcagcttctacttctctctggtgttggaccgaaagtggcggactgcgtgtgtctaatgggcctgggatggggcgaggcagtgccagtggacacccacgtgtggcaaatcgcccaaagagactacagcttcggaaagacgaagtcgaagacgttttcaaaggctatgtacgattcggtcggtgaccattttcgcaagatatgggggccacaagcaggctgggcgcagtccgttttattcactgccaatctcaagtccttttcggagcagctcgcaggcaagaacgagcccgtcgccgtcatcaaaggggaagtcacggaggaagtgaccgttactcctacctccaagattaggaagcgccagatatcagccgtcgtcgagccaattgacactaaggacagtgtttcatcggagaccagaaactcgagccgaaagaggacgagagcgcgaacctgagactttgaacctagatcaagattttaccacatctatttatcactaaaaggctttatttcgagcttatttaagagatcaattttagtcgtgaggtataacacgaacagttatgttcaattcgtgcaggagcttaggggaatcgtacgatgctgcagtggcgtcagcttaatgaataatcatgagtttggacaacactagaatcagtaaccctttagatgttcgacgtggcattaaatacgattgacgtatcgatttacaatcctcatagcaagctcaacaaattccgtatcgctttccgcatagtccggggtaatgatggtcgccaacatttctctggactacactacaacgaaggaacttcataatccatgggcgtgtgaatgaaacaaattgcttcaagtccggagttaacaacctgcctctgcctctcctcattgtaaaccgccgaaaaactgaatatagtgtaatctatatcgaagaagggtaaaaggattgttatatgactcag

SEQ ID NO: 2024 - DNA, 1743 bp, Muscodor strobelii
  misc_feature: SGI cDNA ID NO. 560292
  misc_feature: Reduced expression when VOC is produced
  misc_feature: Encodes the peptide sequence at SEQ ID NO 2025
atgaacggagacagctactcggcgcgagatggccgtcatggctcctcgcgcgactacggcggacgtgacgatagacgcgatcgcgaccgaggagagaggggggagaggggacatcgaggcgaccgacgtgacaggaggcgcagcagatctcctccccgacgctcccatagagacgaagatgcctatgcatccagccgtagccaccgagaccgcgagcgcgaagaccgatacggtggatccggcgccggcggcggtggtggtggtggccgtgaccgcagaggaggagaacgagaatgggaccgtgaccgtggtgcccgaagggacgcccgccgagacgatggtggtggccggccgccccgtcgcgatccctatgctgacgatcgccgcggcggtggtgatcgacgaaatgacaacagagccgccgatagaggcgccgatagaggtggcagagaccgcgacgaagatctatttgcccagaaccgtcggggacgcagcgccacccctcctaagaagagagagcccaccccagatctcaccgacatcatccccgtcctcgagcgcaagcgtcgcatgacccagtgggacatgaagccccctggatacgagaatgtcactgctgagcaggccaagctgtccggcatgttccagcttcccggagccccccgccaacagcctatggatcccacgaggttacaggccttcatgaatcacccaggcggtgccgttaacagcgcagcactgaagcccggaaactcccgccagagcaagcgactgctggcttacaatctcccgcaaggttgcaccgatgagagcatcactgctttcttcaacctccagctcaatggattaaatgtcatcgagagcaccgatccttgtgtcttgtgtcagatatctaaggatcgttcctttgctctgcttgaattcaggcacgcctcggaagcgacagtcgccttggccatggatggcatatctatggaggctgacgatggtgcaaatggagctgcctccggtgggcttaagatccagcgacccaaggactacattgtacctgccgtgcccgacgataccccctatgagcccggtgttgtgtcaaaaacagttgtcgacacccccaacaagatcagcattgccaacatccctccctatctaaacgaagaacagattcttgaacttctggtctctttcggagaactcaaagcctttgtccttgctagagataatggcacagaagaatctcgaggcattgctttctgcgaattcgtcgacccatccgttaccgacattgcgatacaaggtctgcagggcatgccgattggcgagaagaacctcaaagtgcaaaaggctagcattggcattacccaagtatctggcgtggaaatgggcgtcaacgcaatgtctatgctcgccggaaccaccgcttctggcgattctgagatgagcagagtagtgcaattactcaacatggtcacagcggaagaactcatggatgctgaggactacgaggaaatttgtgaggatgtggagggagagtgcgccaagtacggcgaggttgtcgccatgaaagttccaagacccattggtggcagccgacagtccgcaggtgttggcaaaatcttcgtcaagttcgacactcctgaatcagccaagaaagctctccaagcactggcaggaaggaagtttgctgacagaaccgtggtcacaacatattttcccgaggaaaactttgaggttggagcgtggtaa

SEQ ID NO: 2025 - protein, 580 aa, Muscodor strobelii
  misc_feature: SGI Peptide ID NO. 560292
  misc_feature (374)..(445): Pfam Id: PF00076 Pfam Desc: RNA recognition motif. (a.k.a. RRM, RBD, or RNP domain)
  misc_feature (536)..(567): Pfam Id: PF00076 Pfam Desc: RNA recognition motif. (a.k.a. RRM, RBD, or RNP domain)
  misc_feature (54)..(580): NCBI GI: 261357364 Blast Desc: splicing factor U2AF 65 kDa subunit [Verticillium albo-atrum VaMs.102]
  misc_feature (1)..(580): NCBI GI: 85111663 Blast Desc: NCU03039 [Neurospora crassa OR74A] gi|28925805|gb|EAA34808.1| conserved [Neurospora crassa OR74A]
  misc_feature (161)..(580): NCBI GI: 154319442 Blast Desc: BC1G_02202 [Botryotinia fuckeliana B05.10] gi|150855860|gb|EDN31052.1| BC1G_02202 [Botryotinia fuckeliana B05.10]
  misc_feature (165)..(580): NCBI GI: 171684585 Blast Desc: protein product [Podospora anserina] gi|170942253|emb|CAP67905.1| protein product [Podospora anserina]
  misc_feature (168)..(580): NCBI GI: 116192501 Blast Desc: CHGG_05968 [Chaetomium globosum CBS 148.51] gi|88181881|gb|EAQ89349.1| CHGG_05968 [Chaetomium globosum CBS 148.51]
  misc_feature (51)..(572): NCBI GI: 256733047 Blast Desc: NECHADRAFT_38412 [Nectria haematococca mpVI 77-13-4]
  misc_feature (1)..(567): NCBI GI: 46125343 Blast Desc: FG07049.1 [Gibberella zeae PH-1]
  misc_feature (177)..(574): NCBI GI: 156061663 Blast Desc: SS1G_02977 [Sclerotinia sclerotiorum 1980] gi|154700378|gb|EDO00117.1| SS1G_02977 [Sclerotinia sclerotiorum 1980]
  misc_feature (1)..(580): NCBI GI: 261196608 Blast Desc: splicing factor u2af large subunit [Ajellomyces dermatitidis SLH14081] gi|239595952|gb|EEQ78533.1| splicing factor u2af large subunit [Ajellomyces dermatitidis SLH14081]
  misc_feature (170)..(580): NCBI GI: 119189253 Blast Desc: CIMG_04674 [Coccidioides immitis RS]
  misc_feature: Useful for introducing or modulating the production of volatile compounds
MNGDSYSARDGRHGSSRDYGGRDDRRDRDRGERGERGHRGDRRDRRRSRSPPRRSHRDEDAYASSRSHRDREREDRYGGSGAGGGGGGGRDRRGGEREWDRDRGARRDARRDDGGGRPPRRDPYADDRRGGGDRRNDNRAADRGADRGGRDRDEDLFAQNRRGRSATPPKKREPTPDLTDIIPVLERKRRMTQWDMKPPGYENVTAEQAKLSGMFQLPGAPRQQPMDPTRLQAFMNHPGGAVNSAALKPGNSRQSKRLLAYNLPQGCTDESITAFFNLQLNGLNVIESTDPCVLCQISKDRSFALLEFRHASEATVALAMDGISMEADDGANGAASGGLKIQRPKDYIVPAVPDDTPYEPGVVSKTVVDTPNKISIANIPPYLNEEQILELLVSFGELKAFVLARDNGTEESRGIAFCEFVDPSVTDIAIQGLQGMPIGEKNLKVQKASIGITQVSGVEMGVNAMSMLAGTTASGDSEMSRVVQLLNMVTAEELMDAEDYEEICEDVEGECAKYGEVVAMKVPRPIGGSRQSAGVGKIFVKFDTPESAKKALQALAGRKFADRTVVTTYFPEENFEVGAW

SEQ ID NO: 2026 - DNA, 2500 bp, Muscodor strobelii
  misc_feature: SGI EST ID NO. CUFF.5233.0
  misc_feature: Variant of the nucleotide sequence at SEQ ID NO 2024
aactcctccagcctcgtcgactgcagagcatctccaatccactccgaacacagcttccgcttccacttccacttccatttcgacgcatcgaggccgatcggggagccgtgcgttctttacatcatttcgtcagatttattcgctgcgcggcaccttatttccatcgtgtcaattgttgttcccgcattctgcgcgactgggtatctgggtagttgtctagtcagcgacgtcctcccctgcatcgtcttgcacctgcccccatcatgaacggagacagctactcggcgcgagatggccgtcatggctcctcgcgcgactacggcggacgtgacgatagacgcgatcgcgaccgaggagagaggggggagaggggacatcgaggcgaccgacgtgacaggaggcgcagcagatctcctccccgacgctcccatagagacgaagatgcctatgcatccagccgtagccaccgagaccgcgagcgcgaagaccgatacggtggatccggcgccggcggcggtggtggtggtggccgtgaccgcagaggaggagaacgagaatgggaccgtgaccgtggtgcccgaagggacgcccgccgagacgatggtggtggccggccgccccgtcgcgatccctatgctgacgatcgccgcggcggtggtgatcgacgaaatgacaacagagccgccgatagaggcgccgatagaggtggcagagaccgcgacgaagatctatttgcccagaaccgtcggggacgcagcgccacccctcctaagaagagagagcccaccccagatctcaccgacatcatccccgtcctcgagcgcaagcgtcgcatgacccagtgggacatgaagccccctggatacgagaatgtcactgctgagcaggccaagctgtccggcatgttccagcttcccggagccccccgccaacagcctatggatcccacgaggttacaggccttcatgaatcacccaggcggtgccgttaacagcgcagcactgaagcccggaaactcccgccagagcaagcgactgctggcttacaatctcccgcaaggttgcaccgatgagagcatcactgctttcttcaacctccagctcaatggattaaatgtcatcgagagcaccgatccttgtgtcttgtgtcagatatctaaggatcgttcctttgctctgcttgaattcaggcacgcctcggaagcgacagtcgccttggccatggatggcatatctatggaggctgacgatggtgcaaatggagctgcctccggtgggcttaagatccagcgacccaaggactacattgtacctgccgtgcccgacgataccccctatgagcccggtgttgtgtcaaaaacagttgtcgacacccccaacaagatcagcattgccaacatccctccctatctaaacgaagaacagattcttgaacttctggtctctttcggagaactcaaagcctttgtccttgctagagataatggcacagaagaatctcgaggcattgctttctgcgaattcgtcgacccatccgttaccgacattgcgatacaaggtctgcagggcatgccgattggcgagaagaacctcaaagtgcaaaaggctagcattggcattacccaagtatctggcgtggaaatgggcgtcaacgcaatgtctatgctcgccggaaccaccgcttctggcgattctgagatgagcagagtagtgcaattactcaacatggtcacagcggaagaactcatggatgctgaggactacgaggaaatttgtgaggatgtggagggagagtgcgccaagtacggcgaggttgtcgccatgaaagttccaagacccattggtggcagccgacagtccgcaggtgttggcaaaatcttcgtcaagttcgacactcctgaatcagccaagaaagctctccaagcactggcaggaaggaagtttgctgacagaaccgtggtcacaacatattttcccgaggaaaactttgaggttggagcgtggtaaaattgtggcattctctagtcggagtagaggtggcataccagattgattgaggaggacacatcgacacggagagtcgacataagctcaggttcacagggagataggtgtattcttacaatcggtatgtacttgatcaacatgagtcgatgcattgagtggtaatctcaaggtaatctggaagtcggacgtcgcgtgaactaattaccttgctcactcatggtagatctgggactcatcatagctggatgggaagaaagtggttcccaaatcaacgtgtacaatgcaaagccattttccttgcatctctgctatctgcctcgagaatcgtatctgagaatcacaaaagataacacatcgtgtgatgtgacttcgtatgcatcttacaatgaacaagatgatacagtttcctgtaaggtgccatcaaataatgtgtgcagattatctaggtgtgcaggcatagccccgagtggtgaattctaaaatgcccacaaccc

SEQ ID NO: 2027 - DNA, 765 bp, Muscodor strobelii
  misc_feature: SGI cDNA ID NO. 560293
  misc_feature: Encodes the peptide sequence at SEQ ID NO 2028
atgaaccagcaatcccgtctgacctcaagattgctctctagctccgaagtgagcgatctatacctacaagcaacgcagtgcgcatttctcagtctcgcgggccagggacgattaccgaagaagaacctaagccaatggctatcgcaagatagactttacgcacaagcctacgtccgcttcattgggggactgatctcaagggtgaaactacctcttgcttccgacacaagcacgacaagtacactgccatggcgcattcttacattactgcaaggttgcctatcgggcatcatgcgggaactacagttctttgaggacactgctaaaagtcatggcttggatctggctcttactgctaaggctggagaagatctcggtccaaatcacattacggggatatatattcagctttttgactctttcacggcccaagggggtgagaacaagagcttgctagatggattagttgtgctctgggctacggagaaggcatacttggatagctggaactttgcaaagaaccaggagggcaagagcaaggggagtgatctggatggtggtgccttgagggagaagtttataccgaattggacctcggaagagttcaaggaatttgtgaaggagattggggattgtctggatgcatatgccgatgagctggcgatacgtgaggatgatattaaggaatgcttgcagactttcaagtcagtacttatccttgaggaaaagttttggcctgctgttgaaggggatgcaactcgataa

SEQ ID NO: 2028 - protein, 254 aa, Muscodor strobelii
  misc_feature: SGI Peptide ID NO. 560293
  misc_feature (14)..(251): Pfam Id: PF03070 Pfam Desc: TENA/THI-4/PQQC family
  misc_feature (21)..(248): NCBI GI: 238486666 Blast Desc: transcription regulator PAB1642, [Aspergillus flavus NRRL3357] gi|220699450|gb|EED55789.1| transcription regulator PAB1642, [Aspergillus flavus NRRL3357]
  misc_feature (24)..(251): NCBI GI: 119491494 Blast Desc: transcription regulator PAB1642, [Neosartorya fischeri NRRL 181] gi|119411428|gb|EAW21371.1| transcription regulator PAB1642, [Neosartorya fischeri NRRL 181]
  misc_feature (24)..(250): NCBI GI: 70999414 Blast Desc: transcription regulator PAB1642 [Aspergillus fumigatus Af293] gi|66852063|gb|EAL92388.1| transcription regulator PAB1642, [Aspergillus fumigatus Af293] transcription regulator
  misc_feature (6)..(249): NCBI GI: 67524791 Blast Desc: AN2853.2 [Aspergillus nidulans FGSC A4] gi|40744248|gb|EAA63424.1| AN2853.2 [Aspergillus nidulans FGSC A4] gi|259486211|tpe|CBF83870.1| TPA: transcription regulator A4]
  misc_feature (1)..(248): NCBI GI: 255942245 Blast Desc: Pc18g00440 [Penicillium chrysogenum Wisconsin 54-1255] gi|211586624|emb|CAP94268.1| Pc18g00440 [Penicillium chrysogenum Wisconsin 54-1255]
  misc_feature (7)..(248): NCBI GI: 212527732 Blast Desc: transcription regulator PAB1642, [Penicillium marneffei ATCC 18224] gi|210073421|gb|EEA27508.1| transcription regulator PAB1642, [Penicillium marneffei ATCC 18224]
  misc_feature (23)..(248): NCBI GI: 242784514 Blast Desc: transcription regulator PAB1642, [Talaromyces stipitatus ATCC 10500] gi|218720549|gb|EED19968.1| transcription regulator PAB1642, [Talaromyces stipitatus ATCC 10500]
  misc_feature (7)..(251): NCBI GI: 121705860 Blast Desc: transcription regulator PAB1642, [Aspergillus clavatus NRRL 1] gi|119399339|gb|EAW09767.1| transcription regulator PAB1642, [Aspergillus clavatus NRRL 1]
  misc_feature (5)..(234): NCBI GI: 145233073 Blast Desc: An02g07760 [Aspergillus niger] gi|134056834|emb|CAK37739.1| protein product [Aspergillus niger]
  misc_feature (2)..(250): NCBI GI: 169595670 Blast Desc: SNOG_00579 [Phaeosphaeria nodorum SN15] gi|111070954|gb|EAT92074.1| SNOG_00579 [Phaeosphaeria nodorum SN15]
MNQQSRLTSRLLSSSEVSDLYLQATQCAFLSLAGQGRLPKKNLSQWLSQDRLYAQAYVRFIGGLISRVKLPLASDTSTTSTLPWRILTLLQGCLSGIMRELQFFEDTAKSHGLDLALTAKAGEDLGPNHITGIYIQLFDSFTAQGGENKSLLDGLVVLWATEKAYLDSWNFAKNQEGKSKGSDLDGGALREKFIPNWTSEEFKEFVKEIGDCLDAYADELAIREDDIKECLQTFKSVLILEEKFWPAVEGDATR

SEQ ID NO: 2029 - DNA, 1106 bp, Muscodor strobelii
  misc_feature: SGI EST ID NO. CUFF.5239.0
  misc_feature: Variant of the nucleotide sequence at SEQ ID NO 2027
gttttgttcatagtgtcttttacttatacaaaatgcatgcataaccgactctcctttcatatacggtagaggattatgtagttcaggcaatgcgtgtgatactatagtgatgtattgtacatttatcacttgttatttcatggcctgtctttgcacaatttttgcgactcttcaaaacggtcagcaaactggagcataagggtactatctgagagacgtctgacacggggaatttctcccgactcttccctttacatatcatacatcatctgctataccgcagcatacgcaatgatgaaccagcaatcccgtctgacctcaagattgctctctagctccgaaggacgattaccgaagaagaacctaagccaatggctatcgcaagatagactttacgcacaagcctacgtccgcttcattgggggactgatctcaagggtgaaactacctcttgcttccgacacaagcacgacaagtacactgccatggcgcattcttacattactgcaaggttgcctatcgggcatcatgcgggaactacagttctttgaggacactgctaaaagtcatggcttggatctggctcttactgctaaggctggagaagatctcggtccaaatcacattacggggatatatattcagctttttgactctttcacggcccaagggggtgagaacaagagcttgctagatggattagttgtgctctgggctacggagaaggcatacttggatagctggaactttgcaaagaaccaggagggcaagagcaaggggagtgatctggatggtggtgccttgagggagaagtttataccgaattggacctcggaagagttcaaggaatttgtgaaggagattggggattgtctggatgcatatgccgatgagctggcgatacgtgaggatgatattaaggaatgcttgcagactttcaagtcagtacttatccttgaggaaaagttttggcctgctgttgaaggggatgcaactcgataattacctgtaagtagagaaaataacggcccagttctaacgtcaatactctccaactatttgtttgcagtcttttttcccccttagatttgagatcaatcacgaat

SEQ ID NO: 2030 - DNA, 3453 bp, Muscodor strobelii
  misc_feature: SGI cDNA ID NO. 560294
  misc_feature: Encodes the peptide sequence at SEQ ID NO 2031
atggccgccggcgatctcattgacttcgacgtcatcgaaggacagaaggaaaacgttcaatctttgcctggaggacgttccgctaagaagcttgctgaagtcttctctccgggcccccttcacaagctcgacactccgactccgactgatacgaagaacataaatgactgtatcagagccgagtacgaggccgaggtcgaggctctgtccgagtccgacgatcccctagacgtctttgatcgatacgtgcgctggacctttgacgcatacccttcagcccaggcaacacctcaatcacaacttcatactctcttagagcgcgccaccaaggctttcattggctccgcgcaatacaagaacgatccaagatatttgaaactctggcttcactacatccatttcttctccgactctccgcgcgagactttcgttttcctgtcgcgacatagtataggagagagccttgccctgttctacgaagaatacgctgagtggctggaaggcgctggccgctggaaccaggcagaagaggtgtacaagcttggaatcgagcgagaggcccgccctgttcaacgtctcgtccgcaagtttggtgaatttgagaagcgtcgcgagcaacaatctggcgacacccacgagccgtcttctccagctttacctagtgttcgaccagcgctggttgcaaaggttgatccatacgcggcagcagctcgagcagcagcagaccctcaagcacctagacccaatatgggtgtcggagggcagtcttcaaggccgaccaagtcgaagcttgctatcttctccgacgcaagcgcagaagaacctgccatgtcgtccatgggcgcgggcgccaagggatgggatactataggatcgcttgcagatcgcaagaaggaaaacgtgatggaggccaagccctgggtgggagagacgctacagaccagtgtaaagaagagcaatgggccgaagatggcaatttttagggatccgtccaaggcaagaatagcagagtctcatattgttatagctgccgcaaaacaccaagtaattataaacccacaaagcggtaagagagaacgtgtctatgtaaacttagaagctatctatcccaccccagaagagccaggtaccgagctaagcttcgaggagctctgggctgacaaccgaggctggctcgacgcatgctggggtgaggaaagccttctagacacttcgcacgaagtattcgatgagaacagtctcgctgtcggcgtgctcactcaaaaggtccaagagaagatgatcatacaccaggatgtaattcttgatgagaatggcggactcaagaatccctccaaaacaaccactaaaggaaggaagaagaaggtaatggaggtgaacgagactcagataatcaaagccaatcttgattcgccatcaagaccaaaaataaagaagaaaagagcaatgtcatctgagcccaccatgacaatgcacactaaagctgcgaccgatgacatctacgaaattttcaatgctcccctcaaacctgcagatgagggcatcgacagcgacggagatgagtacatgactgacggcgactacacaagtggcgctgagtccaccggcactaccagacagattgctgagagtgaagctggtgacgatgacatcgaggacgacaagagcgtgagtgagtggtctgatttcagcactcgtaaacatgtaccgaatctggacgaccactgctgcgatccgcatcaatccgacaatgagggcgatgatgaggaagaattcacgcacgagactcatcgagattcaattcttacacccacagattcgcccccgcgcacaagatacattcccattccacctgaggactatgaaccgcctactcgaccgtttagggatccggttgaggtggctaacaaccgcctcccgttcatgacacctattaccgagagaactgaaacatcactcggcgtaaatacagaattcggtggacgaaacttcaaatcgcctagcaaactcagcaccacgaccgaggaggatgaggatgatgaggatttcgtcctcttgagtagcccacttcgcgagatcttgaatgatgatcgctcgcctgtcaagatcactcagcctgaactgccaaagccaaagacagcaatacatgctatctcgaaaggcccgatcattaaggagcgccaatgcaacccagtcgatacctccatccgagaggaaattctggccaagatgtatccccctttgtcttcgtatgacggcttttttgaccaccgtgaagagcgcagtgaccgaggctgcgaaattcgcaagttcaccaaagtcgttggtagaaatggcaagggcggcaatgacaagactggcaccattcagagccctgtagtgctcgagttcccagagcttatgggagaatataccctcaagcgcgaactgggtgctggagctttcgccccagtctacctcgttgagaactcttcacttgacgatgatgagaccggcgttgttgagatgggcaaaggcgccttcgcgacccgacagcgtgcccaccttgaggcgctcaagatggagcacccgcccactgcttgggagttccacatgatgcgcttggccgccgatcgtttaggacctcaacacagagctgccgcttctgtctcagcagctcacgagttgcatctgtatcaggatgaatgcttcttattcttgcctcttcatccatacggcacactgctcgatgttgtcaattacttccgtggtgaagcttctggtataatggacgagacgcttgccatgtttttcaccatcgagctgctgcggactgttgagacacttcactctaagcaaatcctgcatggtgatctcaaggctgataactgcttgttacgactcgacgaagcctctttctcgtcttcgcaaacacagctctcaagtcagtggtatgcagatggctctggcggctgggccaatcgcggagtagttctgatcgattttggacgcggtatcgacatgcgtgcttttgagaaagatgtccaattcatcgctgattggaaaacgagtgctgccgactgtgcagagatgcgtgagggtcgaccctggacttggcagatcgactatcatggtcttgccggcatcatccattgcctcctcttcggtcgttatatagacacggtacgcgctgatcaaggtggtcttggaacagctactggacgacgatacaaggttcgcgagtcattcaaaagatactggcagacgcatctttggactgagtgctttgatgttttgctcaatcctggctcgcatgttgacggcgagagcgattcaaggatgcctattaatcggagtctgaggagtgtccgagagagcatggagttgtggcttacgaagaactgcgagaaaggcgttggactgcgcagtctcattggcaaagtcgaggctatggctaaggctagaagacactga

SEQ ID NO: 2031 - protein, 1150 aa, Muscodor strobelii
  misc_feature: SGI Peptide ID NO. 560294
  misc_feature (55)..(183): Pfam Id: PF08311 Pfam Desc: Mad3/BUB1 homology region 1
  misc_feature (894)..(959): Pfam Id: PF00069 Pfam Desc: Protein kinase domain
  misc_feature (2)..(1143): NCBI GI: 46108930 Blast Desc: FG01347.1 [Gibberella zeae PH-1]
  misc_feature (2)..(1108): NCBI GI: 261357357 Blast Desc: checkpoint serine/threonine-protein kinase BUB1 [Verticillium albo-atrum VaMs.102]
  misc_feature (1)..(1149): NCBI GI: 116180662 Blast Desc: CHGG_00959 [Chaetomium globosum CBS 148.51] gi|88185256|gb|EAQ92724.1| CHGG_00959 [Chaetomium globosum CBS 148.51]
  misc_feature (5)..(1149): NCBI GI: 145616442 Blast Desc: MGG_14329 [Magnaporthe grisea 70-15] gi|145010143|gb|EDJ94799.1| MGG_14329 [Magnaporthe grisea 70-15]
  misc_feature (2)..(1148): NCBI GI: 156034681 Blast Desc: SS1G_13275 [Sclerotinia sclerotiorum 1980] gi|154698679|gb|EDN98417.1| SS1G_13275 [Sclerotinia sclerotiorum 1980]
  misc_feature (2)..(1148): NCBI GI: 154311154 Blast Desc: BC1G_06695 [Botryotinia fuckeliana B05.10] gi|150851099|gb|EDN26292.1| BC1G_06695 [Botryotinia fuckeliana B05.10]
  misc_feature (5)..(1149): NCBI GI: 164422506 Blast Desc: NCU10043 [Neurospora crassa OR74A] gi|157069686|gb|EAA28724.2| conserved [Neurospora crassa OR74A]
  misc_feature (5)..(1149): NCBI GI: 171687545 Blast Desc: protein product [Podospora anserina] gi|170943734|emb|CAP69386.1| protein product [Podospora anserina]
  misc_feature (2)..(1144): NCBI GI: 226282684 Blast Desc: checkpoint serine/threonine-protein kinase bub1 [Paracoccidioides brasiliensis Pb01]
  misc_feature (5)..(1143): NCBI GI: 212533133 Blast Desc: checkpoint protein kinase (SldA), [Penicillium marneffei ATCC 18224] gi|210072087|gb|EEA26176.1| checkpoint protein kinase (SldA), [Penicillium marneffei ATCC 18224]
  misc_feature (69)..(1142): SWISSPROT Homolog: EC 2.7.11.1 Non-specific serine/threonine protein kinase
MAAGDLIDFDVIEGQKENVQSLPGGRSAKKLAEVFSPGPLHKLDTPTPTDTKNINDCIRAEYEAEVEALSESDDPLDVFDRYVRWTFDAYPSAQATPQSQLHTLLERATKAFIGSAQYKNDPRYLKLWLHYIHFFSDSPRETFVFLSRHSIGESLALFYEEYAEWLEGAGRWNQAEEVYKLGIEREARPVQRLVRKFGEFEKRREQQSGDTHEPSSPALPSVRPALVAKVDPYAAAARAAADPQAPRPNMGVGGQSSRPTKSKLAIFSDASAEEPAMSSMGAGAKGWDTIGSLADRKKENVMEAKPWVGETLQTSVKKSNGPKMAIFRDPSKARIAESHIVIAAAKHQVIINPQSGKRERVYVNLEAIYPTPEEPGTELSFEELWADNRGWLDACWGEESLLDTSHEVFDENSLAVGVLTQKVQEKMIIHQDVILDENGGLKNPSKTTTKGRKKKVMEVNETQIIKANLDSPSRPKIKKKRAMSSEPTMTMHTKAATDDIYEIFNAPLKPADEGIDSDGDEYMTDGDYTSGAESTGTTRQIAESEAGDDDIEDDKSVSEWSDFSTRKHVPNLDDHCCDPHQSDNEGDDEEEFTHETHRDSILTPTDSPPRTRYIPIPPEDYEPPTRPFRDPVEVANNRLPFMTPITERTETSLGVNTEFGGRNFKSPSKLSTTTEEDEDDEDFVLLSSPLREILNDDRSPVKITQPELPKPKTAIHAISKGPIIKERQCNPVDTSIREEILAKMYPPLSSYDGFFDHREERSDRGCEIRKFTKVVGRNGKGGNDKTGTIQSPVVLEFPELMGEYTLKRELGAGAFAPVYLVENSSLDDDETGVVEMGKGAFATRQRAHLEALKMEHPPTAWEFHMMRLAADRLGPQHRAAASVSAAHELHLYQDECFLFLPLHPYGTLLDVVNYFRGEASGIMDETLAMFFTIELLRTVETLHSKQILHGDLKADNCLLRLDEASFSSSQTQLSSQWYADGSGGWANRGVVLIDFGRGIDMRAFEKDVQFIADWKTSAADCAEMREGRPWTWQIDYHGLAGIIHCLLFGRYIDTVRADQGGLGTATGRRYKVRESFKRYWQTHLWTECFDVLLNPGSHVDGESDSRMPINRSLRSVRESMELWLTKNCEKGVGLRSLIGKVEAMAKARRH

SEQ ID NO: 2032 - DNA, 1423 bp, Muscodor strobelii
  misc_feature: SGI EST ID NO. CUFF.5245.1
  misc_feature: Variant of the nucleotide sequence at SEQ ID NO 2030
ggaacaccacataggagagttgcgaccgtctcgcgtctcataatttcgacctcccatctacaaccaaccccaacagcatagtcttccaataacccccctcgccgcatgggcgccatcgaatccacatacaaaccagcatggccgccggcgatctcattgacttcgacgtcatcgaaggacagaaggaaaacgttcaatctttgcctggaggacgttccgctaagaagcttgctgaagtcttctctccgggcccccttcacaagctcgacactccgactccgactgatacgaagaacataaatgactgtatcagagccgagtacgaggccgaggtcgaggctctgtccgagtccgacgatcccctagacgtctttgatcgatacgtgcgctggacctttgacgcatacccttcagcccaggcaacacctcaatcacaacttcatactctcttagagcgcgccaccaaggctttcattggctccgcgcaatacaagaacgatccaagatatttgaaactctggcttcactacatccatttcttctccgactctccgcgcgagactttcgttttcctgtcgcgacatagtataggagagagccttgccctgttctacgaagaatacgctgagtggctggaaggcgctggccgctggaaccaggcagaagaggtgtacaagcttggaatcgagcgagaggcccgccctgttcaacgtctcgtccgcaagtttggtgaatttgagaagcgtcgcgagcaacaatctggcgacacccacgagccgtcttctccagctttacctagtgttcgaccagcgctggttgcaaaggttgatccatacgcggcagcagctcgagcagcagcagaccctcaagcacctagacccaatatgggtgtcggagggcagtcttcaaggccgaccaagtcgaagcttgctatcttctccgacgcaagcgcagaagaacctgccatgtcgtccatgggcgcgggcgccaagggatgggatactataggatcgcttgcagatcgcaagaaggaaaacgtgatggaggccaagccctgggtgggagagacgctacagaccagtgtaaagaagagcaatgggccgaagatggcaatttttagggatccgtccaaggcaagaatagcagagtctcatattgttatagctgccgcaaaacaccaagtaattataaacccacaaagcggtaagagagaacgtgtctatgtaaacttagaagctatctatcccaccccagaagagccaggtaccgagctaagcttcgaggagctctgggctgacaaccgaggctggctcgacgcatgctggggtgaggaaagccttctagacacttcgcacgaagtattcgatgagaacagtctcgctgtcggcgtgctcactcaaaaggtccaagagaagatgatcat

SEQ ID NO: 2033 - DNA, 453 bp, Muscodor strobelii
  misc_feature: SGI cDNA ID NO. 560295
  misc_feature: Encodes the peptide sequence at SEQ ID NO 2034
atgcgtgcttttgagaaagatgtccaattcatcgctgattggaaaacgagtgctgccgactgtgcagagatgcgtgagggtcgaccctggacttggcagatcgactatcatggtcttgccggcatcatccattgcctcctcttcggtcgttatatagacacggtacgcgctgatcaaggtggtcttggaacagctactggacgacgatacaaggttcgcgagtcattcaaaagatactggcagacgcatctttggactgagtgctttgatgttttgctcaatcctggctcgcatgttgacggcgagagcgattcaaggatgcctattaatcggagtctgaggagtgtccgagagagcatggagttgtggcttacgaagaactgcgagaaaggcgttggactgcgcagtctcattggcaaagtcgaggctatggctaaggctagaagacactga

SEQ ID NO: 2034 - protein, 150 aa, Muscodor strobelii
  misc_feature: SGI Peptide ID NO. 560295
  misc_feature (1)..(149): NCBI GI: 145616442 Blast Desc: MGG_14329 [Magnaporthe grisea 70-15] gi|145010143|gb|EDJ94799.1| MGG_14329 [Magnaporthe grisea 70-15]
  misc_feature (2)..(149): NCBI GI: 116180662 Blast Desc: CHGG_00959 [Chaetomium globosum CBS 148.51] gi|88185256|gb|EAQ92724.1| CHGG_00959 [Chaetomium globosum CBS 148.51]
  misc_feature (1)..(143): NCBI GI: 256735011 Blast Desc: [Nectria haematococca mpVI 77-13-4]
  misc_feature (1)..(143): NCBI GI: 46108930 Blast Desc: FG01347.1 [Gibberella zeae PH-1]
  misc_feature (1)..(149): NCBI GI: 164422506 Blast Desc: NCU10043 [Neurospora crassa OR74A] gi|157069686|gb|EAA28724.2| conserved [Neurospora crassa OR74A]
  misc_feature (1)..(148): NCBI GI: 169599821 Blast Desc: SNOG_02736 [Phaeosphaeria nodorum SN15] gi|111068347|gb|EAT89467.1| SNOG_02736 [Phaeosphaeria nodorum SN15]
  misc_feature (1)..(148): NCBI GI: 189191572 Blast Desc: mitotic spindle checkpoint component mad3 [Pyrenophora tritici-repentis Pt-1C-BFP] gi|187973731|gb|EDU41230.1| mitotic spindle checkpoint component mad3 [Pyrenophora tritici-repentis
  misc_feature (1)..(149): NCBI GI: 156034681 Blast Desc: SS1G_13275 [Sclerotinia sclerotiorum 1980] gi|154698679|gb|EDN98417.1| SS1G_13275 [Sclerotinia sclerotiorum 1980]
  misc_feature (1)..(108): NCBI GI: 261357357 Blast Desc: checkpoint serine/threonine-protein kinase BUB1 [Verticillium albo-atrum VaMs.102]
  misc_feature (1)..(148): NCBI GI: 154311154 Blast Desc: BC1G_06695 [Botryotinia fuckeliana B05.10] gi|150851099|gb|EDN26292.1| BC1G_06695 [Botryotinia fuckeliana B05.10]
  misc_feature (4)..(142): SWISSPROT Homolog: EC 2.7.11.1 Non-specific serine/threonine protein kinase
MRAFEKDVQFIADWKTSAADCAEMREGRPWTWQIDYHGLAGIIHCLLFGRYIDTVRADQGGLGTATGRRYKVRESFKRYWQTHLWTECFDVLLNPGSHVDGESDSRMPINRSLRSVRESMELWLTKNCEKGVGLRSLIGKVEAMAKARRH

SEQ ID NO: 2035 - DNA, 1335 bp, Muscodor strobelii
  misc_feature: SGI cDNA ID NO. 560296
  misc_feature: Encodes the peptide sequence at SEQ ID NO 2036
atgcctcgtccagctcgaaaggcgaccaaggcggctgcgccggctgtgcctgctaagaccaaggccaccaagcgtaagattgaggattcacccgagcctcccgctaagaagcgcgccgctacatccaaggcgaaagtaaaggatgaagacgacgattcaccaccggaagttgcagcaccgaaaaagcgcaagacagcagccaagggcgccaagacagaggatgcgacacccctggcagagcgcacacccatcacttcgctgcaaaaggcgatgtacatcggcgcacatgtcagctcggccggaggagtacaaaactcaatcaccaacacagtacacattggcgccaacgcattcgctctattcctcaagtcacagcggaaatggacgaacccaccgatgaccgaagaagccaaggagggcttcaagaacctagcagcagaacataagattgaagctcataagcattgcttgcctcacggatcatacttggtcaatttggcgacagcggataaggagaaggcagaccaggcgtacggcgctttcgttgatgatttgcagagatgtgaggctttgggcgttaaactgtataatttccatcccggaaatacgaatggcgataagcgtgaggcggcaattggaagaatcgccgcacaactgaacaaagcgcacaaggcgacgagcactgtaatcacggttcttgaaaacatggccggacagggcaatgttgtcggatcgacatttgaagatctccgtgatatcatcgctctcatcgacgacaagactcgcgttggagtatgcattgatacatgtcacaccttcgctgcaggttatgatctgcgctcacctgaggccttcgcagagacaatggcgaaattcgacgaaattgtcggaatctcatatctccgcgctttgcatctcaatgacagcaaggccccgttggactccaaccgagatctgcacgcaaatatcggaaccggattccttggtctcagagccttccacaacgtcatgaattacgacccccttatcggcttgccaatggtccttgaaacaccgatcgacaagaaaggggaggacggcaagtcagtagaggataggaaggtctgggcggatgagatcaagcttcttgagagcctcattggcatggatgccgacaccgatgagttccgtgctctcgaggagaagctgcaggctaaaggtgcaagcgagcgggcgaagctccagggccaagttggccgaaagaatgctaaagatgcgaagaaggcggccaaacccgcaaagaagcgaggagggaagaagaagaaggctgatacagacgaggaggattctgattaa

SEQ ID NO: 2036 - protein, 444 aa, Muscodor strobelii
  misc_feature: SGI Peptide ID NO. 560296
  misc_feature (107)..(328): Pfam Id: PF01261 Pfam Desc: Xylose isomerase-like TIM barrel
  misc_feature (73)..(419): NCBI GI: 46108932 Blast Desc: FG01348.1 [Gibberella zeae PH-1]
  misc_feature (7)..(444): NCBI GI: 116180664 Blast Desc: CHGG_00960 [Chaetomium globosum CBS 148.51] gi|88185257|gb|EAQ92725.1| CHGG_00960 [Chaetomium globosum CBS 148.51]
  misc_feature (55)..(441): NCBI GI: 39970001 Blast Desc: MGG_10609 [Magnaporthe grisea 70-15] gi|145010145|gb|EDJ94801.1| MGG_10609 [Magnaporthe grisea 70-15]
  misc_feature (55)..(419): NCBI GI: 256734302 Blast Desc: [Nectria haematococca mpVI 77-13-4]
  misc_feature (77)..(441): NCBI GI: 261357356 Blast Desc: DNA-(apurinic or apyrimidinic site) lyase [Verticillium albo-atrum VaMs.102]
  misc_feature (49)..(411): NCBI GI: 164422508 Blast Desc: NCU10044 [Neurospora crassa OR74A] gi|157069687|gb|EAA28725.2| NCU10044 [Neurospora crassa OR74A]
  misc_feature (74)..(424): NCBI GI: 154311164 Blast Desc: BC1G_06700 [Botryotinia fuckeliana B05.10] gi|150851104|gb|EDN26297.1| BC1G_06700 [Botryotinia fuckeliana B05.10]
  misc_feature (77)..(424): NCBI GI: 156034695 Blast Desc: SS1G_13282 [Sclerotinia sclerotiorum 1980] gi|154698686|gb|EDN98424.1| SS1G_13282 [Sclerotinia sclerotiorum 1980]
  misc_feature (10)..(411): NCBI GI: 171687543 Blast Desc: protein product [Podospora anserina] gi|170943733|emb|CAP69385.1| protein product [Podospora anserina]
  misc_feature (60)..(442): NCBI GI: 225557502 Blast Desc: DNA lyase [Ajellomyces capsulatus G186AR]
  misc_feature (75)..(404): SWISSPROT Homolog: EC 4.2.99.18 DNA-(apurinic or apyrimidinic site) lyase
MPRPARKATKAAAPAVPAKTKATKRKIEDSPEPPAKKRAATSKAKVKDEDDDSPPEVAAPKKRKTAAKGAKTEDATPLAERTPITSLQKAMYIGAHVSSAGGVQNSITNTVHIGANAFALFLKSQRKWTNPPMTEEAKEGFKNLAAEHKIEAHKHCLPHGSYLVNLATADKEKADQAYGAFVDDLQRCEALGVKLYNFHPGNTNGDKREAAIGRIAAQLNKAHKATSTVITVLENMAGQGNVVGSTFEDLRDIIALIDDKTRVGVCIDTCHTFAAGYDLRSPEAFAETMAKFDEIVGISYLRALHLNDSKAPLDSNRDLHANIGTGFLGLRAFHNVMNYDPLIGLPMVLETPIDKKGEDGKSVEDRKVWADEIKLLESLIGMDADTDEFRALEEKLQAKGASERAKLQGQVGRKNAKDAKKAAKPAKKRGGKKKKADTDEEDSD

SEQ ID NO: 2037 - DNA, 4270 bp, Muscodor strobelii
  misc_feature: SGI EST ID NO. CUFF.5249.0
  misc_feature: Variant of the nucleotide sequence at SEQ ID NO 2035
tgaaaaacgctcctgtgtccaacaaacatcaatgaaagcaaatacatgcacctgagcaaccgattgttgctctctgtgagaggtttgtctttgagagcgcacaatcctgtctactcgtcgcgtctacatctcgtctccacctcatttgcggccactgttacgaagcaggcaacttacagcaccatgcctcgtccagctcgaaaggcgaccaaggcggctgcgccggctgtgcctgctaagaccaaggccaccaagcgtaagattgaggattcacccgagcctcccgctaagaagcgcgccgctacatccaaggcgaaagtaaaggatgaagacgacgattcaccaccggaagttgcagcaccgaaaaagcgcaagacagcagccaagggcgccaagacagaggatgcgacacccctggcagagcgcacacccatcacttcgctgcaaaaggcgatgtacatcggcgcacatgtcagctcggccggaggagtacaaaactcaatcaccaacacagtacacattggcgccaacgcattcgctctattcctcaagtcacagcggaaatggacgaacccaccgatgaccgaagaagccaaggagggcttcaagaacctagcagcagaacataagattgaagctcataagcattgcttgcctcacggatcatacttggtcaatttggcgacagcggataaggagaaggcagaccaggcgtacggcgctttcgttgatgatttgcagagatgtgaggctttgggcgttaaactgtataatttccatcccggaaatacgaatggcgataagcgtgaggcggcaattggaagaatcgccgcacaactgaacaaagcgcacaaggcgacgagcactgtaatcacggttcttgaaaacatggccggacagggcaatgttgtcggatcgacatttgaagatctccgtgatatcatcgctctcatcgacgacaagactcgcgttggagtatgcattgatacatgtcacaccttcgctgcaggttatgatctgcgctcacctgaggccttcgcagagacaatggcgaaattcgacgaaattgtcggaatctcatatctccgcgctttgcatctcaatgacagcaaggccccgttggactccaaccgagatctgcacgcaaatatcggaaccggattccttggtctcagagccttccacaacgtcatgaattacgacccccttatcggcttgccaatggtccttgaaacaccgatcgacaagaaaggggaggacggcaagtcagtagaggataggaaggtctgggcggatgagatcaagcttcttgagagcctcattggcatggatgccgacaccgatgagttccgtgctctcgaggagaagctgcaggctaaaggtgcaagcgagcgggcgaagctccagggccaagttggccgaaagaatgctaaagatgcgaagaaggcggccaaacccgcaaagaagcgaggagggaagaagaagaaggctgatacagacgaggaggattctgattaaatatcgaggtaaaagaatgggcttcaggaagtctgaagatatttcgcctcgttgtaccaacagtattgcatggctccgttcatgcagggatttatctgcatctggcgaaaatggcgtttacttcgagtgagctattatacattattcattgcttagccaatcaatacccttcggctttatctcaatacttggcccttgattctggtcgttctttttcctgaaagatcatctatccttaagtatagagattctaactatcaattggctccctgcttacctatttatgcactaccaatcgctcttttttacagtcatagacacaaggaatgacatgtttgttttaatgataatttcagcattaggtagaaagcaatagtgcctatgtggatatctaaagcgaaggaaggaaaagcatgtacatgtcttgctcaaccaacgcctaacaaaatgttgtctttgtctcgtcatcatcaaagcagtctatgtacgcaacgcaatgctatgcaataccgcgataaccagactgcatatctggttgaattatcccgtcgtcagtgatctccaactcctatcattcttccctttgtgtgttctcttgacgcgattgctcatctcacgctgccacaaaatgtacaacgagtgttgtctgacaactttcaagttcttaacaatttgagcaatgatcgagtgagcatcaggcaagtgtggatcagtgtcttctagccttagccatagcctcgactttgccaatgagactgcgcagtccaacgcctttctcgcagttcttcgtaagccacaactccatgctctctcggacactcctcagactccgattaataggcatccttgaatcgctctcgccgtcaacatgcgagccaggattgagcaaaacatcaaagcactcagtccaaagatgcgtctgccagtatcttttgaatgactcgcgaaccttgtatcgtcgtccagtagctgttccaagaccaccttgatcagcgcgtaccgtgtctatataacgaccgaagaggaggcaatggatgatgccggcaagaccatgatagtcgatctgccaagtccagggtcgaccctcacgcatctctgcacagtcggcagcactcgttttccaatcagcgatgaattggacatctttctcaaaagcacgcatgtcgataccgcgtccaaaatcgatcagaactactccgcgattggcccagccgccagagccatctgcataccactgacttgagagctgtgtttgcgaagacgagaaagaggcttcgtcgagtcgtaacaagcagttatcagccttgagatcaccatgcaggatttgcttagagtgaagtgtctcaacagtccgcagcagctcgatggtgaaaaacatggcaagcgtctcgtccattataccagaagcttcaccacggaagtaattgacaacatcgagcagtgtgccgtatggatgaagaggcaagaataagaagcattcatcctgatacagatgcaactcgtgagctgctgagacagaagcggcagctctgtgttgaggtcctaaacgatcggcggccaagcgcatcatgtggaactcccaagcagtgggcgggtgctccatcttgagcgcctcaaggtgggcacgctgtcgggtcgcgaaggcgcctttgcccatctcaacaacgccggtctcatcatcgtcaagtgaagagttctcaacgaggtagactggggcgaaagctccagcacccagttcgcgcttgagggtatattctcccataagctctgggaactcgagcactacagggctctgaatggtgccagtcttgtcattgccgcccttgccatttctaccaacgactttggtgaacttgcgaatttcgcagcctcggtcactgcgctcttcacggtggtcaaaaaagccgtcatacgaagacaaagggggatacatcttggccagaatttcctctcggatggaggtatcgactgggttgcattggcgctccttaatgatcgggcctttcgagatagcatgtattgctgtctttggctttggcagttcaggctgagtgatcttgacaggcgagcgatcatcattcaagatctcgcgaagtgggctactcaagaggacgaaatcctcatcatcctcatcctcctcggtcgtggtgctgagtttgctaggcgatttgaagtttcgtccaccgaattctgtatttacgccgagtgatgtttcagttctctcggtaataggtgtcatgaacgggaggcggttgttagccacctcaaccggatccctaaacggtcgagtaggcggttcatagtcctcaggtggaatgggaatgtatcttgtgcgcgggggcgaatctgtgggtgtaagaattgaatctcgatgagtctcgtgcgtgaattcttcctcatcatcgccctcattgtcggattgatgcggatcgcagcagtggtcgtccagattcggtacatgtttacgagtgctgaaatcagaccactcactcacgctcttgtcgtcctcgatgtcatcgtcaccagcttcactctcagcaatctgtctggtagtgccggtggactcagcgccacttgtgtagtcgccgtcagtcatgtactcatctccgtcgctgtcgatgccctcatctgcaggtttgaggggagcattgaaaatttcgtagatgtcatcggtcgcagctttagtgtgcattgtcatggtgggctcagatgacattgctcttttcttctttatttttggtcttgatggcga

SEQ ID NO: 2038 - DNA, 1932 bp, Muscodor strobelii
  misc_feature: SGI cDNA ID NO. 560297
  misc_feature: Reduced expression when VOC is produced
  misc_feature: Encodes the peptide sequence at SEQ ID NO 2039
atggtccatcacgatcaccagcctcctatcggggagcttccagttccccatggacctcagagcgacgcagatggtcaatctccagataccaactataccaccgattacgaaaaaaagatcttctcacacgttatgcaacccgatgacttatatacgcccgaagggacctactgggccgaccttcctctcgctaagcgctgggccttcgtcaacaaagtcgacagcgcagagaccaaaaaggagcttagcactatctggtcaatgatgaaggaagaccccctgagcccggtctcctggtactttcgaaatgctgtgcttcccggtgccggtttgctcctcgagggctacgtgttgttctccattggcaatctgtcctccttgttcgccgatgtctggcctctgtgctggggaaaggaaccaacgaaatgcagtaagaactgggttgcatctgtaacctatctcgagatcgtcggcatcatggttggccagactggtgttggcattattggcgactggattggacgacgatggggactgattcaggatgccgttattatgttcctcggtctgctcctacttactgctgcttggggtacctcgttgcaggcctgggtaatcttctatgctttctcgctgtttttctatggtattggtgttggcggcgaataccccattactgcaacatcttccatggaaaacgctgtatcggccggcaaaatctcgacgaaagaggaccgtcttcaccgtggaagaaaagtcacgatggcctttcttatgcagggttggggtcaattcttcaaccaagttgttctgattgtgctattagtcatcttcaaccgaggtagtggtgagccgccatactcgcagacagccgcccaatacacattccggctgtcgttcgctttccctgctgttggaacgctgtggctcgtctactaccgtatctggaagatgaagtctgccggaaaacatctcgagaaggcgaagaagaaggccaatgtcacaggatacgacatgaagtctcttcaagtcacatttagccatttcggaggcagaatctttgccactgcaggcacgtggtttgcaaacgatgtcttcttctacggcaacaagcttttccagggtacctttatcaaactagttacggataacccgaactcgctcttgacgcaatggtcttggaacttgatcaacatcaccgtctcgttggccggatattacgccgccagtttcctcatcgataacaagatgtacggtcggaagaacatgcaacagatcggcttccttgtctgcttcctgacctttgtcatacccgccttcaaatacgactatttcaccagccacgcaggaattcacgcgttccaggccctgtacttcctttcgtctttcttcaaccagtttggacccaactcagtcaccttcctcgtgtctggcgaggtctaccctacgcaagtccgagctaccgcgcacggtttctccgccatgatcggcaaggctggtgcccttctcgcctcggtgctctacaactacatcgacaatcagactaagttctacgttgttccctggttcggtctcgccggcatgcttatgaccttgatatggcttccggacactacgggtcttgatctcaaggagcaagaacgccggtggcagtacattctggctgggaaggccgatgaataccatggaatcgccatccaccctcaacatctgtccttgtgggaacgttggatgggtgtcggcaagaactaccaccctggcctggacatgaaggctaagatccgcgacatgcgtgccgactgggaagagaaagaggcgacgagggctcagacgtcggatagcgaggccgccaacgacgaagatctcgacgacgatatgactcctgagatccaaaaactatttcaagggcttgccccctcaagtggtagatga

SEQ ID NO: 2039 - protein, 643 aa, Muscodor strobelii
  misc_feature: SGI Peptide ID NO. 560297
  misc_feature (103)..(550): Pfam Id: PF00083 Pfam Desc: Sugar (and other) transporter
  misc_feature (419)..(550): Pfam Id: PF00083 Pfam Desc: Sugar (and other) transporter
  misc_feature (3)..(635): NCBI GI: 116192529 Blast Desc: CHGG_05982 [Chaetomium globosum CBS 148.51] gi|88181895|gb|EAQ89363.1| CHGG_05982 [Chaetomium globosum CBS 148.51]
  misc_feature (1)..(639): NCBI GI: 46108858 Blast Desc: FG01311.1 [Gibberella zeae PH-1]
  misc_feature (1)..(641): NCBI GI: 256734322 Blast Desc: [Nectria haematococca mpVI 77-13-4]
  misc_feature (3)..(622): NCBI GI: 224492470 Blast Desc: MFS transporter [Colletotrichum higginsianum]
  misc_feature (3)..(635): NCBI GI: 171684609 Blast Desc: protein product [Podospora anserina] gi|170942265|emb|CAP67917.1| protein product [Podospora anserina]
  misc_feature (6)..(610): NCBI GI: 145611486 Blast Desc: MGG_00346 [Magnaporthe grisea 70-15] gi|145018764|gb|EDK03043.1| MGG_00346 [Magnaporthe grisea 70-15]
  misc_feature (2)..(635): NCBI GI: 85091369 Blast Desc: NCU07375 [Neurospora crassa OR74A] gi|28920257|gb|EAA29632.1| NCU07375 [Neurospora crassa OR74A]
  misc_feature (10)..(635): NCBI GI: 156063160 Blast Desc: SS1G_01696 [Sclerotinia sclerotiorum 1980] gi|154697032|gb|EDN96770.1| SS1G_01696 [Sclerotinia sclerotiorum 1980]
  misc_feature (2)..(635): NCBI GI: 154308966 Blast Desc: BC1G_08011 [Botryotinia fuckeliana B05.10] gi|150852637|gb|EDN27829.1| BC1G_08011 [Botryotinia fuckeliana B05.10]
  misc_feature (37)..(639): NCBI GI: 225559198 Blast Desc: Pi-transporter A-1 [Ajellomyces capsulatus G186AR]
  misc_feature: Useful for introducing or modulating the production of volatile compounds
MVHHDHQPPIGELPVPHGPQSDADGQSPDTNYTTDYEKKIFSHVMQPDDLYTPEGTYWADLPLAKRWAFVNKVDSAETKKELSTIWSMMKEDPLSPVSWYFRNAVLPGAGLLLEGYVLFSIGNLSSLFADVWPLCWGKEPTKCSKNWVASVTYLEIVGIMVGQTGVGIIGDWIGRRWGLIQDAVIMFLGLLLLTAAWGTSLQAWVIFYAFSLFFYGIGVGGEYPITATSSMENAVSAGKISTKEDRLHRGRKVTMAFLMQGWGQFFNQVVLIVLLVIFNRGSGEPPYSQTAAQYTFRLSFAFPAVGTLWLVYYRIWKMKSAGKHLEKAKKKANVTGYDMKSLQVTFSHFGGRIFATAGTWFANDVFFYGNKLFQGTFIKLVTDNPNSLLTQWSWNLINITVSLAGYYAASFLIDNKMYGRKNMQQIGFLVCFLTFVIPAFKYDYFTSHAGIHAFQALYFLSSFFNQFGPNSVTFLVSGEVYPTQVRATAHGFSAMIGKAGALLASVLYNYIDNQTKFYVVPWFGLAGMLMTLIWLPDTTGLDLKEQERRWQYILAGKADEYHGIAIHPQHLSLWERWMGVGKNYHPGLDMKAKIRDMRADWEEKEATRAQTSDSEAANDEDLDDDMTPEIQKLFQGLAPSSGR

SEQ ID NO: 2040 - DNA, 2899 bp, Muscodor strobelii
  misc_feature: SGI EST ID NO. CUFF.5398.0
  misc_feature: Variant of the nucleotide sequence at SEQ ID NO 2038
cgatcactgagaatttgtaaagctccgactgccgtcagaaacatcatggccaacgcccatctccgtcttcgtggggtcgtagatccacttaactcacaaatgcctctcgtctaggtaggtacacaggtctgtactcccactagcatggcagcgataatcacccaatgagcgtccaatatggccgtcgctgaactctacgtgtacctgtccagtctggtggaaacgttgccatctggattgaaatataaaccttcctccgcttagtgccttgcccgtctctcctgcgaactctggcctaactcttgcatctgacaatcgctttcccacatgttgatcagtagtctcgcacgtcgccgctgttgacattttacaccttggttccaccacgaagctcagctttgttggtatatgccagtccatccttcttaaagcgtcattcattctaagcctcatccatagaagtagacctaccgctcaaagcatcatggtccatcacgatcaccagcctcctatcggggagcttccagttccccatggacctcagagcgacgcagatggtcaatctccagataccaactataccaccgattacgaaaaaaagatcttctcacacgttatgcaacccgatgacttatatacgcccgaagggacctactgggccgaccttcctctcgctaagcgctgggccttcgtcaacaaagtcgacagcgcagagaccaaaaaggagcttagcactatctggtcaatgatgaaggaagaccccctgagcccggtctcctggtactttcgaaatgctgtgcttcccggtgccggtttgctcctcgagggctacgtgttgttctccattggcaatctgtcctccttgttcgccgatgtctggcctctgtgctggggaaaggaaccaacgaaatgcagtaagaactgggttgcatctgtaacctatctcgagatcgtcggcatcatggttggccagactggtgttggcgtacgtttactcctttcgaaccaggctgcttacactactctcttcgagatgggcactgacagtaaatgatcagattattggcgactggattggacgacgatggggactgattcaggatgccgttattatgttcctcggtctgctcctacttactgctgcttggggtacctcgttgcaggcctgggtaatcttctatgctttctcgctgtttttctatggtattggtgttggcggcgaataccccattactgcaacatcttccatggaaaacgctgtatcggccggcaaaatctcgacgaaagaggaccgtcttcaccgtggaagaaaagtcacgatggcctttcttatgcagggttggggtcaattcttcaaccaagttgttctgattgtgctattagtcatcttcaaccgaggtagtggtgagccgccatactcgcagacagccgcccaatacacattccggctgtcgttcgctttccctgctgttggaacgctgtggctcgtctactaccgtatctggaagatgaagtctgccggaaaacatctcgagaaggcgaagaagaaggccaatgtcacaggatacgacatgaagtctcttcaagtcacatttagccatttcggaggcagaatctttgccactgcaggcacgtggtttgcaaacgatgtcttcttctacggcaacaagcttttccagggtacctttatcaaactagttacggataacccgaactcgctcttgacgcaatggtcttggaacttgatcaacatcaccgtctcgttggccggatattacgccgccagtttcctcatcgataacaagatgtacggtcggaagaacatgcaacagatcggcttccttgtctgcttcctgacctttgtcatacccgccttcaaatacgactatttcaccagccacgcaggaattcacgcgttccaggccctgtacttcctttcgtctttcttcaaccagtttggacccaactcagtcaccttcctcgtgtctggcgaggtctaccctacgcaagtccgagctaccgcgcacggtttctccgccatgatcggcaaggctggtgcccttctcgcctcggtgctctacaactacatcgacaatcagactaagttctacgttgttccctggttcggtctcgccggcatgcttatgaccttgatatggcttccggacactacgggtcttgatctcaaggagcaagaacgccggtggcagtacattctggctgggaaggccgatgaataccatggaatcgccatccaccctcaacatctgtccttgtgggaacgttggatgggtgtcggcaagaactaccaccctggcctggacatgaaggctaagatccgcgacatgcgtgccgactgggaagagaaagaggcgacgagggctcagacgtcggatagcgaggccgccaacgacgaagatctcgacgacgatatgactcctgagatccaaaaactatttcaagggcttgccccctcaagtggtagatgagattaagaatgagaaaaggaaggcagcacaggcaggacagattgagccgtcggcctacatagaccgtgcgggtgccagtggaagcggaagcggaagcggaagcgatgggacgccaacactaagcgagaagtcaggttgagcagagtgcgagagatcttacgaaatgtgtgatacccaatctatagaatggtccttgtttctgtatatatctatgtgccatccagtatataataatccattagtacccagtaaccaagattgccgatcgacttctaagtactagcagttctttaaattcaagtcgtcagctggatgcgaggctcccaatacttcttgaggcttctagatgcttggaagaaagcaacaagtctgtaatgacgttgatagccgaagatcatcgcatgttggtt

SEQ ID NO: 2041 - DNA, 2628 bp, Muscodor strobelii
  misc_feature: SGI cDNA ID NO. 560298
  misc_feature: Reduced expression when VOC is produced
  misc_feature: Encodes the peptide sequence at SEQ ID NO 2042
atgccggtggcgaagtcggcaacacctcgaaggccgcctcggcagtccaaactcgactttgggaaggcgaagactccgactgggaagagaggttcggtcaatggcaatggcaacatcttgaatttcttcaagaaagtcgaggttgaagaacaactctttcttcccgacccatcgtccaacgccgtctcgacagccccagagactacagttgtctcagcgtcctacggcaaagatgaaatgttcggcgatggcaacgacgacgacgatgacattgaaaatgcactactacaaccagagcaaggcgcttcgaagcgacggaaagtgagccacgatgccactctgaccttggtgtcgcaaatcacagtcccaaaggccaatgcatcgccttctaatccaccgactccagacataccgcccatgccaaagccgaaacgtcgaggcaagggtggattcttgatcgattccgacaccgacgaggatgaagattatacaaagccagtcatcccgacgcctgcgaccgatgttacggtctctcccaagccattaccaatccacgctcccaacgacccggtaccacttgcgcccaatctacctaccgatgaaagctgtcctaacccatttgacgatacagctgttcccgaagacgaattagtggatgaccaataccgtaatctggatgatatcgatggacttttcgacgacgacgacgaattcgaggtcggtgaggagatccgtgaaagacggtttatggaacagcaggcgaggctcgaggctctagaagatggtgcatatatgtctgatgacatagacgacagctctagagctatgatacaagcgtgtcctctgtgtaatgccagcctagatggcgtgacatcagagcaagcaaccgtccatgttaacgcctgtctcgatggcaatcccttaccaccacctcaaccgtccctgaagtggtctaggtcgccatcgccattaccaggcacaatagatgcaccggaggtcagtaaacgatttgcccgggctgctgtccctcggccgggtcaagcaaacccaattgacttgggaggcggcccagccaagtcaacatccgcattcaccaagctgatgtcgggccatgctgaagattccgcatgggtctctgctgcggcatccgaaaatgcctctcgcggcaaacaagcctaccagcggacatgtcccttttataagatcatgcctggctttttcatatgtgtagatgcctttcgatatggcgctgtcgaaggctgcaaggcgtatttcttgagtcatttccacagtgatcattatataggcttgacagcaaattggtcacatggcccgatatattgcagcaaagtcaccgggagtcttgtaaagaatcagctacgaacagctgcgaagtgggtcagagaactcgagttcgaggagactatcgagattccaggtacagagggcgttacagtcacaatgataccggcaaaccactgtcctggtagttccttattcctattcgagaagaagctgggaaccgggcctggccatcgggctcaacggattcttcactgcggtgacttccgagcctgcaccgcccatgtcacacatccccttctgaaacctgaaaccattgacaaggtatcaggcaaaacaaggcaacagaaaattgatatttgctacctcgacacaacatatctcaatcctcgctattcattcccgccacaaaatgatgtcatcggagcgtgcgccgacttctgtcgttcgctatcaggggatacaaatgctgcgaacgatgcgctcgatgcactcaagcggggaaagaatacgacttcagtgagtcaatactttccaaaggacaagaaagactctgccacgaaagcgaaaagcgaagacacgaatggggacggcaagaaagataggctcctcgtgatctgtggtacgtactcgatcggaaaggagcgcatctgcaaagccattgcgcaggcactcaacacaaagatctttgcctcagcggccaagatcaagatctgctcgcaactgggagatccggagctagcggcattgatgacttcgaatccccatgaagcacaggtccacatgcagatgctaatggagatccgtgccgaaacgctacaagactatctggactcgtacaagccccatttttccaggatagtcgggttccgtccctcaggctggaacttccggtccccaaccacgacagcgaagaatgtctcggcaaacacatcgcctggcaccgtatccacgactagtattctgcatagtggtgcctggaggacgaggttcggggctaaagactttgttgcgcagagaggaagcacgcgcacggcgatgtgctttggcgttccatactcggaacattcttcattccgtgagctggccttgttttgcatgtcgttgaggattgaaaaagttgttcctactgttaatgtgggaagcgatgtcagtcggaagcgcatgaagagctggaccgataggtggctcgcggagagaaggaaaggtggtatcgttagggcgcttgaggaaaatgagggaaatgaggacgagaaagaaggtaaagagacaaagtcagggctttgggatgggaaggacggaaagggtggcggtgtctactggtag

SEQ ID NO: 2042 - protein, 875 aa, Muscodor strobelii
  misc_feature: SGI Peptide ID NO. 560298
  misc_feature (684)..(813): Pfam Id: PF07522 Pfam Desc: DNA repair metallo-beta-lactamase
  misc_feature (11)..(875): NCBI GI: 256734598 Blast Desc: NECHADRAFT_65714 [Nectria haematococca mpVI 77-13-4]
  misc_feature (9)..(875): NCBI GI: 46105466 Blast Desc: FG00361.1 [Gibberella zeae PH-1]
  misc_feature (36)..(875): NCBI GI: 145611480 Blast Desc: MGG_11590 [Magnaporthe grisea 70-15] gi|145018755|gb|EDK03034.1| MGG_11590 [Magnaporthe grisea 70-15]
  misc_feature (209)..(841): NCBI GI: 156063186 Blast Desc: SS1G_01709 [Sclerotinia sclerotiorum 1980] gi|154697045|gb|EDN96783.1| SS1G_01709 [Sclerotinia sclerotiorum 1980]
  misc_feature (5)..(848): NCBI GI: 171684601 Blast Desc: protein product [Podospora anserina] gi|170942261|emb|CAP67913.1| protein product [Podospora anserina]
  misc_feature (36)..(774): NCBI GI: 261356181 Blast Desc: DNA cross-link repair protein pso2/snm1 [Verticillium albo-atrum VaMs.102]
  misc_feature (72)..(841): NCBI GI: 119481915 Blast Desc: DNA repair protein Pso2/Snm1, [Neosartorya fischeri NRRL 181] gi|119409140|gb|EAW19089.1| DNA repair protein Pso2/Snm1, [Neosartorya fischeri NRRL 181]
  misc_feature (52)..(841): NCBI GI: 238488711 Blast Desc: DNA repair protein Pso2/Snm1, [Aspergillus flavus NRRL3357] gi|220697981|gb|EED54321.1| DNA repair protein Pso2/Snm1, [Aspergillus flavus NRRL3357]
  misc_feature (246)..(842): NCBI GI: 212544306 Blast Desc: DNA repair protein Pso2/Snm1, [Penicillium marneffei ATCC 18224] gi|210065276|gb|EEA19370.1| DNA repair protein Pso2/Snm1, [Penicillium marneffei ATCC 18224]
  misc_feature (246)..(848): NCBI GI: 189204073 Blast Desc: DNA cross-link repair protein pso2/snm1 [Pyrenophora tritici-repentis Pt-1C-BFP] gi|187985471|gb|EDU50959.1| DNA cross-link repair protein pso2/snm1 [Pyrenophora tritici-repentis
  misc_feature: Useful for introducing or modulating the production of volatile compounds
MPVAKSATPRRPPRQSKLDFGKAKTPTGKRGSVNGNGNILNFFKKVEVEEQLFLPDPSSNAVSTAPETTVVSASYGKDEMFGDGNDDDDDIENALLQPEQGASKRRKVSHDATLTLVSQITVPKANASPSNPPTPDIPPMPKPKRRGKGGFLIDSDTDEDEDYTKPVIPTPATDVTVSPKPLPIHAPNDPVPLAPNLPTDESCPNPFDDTAVPEDELVDDQYRNLDDIDGLFDDDDEFEVGEEIRERRFMEQQARLEALEDGAYMSDDIDDSSRAMIQACPLCNASLDGVTSEQATVHVNACLDGNPLPPPQPSLKWSRSPSPLPGTIDAPEVSKRFARAAVPRPGQANPIDLGGGPAKSTSAFTKLMSGHAEDSAWVSAAASENASRGKQAYQRTCPFYKIMPGFFICVDAFRYGAVEGCKAYFLSHFHSDHYIGLTANWSHGPIYCSKVTGSLVKNQLRTAAKWVRELEFEETIEIPGTEGVTVTMIPANHCPGSSLFLFEKKLGTGPGHRAQRILHCGDFRACTAHVTHPLLKPETIDKVSGKTRQQKIDICYLDTTYLNPRYSFPPQNDVIGACADFCRSLSGDTNAANDALDALKRGKNTTSVSQYFPKDKKDSATKAKSEDTNGDGKKDRLLVICGTYSIGKERICKAIAQALNTKIFASAAKIKICSQLGDPELAALMTSNPHEAQVHMQMLMEIRAETLQDYLDSYKPHFSRIVGFRPSGWNFRSPTTTAKNVSANTSPGTVSTTSILHSGAWRTRFGAKDFVAQRGSTRTAMCFGVPYSEHSSFRELALFCMSLRIEKVVPTVNVGSDVSRKRMKSWTDRWLAERRKGGIVRALEENEGNEDEKEGKETKSGLWDGKDGKGGGVYW

SEQ ID NO: 2043 - DNA, 297 bp, Muscodor strobelii
  misc_feature: SGI cDNA ID NO. 560299
  misc_feature: Encodes the peptide sequence at SEQ ID NO 2044
atgctgttcttcagcttcttcaagaccctcatcgaccacgaggtaacagtcgagctcaagaacgacatccagatccgcggcacgctgaagagcgtcgaccagtatctcaacatcaagctagaggacatccaagtcgtagaggagctcaagtatccgcacttaagttccgtcaagaatgtcttcatccgtggctcggtagtgcgctacgtccacctcccagcagcagcagtagatgtcccgctcctcgaggacgctacgagaagagaagctgcgaatcaagcagggaagggtaaatga

SEQ ID NO: 2044 - protein, 98 aa, Muscodor strobelii
  misc_feature: SGI Peptide ID NO. 560299
  misc_feature (5)..(72): Pfam Id: PF01423 Pfam Desc: LSM domain
  misc_feature (1)..(98): NCBI GI: 116192515 Blast Desc: conserved [Chaetomium globosum CBS 148.51] gi|88181888|gb|EAQ89356.1| conserved [Chaetomium globosum CBS 148.51]
  misc_feature (1)..(89): NCBI GI: 261356185 Blast Desc: DOM34-interacting protein [Verticillium albo-atrum VaMs.102]
  misc_feature (1)..(98): NCBI GI: 154308998 Blast Desc: conserved [Botryotinia fuckeliana B05.10] gi|150852653|gb|EDN27845.1| conserved [Botryotinia fuckeliana B05.10]
  misc_feature (1)..(98): NCBI GI: 171684599 Blast Desc: protein product [Podospora anserina] gi|170942260|emb|CAP67912.1| protein product [Podospora anserina]
  misc_feature (1)..(96): NCBI GI: 39974997 Blast Desc: small nuclear ribonucleoprotein LSM2 [Magnaporthe grisea 70-15] gi|145018756|gb|EDK03035.1| small nuclear ribonucleoprotein LSM2 [Magnaporthe grisea 70-15]
  misc_feature (1)..(98): NCBI GI: 226283602 Blast Desc: small nuclear ribonucleoprotein LSM2 [Paracoccidioides brasiliensis Pb01] gi|226288343|gb|EEH43855.1| small nuclear ribonucleoprotein LSM2 [Paracoccidioides brasiliensis Pb18]
  misc_feature (1)..(98): NCBI GI: 261203087 Blast Desc: small nuclear ribonucleoprotein LSM2 [Ajellomyces dermatitidis SLH14081] gi|239586542|gb|EEQ69185.1| small nuclear ribonucleoprotein LSM2 [Ajellomyces dermatitidis SLH14081]
  misc_feature (1)..(98): NCBI GI: 189204055 Blast Desc: PTRG_08031 [Pyrenophora tritici-repentis Pt-1C-BFP] gi|187985462|gb|EDU50950.1| PTRG_08031 [Pyrenophora tritici-repentis Pt-1C-BFP]
  misc_feature (1)..(98): NCBI GI: 169623821 Blast Desc: SNOG_15154 [Phaeosphaeria nodorum SN15] gi|111056259|gb|EAT77379.1| SNOG_15154 [Phaeosphaeria nodorum SN15]
  misc_feature (1)..(98): NCBI GI: 255930807 Blast Desc: Pc12g00570 [Penicillium chrysogenum Wisconsin 54-1255] gi|211581579|emb|CAP79684.1| Pc12g00570 [Penicillium chrysogenum Wisconsin 54-1255]
MLFFSFFKTLIDHEVTVELKNDIQIRGTLKSVDQYLNIKLEDIQVVEELKYPHLSSVKNVFIRGSVVRYVHLPAAAVDVPLLEDATRREAANQAGKGK

SEQ ID NO: 2045 - DNA, 3768 bp, Muscodor strobelii
  misc_feature: SGI EST ID NO. CUFF.5402.0
  misc_feature: Variant of the nucleotide sequence at SEQ ID NO 2043
cccatatgaaagcatcaatcacgtgacgtcaatggacctcaatctgcaattgcgctggatgccccacttcacttttggcgtgcgacctctagaccacagcttggatgcgaagtgcagcatacggaacaacttacttctaacctcgttgttggagtcgtcatcagcgaacaatctttcggcttggcagacaggaatcaatcaagatgctgttcttcagcttcttcaagaccctcatcgaccacgaggtaacagtcgagctcaagaacgacatccagatccgcggcacgctgaagagcgtcgaccagtatctcaacatcaagctagaggacatccaagtcgtagaggagctcaagtatccgcacttaagttccgtcaagaatgtcttcatccgtggctcggtagtgcgctacgtccacctcccagcagcagcagtagatgtcccgctcctcgaggacgctacgagaagagaagctgcgaatcaagcagggaagggtaaatgagggacgtaatcagagataaaggaccggatttggactgagtcgcacctgaaattcttagatagggcaacttccaccatcaagaccaccaagaaagagacagatagggattacccgtcttggtacaatggcgagatacagtgatatcgagctggcggctgagcaacggaagcatagtctgatatgccgccaggatcgtttcgctagaggcggaaacttgacagcaatgtcgccatcacatgagcttatgccgtattagagcagatgagcaatgcaaatatattctgcacatgtgtcctgagtcaatgatgttaaaccggacactcgcaagtcttatgtacatctacgtgctgaattgtagcccatatagcgttgcggaaccctaccagtagacaccgccaccctttccgtccttcccatcccaaagccctgactttgtctctttaccttctttctcgtcctcatttccctcattttcctcaagcgccctaacgataccacctttccttctctccgcgagccacctatcggtccagctcttcatgcgcttccgactgacatcgcttcccacattaacagtaggaacaactttttcaatcctcaacgacatgcaaaacaaggccagctcacggaatgaagaatgttccgagtatggaacgccaaagcacatcgccgtgcgcgtgcttcctctctgcgcaacaaagtctttagccccgaacctcgtcctccaggcaccactatgcagaatactagtcgtggatacggtgccaggcgatgtgtttgccgagacattcttcgctgtcgtggttggggaccggaagttccagcctgagggacggaacccgactatcctggaaaaatggggcttgtacgagtccagatagtcttgtagcgtttcggcacggatctccattagcatctgcatgtggacctgtgcttcatggggattcgaagtcatcaatgccgctagctccggatctcccagttgcgagcagatcttgatcttggccgctgaggcaaagatctttgtgttgagtgcctgcgcaatggctttgcagatgcgctcctttccgatcgagtacgtaccacagatcacgaggagcctatctttcttgccgtccccattcgtgtcttcgcttttcgctttcgtggcagagtctttcttgtcctttggaaagtattgactcactgaagtcgtattctttccccgcttgagtgcatcgagcgcatcgttcgcagcatttgtatcccctgatagcgaacgacagaagtcggcgcacgctccgatgacatcattttgtggcgggaatgaatagcgaggattgagatatgttgtgtcgaggtagcaaatatcaattttctgttgccttgttttgcctgataccttgtcaatggtttcaggtttcagaaggggatgtgtgacatgggcggtgcaggctcggaagtcaccgcagtgaagaatccgttgagcccgatggccaggcccggttcccagcttcttctcgaataggaataaggaactaccaggacagtggtttgccggtatcattgtgactgtaacgccctctgtacctggaatctcgatagtctcctcgaactcgagttctctgacccacttcgcagctgttcgtagctgattctttacaagactcccggtgactttgctgcaatatatcgggccatgtgaccaatttgctgtcaagcctatataatgatcactgtggaaatgactcaagaaatacgccttgcagccttcgacagcgccatatcgaaaggcatctacacatatgaaaaagccaggcatgatcttataaaagggacatgtccgctggtaggcttgtttgccgcgagaggcattttcggatgccgcagcagagacccatgcggaatcttcagcatggcccgacatcagcttggtgaatgcggatgttgacttggctgggccgcctcccaagtcaattgggtttgcttgacccggccgagggacagcagcccgggcaaatcgtttactgacctccggtgcatctattgtgcctggtaatggcgatggcgacctagaccacttcagggacggttgaggtggtggtaagggattgccatcgagacaggcgttaacatggacggttgcttgctctgatgtcacgccatctaggctggcattacacagaggacacgcttgtatcatagctctagagctgtcgtctatgtcatcagacatatatgcaccatcttctagagcctcgagcctcgcctgctgttccataaaccgtctttcacggatctcctcaccgacctcgaattcgtcgtcgtcgtcgaaaagtccatcgatatcatccagattacggtattggtcatccactaattcgtcttcgggaacagctgtatcgtcaaatgggttaggacagctttcatcggtaggtagattgggcgcaagtggtaccgggtcgttgggagcgtggattggtaatggcttgggagagaccgtaacatcggtcgcaggcgtcgggatgactggctttgtataatcttcatcctcgtcggtgtcggaatcgatcaagaatccacccttgcctcgacgtttcggctttggcatgggcggtatgtctggagtcggtggattagaaggcgatgcattggcctttgggactgtgatttgcgacaccaaggtcagagtggcatcgtggctcactttccgtcgcttcgaagcgccttgctctggttgtagtagtgcattttcaatgtcatcgtcgtcgtcgttgccatcgccgaacatttcatctttgccgtaggacgctgagacaactgtagtctctggggctgtcgagacggcgttggacgatgggtcgggaagaaagagttgttcttcaacctcgactttcttgaagaaattcaagatgttgccattgccattgaccgaacctctcttcccagtcggagtcttcgccttcccaaagtcgagtttggactgccgaggcggccttcgaggtgttgccgacttcgccaccggcatttgtgctgagggacggaaaagattggagatgttcttgcagaaaagcacgtgagtacggctgtcaaaacagacacatctacaacatggtttcgagcgtatgcagcaattatgcagggaatttgatactgtcttatcgtctgcttggaaagatcgtaggagtgaccattgcaacaaatgcaatataggtgcgcagggagtcgacttcgctcggagcactactggagtttgcccctcggggtcggtgacgtccactaaaatcgg

SEQ ID NO: 2046 - DNA, 933 bp, Muscodor strobelii
  misc_feature: SGI cDNA ID NO. 560300
  misc_feature: Encodes the peptide sequence at SEQ ID NO 2047
atgatggactacgcgcaataccagcaaccaccacaatcggcgcattctggttacacgagctcaagcgccggaaacaatattacatcaccaacgagtcacaacatacaccagcacggcgttcagacatcacctattctcccctctcaacatcagtcgtccgcacctggacaaacgcacaacatgtaccaaactcaatatggtgttcctcagcagagtatgcattatggcattcaagccgcggcaatggctgcaactgctgctgctgctggaggtaccggatactcgccttatatgacgtctgattcaggtctgacacaaacctcgccacgcatggcttctggaaccaagaaggaaacaagagatccacgatctcctcagcagatgacgaatgtcaaccagctatcgggacgccgaatgagtcaggttacgagtcctggcgtcaccaatacacaaatcatgaatcacgccggccctcgatccaatgtcgcgccaccaatgccaccaggacaatcaatgcagcagccccagtctcctgagatgactgcaggagtagaagagtcgcccctctatgtaaatgccaaacagtttcaccgtattctgaaaagaagggttgcacgacagcgcttggaggaagcattgcggttgacgagtaagggccggaagccttatctgcacgagtccaggcataatcacgcgatgcggcggccgcgcggtcctggtggtcgctttcttactgcagaagaggtagccgagattgaacgaaccaaaggtggcggtgacgataaagacggcagtgtgggtgatcttgctggaccgaaaactggctccaagagaaagtcagaggcagactcatcagcaccaaacaagaaatctaagaacgactcgcgaactcctgaagaggaagacgaggatgacgccgaggacgacagctaa

SEQ ID NO: 2047 - protein, 310 aa, Muscodor strobelii
  misc_feature: SGI Peptide ID NO. 560300
  misc_feature (186)..(243): Pfam Id: PF02045 Pfam Desc: CCAAT-binding transcription factor (CBF-B/NF-YA) subunit B
  misc_feature (1)..(298): NCBI GI: 116192513 Blast Desc: CHGG_05974 [Chaetomium globosum CBS 148.51] gi|88181887|gb|EAQ89355.1| CHGG_05974 [Chaetomium globosum CBS 148.51]
  misc_feature (1)..(305): NCBI GI: 171684597 Blast Desc: protein product [Podospora anserina] gi|170942259|emb|CAP67911.1| protein product [Podospora anserina]
  misc_feature (2)..(305): NCBI GI: 256735326 Blast Desc: NECHADRAFT_98863 [Nectria haematococca mpVI 77-13-4]
  misc_feature (1)..(305): NCBI GI: 85118254 Blast Desc: NCU03033 [Neurospora crassa OR74A] gi|28927227|gb|EAA36183.1| NCU03033 [Neurospora crassa OR74A] gi|38566961|emb|CAE76262.1| related to CCAAT-binding factor HAPB
  misc_feature (1)..(298): NCBI GI: 39974999 Blast Desc: MGG_00354 [Magnaporthe grisea 70-15] gi|145018757|gb|EDK03036.1| MGG_00354 [Magnaporthe grisea 70-15]
  misc_feature (2)..(305): NCBI GI: 46105448 Blast Desc: FG00352.1 [Gibberella zeae PH-1]
  misc_feature (1)..(298): NCBI GI: 261357359 Blast Desc: transcriptional activator HAP2 [Verticillium albo-atrum VaMs.102]
  misc_feature (1)..(292): NCBI GI: 156063218 Blast Desc: SS1G_01725 [Sclerotinia sclerotiorum 1980] gi|154697061|gb|EDN96799.1| SS1G_01725 [Sclerotinia sclerotiorum 1980]
  misc_feature (1)..(310): NCBI GI: 14579223 Blast Desc: AF283501_1 CCAAT-binding complex subunit HAP2 [Hypocrea jecorina]
  misc_feature (2)..(292): NCBI GI: 154294420 Blast Desc: BC1G_13730 [Botryotinia fuckeliana B05.10] gi|150844739|gb|EDN19932.1| BC1G_13730 [Botryotinia fuckeliana B05.10]
MMDYAQYQQPPQSAHSGYTSSSAGNNITSPTSHNIHQHGVQTSPILPSQHQSSAPGQTHNMYQTQYGVPQQSMHYGIQAAAMAATAAAAGGTGYSPYMTSDSGLTQTSPRMASGTKKETRDPRSPQQMTNVNQLSGRRMSQVTSPGVTNTQIMNHAGPRSNVAPPMPPGQSMQQPQSPEMTAGVEESPLYVNAKQFHRILKRRVARQRLEEALRLTSKGRKPYLHESRHNHAMRRPRGPGGRFLTAEEVAEIERTKGGGDDKDGSVGDLAGPKTGSKRKSEADSSAPNKKSKNDSRTPEEEDEDDAEDDS

SEQ ID NO: 2048 - DNA, 3839 bp, Muscodor strobelii
  misc_feature: SGI EST ID NO. CUFF.5288.2
  misc_feature: Variant of the nucleotide sequence at SEQ ID NO 2046
gtttgctctaaaaacagctctggccagtcagcgacgcagcgcataacgaaagcagggccctctccagttcccatcatccacccacacttccagcaaatcaacaagctccccagcactcgttagagatttgaccctctttgcgacgaggtgtaagagacctatcatcatagacaacactattctcattgtcactattggctctatcctcaatcaggtgatgaagactatctgcggattgcaatcagtcttaagctagtgccctggattcatcaaagcctcatcaacgccttgtcgtctttgacactgaatcccttgacgcacgactttctacttctcccaagtgggcgaacaaacgcattacgtctgcgcaacccactcggacagccaccataccccggcacactggtaccgccttttctacctccctaggcctggtctgtctcacccgtgtcgtcacagcctgaccgcaacacattctgcatatacatgactacttttgctgcctcccaaaaggcggctgcgcgccgttgtctgtagacacttgcctctacctgtttctccctcaaaagacatgtcaacatacataccttattcgatacttgcccaaagtctcgcgcttttttgtttcattgccctgtttctgtaattcttcatacgcagtattcatttttctgcattcaatcgctagattctcagttaactgacattgtcgtcttaaaagacgcccacacatcccccaggttggcaacgcgcagggtgaacccagaccctcgggaactcgttagagaaagttctccacaatcaaatagccgtcaagagaatctctagggattcgcatctcgagagctgtttcgtcagtcttgtttaggtttgcgatacaactgctgtatagcctcgcatctcttccagggactcacgtggttgttctgcgccatttcaagcccgaggatttgaggcactagcggtaccgccccacgacctacattcgatttgcatatgccgtgaaggccggccacctgcgtgcacctaccacatcatccagtgccagcgcatccacgcatacccaatagatagggtgcatattcaagcctagttgccgctattctagtgacgaaagactgttcaagacgcggtcataaccccagtgatctattatctggttgaataatccgactacgggtatcgatctgacatcagtaaacttacactgccaatcttacagtacgaatccattgcaatatagctctctggaacacttgagtgacgagacataaacacatctaactcttgttactgccaaatttaagtcgccagtttgcgagccatccattgccgataatgatggactacgcgcaataccagcaaccaccacaatcggcgcattctggttacacgagctcaagcgccggaaacaatattacatcaccaacgagtcacaacatacaccagcacggcgttcagacatcacctattctcccctctcaacatcagtcgtccgcacctggacaaacgcacaacatgtaccaaactcaatatggtgttcctcagcagagtatgcattatggcattcaagccgcggcaatggctgcaactgctgctgctgctggaggtaccggatactcgccttatatgacgtctgattcaggtctgacacaaacctcgccacgcatggcttctggaaccaagaaggaaacaagagatccacgatctcctcagcagatgacgaatgtcaaccagctatcgggacgccgaatgagtcaggttacgagtcctggcgtcaccaatacacaaatcatgaatcacgccggccctcgatccaatgtcgcgccaccaatgccaccaggacaatcaatgcagcagccccagtctcctgagatgactgcaggagtagaagagtcgcccctctatgtaaatgccaaacagtttcaccgtattctgaaaagaagggttgcacgacagcgcttggaggaagcattgcggttgacgagtaagggccggaagccttatctgcacgagtccaggcataatcacgcgatgcggcggccgcgcggtcctggtggtcgctttcttactgcagaagaggtagccgagattgaacgaaccaaaggtggcggtgacgataaagacggcagtgtgggtgatcttgctggaccgaaaactggctccaagagaaagtcagaggcagactcatcagcaccaaacaagaaatctaagaacgactcgcgaactcctgaagaggaagacgaggatgacgccgaggacgacagctaatcctggtgaatacctcgagcgcctacagtatttgctttgtttgctgttacgacgttacgacacccttgattctcactgcctatattgtttcacgcgcgactactactaaggcgatggcatacgggatggattcattcggatatgaggaagcgttgtgtttatattgcttttgagaggacgcagctgacgcaagttggctttccctttgtacaggagcctaaggtctcgcggtgattaaagtggcgtgtcggcaggcgccaggacactcgctctcgatcgtttcctacacaattcctcatcgctcacgcgatacttttcgtctcttcccttcacagtgtctaatgttggttgcatggtgcggacaactaaataggtcaggttgtacggagcgaaatttgcatggatgatacgcgaccacggaaggataccccatgaaataccagtatggactacttgtcctaaactccttcgattcatgtctactatgttgagacggctgtgtttcgatttctcactgtcctagcgatacagagaaacacaataaacgcccacttgccacatgttttcggcgtgacaatgcttcagaagcgccccgattaagaaatccaggttcagacacgatctgagtatatcgacagacacatccagattggacaacaacagaaaaaaacggcgtggcgcacaaattattaatttgtcaattaggatggaaatagacattcaatcaatgaatccgacgccggatgtatgaacactttgagcataggaaataacatatcaattctacgaagcggtttctaatttatctgtgatatattgtatgatgaaccgtcactgcagcccttgcatttttagtggtcaaacaggagtcaaaatagatggcaccgtcgaacaacagatcgactaatcctgcgatgataatacgactaatgaattacattgatcttcaaatattctaatatatagatatggcttaagtatggatggttttcatgaaaatctactgccggtataatcagagataggtaaaaaggaatgtcacttattttgttactggcctgattgttttaacagtgaatctatatcgttttgttgcgagcttgacgatgtttaaggcggcctctcgcacactagcatagaattctcggcgaatacaagcccgcatgcacatgcaccgagaacgatgacctgggctcgccgccactcaaaagtgtaactcgtcagtatagttcaaattggtagtcaagtctagcgtgtgtaaagtgtccggcaaatacactgccactatactgccagcttcggcgggtgaatagttttgcattacgtatcagagagtaagcattcgacttcctcaatatcaaggcttagatgctcttcgggctcttgatgaacgacgatgacggctacctgttagtttctgaaccctgcttttggtagatgccgacagactctcaatatcatatagattggcctctaaaattagcccgtttcgccccgagtccccgcagagcttggcatttctgtactgtagctttatggattgatattgtgatccagcaaaagcgaag

SEQ ID NO: 2049 - DNA, 732 bp, Muscodor strobelii
  misc_feature: SGI cDNA ID NO. 560301
  misc_feature: Encodes the peptide sequence at SEQ ID NO 2050
atgccttcagccaagccaaaactcccgcagttgaccacaccggtcactgcaacatttccatctgagctatctgctttgtctgcctctgcgaagacacctttatcggcgattcctacattcatcaaggaggagtttcccagtgacaagacaccaattagcccaccaatggcttatatggatttcctcaaggccatgtctatcccgtcaccagtgattcctgacaaaagatcatcatcgggcactgttacacctgaagaggagtcggcacaggaatcggcaccttcaaccgccagcagcgagcagactgactgctcatgtaagtgtggaggacataaatcgcctgcggggataccatctagcccagcctcaaatatgcctatgtcggcaccacccatgagtgttacctcattccccagcatgcttatccctccatctcctgcagtgtccacaacggactcccctatgagtgctacggctcgatcacccttcagcgcacgatccgtacgctcaccatttgactgggaagcggcacttaaatctcgatatgctcaagattgtcgggcacaaaaatcaacaggaaagagcgtgcggcatatacgcgaagttgtcacgaggacagtgacatatactccacgaatggccccagcaccgaagggcaagaggaggagaacacattctaactgcgcaaatgcggccaccaaagaggcaccaacaccagcagcttcgtcttaa

SEQ ID NO: 2050 - protein, 243 aa, Muscodor strobelii
  misc_feature: SGI Peptide ID NO. 560301
  misc_feature (1)..(225): NCBI GI: 256732602 Blast Desc: NECHADRAFT_100025 [Nectria haematococca mpVI 77-13-4]
  misc_feature (1)..(225): NCBI GI: 46125335 Blast Desc: FG07045.1 [Gibberella zeae PH-1]
  misc_feature (1)..(225): NCBI GI: 39975003 Blast Desc: MGG_00352 [Magnaporthe grisea 70-15] gi|145018758|gb|EDK03037.1| MGG_00352 [Magnaporthe grisea 70-15]
  misc_feature (3)..(229): NCBI GI: 116192509 Blast Desc: CHGG_05972 [Chaetomium globosum CBS 148.51] gi|88181885|gb|EAQ89353.1| CHGG_05972 [Chaetomium globosum CBS 148.51]
  misc_feature (3)..(229): NCBI GI: 85111655 Blast Desc: NCU03035 [Neurospora crassa OR74A] gi|28925801|gb|EAA34804.1| conserved [Neurospora crassa OR74A] gi|38566959|emb|CAE76260.1| [Neurospora crassa]
  misc_feature (8)..(234): NCBI GI: 171684593 Blast Desc: protein product [Podospora anserina] gi|170942257|emb|CAP67909.1| protein product [Podospora anserina]
  misc_feature (2)..(225): NCBI GI: 261191949 Blast Desc: conserved [Ajellomyces dermatitidis SLH14081] gi|239589698|gb|EEQ72341.1| conserved [Ajellomyces dermatitidis SLH14081]
  misc_feature (2)..(225): NCBI GI: 239608569 Blast Desc: conserved [Ajellomyces dermatitidis ER-3]
  misc_feature (3)..(224): NCBI GI: 225682315 Blast Desc: PABG_02830 [Paracoccidioides brasiliensis Pb03]
  misc_feature (3)..(224): NCBI GI: 226279822 Blast Desc: conserved [Paracoccidioides brasiliensis Pb01]
MPSAKPKLPQLTTPVTATFPSELSALSASAKTPLSAIPTFIKEEFPSDKTPISPPMAYMDFLKAMSIPSPVIPDKRSSSGTVTPEEESAQESAPSTASSEQTDCSCKCGGHKSPAGIPSSPASNMPMSAPPMSVTSFPSMLIPPSPAVSTTDSPMSATARSPFSARSVRSPFDWEAALKSRYAQDCRAQKSTGKSVRHIREVVTRTVTYTPRMAPAPKGKRRRTHSNCANAATKEAPTPAASS

SEQ ID NO: 2051 - DNA, 2553 bp, Muscodor strobelii
  misc_feature: SGI cDNA ID NO. 560302
  misc_feature: Encodes the peptide sequence at SEQ ID NO 2052
atggatgcctttgtcataaaactgaaaccccagggaacacattcggaacgaaataagccaccggtagacgagccgcccaaaaagaagctgaaactagaagcatccgacgaaagtgatgcagattcggatagatctcgcatcgagacaccaccagtacaggtgaaggctcggcccgcgctacgtcatgacgacacgaatgatacgattctagatactcacatacttgaaaatgacgatgactactcggctcggcccactgccattgagagttccttgcccgagatcaagtctgatgaggatgcgattgaagagtatgagaattttagagcttctcaaggcgagaatgatcaaactgccgcgtcaaggcttgattcgaggaaatgggtgaggggcaagagctctctatatgtggatgccttcaaccttgcccttgacactgtgcttgatgaggagtctcatcttttcgatgggagagagatacggatctttgaacagtggagagcactcgatcatgaggctcaattcttatatgtgcgcttatttctacgcaaaacctcttcttggcatcgcattgcccgtttgggctattatcatgatatcacagatacggaggctgctgcgaaagagttgcagaagaagatcaatttccctaaaatatctgagcccgcagaatctgatcatcaatctccacagccagatcttcaagcctttattcaagaacagtgtgatctaggggacacattcacctttgctgatgcctccgaggattttgtcgataccattgaagaagcagtctcgcttttgagtttggatgaagtcaaagccttagctaaagaagccaaggtccgtggcagaaacaaagctgacattgccaaggctatctgcaaaatgtgtaatcagcaagccggcttgttttccgtagggcttcggagggccgaatcggcagactcatctggacagatgacccctgaagaagattcccccggaccgcgcaagaacgaagactccaatagaagaaagcattttcttggaaagattctagccataactggccgttgcattcggctttcattgcccgttttcaagcttttcgaaagagttcatctcgtcttctacaggtccacagagtggacagagaagtctctaaccacgattattctggcgaagatttcgagacgcaactttccgcaatacatcgtcagccgatctgctcgcatattcgcttcgcgattgcagcttttagagttcgagactgcaatgaggaccgagttcacagtcgatagtattctggaattcaatggaccagttggagacgcaggattccgtaaagtggtcgatgcttttgagtctatctatcctcggtggaaaacgattgtacaagaggaacaagagaaagaagagaagctgtatgaatcaggtgaaggtgcgtatcttcggcgactcaatccagggcacgcatatacaagaatcattcataaggcaacttctgcccttggccggttgaaacaacacgagcgggagcatgatttgttgactgagctgctcgatcaacggctctttcatctagcccgtcgaggttcatggtaccagagaaaggctctactggaggaacactacatgcatgctctcagacccaatgctgcttacacgagtccagaaaagcaaaagacttattggaaaggtatcgcggttgcgacctgtgaaactgccctagaggaccccgactgccatctcaaatatcattacgacttgcaaaagcgggtcgttaagctggagaagcaactcaagattcctttacgactgcaacataattttggacatgtccgactgaaaaaaccggaggagcacacagtggaagggattcagatcaagaaactcgatcctgtaggaaagaatggcaggcaaccaagtaccaaaactatttgggtcgacgaggcagaaggcggaggggactgcagtgtagaagaaatgtgtttgagttggtatcggagtcaaggttggaaaggttaccatgccgagggcggcatcatacgaacactatttgcctatctattcttcgatattctctttctctacatacctaatgttttccagacagcctaccagacttgtcctctagacttgcatacggacgccttctacccaacgagagcgtcagagatcaatcatcgcttggttgaaattgcaaacggcggtgcgtcgaagataattaaagaggtggatgatcgagaacgggaaaatcggacatgtgtagtcgggttaaactgggactacgagcaagcagatctcctcgagctcgccgactctttcgacggtgcagcacttgctacagtatgcaaggtcatggcccaagagtatggacagagaggaggtgggattcctgacttgattttgtggaagacagaaccagagaaagaatgcatgttctcagaggtcaagagtgcaaacgatcgcttgagcgatacacaaagactttggatacatgtgctgactggcgctggtgtcagagtcgcactttgcaatgctgttgcgaaagaggttagagagatatag

SEQ ID NO: 2052 - protein, 850 aa, Muscodor strobelii
  misc_feature: SGI Peptide ID NO. 560302
  misc_feature (731)..(844): Pfam Id: PF08774 Pfam Desc: VRR-NUC domain
  misc_feature (1)..(849): NCBI GI: 46125337 Blast Desc: FG07046.1 [Gibberella zeae PH-1]
  misc_feature (1)..(849): NCBI GI: 39975005 Blast Desc: MGG_00351 [Magnaporthe grisea 70-15] gi|145018759|gb|EDK03038.1| MGG_00351 [Magnaporthe grisea 70-15]
  misc_feature (1)..(850): NCBI GI: 256733045 Blast Desc: [Nectria haematococca mpVI 77-13-4]
  misc_feature (84)..(850): NCBI GI: 171684591 Blast Desc: protein product [Podospora anserina] gi|170942256|emb|CAP67908.1| protein product [Podospora anserina]
  misc_feature (86)..(850): NCBI GI: 164427524 Blast Desc: NCU03036 [Neurospora crassa OR74A] gi|157071779|gb|EAA34805.2| conserved [Neurospora crassa OR74A]
  misc_feature (30)..(850): NCBI GI: 189203241 Blast Desc: coiled-coil domain-containing protein MTMR15 [Pyrenophora tritici-repentis Pt-1C-BFP] gi|187985055|gb|EDU50543.1| coiled-coil domain-containing protein
  misc_feature (30)..(850): NCBI GI: 169603221 Blast Desc: SNOG_04619 [Phaeosphaeria nodorum SN15] gi|111067259|gb|EAT88379.1| SNOG_04619 [Phaeosphaeria nodorum SN15]
  misc_feature (88)..(848): NCBI GI: 116192507 Blast Desc: CHGG_05971 [Chaetomium globosum CBS 148.51] gi|88181884|gb|EAQ89352.1| CHGG_05971 [Chaetomium globosum CBS 148.51]
  misc_feature (59)..(850): NCBI GI: 242803755 Blast Desc: conserved [Talaromyces stipitatus ATCC 10500] gi|218717583|gb|EED17004.1| conserved [Talaromyces stipitatus ATCC 10500]
  misc_feature (71)..(850): NCBI GI: 115400093 Blast Desc: conserved [Aspergillus terreus NIH2624] gi|114191301|gb|EAU33001.1| conserved [Aspergillus terreus NIH2624]
MDAFVIKLKPQGTHSERNKPPVDEPPKKKLKLEASDESDADSDRSRIETPPVQVKARPALRHDDTNDTILDTHILENDDDYSARPTAIESSLPEIKSDEDAIEEYENFRASQGENDQTAASRLDSRKWVRGKSSLYVDAFNLALDTVLDEESHLFDGREIRIFEQWRALDHEAQFLYVRLFLRKTSSWHRIARLGYYHDITDTEAAAKELQKKINFPKISEPAESDHQSPQPDLQAFIQEQCDLGDTFTFADASEDFVDTIEEAVSLLSLDEVKALAKEAKVRGRNKADIAKAICKMCNQQAGLFSVGLRRAESADSSGQMTPEEDSPGPRKNEDSNRRKHFLGKILAITGRCIRLSLPVFKLFERVHLVFYRSTEWTEKSLTTIILAKISRRNFPQYIVSRSARIFASRLQLLEFETAMRTEFTVDSILEFNGPVGDAGFRKVVDAFESIYPRWKTIVQEEQEKEEKLYESGEGAYLRRLNPGHAYTRIIHKATSALGRLKQHEREHDLLTELLDQRLFHLARRGSWYQRKALLEEHYMHALRPNAAYTSPEKQKTYWKGIAVATCETALEDPDCHLKYHYDLQKRVVKLEKQLKIPLRLQHNFGHVRLKKPEEHTVEGIQIKKLDPVGKNGRQPSTKTIWVDEAEGGGDCSVEEMCLSWYRSQGWKGYHAEGGIIRTLFAYLFFDILFLYIPNVFQTAYQTCPLDLHTDAFYPTRASEINHRLVEIANGGASKIIKEVDDRERENRTCVVGLNWDYEQADLLELADSFDGAALATVCKVMAQEYGQRGGGIPDLILWKTEPEKECMFSEVKSANDRLSDTQRLWIHVLTGAGVRVALCNAVAKEVREI

SEQ ID NO: 2053 - DNA, 498 bp, Muscodor strobelii
  misc_feature: SGI cDNA ID NO. 560303
  misc_feature: Encodes the peptide sequence at SEQ ID NO 2054
atgggtgacgaggttccccaaacacctgtccccttgccaacctacggccaacctgcacctccgtctcaagcagccataccagcgccagatatcgcgatggacaaccacgcattgaatcagcaacccagtaccgaagcaatcgccattgcgcccacgaccgaatcgaacactaaggatgttgcgatgacagacgcgcaggctgcctccccagcacgcggagccccgagcccagcacctgctcgaacgggtacccctctgcgcacaaatggccctgagaatacgtctcgtgctgcttcacagcatcctgatcccgcctttactatgcccgacgctgctccgcctcatggtgccccggttcgacagtatttaaatgctaaagtcgtcgctcatttgttggatggcatgaagaagctcgcccaggacaaacctgagaaaccactccaagcccttggcgaatttctcctcgagcgttccaaggagttcgagaaatcagagtag

SEQ ID NO: 2054 - protein, 165 aa, Muscodor strobelii
  misc_feature: SGI Peptide ID NO. 560303
  misc_feature (118)..(159): Pfam Id: PF05186 Pfam Desc: Dpy-30 motif
  misc_feature (53)..(162): NCBI GI: 46125339 Blast Desc: FG07047.1 [Gibberella zeae PH-1]
  misc_feature (30)..(162): NCBI GI: 156061677 Blast Desc: SS1G_02984 [Sclerotinia sclerotiorum 1980] gi|154700385|gb|EDO00124.1| SS1G_02984 [Sclerotinia sclerotiorum 1980]
  misc_feature (85)..(165): NCBI GI: 261357362 Blast Desc: conserved [Verticillium albo-atrum VaMs.102]
  misc_feature (30)..(162): NCBI GI: 154319420 Blast Desc: BC1G_02191 [Botryotinia fuckeliana B05.10] gi|150855849|gb|EDN31041.1| BC1G_02191 [Botryotinia fuckeliana B05.10]
  misc_feature (80)..(164): NCBI GI: 39975007 Blast Desc: MGG_00350 [Magnaporthe grisea 70-15] gi|145018760|gb|EDK03039.1| MGG_00350 [Magnaporthe grisea 70-15]
  misc_feature (108)..(162): NCBI GI: 85111659 Blast Desc: NCU03037 [Neurospora crassa OR74A] gi|28925803|gb|EAA34806.1| [Neurospora crassa OR74A]
  misc_feature (108)..(163): NCBI GI: 171684589 Blast Desc: protein product [Podospora anserina] gi|170942255|emb|CAP67907.1| protein product [Podospora anserina]
  misc_feature (93)..(163): NCBI GI: 225562845 Blast Desc: [Ajellomyces capsulatus G186AR]
  misc_feature (93)..(163): NCBI GI: 240279659 Blast Desc: [Ajellomyces capsulatus H143]
  misc_feature (60)..(162): NCBI GI: 255931759 Blast Desc: Pc12g05920 [Penicillium chrysogenum Wisconsin 54-1255] gi|211582055|emb|CAP80219.1| Pc12g05920 [Penicillium chrysogenum Wisconsin 54-1255]
MGDEVPQTPVPLPTYGQPAPPSQAAIPAPDIAMDNHALNQQPSTEAIAIAPTTESNTKDVAMTDAQAASPARGAPSPAPARTGTPLRTNGPENTSRAASQHPDPAFTMPDAAPPHGAPVRQYLNAKVVAHLLDGMKKLAQDKPEKPLQALGEFLLERSKEFEKSE

SEQ ID NO: 2055 - DNA, 2658 bp, Muscodor strobelii
  misc_feature: SGI EST ID NO. CUFF.5407.0
  misc_feature: Variant of the nucleotide sequence at SEQ ID NO 2053
acaagaattgagcctcatgatcgagtgctctccactgttcaaagatccgtatctctctcccatcgaaaagatgagactcctcatcaagcacagtgtcaagggcaaggttgaaggcatccacatatagagagctcttgcccctcacccatttcctcgaatcaagccttgacgcggcagtttgatcattctcgccttgagaagctctaaaattctcatactcttcaatcgcatcctcatcagacttgatctcgggcaaggaactctcaatggcagtgggccgagccgagtagtcatcgtcattttcaagtatgtgagtatctagaatcgtatcattcgtgtcgtcatgacgtagcgcgggccgagccttcacctgtactggtggtgtctcgatgcgagatctatccgaatctgcatcactttcgtcggatgcttctagtttcagcttctttttgggcggctcgtctaccggtggcttatttcgttccgaatgtgttccctggggtttcagttttatgacaaaggcatccatagttattttatgtaggagccatgtctaatgcaatatgaaccaaataagacccaagagacaaggattaagatacaagtgaagagattatgaagtgaggaggggaagacgcgatgtgggacgcggtgatggtgacaaggggcattaggcaacgcggtgtcacgggataacgtgagtctttctccaaggtcaattaatttgatcggcatggttgagcaccgctgtcccgccgccagctgcagccagcccactccgcttgttgctttgctattcctcaactaatccctaggccgacctccgacattcccagttgatgatctttccactgtatgtaccgggattgtaatcgggtctcaatccattaagcagtcacgatgggtgacgaggttccccaaacacctgtccccttgccaacctacggccaacctgcacctccgtctcaagcagccataccagcgccagatatcgcgatggacaaccacgcattgaatcagcaacccagtaccgaagcaatcgccattgcgcccacgaccgaatcgaacactaaggatgttgcgatgacagacgcgcaggctgcctccccagcacgcggagccccgagcccagcacctgctcgaacgggtacccctctgcgcacaaatggccctgagaatacgtctcgtgctgcttcacagcatcctgatcccgcctttactatgcccgacgctgctccgcctcatggtgccccggttcgacagtatttaaatgctaaagtcgtcgctcatttgttggatggcatgaagaagctcgcccaggacaaacctgagaaaccactccaagcccttggcgaatttctcctcgagcgttccaaggagttcgagaaatcagagtaggcgagtatcaagaaggtgcatcactaaatggattacgacttgcagcatcgtggcgttctaggatttgggcaaaatacggaggggtatagtgactgccgcggctggctcactggttcatgtatttgcctttcacgcgaaataccattgcatttgcacaggaattcaggattggttgagtacgtggtcttttgcgacctgtatcatcatatggccatgacatgcatctatctcattgcgatgatcgtgacgagggccaagtaatttgtggcatgaccgaaaaccaatagcctgcccatgtccgtaaactccgtgccccttttttccatgcgggttgttgtgtcacgtctaagcgacaatggtgctggcagtagcactctcgtacttccaggtgggaggaaggacaccgacggtctgtcgtcgcacgttagctatgctgctattcggtcaggaactggtaagaaactcaccttgtagtagcgggtaagacggtggatacgggactcgatgagaatgaggcggaacttggcgtctttgtccttgcgattgcgctcgaggtgctttcgtacggagacggccttcttgatcaacactgcagcggcatctcgttaacaactttgagggcccaaggcacgattcaagcttttgggggaaggactgcatagacatactgtagagatcctcggggagttcaggggcgagacctgaaagagaagaatcacactgtcagccttgaccgacaagtggctatcatgccgttgcattttatatgtatggtgggaatcatcgcatcgatgtcgactgtggtcgcgtatcgggtgcgtctcgttgggaggctctcatgacataccgttgcccttgagaatgcggaggatcttgtttccggtgacggccttgacctgggcaatgccgtgggagtcacgcaggatgacaccgatctgggagggggtggcacccttacgggcgagcttgatgatctggtcctcgacctgggcgggagtggtcttgagccaggccgggggagcgcgcgagtaggggagcgccgaagcggagataccctttcccttggagtgaagacgacccatcttggcggtggtgtttgtcgacggattcggagtgacgaggtggtggttgtcgcgacgttgccgttgtcgatgtcgattgtcgtgggctgcgtggaagtgtgggggttgcaaaagttcgggcgcaagaaattgtgtgtgtcgattagttggcctggtccgagcgctgtaaaggataccc

SEQ ID NO: 2056 - DNA, 456 bp, Muscodor strobelii
  misc_feature: SGI cDNA ID NO. 560304
  misc_feature: Reduced expression when VOC is produced
  misc_feature: Encodes the peptide sequence at SEQ ID NO 2057
atgggtcgtcttcactccaagggaaagggtatctccgcttcggcgctcccctactcgcgcgctcccccggcctggctcaagaccactcccgcccaggtcgaggaccagatcatcaagctcgcccgtaagggtgccaccccctcccagatcggtgtcatcctgcgtgactcccacggcattgcccaggtcaaggccgtcaccggaaacaagatcctccgcattctcaagggcaacggtctcgcccctgaactccccgaggatctctacatgttgatcaagaaggccgtctccgtacgaaagcacctcgagcgcaatcgcaaggacaaagacgccaagttccgcctcattctcatcgagtcccgtatccaccgtcttacccgctactacaagaccgtcggtgtccttcctcccacctggaagtacgagagtgctactgccagcaccattgtcgcttag

SEQ ID NO: 2057 - protein, 151 aa, Muscodor strobelii
  misc_feature: SGI Peptide ID NO. 560304
  misc_feature (1)..(60): Pfam Id: PF08069 Pfam Desc: Ribosomal S13/S15 N-terminal domain
  misc_feature (65)..(151): Pfam Id: PF00312 Pfam Desc: Ribosomal protein S15
  misc_feature (65)..(147): Pfam Id: PF00312 Pfam Desc: Ribosomal protein S15
  misc_feature (1)..(151): NCBI GI: 119189291 Blast Desc: CIMG_04693 [Coccidioides immitis RS] gi|240111292|gb|EER29445.1| 40S ribosomal protein S13, [Coccidioides posadasii C735 delta SOWgp]
  misc_feature (1)..(151): NCBI GI: 85111661 Blast Desc: 40S ribosomal protein S13 [Neurospora crassa OR74A] gi|28925804|gb|EAA34807.1| 40S ribosomal protein S13 [Neurospora crassa OR74A]
  misc_feature (1)..(151): NCBI GI: 242803760 Blast Desc: 40S ribosomal protein S13 [Talaromyces stipitatus ATCC 10500] gi|218717584|gb|EED17005.1| 40S ribosomal protein S13 [Talaromyces stipitatus ATCC 10500]
  misc_feature (1)..(151): NCBI GI: 154319422 Blast Desc: 40S ribosomal protein S13 [Botryotinia fuckeliana B05.10] gi|150855850|gb|EDN31042.1| 40S ribosomal protein S13 [Botryotinia fuckeliana B05.10]
  misc_feature (1)..(151): NCBI GI: 156061679 Blast Desc: 40S ribosomal protein S13 [Sclerotinia sclerotiorum 1980] gi|154700386|gb|EDO00125.1| 40S ribosomal protein S13 [Sclerotinia sclerotiorum 1980]
  misc_feature (1)..(151): NCBI GI: 46125341 Blast Desc: RS13_XENLA 40S RIBOSOMAL PROTEIN S13 [Gibberella zeae PH-1]
  misc_feature (1)..(151): NCBI GI: 226279089 Blast Desc: 40S ribosomal protein S13-1 [Paracoccidioides brasiliensis Pb01]
  misc_feature (1)..(151): NCBI GI: 212539748 Blast Desc: 40S ribosomal protein S13 [Penicillium marneffei ATCC 18224] gi|210067328|gb|EEA21420.1| 40S ribosomal protein S13 [Penicillium marneffei ATCC 18224]
  misc_feature (1)..(151): NCBI GI: 39975009 Blast Desc: 40S ribosomal protein S13 [Magnaporthe grisea 70-15] gi|145018761|gb|EDK03040.1| 40S ribosomal protein S13 [Magnaporthe grisea 70-15]
  misc_feature (1)..(151): NCBI GI: 119482888 Blast Desc: 40S ribosomal protein S13 [Neosartorya fischeri NRRL 181] gi|119409627|gb|EAW19575.1| 40S ribosomal protein S13 [Neosartorya fischeri NRRL 181]
  misc_feature: Useful for introducing or modulating the production of volatile compounds
MGRLHSKGKGISASALPYSRAPPAWLKTTPAQVEDQIIKLARKGATPSQIGVILRDSHGIAQVKAVTGNKILRILKGNGLAPELPEDLYMLIKKAVSVRKHLERNRKDKDAKFRLILIESRIHRLTRYYKTVGVLPPTWKYESATASTIVA

SEQ ID NO: 2058 - DNA, 2501 bp, Muscodor strobelii
  misc_feature: SGI EST ID NO. CUFF.5408.1
  misc_feature: Variant of the nucleotide sequence at SEQ ID NO 2056
gggtatcctttacagcgctcggaccaggccaactaatcgacacacacaatttcttgcgcccgaacttttgcaacccccacacttccacgcagcccacgacaatcgacatcgacaacggcaacgtcgcgacaaccaccacctcgtcactccgaatccgtcgacaaacaccaccgccaagatgggtcgtcttcactccaagggaaagggtatctccgcttcggcgctcccctactcgcgcgctcccccggcctggctcaagaccactcccgcccaggtcgaggaccagatcatcaagctcgcccgtaagggtgccaccccctcccagatcggtgtcatcctgcgtgactcccacggcattgcccaggtcaaggccgtcaccggaaacaagatcctccgcattctcaagggcaacggtctcgcccctgaactccccgaggatctctacatgttgatcaagaaggccgtctccgtacgaaagcacctcgagcgcaatcgcaaggacaaagacgccaagttccgcctcattctcatcgagtcccgtatccaccgtcttacccgctactacaagaccgtcggtgtccttcctcccacctggaagtacgagagtgctactgccagcaccattgtcgcttagacgtgacacaacaacccgcatggaaaaaaggggcacggagtttacggacatgggcaggctattggttttcggtcatgccacaaattacttggccctcgtcacgatcatcgcaatgagatagatgcatgtcatggccatatgatgatacaggtcgcaaaagaccacgtactcaaccaatcctgaattcctgtgcaaatgcaatggtatttcgcgtgaaaggcaaatacatgaaccagtgagccagccgcggcagtcactatacccctccgtattttgcccaaatcctagaacgccacgatgctgcaagtcgtaatccatttagtgatgcaccttcttgatactcgcctactctgatttctcgaactccttggaacgctcgaggagaaattcgccaagggcttggagtggtttctcaggtctgtatagctgtgagtaattgacgtgttcacgttcaatgaaacttcatataggtgtcttacttgtcctgggcgagcttcttcatgccatccaacaaatgagcgacgactttagcatttaaatactgtcgaaccggggcaccatgaggcggagcagcgtcgggcatagtaaaggcgggatcaggatgctgtgaagcagcacgagacgtattctcagggccatttgtgcgcagaggggtacccgttcgagcaggtgctgggctcggggctccgcgtgctggggactttattcggactgttagttacgtatgtgtctctgtgggcgccgaagagaacggagagcttacggcagcctgcgcgtctgtcatcgcaacatccttagtgttcgattcggtcgtgggcgcaatggcgattgcttcggtactgggttgctgattcaatgcgtggttgtccatcgcgatatctggcgctggtatggctgcttgagacggaggtgcaggttggccgtaggttggcaaggggacaggtgtttggggaacctcgtcacccatcgtgactgcttaatggattgagacccgattacaatcccggtacatacagtggaaagatcatcaactgggaatgtcggaggtcggcctagggattagttgaggaatagcaaagcaacaagcggagtgggctggctgcagctggcggcgggacagcggtgctcaaccatgccgatcaaattaattgaccttggagaaagactcacgttatcccgtgacaccgcgttgcctaatgccccttgtcaccatcaccgcgtcccacatcgcgtcttcccctcctcacttcataatctcttcacttgtatcttaatccttgtctcttgggtcttatttggttcatattgcattagacatggctcctacataaaataactatggatgcctttgtcataaaactgaaaccccagggaacacattcggaacgaaataagccaccggtagacgagccgcccaaaaagaagctgaaactagaagcatccgacgaaagtgatgcagattcggatagatctcgcatcgagacaccaccagtacaggtgaaggctcggcccgcgctacgtcatgacgacacgaatgatacgattctagatactcacatacttgaaaatgacgatgactactcggctcggcccactgccattgagagttccttgcccgagatcaagtctgatgaggatgcgattgaagagtatgagaattttagagcttctcaaggcgagaatgatcaaactgccgcgtcaaggcttgattcgaggaaatgggtgaggggcaagagctctctatatgtggatgccttcaaccttgcccttgacactgtgcttgatgaggagtctcatcttttcgatgggagagagatacggatctttgaacagtggagagcactcgatcatgaggctcaattcttgt

SEQ ID NO: 2059 - DNA, 651 bp, Muscodor strobelii
  misc_feature: SGI cDNA ID NO. 560305
  misc_feature: Elevated expression when VOC is produced
  misc_feature: Encodes the peptide sequence at SEQ ID NO 2060
atgtcatccaacgaaaacaacacatctcagcctcccccggcaccaccgctaccagactctctgcccaagccaccagtaccaagccaaccatcaccaacccaaaccgccacttctgagctctcagcaaaacgtgcaaacatggcagcgaaatatggaactgcaggtccatggaagccaaaaccgcacctcttctcatcaacaaccttcacaccatgtcacatgttcttctacggcaccttaatggaggcgtccttcatccaaatgataacccgctcccccgaagtcccgatcctaaaaaaaggctacatcaccggcttccgccccaagaagtgggccatgtatcctactctcattcccctctcagagctacccgatgagcaggtgacggcagaagagcgcgatctgaagatccacggcttgctttggaaatgcgagaactacgaccatttcaaggaactccaacgctacgagacttccaagtaccgcggcgaacgggtccagatccataccaacgatcccgaggatgagaacaaggaggttatcatcgaagatggcgtggtcttcgtctgggccatgaacccgcaaagtcccgatcttgaagagggagaattcgacattgcgcaatatcagaaagaaattaaattttcgtag

SEQ ID NO: 2060 - protein, 216 aa, Muscodor strobelii
  misc_feature: SGI Peptide ID NO. 560305
  misc_feature (74)..(191): Pfam Id: PF06094 Pfam Desc: AIG2-like family
  misc_feature (69)..(216): NCBI GI: 189197967 Blast Desc: conserved [Pyrenophora tritici-repentis Pt-1C-BFP] gi|187981269|gb|EDU47895.1| conserved [Pyrenophora tritici-repentis Pt-1C-BFP]
  misc_feature (69)..(214): NCBI GI: 169604170 Blast Desc: SNOG_05095 [Phaeosphaeria nodorum SN15] gi|111066366|gb|EAT87486.1| SNOG_05095 [Phaeosphaeria nodorum SN15]
  misc_feature (65)..(214): NCBI GI: 258570299 Blast Desc: [Uncinocarpus reesii 1704] gi|237904223|gb|EEP78624.1| [Uncinocarpus reesii 1704]
  misc_feature (57)..(213): NCBI GI: 189197915 Blast Desc: conserved [Pyrenophora tritici-repentis Pt-1C-BFP] gi|187981243|gb|EDU47869.1| conserved [Pyrenophora tritici-repentis Pt-1C-BFP]
  misc_feature (71)..(214): NCBI GI: 261358393 Blast Desc: conserved [Verticillium albo-atrum VaMs.102]
  misc_feature (70)..(214): NCBI GI: 119173663 Blast Desc: CIMG_10263 [Coccidioides immitis RS]
  misc_feature (65)..(214): NCBI GI: 225682759 Blast Desc: PABG_03274 [Paracoccidioides brasiliensis Pb03]
  misc_feature (65)..(214): NCBI GI: 226290200 Blast Desc: conserved [Paracoccidioides brasiliensis Pb18]
  misc_feature (75)..(216): NCBI GI: 46139875 Blast Desc: FG11452.1 [Gibberella zeae PH-1]
  misc_feature (69)..(214): NCBI GI: 255936045 Blast Desc: Pc13g06150 [Penicillium chrysogenum Wisconsin 54-1255] gi|211583669|emb|CAP91684.1| Pc13g06150 [Penicillium chrysogenum Wisconsin 54-1255]
  misc_feature: Useful for introducing or modulating the production of volatile compounds
MSSNENNTSQPPPAPPLPDSLPKPPVPSQPSPTQTATSELSAKRANMAAKYGTAGPWKPKPHLFSSTTFTPCHMFFYGTLMEASFIQMITRSPEVPILKKGYITGFRPKKWAMYPTLIPLSELPDEQVTAEERDLKIHGLLWKCENYDHFKELQRYETSKYRGERVQIHTNDPEDENKEVIIEDGVVFVWAMNPQSPDLEEGEFDIAQYQKEIKFS

SEQ ID NO: 2061 - DNA, 3719 bp, Muscodor strobelii
  misc_feature: SGI EST ID NO. CUFF.5519.0
  misc_feature: Variant of the nucleotide sequence at SEQ ID NO 2059
gtcgaagcttccaatttctgcattctaaccactcttcaacgcttgcaagctgtcgtgcggaagtctcagttagctctggcaattctacttggggaatccctggcgtgagcttctaattgtgagtctttgatctttcaaagtttagtattcaagtaataacatcaagtcgacataatatgtgaatcctgtcggtgctttctgttgtctttttggagcgtacgaggttttcgagcctggacttcattgggtgcctgggtgcctttttctggttcgcagtagcttgtttgattgcataccgagctggatactatgtctgctaagctacatgcatcaggatttgcggcaaacgggcctggtgtgatctcaatgtctcagctttttcaacttattttgtgtgcataaggtagtaatctagaataatgcccaagataaaagtgtgcttcctatttgctacgtcgcagtgttgttgcctgagacgccatgcagggctgtgttaccttgccaacaactaacaaccaacgacttccaatcctggaaacatctcgtcgcacttcctgtataagtgagacacttcacgcaataatacaaggcccgaggtcaatacacttcattatctcacagagtctctcatcccgatgtcatccaacgaaaacaacacatctcagcctcccccggcaccaccgctaccagactctctgcccaagccaccagtaccaagccaaccatcaccaacccaaaccgccacttctgagctctcagcaaaacgtgcaaacatggcagcgaaatatggaactgcaggtccatggaagccaaaaccgcacctcttctcatcaacaaccttcacaccatgtcacatgttcttctacggcaccttaatggaggcgtccttcatccaaatgataacccgctcccccgaagtcccgatcctaaaaaaaggctacatcaccggcttccgccccaagaagtgggccatgtatcctactctcattcccctctcagagctacccgatgagcaggtgacggcagaagagcgcgatctgaagatccacggcttgctttggaaatgcgagaactacgaccatttcaaggaactccaacgctacgagacttccaagtaccgcggcgaacgggtccagatccataccaacgatcccgaggatgagaacaaggaggttatcatcgaagatggcgtggtcttcgtctgggccatgaacccgcaaagtcccgatcttgaagagggagaattcgacattgcgcaatatcagaaagaaattaaattttcgtaggtgcaattagtgaactgctctaaaaatggttcgctttaccagattgtcatacttgggacccttgccgtgaaatgcacggctatgcattggcaatattcgggatctcgaatgtaacgcgggaattcccgcagtcgtgggttcagagggggtagacttcacatgctgctgttgcgtaaaaagtggactatgtttctagctggtatttgtttcacccaacctgttggtggggtatcaatcattatattctgttttaatagcaagtctatcatcgcccattttgccattcccgtacccgaatcgtcccgatcgtcaataaaaccatgagtttgctgtattcactgccgaggttagagccatttacatgttaacggcagtgcggaagttggatccagcatagacagcgttgcttccgagctcttcctcgatgcgaagaatctggttgagcttggcaagacgctcagagcggcaaggagcaccggtcttgatctggccagctcggataccgacaacaatgtcggcaatggtgacatcctcggtctctccagagcggtgagaaaccatgacaccccagccgtcagcgtacgagtccttggcagcctggatggactcggtcagcgttccgatctggttgaccttgaggagcaaagcgttggcagccttgagctcgatggccttcttgatgcggataggattggtgacagtcaagtcatcaccgacaatctggatatcttgagtcttgtagaagtaactccaggcctcccagtcatcctcagcgaaggggtcctcgatgctgacaatggggtacttcttagagagctcgccatacagggcagcaagctgctcgtaggtgatccacttctcgggatcagagtcggggttcttgaagtccaagtcgtacttcttagcgtcctccttgtaaaactcgctggaagcgacgtccatagcaatgtgcatcttgccagtgtagccagcggcctcgatagcctcagtgatgaggtcaagtgcctcttcagcggtctgaatatcgggggcaacaccaccctcgtctccaacgttgccagccgactgaccgtacttcttcttggcaagacccttcagcttctggtagacctcagcaccctggcgcatagcctcggtgaaagaaggagcatcagagggcacgatcatgaactcctggaaggcgagacgaccaccggcatgggagccaccattcaggacgttcatgaaagggacgggaaggacgtaaggcttcttggttccagccaagtcagagacgtgggcgtataggggaacgcccttctcagcagcaccagccttggcaatagccatgctaacaccgaggatggcattggcgccaagcttggtcttgttggcagttccgtcgagctcgttgaggaacttgtcgacagtgctctggtccttcacgtcgagacccttctcgatgacggcaggggcgatgacactgttgacattgtcgacggccttggagacacccttgccaccccacttggccttgtctccatcgcggagctcgcaagcctcgtgttgtcctacaaggagattagtcgcttgcggatcgtttgcttatgagttgtcacgtaccagtggaggcaccggaaggaacgatggcgcggtgaagaccagtttcggtgacgacgtcaacttccacggtgggattaccgcgagagtcatagacggaacgggcgtggatcttcttgatggccattttggatgtgcttttgttcgactgcgtggtgtgttggtatttgtttatgctagcaacaggtgttaagccggatcaacaaaggaagttgtggatggagaggggaaaggaaagaacgggtagggatagataaatttgctcaattagcttcgggttagtgacacgaatgattacaagatatatgccgcaatgggacgaaatattcgggttcaggtagtaagaacggattggaaggaagatgatgggatggtggggtagcttctgcaaacttgctcgaggaagcttgagaagaggcggggtgtttggtcgatgccactgagcttgaacgggcctgcactgagaggggatatagacatgtaggaattgtatgatcagcttgtagaaatgtctcacctttcgtaaagagccgattgcaaggcagtctaggtgtgaagagagaagggaagggaagaaaagatgggagagggggatgagagaaaaaaatatctggtcgagtgtttgaagagacgtcaagggccaagaggctctcgttcttgccttactgatgtttgtgcctacatcccacctcacctacgaaatacgtacttcatgtcactcacttcatatgctgctgattggtttcgaggttgtgaggggctggtgtccctagacgacgggtgaaagtgaccgaaaggtacctactcctcagacagaccgtgtttgtatctttc

SEQ ID NO: 2062 - DNA, 1317 bp, Muscodor strobelii
  misc_feature: SGI cDNA ID NO. 560306
  misc_feature: Encodes the peptide sequence at SEQ ID NO 2063
atggccatcaagaagatccacgcccgttccgtctatgactctcgcggtaatcccaccgtggaagttgacgtcgtcaccgaaactggtcttcaccgcgccatcgttccttccggtgcctccactggacaacacgaggcttgcgagctccgcgatggagacaaggccaagtggggtggcaagggtgtctccaaggccgtcgacaatgtcaacagtgtcatcgcccctgccgtcatcgagaagggtctcgacgtgaaggaccagagcactgtcgacaagttcctcaacgagctcgacggaactgccaacaagaccaagcttggcgccaatgccatcctcggtgttagcatggctattgccaaggctggtgctgctgagaagggcgttcccctatacgcccacgtctctgacttggctggaaccaagaagccttacgtccttcccgtccctttcatgaacgtcctgaatggtggctcccatgccggtggtcgtctcgccttccaggagttcatgatcgtgccctctgatgctccttctttcaccgaggctatgcgccagggtgctgaggtctaccagaagctgaagggtcttgccaagaagaagtacggtcagtcggctggcaacgttggagacgagggtggtgttgcccccgatattcagaccgctgaagaggcacttgacctcatcactgaggctatcgaggccgctggctacactggcaagatgcacattgctatggacgtcgcttccagcgagttttacaaggaggacgctaagaagtacgacttggacttcaagaaccccgactctgatcccgagaagtggatcacctacgagcagcttgctgccctgtatggcgagctctctaagaagtaccccattgtcagcatcgaggaccccttcgctgaggatgactgggaggcctggagttacttctacaagactcaagatatccagattgtcggtgatgacttgactgtcaccaatcctatccgcatcaagaaggccatcgagctcaaggctgccaacgctttgctcctcaaggtcaaccagatcggaacgctgaccgagtccatccaggctgccaaggactcgtacgctgacggctggggtgtcatggtttctcaccgctctggagagaccgaggatgtcaccattgccgacattgttgtcggtatccgagctggccagatcaagaccggtgctccttgccgctctgagcgtcttgccaagctcaaccagattcttcgcatcgaggaagagctcggaagcaacgctgtctatgctggatccaacttccgcactgccgttaacatgtaa

SEQ ID NO: 2063 - protein, 438 aa, Muscodor strobelii
  misc_feature: SGI Peptide ID NO. 560306
  misc_feature (143)..(436): Pfam Id: PF00113 Pfam Desc: Enolase, C-terminal TIM barrel domain
  misc_feature (2)..(134): Pfam Id: PF03952 Pfam Desc: Enolase, N-terminal domain
  misc_feature (1)..(438): NCBI GI: 46108928 Blast Desc: ENO_ALTAL Enolase (2-phosphoglycerate dehydratase) (2-phospho-D-glycerate hydro-lyase) (Major allergen Alt a 11) (Alt a XI) [Gibberella zeae PH-1]
  misc_feature (1)..(437): NCBI GI: 110592112 Blast Desc: enolase [Beauveria bassiana]
  misc_feature (1)..(438): NCBI GI: 156056683 Blast Desc: enolase [Sclerotinia sclerotiorum 1980] gi|154701858|gb|EDO01597.1| enolase [Sclerotinia sclerotiorum 1980]
  misc_feature (1)..(438): NCBI GI: 74661880 Blast Desc: ENO_CRYPA RecName: Full=Enolase; AltName: Full=2-phosphoglycerate dehydratase; AltName: Full=2-phospho-D-glycerate hydro-lyase gi|40806812|gb|AAR92205.1|
  misc_feature (1)..(438): NCBI GI: 212537563 Blast Desc: enolase/allergen Asp F 22 [Penicillium marneffei ATCC 18224] gi|210068679|gb|EEA22770.1| enolase/allergen Asp F 22 [Penicillium marneffei ATCC 18224]
  misc_feature (1)..(438): NCBI GI: 258564696 Blast Desc: phosphopyruvate hydratase [Uncinocarpus reesii 1704] gi|237908600|gb|EEP83001.1| phosphopyruvate hydratase [Uncinocarpus reesii 1704]
  misc_feature (1)..(438): NCBI GI: 171687549 Blast Desc: protein product [Podospora anserina] gi|170943736|emb|CAP69388.1| protein product [Podospora anserina]
  misc_feature (1)..(438): NCBI GI: 85089455 Blast Desc: enolase [Neurospora crassa OR74A] gi|74662419|sp|Q7RV85.1|ENO_NEUCR RecName: Full=Enolase; AltName: Full=2-phosphoglycerate dehydratase; AltName: hydro-lyase enolase
  misc_feature (1)..(438): NCBI GI: 169769647 Blast Desc: [Aspergillus oryzae RIB40] gi|238488036|ref|XP_002375256.1| enolase/allergen Asp F 22 [Aspergillus flavus NRRL3357] gi|3023683|sp|Q12560.1|ENO_ASPOR F
  misc_feature (1)..(438): NCBI GI: 154323902 Blast Desc: enolase [Botryotinia fuckeliana B05.10] gi|150842579|gb|EDN17772.1| enolase [Botryotinia fuckeliana B05.10]
  misc_feature (1)..(438): SWISSPROT Homolog: EC 4.2.1.11 Phosphopyruvate hydratase
MAIKKIHARSVYDSRGNPTVEVDVVTETGLHRAIVPSGASTGQHEACELRDGDKAKWGGKGVSKAVDNVNSVIAPAVIEKGLDVKDQSTVDKFLNELDGTANKTKLGANAILGVSMAIAKAGAAEKGVPLYAHVSDLAGTKKPYVLPVPFMNVLNGGSHAGGRLAFQEFMIVPSDAPSFTEAMRQGAEVYQKLKGLAKKKYGQSAGNVGDEGGVAPDIQTAEEALDLITEAIEAAGYTGKMHIAMDVASSEFYKEDAKKYDLDFKNPDSDPEKWITYEQLAALYGELSKKYPIVSIEDPFAEDDWEAWSYFYKTQDIQIVGDDLTVTNPIRIKKAIELKAANALLLKVNQIGTLTESIQAAKDSYADGWGVMVSHRSGETEDVTIADIVVGIRAGQIKTGAPCRSERLAKLNQILRIEEELGSNAVYAGSNFRTAVNM

SEQ ID NO: 2064 - DNA, 3136 bp, Muscodor strobelii
  misc_feature: SGI EST ID NO. CUFF.5520.2
  misc_feature: Variant of the nucleotide sequence at SEQ ID NO 2062
ctttcggtcactttcacccgtcgtctagggacaccagcccctcacaacctcgaaaccaatcagcagcatatgaagtgagtgacatgaagtacgtatttcgtaggtgaggtgggatgtaggcacaaacatcagtaaggcaagaacgagagcctcttggcccttgacgtctcttcaaacactcgaccagatatttttttctctcatccccctctcccatcttttcttcccttcccttctctcttcacacctagactgccttgcaatcggctctttacgaaagcataaacaaataccaacacaccacgcagtcgaacaaaagcacatccaaaatggccatcaagaagatccacgcccgttccgtctatgactctcgcggtaatcccaccgtggaagttgacgtcgtcaccgaaactggtcttcaccgcgccatcgttccttccggtgcctccactggacaacacgaggcttgcgagctccgcgatggagacaaggccaagtggggtggcaagggtgtctccaaggccgtcgacaatgtcaacagtgtcatcgcccctgccgtcatcgagaagggtctcgacgtgaaggaccagagcactgtcgacaagttcctcaacgagctcgacggaactgccaacaagaccaagcttggcgccaatgccatcctcggtgttagcatggctattgccaaggctggtgctgctgagaagggcgttcccctatacgcccacgtctctgacttggctggaaccaagaagccttacgtccttcccgtccctttcatgaacgtcctgaatggtggctcccatgccggtggtcgtctcgccttccaggagttcatgatcgtgccctctgatgctccttctttcaccgaggctatgcgccagggtgctgaggtctaccagaagctgaagggtcttgccaagaagaagtacggtcagtcggctggcaacgttggagacgagggtggtgttgcccccgatattcagaccgctgaagaggcacttgacctcatcactgaggctatcgaggccgctggctacactggcaagatgcacattgctatggacgtcgcttccagcgagttttacaaggaggacgctaagaagtacgacttggacttcaagaaccccgactctgatcccgagaagtggatcacctacgagcagcttgctgccctgtatggcgagctctctaagaagtaccccattgtcagcatcgaggaccccttcgctgaggatgactgggaggcctggagttacttctacaagactcaagatatccagattgtcggtgatgacttgactgtcaccaatcctatccgcatcaagaaggccatcgagctcaaggctgccaacgctttgctcctcaaggtcaaccagatcggaacgctgaccgagtccatccaggctgccaaggactcgtacgctgacggctggggtgtcatggtttctcaccgctctggagagaccgaggatgtcaccattgccgacattgttgtcggtatccgagctggccagatcaagaccggtgctccttgccgctctgagcgtcttgccaagctcaaccagattcttcgcatcgaggaagagctcggaagcaacgctgtctatgctggatccaacttccgcactgccgttaacatgtaaatggctctaacctcggcagtgaatacagcaaactcatggttttattgacgatcgggacgattcgggtacgggaatggcaaaatgggcgatgatagacttgctattaaaacagaatataatgattgataccccaccaacaggttgggtgaaacaaataccagctagaaacatagtccactttttacgcaacagcagcatgtgaagtctaccccctctgaacccacgactgcgggaattcccgcgttacattcgagatcccgaatattgccaatgcatagccgtgcatttcacggcaagggtcccaagtatgacaatctggtaaagcgaaccatttttagagcagttcactaattgcacctacgaaaatttaatttctttctgatattgcgcaatgtcgaattctccctcttcaagatcgggactttgcgggttcatggcccagacgaagaccacgccatcttcgatgataacctccttgttctcatcctcgggatcgttggtatggatctggacccgttcgccgcggtacttggaagtctcgtagcgttggagttccttgaaatggtcgtagttctcgcatttccaaagcaagccgtggatcttcagatcgcgctcttctgccgtcacctgctcatcgggtagctctgagaggggaatgagagtaggatacatggcccacttcttggggcggaagccggtgatgtagcctttttttaggatcgggacttcgggggagcgggttatcatttggatgaaggacgcctccattaaggtgccgtagaagaacatgtgacatggtgtgaaggttgttgatgagaagaggtgcggttttggcttccatggacctgcagttccatatttcgctgccatgtttgcacgttttgctgagagctcagaagtggcggtttgggttggtgatggttggcttggtactggtggcttgggcagagagtctggtagcggtggtgccgggggaggctgagatgtgttgttttcgttggatgacatcgggatgagagactctgtgagataatgaagtgtattgacctcgggccttgtattattgcgtgaagtgtctcacttatacaggaagtgcgacgagatgtttccaggattggaagtcgttggttgttagttgttggcaaggtaacacagccctgcatggcgtctcaggcaacaacactgcgacgtagcaaataggaagcacacttttatcttgggcattattctagattactaccttatgcacacaaaataagttgaaaaagctgagacattgagatcacaccaggcccgtttgccgcaaatcctgatgcatgtagcttagcagacatagtatccagctcggtatgcaatcaaacaagctactgcgaaccagaaaaaggcacccaggcacccaatgaagtccaggctcgaaaacctcgtacgctccaaaaagacaacagaaagcaccgacaggattcacatattatgtcgacttgatgttatta

SEQ ID NO: 2065 - DNA, 999 bp, Muscodor strobelii
  misc_feature: SGI cDNA ID NO. 560307
  misc_feature: Encodes the peptide sequence at SEQ ID NO 2066
atgggtggaaagcgcaagcgcggcgggaacaaggcaggcggcgctgacactgtccagccgaaccagaaacgctccaaaacagacaaccacgacaacagcgccaaaagtgagtcgaagacgttggagctcgataaatcaccatttccacacgaacttactcgtaatgatcgggagcgcgaggcaaacatatatgaactcctagggagccatgacagtgaagaacaaatcgccgctgccgaagcattgataactggtctactcgctggatccggagtagcgctgagaaggcatctcgagaagagattgtttcgtggacttgtgagctctcgcaagacatctcgtccgggatttagtcttgtgctcacggagatattgttacaattgtttggtgcaccagatcttgctgagaccaaattccctggcctcaccttcgacaagatactgaacgtactgattgatgcgacgaaaacgggtggaaacctgcctggccaagaacaaaaggatgcctactttggacgcctattcggtcttcgctgttttgttggagccacgattttattcaatggagaggaccgttggtctcaagtcctcaatttgctactcgagatggctgaagataagtcctggatgcggtctcattgcgcatgggttattgtcgatgctctcccgcaaatgggacaggcaagagcagagaccacaatccagaaattctgtgatcttggactagccaagacagccgaagggattggtctatggttgcgagcaagaagccagtatcccgaaatcagaatcccatcaaagccctggactgatccattaagcccgactgccatgcccgaagttgctcgagtactcaaggataacattgccaatgatacgggggaagatgcggcaatctcaaagatgaaaaatagcaactggactgcccaattacactttgtttgggatctgatcctggaagtcttccaggagaaagagcaaaaagaaaaaagcacgtaa

SEQ ID NO: 2066 - protein, 332 aa, Muscodor strobelii
  misc_feature: SGI Peptide ID NO. 560307
  misc_feature (1)..(330): NCBI GI: 85116616 Blast Desc: NCU02497 [Neurospora crassa OR74A] gi|28926893|gb|EAA35855.1| [Neurospora crassa OR74A] gi|38567092|emb|CAE76388.1| related to DNA polymerase V crassa]
  misc_feature (1)..(319): NCBI GI: 256734504 Blast Desc: NECHADRAFT_90099 [Nectria haematococca mpVI 77-13-4]
  misc_feature (1)..(322): NCBI GI: 154302193 Blast Desc: BC1G_09777 [Botryotinia fuckeliana B05.10] gi|150855551|gb|EDN30743.1| BC1G_09777 [Botryotinia fuckeliana B05.10]
  misc_feature (1)..(331): NCBI GI: 116181036 Blast Desc: CHGG_01146 [Chaetomium globosum CBS 148.51] gi|88185443|gb|EAQ92911.1| CHGG_01146 [Chaetomium globosum CBS 148.51]
  misc_feature (1)..(330): NCBI GI: 39972867 Blast Desc: MGG_07728 [Magnaporthe grisea 70-15] gi|145012495|gb|EDJ97149.1| MGG_07728 [Magnaporthe grisea 70-15]
  misc_feature (1)..(322): NCBI GI: 156063524 Blast Desc: SS1G_01880 [Sclerotinia sclerotiorum 1980] gi|154697214|gb|EDN96952.1| SS1G_01880 [Sclerotinia sclerotiorum 1980]
  misc_feature (1)..(328): NCBI GI: 171695488 Blast Desc: protein product [Podospora anserina] gi|170947986|emb|CAP60150.1| protein product [Podospora anserina]
  misc_feature (44)..(325): NCBI GI: 261356492 Blast Desc: conserved [Verticillium albo-atrum VaMs.102]
  misc_feature (63)..(331): NCBI GI: 119469431 Blast Desc: DNA polymerase V, [Neosartorya fischeri NRRL 181] gi|119406087|gb|EAW16038.1| DNA polymerase V, [Neosartorya fischeri NRRL 181]
  misc_feature (63)..(319): NCBI GI: 70991717 Blast Desc: DNA polymerase V [Aspergillus fumigatus Af293] gi|66848340|gb|EAL88669.1| DNA polymerase V, [Aspergillus fumigatus Af293] gi|159124270|gb|EDP49388.1| DNA polymerase V,
  misc_feature (63)..(325): SWISSPROT Homolog: EC 2.7.7.7 DNA-directed DNA polymerase
MGGKRKRGGNKAGGADTVQPNQKRSKTDNHDNSAKSESKTLELDKSPFPHELTRNDREREANIYELLGSHDSEEQIAAAEALITGLLAGSGVALRRHLEKRLFRGLVSSRKTSRPGFSLVLTEILLQLFGAPDLAETKFPGLTFDKILNVLIDATKTGGNLPGQEQKDAYFGRLFGLRCFVGATILFNGEDRWSQVLNLLLEMAEDKSWMRSHCAWVIVDALPQMGQARAETTIQKFCDLGLAKTAEGIGLWLRARSQYPEIRIPSKPWTDPLSPTAMPEVARVLKDNIANDTGEDAAISKMKNSNWTAQLHFVWDLILEVFQEKEQKEKST

SEQ ID NO: 2067 - DNA, 3382 bp, Muscodor strobelii
  misc_feature: SGI EST ID NO. CUFF.5291.0
  misc_feature: Variant of the nucleotide sequence at SEQ ID NO 2065
ctgaattcaattcaattcaattcaacaattgcatgtgtaatctttaaagattcctggatctcactcaatctcaaggcctatcggtagcaaaagggaataatcaagcatccgtgatgggtggaaagcgcaagcgcggcgggaacaaggcaggcggcgctgacactgtccagccgaaccagaaacgctccaaaacagacaaccacgacaacagcgccaaaagtgagtcgaagacgttggagctcgataaatcaccatttccacacgaacttactcgtaatgatcgggagcgcgaggcaaacatatatgaactcctagggagccatgacagtgaagaacaaatcgccgctgccgaagcattgataactggtctactcgctggatccggagtagcgctgagaaggcatctcgagaagagattgtttcgtggacttgtgagctctcgcaagacatctcgtccgggatttagtcttgtgctcacggagatattgttacaattgtttggtgcaccagatcttgctgagaccaaattccctggcctcaccttcgacaagatactgaacgtactgattgatgcgacgaaaacgggtggaaacctgcctggccaagaacaaaaggatgcctactttggacgcctattcggtcttcgctgttttgttggagccacgattttattcaatggagaggaccgttggtctcaagtcctcaatttgctactcgagatggctgaagataagtcctggatgcggtctcattgcgcatgggttattgtcgatgctctcccgcaaatgggacaggcaagagcagagaccacaatccagaaattctgtgatcttggactagccaagacagccgaagggattggtctatggttgcgagcaagaagccagtatcccgaaatcagaatcccatcaaagccctggactgatccattaagcccgactgccatgcccgaagttgctcgagtactcaaggataacattgccaatgatacgggggaagatgcggcaatctcaaagatgaaaaatagcaactggactgcccaattacactttgtttgggatctgatcctggaagtcttccaggagaaagagcaaaaagaaaaaagcacgtaaaggaccagttcaaactattttggactacggtcattgacgatggcttgttttccaaaaatgccacggacggtcaaaagtttcgtgggttcatgttgttccaaaagtatcttcagaactttgcatcattagacaagaccttcgtcaaggaactattttcacggaacttgatgaagtgtctggtcaatcaggctgcaaaagaagatcgctatcttcaccgtgcatcgctgaagagcttgcaatcattagagaagagtgtagaggtcaacccagatctgctcataccgatcttgagagaactcatcggcaaatttgggctgtatgattttgaccagcgcacgaatacgaagacgattgagagcctattgcaattcgttacgccacagaattccaagaaagtcctcaaacttctacaggagccagttttgaaccttcagaacacgcctgatgaagccgaaaagcttcggcaagcttacgctgaatatgttttcaagatgacgattcagactaagtcatcttcgtctgatgatattggcgctgatggtaaaagcgctcttgaggtcggcgtcctcgaattagcggcatgcgcgtattcgacgcgtcaggactttgtcccggagctctccgctaggacacgagatgtcttccgccaacggctctcgtcggcattcgctagagtgactaaacaaacgagtcacacagaatatctttgtaatgctgttgtttcagtgaaacctacggctgtggcaatgaacgacgaactcgagaccgcctgcagaacagccgtgaaagcaatgagaggactccttaagaatcattcgaagacggacaatgattctgccggcgcatccctgggtctcgcactgctctatgccgccaccatcttgcaattatatgatggagccccggacgccctggacatcttacaagacattcaagcctgttcagaaagaatggatagtaagggaactggcacatccgaaatactcgtcgaaattttgaaagcattggtgtctaggcagtcacctatgatgcggcaaattagcgagcaagtattcgaccttttcgctgcacaaatgacttccaaggccctcgaactcctcacagagccgttaatggtagaagagaaccagagaggctttgaagccttattcgagaatgctgacgatggtgatgatattgccatggatgacgcgtcgagttctaactccggaagtgacaacggggatggcgaagacaatatatctgagattggctcagatgttgagtttgtcaccctcaacggagaggacttggcaaatggagatgacgaagatgaccaagacgaagatgacaaagaagacaaaggcagcgctagtgaaggagagcctgaggatgcagacttggtagctctggatgatgctcttgctaaagtccttaatagtcatcgccttgatcaggaccaagaggccgaaacatcggatgatgattcggatatgacggactcagagatgatggcgttagacgagaagctcgtggaggtcttcaaacagcgggcaaaaaaatccaaccagaaaaacgaaaagagagatgcgaaagaatctgtggtcaatcttaagcaccgggtgctggatttactgagcatctatgtcaagcgcgaggcatcgaatgttctggctttccaaatccttctaccgcttttggaacttgttcggacatcgactgtaaaacccctggcaaataaggctatcaatatcctttcagagttcggaaagatctcaaagaaaacacgatcgaaggagactcaaatcgatccaaatactcaatttgaattcttagagaaaattcatgaagaggctggcaaggatacatcacatgcgttcgccaaagctgcctccacggcgagcttgttagtggcctctggactgtgggcagcagatagcgggcatgtcgatagaatcaatgcggtatacgcaaagacatttgccgattgtcagaagggcaagacgaagatgcagggtgcattcttctcggactggatcaactggggtatggcccatgttgcctcagccgctccatgaacactttagcatgttgatagattgggtgtatattagacagcgtgcggtagtaaacactaggtgacggataaccgttgagggaagtgaaagccgtaattgctatgacgtttcggctcggatcatctaattgcacttattctgctactgttgaatttcttgcctcttcttagacttacccaatggcgcctttgattcatcgcattatgccccaac

SEQ ID NO: 2068 - DNA, 1968 bp, Muscodor strobelii
  misc_feature: SGI cDNA ID NO. 560308
  misc_feature: Encodes the peptide sequence at SEQ ID NO 2069
atgttgttccaaaagtatcttcagaactttgcatcattagacaagaccttcgtcaaggaactattttcacggaacttgatgaagtgtctggtcaatcaggctgcaaaagaagatcgctatcttcaccgtgcatcgctgaagagcttgcaatcattagagaagagtgtagaggtcaacccagatctgctcataccgatcttgagagaactcatcggcaaatttgggctgtatgattttgaccagcgcacgaatacgaagacgattgagagcctattgcaattcgttacgccacagaattccaagaaagtcctcaaacttctacaggagccagttttgaaccttcagaacacgcctgatgaagccgaaaagcttcggcaagcttacgctgaatatgttttcaagatgacgattcagactaagtcatcttcgtctgatgatattggcgctgatggtaaaagcgctcttgaggtcggcgtcctcgaattagcggcatgcgcgtattcgacgcgtcaggactttgtcccggagctctccgctaggacacgagatgtcttccgccaacggctctcgtcggcattcgctagagtgactaaacaaacgagtcacacagaatatctttgtaatgctgttgtttcagtgaaacctacggctgtggcaatgaacgacgaactcgagaccgcctgcagaacagccgtgaaagcaatgagaggactccttaagaatcattcgaagacggacaatgattctgccggcgcatccctgggtctcgcactgctctatgccgccaccatcttgcaattatatgatggagccccggacgccctggacatcttacaagacattcaagcctgttcagaaagaatggatagtaagggaactggcacatccgaaatactcgtcgaaattttgaaagcattggtgtctaggcagtcacctatgatgcggcaaattagcgagcaagtattcgaccttttcgctgcacaaatgacttccaaggccctcgaactcctcacagagccgttaatggtagaagagaaccagagaggctttgaagccttattcgagaatgctgacgatggtgatgatattgccatggatgacgcgtcgagttctaactccggaagtgacaacggggatggcgaagacaatatatctgagattggctcagatgttgagtttgtcaccctcaacggagaggacttggcaaatggagatgacgaagatgaccaagacgaagatgacaaagaagacaaaggcagcgctagtgaaggagagcctgaggatgcagacttggtagctctggatgatgctcttgctaaagtccttaatagtcatcgccttgatcaggaccaagaggccgaaacatcggatgatgattcggatatgacggactcagagatgatggcgttagacgagaagctcgtggaggtcttcaaacagcgggcaaaaaaatccaaccagaaaaacgaaaagagagatgcgaaagaatctgtggtcaatcttaagcaccgggtgctggatttactgagcatctatgtcaagcgcgaggcatcgaatgttctggctttccaaatccttctaccgcttttggaacttgttcggacatcgactgtaaaacccctggcaaataaggctatcaatatcctttcagagttcggaaagatctcaaagaaaacacgatcgaaggagactcaaatcgatccaaatactcaatttgaattcttagagaaaattcatgaagaggctggcaaggatacatcacatgcgttcgccaaagctgcctccacggcgagcttgttagtggcctctggactgtgggcagcagatagcgggcatgtcgatagaatcaatgcggtatacgcaaagacatttgccgattgtcagaagggcaagacgaagatgcagggtgcattcttctcggactggatcaactggggtatggcccatgttgcctcagccgctccatga

SEQ ID NO: 2069 - protein, 655 aa, Muscodor strobelii
  misc_feature: SGI Peptide ID NO. 560308
  misc_feature (399)..(513): Pfam Id: PF04931 Pfam Desc: DNA polymerase phi
  misc_feature (1)..(645): NCBI GI: 85116616 Blast Desc: NCU02497 [Neurospora crassa OR74A] gi|28926893|gb|EAA35855.1| [Neurospora crassa OR74A] gi|38567092|emb|CAE76388.1| related to DNA polymerase V crassa]
  misc_feature (1)..(649): NCBI GI: 171695488 Blast Desc: protein product [Podospora anserina] gi|170947986|emb|CAP60150.1| protein product [Podospora anserina]
  misc_feature (1)..(649): NCBI GI: 116181036 Blast Desc: CHGG_01146 [Chaetomium globosum CBS 148.51] gi|88185443|gb|EAQ92911.1| CHGG_01146 [Chaetomium globosum CBS 148.51]
  misc_feature (1)..(654): NCBI GI: 256734504 Blast Desc: NECHADRAFT_90099 [Nectria haematococca mpVI 77-13-4]
  misc_feature (2)..(645): NCBI GI: 39972867 Blast Desc: MGG_07728 [Magnaporthe grisea 70-15] gi|145012495|gb|EDJ97149.1| MGG_07728 [Magnaporthe grisea 70-15]
  misc_feature (2)..(622): NCBI GI: 261356492 Blast Desc: conserved [Verticillium albo-atrum VaMs.102]
  misc_feature (21)..(648): NCBI GI: 119193528 Blast Desc: CIMG_01141 [Coccidioides immitis RS]
  misc_feature (21)..(648): NCBI GI: 240105676 Blast Desc: DNA polymerase V family protein [Coccidioides posadasii C735 delta SOWgp]
  misc_feature (21)..(648): NCBI GI: 121699325 Blast Desc: DNA polymerase V, [Aspergillus clavatus NRRL 1] gi|119396126|gb|EAW06558.1| DNA polymerase V, [Aspergillus clavatus NRRL 1]
  misc_feature (21)..(648): NCBI GI: 258574761 Blast Desc: conserved [Uncinocarpus reesii 1704] gi|237901828|gb|EEP76229.1| conserved [Uncinocarpus reesii 1704]
  misc_feature (18)..(354): SWISSPROT Homolog: EC 2.7.7.7 DNA-directed DNA polymerase
MLFQKYLQNFASLDKTFVKELFSRNLMKCLVNQAAKEDRYLHRASLKSLQSLEKSVEVNPDLLIPILRELIGKFGLYDFDQRTNTKTIESLLQFVTPQNSKKVLKLLQEPVLNLQNTPDEAEKLRQAYAEYVFKMTIQTKSSSSDDIGADGKSALEVGVLELAACAYSTRQDFVPELSARTRDVFRQRLSSAFARVTKQTSHTEYLCNAVVSVKPTAVAMNDELETACRTAVKAMRGLLKNHSKTDNDSAGASLGLALLYAATILQLYDGAPDALDILQDIQACSERMDSKGTGTSEILVEILKALVSRQSPMMRQISEQVFDLFAAQMTSKALELLTEPLMVEENQRGFEALFENADDGDDIAMDDASSSNSGSDNGDGEDNISEIGSDVEFVTLNGEDLANGDDEDDQDEDDKEDKGSASEGEPEDADLVALDDALAKVLNSHRLDQDQEAETSDDDSDMTDSEMMALDEKLVEVFKQRAKKSNQKNEKRDAKESVVNLKHRVLDLLSIYVKREASNVLAFQILLPLLELVRTSTVKPLANKAINILSEFGKISKKTRSKETQIDPNTQFEFLEKIHEEAGKDTSHAFAKAASTASLLVASGLWAADSGHVDRINAVYAKTFADCQKGKTKMQGAFFSDWINWGMAHVASAAP

SEQ ID NO: 2070 - DNA, 3382 bp, Muscodor strobelii; identical to SEQ ID NO: 2067
  misc_feature: SGI EST ID NO. CUFF.5291.0
  misc_feature: Variant of the nucleotide sequence at SEQ ID NO 2068

SEQ ID NO: 2071 - DNA, 1620 bp, Muscodor strobelii
  misc_feature: SGI cDNA ID NO. 560309
  misc_feature: Encodes the peptide sequence at SEQ ID NO 2072
atggcagcagccaaagtggtgctcgtgctgggcagccctgacggaaagcttgctgagacattcgccaagctcgatacccttcacaagaagcagaatttcgctttcgccatcgtcaccggtaatctctttgcccccgaccaagatgatgaagctctccagaagcttctcgatggccattccaacctgcctatttccacctacttcactgtcggcaccagtccgctgccgcccgcagtagtcgagcgcattgagcaggatcaagatatttgcgagaatcttcactaccttggcaagcgaagcgtcactaagacttcggacggactccgtatcgtcactctcggcggtgttctaaacagctctgtcgttggcggccaatcctcagagcagcaccttccttttcacacatctagcgatgccaaagccctgcgcggcgccaactcggccgatatcctcctgaccgccacttggcccaaagctgttacgactggctccaatgttcccatcgccccagacgactatgtatctatcccgtggtcagacgagatcgcagatctatgcgccgcgctcaagccgcgctatcacttcactacttcacctgccgacttcttctatgagcgcgaggctttcatgcacccgatcacggataacgagtctgacagcaaggccgtcacgcgattcatctctatcgcgccctttggcaacgctaggaaacagaaggcattgtatgctttcaaaatcacaccgaacgaggtcgttacttcactacctactggttgcacgtcgagcccatttcaatctcagcagaagaagcgcgcagctcccgcaaacgagggcgaatacagtcgcttcgcgaatggcaatgaccatcatggcggtcgacacaagcgccgtcgcaatcgctcgcctcctcccggtccagatcgctgcttcttctgccttagtaacgtgcaagccgacacgcacatgatctgcagcattggttcggagtcgtatgtcaccactgccaaaggtccgcttcccagttctgaccatttctctgcggccggtctctccttccctggccaccaattgatcatcccgctgtgccacgagcccactttccgatctatgggcgcggacgcagagacaactttcaaggagatgactcgtttccgagagacgatgcaagccatggttgccacccagtcgaagcacaagcttggtactgtgacctgggagatcagccgccaaaagggtattcacgatcactggcagttcatgcccgttcctcttgacctggttaataagggtcttgttgaggctggcttcaaggtcgaggccgaaaaccagaagttcccgtcttttgaggagacgaatctcggcgccgctaccgacgaatcgagtgacttcttccgagtctggatctggtccgatgatggagacaaaatctttagcaaggagcttgtcatgcgattggacgatagcttccgcttcgacctccagttcggacgtcgcgtcatggcgaagctccttggtctcgaatcccgcctgtcatggcgtgacgtcgctcagcctccggctgaagaggtcgaggacgttgagaagttcaaggaggcttttcagccttgggacttcagttag

SEQ ID NO: 2072 - protein, 539 aa, Muscodor strobelii
  misc_feature: SGI Peptide ID NO. 560309
  misc_feature (291)..(437): Pfam Id: PF04677 Pfam Desc: Protein similar to CwfJ C-terminus 1
  misc_feature (444)..(539): Pfam Id: PF04676 Pfam Desc: Protein similar to CwfJ C-terminus 2
  misc_feature (481)..(539): Pfam Id: PF04676 Pfam Desc: Protein similar to CwfJ C-terminus 2
  misc_feature (1)..(539): NCBI GI: 46107366 Blast Desc: FG00566.1 [Gibberella zeae PH-1]
  misc_feature (8)..(539): NCBI GI: 145604511 Blast Desc: MGG_07744 [Magnaporthe grisea 70-15] gi|145012513|gb|EDJ97167.1| MGG_07744 [Magnaporthe grisea 70-15]
  misc_feature (5)..(539): NCBI GI: 171695484 Blast Desc: protein product [Podospora anserina] gi|170947984|emb|CAP60148.1| protein product [Podospora anserina]
  misc_feature (5)..(539): NCBI GI: 38567094 Blast Desc: conserved [Neurospora crassa]
  misc_feature (5)..(539): NCBI GI: 164427920 Blast Desc: NCU02495 [Neurospora crassa OR74A] gi|157071936|gb|EAA35853.2| conserved [Neurospora crassa OR74A]
  misc_feature (2)..(539): NCBI GI: 116181024 Blast Desc: CHGG_01140 [Chaetomium globosum CBS 148.51] gi|88185437|gb|EAQ92905.1| CHGG_01140 [Chaetomium globosum CBS 148.51]
  misc_feature (4)..(539): NCBI GI: 154311102 Blast Desc: BC1G_06669 [Botryotinia fuckeliana B05.10] gi|150851073|gb|EDN26266.1| BC1G_06669 [Botryotinia fuckeliana B05.10]
  misc_feature (4)..(539): NCBI GI: 156034645 Blast Desc: SS1G_13257 [Sclerotinia sclerotiorum 1980] gi|154698661|gb|EDN98399.1| SS1G_13257 [Sclerotinia sclerotiorum 1980]
  misc_feature (4)..(539): NCBI GI: 261199586 Blast Desc: CwfJ domain-containing protein [Ajellomyces dermatitidis SLH14081] gi|239594402|gb|EEQ76983.1| CwfJ domain-containing protein [Ajellomyces dermatitidis SLH14081]
  misc_feature (4)..(539): NCBI GI: 239615571 Blast Desc: CwfJ domain-containing protein [Ajellomyces dermatitidis ER-3]
MAAAKVVLVLGSPDGKLAETFAKLDTLHKKQNFAFAIVTGNLFAPDQDDEALQKLLDGHSNLPISTYFTVGTSPLPPAVVERIEQDQDICENLHYLGKRSVTKTSDGLRIVTLGGVLNSSVVGGQSSEQHLPFHTSSDAKALRGANSADILLTATWPKAVTTGSNVPIAPDDYVSIPWSDEIADLCAALKPRYHFTTSPADFFYEREAFMHPITDNESDSKAVTRFISIAPFGNARKQKALYAFKITPNEVVTSLPTGCTSSPFQSQQKKRAAPANEGEYSRFANGNDHHGGRHKRRRNRSPPPGPDRCFFCLSNVQADTHMICSIGSESYVTTAKGPLPSSDHFSAAGLSFPGHQLIIPLCHEPTFRSMGADAETTFKEMTRFRETMQAMVATQSKHKLGTVTWEISRQKGIHDHWQFMPVPLDLVNKGLVEAGFKVEAENQKFPSFEETNLGAATDESSDFFRVWIWSDDGDKIFSKELVMRLDDSFRFDLQFGRRVMAKLLGLESRLSWRDVAQPPAEEVEDVEKFKEAFQPWDFS

SEQ ID NO: 2073 - DNA, 2147 bp, Muscodor strobelii
  misc_feature: SGI EST ID NO. CUFF.5295.0
  misc_feature: Variant of the nucleotide sequence at SEQ ID NO 2071
ctcaggtgttagtacctaggatgctgaacccatcgcgaactccagcttcaagctccaaattaccctcccaaagccctgatcacaacacacagtgattagatcgcccaacccacccttcgcaatcgggtcaacatggcagcagccaaagtggtgctcgtgctgggcagccctgacggaaagcttgctgagacattcgccaagctcgatacccttcacaagaagcagaatttcgctttcgccatcgtcaccggtaatctctttgcccccgaccaagatgatgaagctctccagaagcttctcgatggccattccaacctgcctatttccacctacttcactgtcggcaccagtccgctgccgcccgcagtagtcgagcgcattgagcaggatcaagatatttgcgagaatcttcactaccttggcaagcgaagcgtcactaagacttcggacggactccgtatcgtcactctcggcggtgttctaaacagctctgtcgttggcggccaatcctcagagcagcaccttccttttcacacatctagcgatgccaaagccctgcgcggcgccaactcggccgatatcctcctgaccgccacttggcccaaagctgttacgactggctccaatgttcccatcgccccagacgactatgtatctatcccgtggtcagacgagatcgcagatctatgcgccgcgctcaagccgcgctatcacttcactacttcacctgccgacttcttctatgagcgcgaggctttcatgcacccgatcacggataacgagtctgacagcaaggccgtcacgcgattcatctctatcgcgccctttggcaacgctaggaaacagaaggcattgtatgctttcaaaatcacaccgaacgaggtcgttacttcactacctactggttgcacgtcgagcccatttcaatctcagcagaagaagcgcgcagctcccgcaaacgagggcgaatacagtcgcttcgcgaatggcaatgaccatcatggcggtcgacacaagcgccgtcgcaatcgctcgcctcctcccggtccagatcgctgcttcttctgccttagtaacgtgcaagccgacacgcacatgatctgcagcattggttcggagtcgtatgtcaccactgccaaaggtccgcttcccagttctgaccatttctctgcggccggtctctccttccctggccaccaattgatcatcccgctgtgccacgagcccactttccgatctatgggcgcggacgcagagacaactttcaaggagatgactcgtttccgagagacgatgcaagccatggttgccacccagtcgaagcacaagcttggtactgtgacctgggagatcagccgccaaaagggtattcacgatcactggcagttcatgcccgttcctcttgacctggttaataagggtcttgttgaggctggcttcaaggtcgaggccgaaaaccagaagttcccgtcttttgaggagacgaatctcggcgccgctaccgacgaatcgagtgacttcttccgagtctggatctggtccgatgatggagacaaaatctttagcaaggagcttgtcatgcgattggacgatagcttccgcttcgacctccagttcggacgtcgcgtcatggcgaagctccttggtctcgaatcccgcctgtcatggcgtgacgtcgctcagcctccggctgaagaggtcgaggacgttgagaagttcaaggaggcttttcagccttgggacttcagttagagacctttctttaaaattatggcaattggatcggtgttcaggtttcggcaaaagttatatgatacccgcttgattttcacggtgcatgactcggagttacggataggagcgagcagcattgctttatcaatgaccgatataagcagcacataggtgatatttctctcatgttatggcaacgatttatacatcttatgatgcatctcggaaacgggcaagatagttttatcaaggtatataaggccatatctagccatctatgcgagccgtcggtttagtcattctagcgcagcattactagcatcaattatcgcaatatgacctatacatcccactaaagatttgatgcagcctttatcactatgctatgttgtgtctctaccgttttatgtggg

SEQ ID NO: 2074 - DNA, 8034 bp, Muscodor strobelii
  misc_feature: SGI cDNA ID NO. 560310
  misc_feature: Reduced expression when VOC is produced
  misc_feature: Encodes the peptide sequence at SEQ ID NO 2075
atgccggcgacgcagtccggccgcatcgtcaagtcccgccggggcaagacacccagcactccccaccagaaaaaccaccgatgggagtctttctcgaccaagatatccaagcttcattccctcgaccccttacgccgtgtgcgccggcacgacctcgacgccgaagacctcgagtccacaacttcatacttgaacaatggcttgcagaaatgggcggatctcaatgtcggcaagggcttcactctgttcaagagagagctgcagcctctctgcgacagtctgccccagatcctgcactttcaaggccgcattatggatctactggacaaatacatatcagcccacgatcccgaatcgctcgagcctctactggacctgttgactgcctttgcccatgatctcggtccccgcttcgagaagcactacccccgcgccctcgctctaatcattggcattgcaagccgcccccaggatgtcgccgttgtcgagtggacttttacatgtcttgccttcttgttcaagtatttatcaaaactgcttgtaccagacctcagaccgacctacgacgctcttgcgcctctgctcggcaagtctcgaaacccaccccacattgcccgcttcgccgctgaagctttgagtttcctcgttaagaaggccgcggcaccggcgaacagagaaaactctctgatccctttcatagagcacattcgccaggatttcgcttccagcagagatgacaagcacctagagctatactatcatgggctaatgaccatgtttgctgaggccgtgaagggccaagggcgcggaatccataccgccggacctgatattatcaaggccttggtgagttctgtttccaatgatcagtgtatcactttggaacctatcaattggtccgaacttgtttgtggcatcctcgtcagctcagtccatcacaccactgcagagacgttccagccgatcccccaagccattgttgatatgattacgaacgatgcaggtcgtgccgaatacccaccacgtaatgtgttctacgtaagatgtctaggaacgatctctggtgtccgaaagggctctcgtgtcagcgactggaagccgattcttgctagcctattgcagtgtcttggtcctatctctcgaaacccagagagcttacaaggcgtcgggtcaactatcatttggcaacatttgatggtgaacatggcaatagtatggcaattggcacctatggatgtcattgtcccgcatattactgagttcatggccgcaatgacgtgtgaacctttgatgaattggttcatccccttctgtgcctacttctcaaccccgagtctggattacgagcaaatgagtaggaatcaagatctattccgaagcatattcctcaaacatttccaaaaatttgtagttgcacattggtctgatggttctaacgaagacatgctttgtgttttcatcccgcagatgattgaatctcgatctcttccagccgctgcggaaccagatgcattttctttgcctcaacgatggcaagaccaaatcgttagtaaatttgagcgcctggaaatatctccgtttcctgaacagagcgcatctggcggatacgacaaagactctaagacatggcgggataaatgcttaccgaaatattcggccctcctccgtcttctagagtataccaatgtccgcccatccactatgagtccaatagcagacctgttactacggaaattaaaacttgcactgcggccatcacaatctccgctgactgaggaagcttgcttcattgttacccaagggttttctgcctatcttcggatgactaaagtaattggtcaattagacaatgcactcttgccacttctcaaagctgccacgccacgttattcccgtctcacgggatttttggagtcaatgttggaatatgagaatttatgtggcgaaagaagtccacaatctcaaagtgaaagaagtaatgggagtgaaacagaagttgtcgatccattcctgcaaagtttgatacaagggctgtcgatgccgtctcatgcccatagactagctgccttacgactcctgagcaagcttgattctgctccagacaacttgaaccaggaccggagccctcttgctctcatgttagagaccgaggaaaccccggttgatttaaaaagcgtccgagcttactctatgcacatgcggaacctggctgctgcatatccaaatttgactgagacatcgtggcttcgagatgcaattcctcaatttctgttcggcctgatgacggtacagttgactcctatttgggacgctgctgtcgatgctttgcagcagattggccagacacagtccggggagcaagtcatctgtgaaattgcgtttaaatggatggaacatccgtccaaacgttgggaaggttcctcagcccattcaaaggcaacatctcgtactggccagaccgatttcgagtgtacgaatctttcaagtcttcacactcaagcagaagataccgagaatgtgattgcaaatgccccggacattatgctagaatcattcgaaaagggacagaatttggtacaagagattccagtcaacgcgcgatcgcaatcattgaaagtcttcctagcagcaccagcgcttgcggaaaagaagtctcggaagctcgtcccgatttttctctcttgggttcttaatcatgaagaggatgacgcccatgatgaattcgcagcagctgataggtcatggtctctgttcgacaagaagatcttgatcggggtatttgcccaattttcgaacccaaaagtactctaccagagtcagcaggtctacgaggcccttcttgttctgcttggaaatggtgatatcgaaattcaaaaatccgccctcaaagctattctggcgtggaaacaagaaggtgtcaagccatatcaagaaagtctggagtatttgcttgatgaagctagattcaaaaatgaactgacagttctcttccaaggagatcaccaaattcaacccgagcatcgcgcggaagttatgccagttcttctccgtcttttatatggccgatcaatctcgaagaaaggcgcgtctagcggccggcaaggcttgcactcaacccgtctgatggtcttgagacacctcacagtcaaagatatgggtgacttcttagacatttcgcttggtaatcttcgagatatcaaagtcatcgacaatgcgactatcaacgaggaaattttccaccaagatctgctcgcgcctcgaaagcaggttggttttctaaacatgatggaatctatgatccgagaattgggctcaagcgctgtggaatatgtcgagaagttgttgcacgccatcctatactgtctcgtttcctcttgccgcaagcttctgacagcctccgacgatgaagaagataacaccattcagcatgcgtcattgttccgagttataaggactacgagcttgaagtgcataattttgttacttcaaaatgcgcccaaagctaagtggacgtcttaccgggaaatgctgatcagagaagttatcagcccacgtcttgacaagttgcctattgagaatactcaaggaatatctggcacacttcaactactgtcgactttttcgcaattgcctgagaccgccttatttttcactgtcgacgaccgcattctctctaagttgatgagtcttgttgccttcgctaagtgtaaagacgaggtcaggatatttgctctgagtattgtgcgtagcctggtgaagctcgctcagttgccagccgcagagaacgaatacaatgagctccttgctgaagaagtcattggtcccaacatcgatacgatacttgaaactatcggctcccttctcaaaaccgagacagatatcagcaaagacgtcctcttgacctgtgttgaaactgtggttgaactttctcctatgattcagcagtctctccatgtagcgagcttggttgaaatttccgtgttccttctcaacgaatcgtcaaaacgagtcaacccgaagactaaaggtttaatacttctgatgattgagggctttcttgccctggacgaaacatccttcgagccggctttactggatcagatttatacaaccattgcatcgctttatggctactttagggaccggaagagtcgagagactctgtcaagtgtacttgcggttctacttcgcagggagtcccggactgatgagattgctttgatatgtgctgatatcaatgccttcgacgcaaaacgcattgacgaaccagactacaagaaacgtcttgctacctttaacaagttatcaagcactagagacgtcgcatttacgccgagagaatggctacctcttgtctataactttgtattctacatcaagcatgatgaggaatacggcgttctctcagcccattccgccgacgcaatgtgcagatttgttgatgcggttgttgcatcattagaagtgaaggaccaattctacgctatgctgtcttcgatcatcatgccatctatttactctaacgtcaaggaactttcggaaactgttcggcgagagactgttagagttatgggttatatcatttctcaaacaccagactggagcctggtctctgatctcgtcacacttgatcctcagccagacgacaaagaccccgatccgagcttttttagtaacattcttagtccagctacggcaaggcaaatgcgtgctctacagctgttgtctaaggtcagcgtacgcacatcattgagcagccgtcacgtatcgcaatttttcgtgcctctactagagcatttcatcttcaaccggccagatggcgttgatgaccaaggtgttggggctcaagcggcgacaacgatttcggatcttgctgtgtctcttgaatggccacagtaccgggcaattcttcgccgatatatcagttacattgaaacgaaacctgatgagcagaagcaagtagttaggcttctcggaaaatttgtcgacactctaacccttggttcagatcagaaaaatcaagacgaaatggatgttgatatgccagcttcgtcagagatccataagtcacatctagcaaaaacaaggccctccttagaaaagttcaatgaagatattcttagtaatgttttgcctcctttactcgattatatgcacgagaaggacgaaactaccgtcagctctcgagtaccagtcggcatcattattgtcaaacttctaaagcttctcccagacgaatcaatgaggcggaaactaccgggtctccttacagatctctgccatattctacgcagcaaagcggtggaagctagggacatgactcgcgataccctttccaagatgaccttactcctaggtcctccgtactttgggtttgtcctgaaagaacttcgaggagctttgttgcatggttatcaactccacgttttgtcttatacaatgcacaccattcttattgatctcataccccattccgaaccgggggatctggactattgtcttgatgatatcatggccataataatggatgacatattcggcattactgggcaggaaaaggatgcagaggaatacacgagcaagaccaaggaagtcaagagcagcaagagtcaggattcgatggaactcatcgctcgaaacgcttccgtgactcactttggtgcactcattcgtccaatccgtgcgctactcatggagaaactcgatatcaaaatggtccgcaagattgatgacttgctttcgagaatcacgtctggattgctcggcaattctgcagcggcaagcagggatagcctcattttctgctacgaggtcattgagcaggtgtacgcgagcgagaagaccgaaagcgagcccaagattgatccgcgagtcagacgatatctcgtgcagaaaggagcgaagaggagtggcgagcgaagcaacacaagcaagtatactttcaaacttgttcgctttgctattgacgtcctacgcaccgtgttcaagaagcacgatagtctgagaaatgccagcaacatatcaggcttcataccaatcttgggagatgcagtggtcgggggagaggaagaggttaagattgctacgttcaagctcttgaatgttctcactaaggttcctttcaaaaccgacgacgcgttaaaactctataaaatcgcggcaaaggaagccacaaaatgtgtctcgacatccacctcgtttgcggcggatctcactcaagcttctttaaagcttatgtctgttattcttcgcgataaacgagatgttgtggtcaaggatgcagcggtcgacatgctactcaataaactgaaagatgacctgacagagcccctttaccgtcatatcacattcaatttcctccgatcagtgctggaccggaaggtggaaaccgctgtagtctatgatactctagactatgtaggtaccgtgatgattaccaatgacgacaaggatacccgtgaccttgcacgaggtgccttcttccaattcctacgagactatccgcaaaagaagaatcggtgggcgaagcaattgagattcattgttgccaacctgacttacgaaagggaaggcggccgattgtcagtcatggaagtcattcaccatctcctcaccaagtcagccgatgatttcgtgcaagaaattgccaccaataccttcattccgctagtactagtgttggtcaatgatgatagcgataaatgccgcctcgccgctgccgagttgatgaaggagatctttcgcaaagcggataaggagcgcatgtccaagtttttgactcttgcacgaggctggttagagcaaaatgacaatgcatcggtattacaactaggcattcgatctttcgacctctatttcgaagcgcgagagccctcctcgaaggacaagaaagatcttgaaggaatccttgctgctttgatattagtcttggacaactactctacgtttgcgagggatacaactctgttggatgttgttctacaaaccatagctacgctgatacgaaaacacccagcagcggtccttgcaaatgacgagttgtggagactgactccgattcctctggcacactccgatgcttcgatccaaggaagctctgtacagctaatcctcatgtacttggcggatttccacgcgaacaacgcatctatcactcagcagcagaacattgtcggatcccacggattgaagttagacaggctaatgatcaagcacctaattgtaggcgccaacagtatactgagccctaatgtggtagcgcgatggatgaggaagcaaaaacagagttttagcggcatggaatctcatctaagtgccgagaaaggaccccaggaactagaagaaggcttagcagcagatgccagccgactcatccttatgctcagcaaattccttgagcccggtacacgagcagccaagaaggactctgaaaccaacaatgtggacgacgatgcctcttcagatggcgaagaggaagaagaatggagcgggatagacgccgatgagcaacccgataaacaagcacagcacgtcacattatacaccctctgcacctggctctcggacacactgatagaagagacacgtgctaaagccagctttctccttcccaaagtcgcagcattagacattctatccctactcatcagctcgctcccaccgccctcactgcgcccatcactcttcacactcctcatcccgctccaccaactcaccgacccctccataccgacaccctttgtcttagacgaggccttcaagattcgacacgaggggctcaagaccaaagccacagagaccatggacgccctgcagcgcaaattcggcacagcggagtatagcaaggaactacttgccgtgagagagagagcgaggaataggagagagggcaggagtaagaagaggaagatagaggctgtggtgcagccggagagacatgggaagtggaagaagggaagattggagaagaagattaagaggaggaaggagaagggtgttgcgaataaagagaggagaggacagggaaagtattag

SEQ ID NO: 2075 - protein, 2677 aa, Muscodor strobelii
  misc_feature: SGI Peptide ID NO. 560310
  misc_feature (925)..(1063): Pfam Id: PF07539 Pfam Desc: Down-regulated in metastasis
  misc_feature (19)..(2288): NCBI GI: 255718949 Blast Desc: KLTH0G16588p [Lachancea thermotolerans] gi|238937139|emb|CAR25318.1| KLTH0G16588p [Lachancea thermotolerans]
  misc_feature (768)..(1639): NCBI GI: 156034647 Blast Desc: SS1G_13258 [Sclerotinia sclerotiorum 1980] gi|154698662|gb|EDN98400.1| SS1G_13258 [Sclerotinia sclerotiorum 1980]
  misc_feature (1)..(663): NCBI GI: 156034647 Blast Desc: SS1G_13258 [Sclerotinia sclerotiorum 1980] gi|154698662|gb|EDN98400.1| SS1G_13258 [Sclerotinia sclerotiorum 1980]
  misc_feature (15)..(2285): NCBI GI: 254577147 Blast Desc: ZYRO0A04356p [Zygosaccharomyces rouxii] gi|238937449|emb|CAR25627.1| ZYRO0A04356p [Zygosaccharomyces rouxii]
  misc_feature (686)..(2299): NCBI GI: 213401793 Blast Desc: U3 snoRNP protein Utp20 [Schizosaccharomyces japonicus yFS275] gi|211999716|gb|EEB05376.1| U3 snoRNP protein Utp20 [Schizosaccharomyces japonicus yFS275]
  misc_feature (1582)..(2672): NCBI GI: 154274892 Blast Desc: [Ajellomyces capsulatus NAm1] gi|150414737|gb|EDN10099.1| [Ajellomyces capsulatus NAm1]
  misc_feature (668)..(2285): NCBI GI: 202953407 Blast Desc: DEHA2F18172p [Debaryomyces hansenii]
  misc_feature (668)..(2285): NCBI GI: 50425113 Blast Desc: DEHA0F19580g [Debaryomyces hansenii CBS767]
  misc_feature (674)..(2285): NCBI GI: 50309455 Blast Desc: protein product [Kluyveromyces lactis] gi|49643870|emb|CAG99822.1| KLLA0E17425p [Kluyveromyces lactis]
  misc_feature (665)..(2285): NCBI GI: 150866754 Blast Desc: U3 snoRNP protein [Pichia stipitis CBS 6054] gi|149388010|gb|ABN68425.2| U3 snoRNP protein [Pichia stipitis CBS 6054]
  misc_feature: Useful for introducing or modulating the production of volatile compounds
MPATQSGRIVKSRRGKTPSTPHQKNHRWESFSTKISKLHSLDPLRRVRRHDLDAEDLESTTSYLNNGLQKWADLNVGKGFTLFKRELQPLCDSLPQILHFQGRIMDLLDKYISAHDPESLEPLLDLLTAFAHDLGPRFEKHYPRALALIIGIASRPQDVAVVEWTFTCLAFLFKYLSKLLVPDLRPTYDALAPLLGKSRNPPHIARFAAEALSFLVKKAAAPANRENSLIPFIEHIRQDFASSRDDKHLELYYHGLMTMFAEAVKGQGRGIHTAGPDIIKALVSSVSNDQCITLEPINWSELVCGILVSSVHHTTAETFQPIPQAIVDMITNDAGRAEYPPRNVFYVRCLGTISGVRKGSRVSDWKPILASLLQCLGPISRNPESLQGVGSTIIWQHLMVNMAIVWQLAPMDVIVPHITEFMAAMTCEPLMNWFIPFCAYFSTPSLDYEQMSRNQDLFRSIFLKHFQKFVVAHWSDGSNEDMLCVFIPQMIESRSLPAAAEPDAFSLPQRWQDQIVSKFERLEISPFPEQSASGGYDKDSKTWRDKCLPKYSALLRLLEYTNVRPSTMSPIADLLLRKLKLALRPSQSPLTEEACFIVTQGFSAYLRMTKVIGQLDNALLPLLKAATPRYSRLTGFLESMLEYENLCGERSPQSQSERSNGSETEVVDPFLQSLIQGLSMPSHAHRLAALRLLSKLDSAPDNLNQDRSPLALMLETEETPVDLKSVRAYSMHMRNLAAAYPNLTETSWLRDAIPQFLFGLMTVQLTPIWDAAVDALQQIGQTQSGEQVICEIAFKWMEHPSKRWEGSSAHSKATSRTGQTDFECTNLSSLHTQAEDTENVIANAPDIMLESFEKGQNLVQEIPVNARSQSLKVFLAAPALAEKKSRKLVPIFLSWVLNHEEDDAHDEFAAADRSWSLFDKKILIGVFAQFSNPKVLYQSQQVYEALLVLLGNGDIEIQKSALKAILAWKQEGVKPYQESLEYLLDEARFKNELTVLFQGDHQIQPEHRAEVMPVLLRLLYGRSISKKGASSGRQGLHSTRLMVLRHLTVKDMGDFLDISLGNLRDIKVIDNATINEEIFHQDLLAPRKQVGFLNMMESMIRELGSSAVEYVEKLLHAILYCLVSSCRKLLTASDDEEDNTIQHASLFRVIRTTSLKCIILLLQNAPKAKWTSYREMLIREVISPRLDKLPIENTQGISGTLQLLSTFSQLPETALFFTVDDRILSKLMSLVAFAKCKDEVRIFALSIVRSLVKLAQLPAAENEYNELLAEEVIGPNIDTILETIGSLLKTETDISKDVLLTCVETVVELSPMIQQSLHVASLVEISVFLLNESSKRVNPKTKGLILLMIEGFLALDETSFEPALLDQIYTTIASLYGYFRDRKSRETLSSVLAVLLRRESRTDEIALICADINAFDAKRIDEPDYKKRLATFNKLSSTRDVAFTPREWLPLVYNFVFYIKHDEEYGVLSAHSADAMCRFVDAVVASLEVKDQFYAMLSSIIMPSIYSNVKELSETVRRETVRVMGYIISQTPDWSLVSDLVTLDPQPDDKDPDPSFFSNILSPATARQMRALQLLSKVSVRTSLSSRHVSQFFVPLLEHFIFNRPDGVDDQGVGAQAATTISDLAVSLEWPQYRAILRRYISYIETKPDEQKQVVRLLGKFVDTLTLGSDQKNQDEMDVDMPASSEIHKSHLAKTRPSLEKFNEDILSNVLPPLLDYMHEKDETTVSSRVPVGIIIVKLLKLLPDESMRRKLPGLLTDLCHILRSKAVEARDMTRDTLSKMTLLLGPPYFGFVLKELRGALLHGYQLHVLSYTMHTILIDLIPHSEPGDLDYCLDDIMAIIMDDIFGITGQEKDAEEYTSKTKEVKSSKSQDSMELIARNASVTHFGALIRPIRALLMEKLDIKMVRKIDDLLSRITSGLLGNSAAASRDSLIFCYEVIEQVYASEKTESEPKIDPRVRRYLVQKGAKRSGERSNTSKYTFKLVRFAIDVLRTVFKKHDSLRNASNISGFIPILGDAVVGGEEEVKIATFKLLNVLTKVPFKTDDALKLYKIAAKEATKCVSTSTSFAADLTQASLKLMSVILRDKRDVVVKDAAVDMLLNKLKDDLTEPLYRHITFNFLRSVLDRKVETAVVYDTLDYVGTVMITNDDKDTRDLARGAFFQFLRDYPQKKNRWAKQLRFIVANLTYEREGGRLSVMEVIHHLLTKSADDFVQEIATNTFIPLVLVLVNDDSDKCRLAAAELMKEIFRKADKERMSKFLTLARGWLEQNDNASVLQLGIRSFDLYFEAREPSSKDKKDLEGILAALILVLDNYSTFARDTTLLDVVLQTIATLIRKHPAAVLANDELWRLTPIPLAHSDASIQGSSVQLILMYLADFHANNASITQQQNIVGSHGLKLDRLMIKHLIVGANSILSPNVVARWMRKQKQSFSGMESHLSAEKGPQELEEGLAADASRLILMLSKFLEPGTRAAKKDSETNNVDDDASSDGEEEEEWSGIDADEQPDKQAQHVTLYTLCTWLSDTLIEETRAKASFLLPKVAALDILSLLISSLPPPSLRPSLFTLLIPLHQLTDPSIPTPFVLDEAFKIRHEGLKTKATETMDALQRKFGTAEYSKELLAVRERARNRREGRSKKRKIEAVVQPERHGKWKKGRLEKKIKRRKEKGVANKERRGQGKY

SEQ ID NO: 2076 - DNA, 11047 bp, Muscodor strobelii
  misc_feature: SGI EST ID NO. CUFF.5417.0
  misc_feature: Variant of the nucleotide sequence at SEQ ID NO 2074
gggggctctctcttgccgaccttctacaattcgcactcaacatagcagaattatgttaaccaccaccgatctctcgaccgtacgcggatagggggatacttggcattggaaagcgctcacgatgccggcgacgcagtccggccgcatcgtcaagtcccgccggggcaagacacccagcactccccaccagaaaaaccaccgatgggagtctttctcgaccaagatatccaagcttcattccctcgaccccttacgccgtgtgcgccggcacgacctcgacgccgaagacctcgagtccacaacttcatacttgaacaatggcttgcagaaatgggcggatctcaatgtcggcaagggcttcactctgttcaagagagagctgcagcctctctgcgacagtctgccccagatcctgcactttcaaggccgcattatggatctactggacaaatacatatcagcccacgatcccgaatcgctcgagcctctactggacctgttgactgcctttgcccatgatctcggtccccgcttcgagaagcactacccccgcgccctcgctctaatcattggcattgcaagccgcccccaggatgtcgccgttgtcgagtggacttttacatgtcttgccttcttgttcaagtatttatcaaaactgcttgtaccagacctcagaccgacctacgacgctcttgcgcctctgctcggcaagtctcgaaacccaccccacattgcccgcttcgccgctgaagctttgagtttcctcgttaagaaggccgcggcaccggcgaacagagaaaactctctgatccctttcatagagcacattcgccaggatttcgcttccagcagagatgacaagcacctagagctatactatcatgggctaatgaccatgtttgctgaggccgtgaagggccaagggcgcggaatccataccgccggacctgatattatcaaggccttggtgagttctgtttccaatgatcagtgtatcactttggaacctatcaattggtccgaacttgtttgtggcatcctcgtcagctcagtccatcacaccactgcagagacgttccagccgatcccccaagccattgttgatatgattacgaacgatgcaggtcgtgccgaatacccaccacgtaatgtgttctacgtaagatgtctaggaacgatctctggtgtccgaaagggctctcgtgtcagcgactggaagccgattcttgctagcctattgcagtgtcttggtcctatctctcgaaacccagagagcttacaaggcgtcgggtcaactatcatttggcaacatttgatggtgaacatggcaatagtatggcaattggcacctatggatgtcattgtcccgcatattactgagttcatggccgcaatgacgtgtgaacctttgatgaattggttcatccccttctgtgcctacttctcaaccccgagtctggattacgagcaaatgagtaggaatcaagatctattccgaagcatattcctcaaacatttccaaaaatttgtagttgcacattggtctgatggttctaacgaagacatgctttgtgttttcatcccgcagatgattgaatctcgatctcttccagccgctgcggaaccagatgcattttctttgcctcaacgatggcaagaccaaatcgttagtaaatttgagcgcctggaaatatctccgtttcctgaacagagcgcatctggcggatacgacaaagactctaagacatggcgggataaatgcttaccgaaatattcggccctcctccgtcttctagagtataccaatgtccgcccatccactatgagtccaatagcagacctgttactacggaaattaaaacttgcactgcggccatcacaatctccgctgactgaggaagcttgcttcattgttacccaagggttttctgcctatcttcggatgactaaagtaattggtcaattagacaatgcactcttgccacttctcaaagctgccacgccacgttattcccgtctcacgggatttttggagtcaatgttggaatatgagaatttatgtggcgaaagaagtccacaatctcaaagtgaaagaagtaatgggagtgaaacagaagttgtcgatccattcctgcaaagtttgatacaagggctgtcgatgccgtctcatgcccatagactagctgccttacgactcctgagcaagcttgattctgctccagacaacttgaaccaggaccggagccctcttgctctcatgttagagaccgaggaaaccccggttgatttaaaaagcgtccgagcttactctatgcacatgcggaacctggctgctgcatatccaaatttgactgagacatcgtggcttcgagatgcaattcctcaatttctgttcggcctgatgacggtacagttgactcctatttgggacgctgctgtcgatgctttgcagcagattggccagacacagtccggggagcaagtcatctgtgaaattgcgtttaaatggatggaacatccgtccaaacgttgggaaggttcctcagcccattcaaaggcaacatctcgtactggccagaccgatttcgagtgtacgaatctttcaagtcttcacactcaagcagaagataccgagaatgtgattgcaaatgccccggacattatgctagaatcattcgaaaagggacagaatttggtacaagagattccagtcaacgcgcgatcgcaatcattgaaagtcttcctagcagcaccagcgcttgcggaaaagaagtctcggaagctcgtcccgatttttctctcttgggttcttaatcatgaagaggatgacgcccatgatgaattcgcagcagctgataggtcatggtctctgttcgacaagaagatcttgatcggggtatttgcccaattttcgaacccaaaagtactctaccagagtcagcaggtctacgaggcccttcttgttctgcttggaaatggtgatatcgaaattcaaaaatccgccctcaaagctattctggcgtggaaacaagaaggtgtcaagccatatcaagaaagtctggagtatttgcttgatgaagctagattcaaaaatgaactgacagttctcttccaaggagatcaccaaattcaacccgagcatcgcgcggaagttatgccagttcttctccgtcttttatatggccgatcaatctcgaagaaaggcgcgtctagcggccggcaaggcttgcactcaacccgtctgatggtcttgagacacctcacagtcaaagatatgggtgacttcttagacatttcgcttggtaatcttcgagatatcaaagtcatcgacaatgcgactatcaacgaggaaattttccaccaagatctgctcgcgcctcgaaagcaggttggttttctaaacatgatggaatctatgatccgagaattgggctcaagcgctgtggaatatgtcgagaagttgttgcacgccatcctatactgtctcgtttcctcttgccgcaagcttctgacagcctccgacgatgaagaagataacaccattcagcatgcgtcattgttccgagttataaggactacgagcttgaagtgcataattttgttacttcaaaatgcgcccaaagctaagtggacgtcttaccgggaaatgctgatcagagaagttatcagcccacgtcttgacaagttgcctattgagaatactcaaggaatatctggcacacttcaactactgtcgactttttcgcaattgcctgagaccgccttatttttcactgtcgacgaccgcattctctctaagttgatgagtcttgttgccttcgctaagtgtaaagacgaggtcaggatatttgctctgagtattgtgcgtagcctggtgaagctcgctcagttgccagccgcagagaacgaatacaatgagctccttgctgaagaagtcattggtcccaacatcgatacgatacttgaaactatcggctcccttctcaaaaccgagacagatatcagcaaagacgtcctcttgacctgtgttgaaactgtggttgaactttctcctatgattcagcagtctctccatgtagcgagcttggttgaaatttccgtgttccttctcaacgaatcgtcaaaacgagtcaacccgaagactaaaggtttaatacttctgatgattgagggctttcttgccctggacgaaacatccttcgagccggctttactggatcagatttatacaaccattgcatcgctttatggctactttagggaccggaagagtcgagagactctgtcaagtgtacttgcggttctacttcgcagggagtcccggactgatgagattgctttgatatgtgctgatatcaatgccttcgacgcaaaacgcattgacgaaccagactacaagaaacgtcttgctacctttaacaagttatcaagcactagagacgtcgcatttacgccgagagaatggctacctcttgtctataactttgtattctacatcaagcatgatgaggaatacggcgttctctcagcccattccgccgacgcaatgtgcagatttgttgatgcggttgttgcatcattagaagtgaaggaccaattctacgctatgctgtcttcgatcatcatgccatctatttactctaacgtcaaggaactttcggaaactgttcggcgagagactgttagagttatgggttatatcatttctcaaacaccagactggagcctggtctctgatctcgtcacacttgatcctcagccagacgacaaagaccccgatccgagcttttttagtaacattcttagtccagctacggcaaggcaaatgcgtgctctacagctgttgtctaaggtcagcgtacgcacatcattgagcagccgtcacgtatcgcaatttttcgtgcctctactagagcatttcatcttcaaccggccagatggcgttgatgaccaaggtgttggggctcaagcggcgacaacgatttcggatcttgctgtgtctcttgaatggccacagtaccgggcaattcttcgccgatatatcagttacattgaaacgaaacctgatgagcagaagcaagtagttaggcttctcggaaaatttgtcgacactctaacccttggttcagatcagaaaaatcaagacgaaatggatgttgatatgccagcttcgtcagagatccataagtcacatctagcaaaaacaaggccctccttagaaaagttcaatgaagatattcttagtaatgttttgcctcctttactcgattatatgcacgagaaggacgaaactaccgtcagctctcgagtaccagtcggcatcattattgtcaaacttctaaagcttctcccagacgaatcaatgaggcggaaactaccgggtctccttacagatctctgccatattctacgcagcaaagcggtggaagctagggacatgactcgcgataccctttccaagatgaccttactcctaggtcctccgtactttgggtttgtcctgaaagaacttcgaggagctttgttgcatggttatcaactccacgttttgtcttatacaatgcacaccattcttattgatctcataccccattccgaaccgggggatctggactattgtcttgatgatatcatggccataataatggatgacatattcggcattactgggcaggaaaaggatgcagaggaatacacgagcaagaccaaggaagtcaagagcagcaagagtcaggattcgatggaactcatcgctcgaaacgcttccgtgactcactttggtgcactcattcgtccaatccgtgcgctactcatggagaaactcgatatcaaaatggtccgcaagattgatgacttgctttcgagaatcacgtctggattgctcggcaattctgcagcggcaagcagggatagcctcattttctgctacgaggtcattgagcaggtgtacgcgagcgagaagaccgaaagcgagcccaagattgatccgcgagtcagacgatatctcgtgcagaaaggagcgaagaggagtggcgagcgaagcaacacaagcaagtatactttcaaacttgttcgctttgctattgacgtcctacgcaccgtgttcaagaagcacgatagtctgagaaatgccagcaacatatcaggcttcataccaatcttgggagatgcagtggtcgggggagaggaagaggttaagattgctacgttcaagctcttgaatgttctcactaaggttcctttcaaaaccgacgacgcgttaaaactctataaaatcgcggcaaaggaagccacaaaatgtgtctcgacatccacctcgtttgcggcggatctcactcaagcttctttaaagcttatgtctgttattcttcgcgataaacgagatgttgtggtcaaggatgcagcggtcgacatgctactcaataaactgaaagatgacctgacagagcccctttaccgtcatatcacattcaatttcctccgatcagtgctggaccggaaggtggaaaccgctgtagtctatgatactctagactatgtaggtaccgtgatgattaccaatgacgacaaggatacccgtgaccttgcacgaggtgccttcttccaattcctacgagactatccgcaaaagaagaatcggtgggcgaagcaattgagattcattgttgccaacctgacttacgaaagggaaggcggccgattgtcagtcatggaagtcattcaccatctcctcaccaagtcagccgatgatttcgtgcaagaaattgccaccaataccttcattccgctagtactagtgttggtcaatgatgatagcgataaatgccgcctcgccgctgccgagttgatgaaggagatctttcgcaaagcggataaggagcgcatgtccaagtttttgactcttgcacgaggctggttagagcaaaatgacaatgcatcggtattacaactaggcattcgatctttcgacctctatttcgaagcgcgagagccctcctcgaaggacaagaaagatcttgaaggaatccttgctgctttgatattagtcttggacaactactctacgtttgcgagggatacaactctgttggatgttgttctacaaaccatagctacgctgatacgaaaacacccagcagcggtccttgcaaatgacgagttgtggagactgactccgattcctctggcacactccgatgcttcgatccaaggaagctctgtacagctaatcctcatgtacttggcggatttccacgcgaacaacgcatctatcactcagcagcagaacattgtcggatcccacggattgaagttagacaggctaatgatcaagcacctaattgtaggcgccaacagtatactgagccctaatgtggtagcgcgatggatgaggaagcaaaaacagagttttagcggcatggaatctcatctaagtgccgagaaaggaccccaggaactagaagaaggcttagcagcagatgccagccgactcatccttatgctcagcaaattccttgagcccggtacacgagcagccaagaaggactctgaaaccaacaatgtggacgacgatgcctcttcagatggcgaagaggaagaagaatggagcgggatagacgccgatgagcaacccgataaacaagcacagcacgtcacattatacaccctctgcacctggctctcggacacactgatagaagagacacgtgctaaagccagctttctccttcccaaagtcgcagcattagacattctatccctactcatcagctcgctcccaccgccctcactgcgcccatcactcttcacactcctcatcccgctccaccaactcaccgacccctccataccgacaccctttgtcttagacgaggccttcaagattcgacacgaggggctcaagaccaaagccacagagaccatggacgccctgcagcgcaaattcggcacagcggagtatagcaaggaactacttgccgtgagagagagagcgaggaataggagagagggcaggagtaagaagaggaagatagaggctgtggtgcagccggagagacatgggaagtggaagaagggaagattggagaagaagattaagaggaggaaggagaagggtgttgcgaataaagagaggagaggacagggaaagtattagttaggggttgcatttgtggtgttggggaatatgggaaaagacctaacaattgagtttgagattttatatgtctacttgaagttttaatcttcagatgtcttacagttttaagtgacttagaatgacggcgtgagctgtcttaatagtgagaaaatgtctgccatttgtacaaaggcacagagatgccgtaatatttcagttgggtatctggtgatatagtacaaatacaatgatgttacaacaatattttcatgccagcccgctattcgaatgcaccgtaacctgcaccatgcccataaggaaaacagacgtctcacaagatcataaacagacctgatcgccaattcgcacaaccctccttggttcagtcggtaacgtagcgagactttccaagcgtctcttttcctccctctttcccttttccgctttatccaagatccgattcgcgggtttgaactccggtaagaaatttagtttcgtagggttcttagccggtaaacccttcaccttaaacttcttatttttggggatgctttccatagcttttacttgagcagcagagaaccccgaactaagatccgggttgatacctatcaaataaccaggtgggtagaattctcttcccaagctcttcgaaacgttttgtttagaaacgctatccacggccttcgctttagcagcagagaaaccagcaggaagatccggcttaatgccaatcaaatgaccaggtagattaaaccctctttccgaactcgtaggtctcgggggagggttctcgtcgtagactttcttgaaggtgaattccttggagatcccaacctttcgaacgcgtttcgatattgcacttttactgcttcgaacaggctgtggtatatttttcaaaatttgaggattgctagccaaggctttctcagcgtcaagaggtggtaaatcatccctatatattttgcggactattggggatatgcgagatcgagccatcaggagtcgcgcttctctctctgcttcatggggattgagtagcccatcagctggctttgagaagaacttacggactaagggattcccacccctgggctcgtagcctgctccatgtctattttgaacacttcgtttcattttgactttgctcgacctccatactggctcccagcgacgacgctggggctgtgaggaatcgagagcagagcgcatataatttcttggcgtgatacgtccagccgatggcctagtcggttctgtggtaccaaaaaactcctcgtaacttgaagacgccgtccgcagctccgatgaactgtcaatggagtcggaggcaggatctactgattctttgggctcaaagccctcgtaacctgaagatacgagttcgaatgcttgtctctcctcctcggcggatgcaaccgattcttcattcttgaggatgtccataaaacggatatttggacgatggcgttgtcgccccaatgaatttctaccggggatgtgcatggcggcagaagacttagacgatttattagctacagaggcgcccctaaaacttgacttcgaagtctctgatggttgcactgatgcattctcggtaggtgcggcggcggcaagtcttcgtctctctgctgcttggtgtatccttcgtctctcttctttttctcggatgcgttgatttcgaaccttgcgttcttgtaaccgacgcgttcttctcatgtcgtcgagcttctggatttgtgcctggagcatttccttgtgggacacacgtttggaagggaaataaaagcgctggtattttacaatttggttctcacggagatatcgatcaagctggttgagtttgcgtgagagctctaggtccacgggggctccatggttggatgacgtgtccgtatgacctttacggttcggaggcggtcggtcaacggaatgggcatgtacccgggggctggcggattcggagaggcgcgaccattcagcattgctattttcatgtttaggatcgactgtcgttgcgtgcgggctttttgtgtatacctgtgtctgtctccgttctctggatgagatggcagaggtagagaattggcgacgggtggacggggcggtgacgcttgggtgcaccggcggagtggtgttgttactcgatggggatacgacatcgtcctgccagaactcgatgtcgccgtcctcgccgagggtgccgcgcttgacgagctggcccttctcgcgcatcaggtcctcgacggtgaggtggcggtcgccgaagatgttgaggtggtcggagatgacatggcggttgcggcactgcgggcaggtgatgagcacggagcccttgtggtagccctgcttggagacggtgtgcgaggagcggtcgccgcaggggacacaggtgaaggtcagctggtaatggggctcgagctgcttcctggggatcgcgtccgaggtggcagcatcagaagaggcggcatcagagacagcaccgtcagcgttgggctcggtggtagctgtagccggacgcggtggcttggggatgctatgtgcaaatcgacgtgtcgccggcacgaggatcggcggcgcaaaacggcatgtagctcgagcaagtgagtggcgctggagagcaacaaaccgacgtgctggagggatcagggggatgtatcgtgttgctattcgtgaagccatggttggctgagttcaaaacatcatccacacaccgtcaaccagacttaggagaaaggggggggaacggtcgaaggggaagttgctagttggaatctctcgaatcaagtggctcttgaagaagaattacgtaggtgcatgcaagtacaacttctcgttgcatttggaagtttcattggcaattcctcttctactaacccgattggtcttatcgttatcgttcgacctctg

SEQ ID NO: 2077 - DNA, 2343 bp, Muscodor strobelii
  misc_feature: SGI cDNA ID NO. 560311
  misc_feature: Reduced expression when VOC is produced
  misc_feature: Encodes the peptide sequence at SEQ ID NO 2078
atggcttcacgaatagcaacacgatacatccccctgatccctccagcacgtcggtttgttgctctccagcgccactcacttgctcgagctacatgccgttttgcgccgccgatcctcgtgccggcgacacgtcgatttgcacatagcatccccaagccaccgcgtccggctacagctaccaccgagcccaacgctgacggtgctgtctctgatgccgcctcttctgatgctgccacctcggacgcgatccccaggaagcagctcgagccccattaccagctgaccttcacctgtgtcccctgcggcgaccgctcctcgcacaccgtctccaagcagggctaccacaagggctccgtgctcatcacctgcccgcagtgccgcaaccgccatgtcatctccgaccacctcaacatcttcggcgaccgccacctcaccgtcgaggacctgatgcgcgagaagggccagctcgtcaagcgcggcaccctcggcgaggacggcgacatcgagttctggcaggacgatgtcgtatccccatcgagtaacaacaccactccgccggtgcacccaagcgtcaccgccccgtccacccgtcgccaattctctacctctgccatctcatccagagaacggagacagacacaggtatacacaaaaagcccgcacgcaacgacagtcgatcctaaacatgaaaatagcaatgctgaatggtcgcgcctctccgaatccgccagcccccgggtacatgcccattccgttgaccgaccgcctccgaaccgtaaaggtcatacggacacgtcatccaaccatggagcccccgtggacctagagctctcacgcaaactcaaccagcttgatcgatatctccgtgagaaccaaattgtaaaataccagcgcttttatttcccttccaaacgtgtgtcccacaaggaaatgctccaggcacaaatccagaagctcgacgacatgagaagaacgcgtcggttacaagaacgcaaggttcgaaatcaacgcatccgagaaaaagaagagagacgaaggatacaccaagcagcagagagacgaagacttgccgccgccgcacctaccgagaatgcatcagtgcaaccatcagagacttcgaagtcaagttttaggggcgcctctgtagctaataaatcgtctaagtcttctgccgccatgcacatccccggtagaaattcattggggcgacaacgccatcgtccaaatatccgttttatggacatcctcaagaatgaagaatcggttgcatccgccgaggaggagagacaagcattcgaactcgtatcttcaggttacgagggctttgagcccaaagaatcagtagatcctgcctccgactccattgacagttcatcggagctgcggacggcgtcttcaagttacgaggagttttttggtaccacagaaccgactaggccatcggctggacgtatcacgccaagaaattatatgcgctctgctctcgattcctcacagccccagcgtcgtcgctgggagccagtatggaggtcgagcaaagtcaaaatgaaacgaagtgttcaaaatagacatggagcaggctacgagcccaggggtgggaatcccttagtccgtaagttcttctcaaagccagctgatgggctactcaatccccatgaagcagagagagaagcgcgactcctgatggctcgatctcgcatatccccaatagtccgcaaaatatatagggatgatttaccacctcttgacgctgagaaagccttggctagcaatcctcaaattttgaaaaatataccacagcctgttcgaagcagtaaaagtgcaatatcgaaacgcgttcgaaaggttgggatctccaaggaattcaccttcaagaaagtctacgacgagaaccctcccccgagacctacgagttcggaaagagggtttaatctacctggtcatttgattggcattaagccggatcttcctgctggtttctctgctgctaaagcgaaggccgtggatagcgtttctaaacaaaacgtttcgaagagcttgggaagagaattctacccacctggttatttgataggtatcaacccggatcttagttcggggttctctgctgctcaagtaaaagctatggaaagcatccccaaaaataagaagtttaaggtgaagggtttaccggctaagaaccctacgaaactaaatttcttaccggagttcaaacccgcgaatcggatcttggataaagcggaaaagggaaagagggaggaaaagagacgcttggaaagtctcgctacgttaccgactgaaccaaggagggttgtgcgaattggcgatcaggtctgtttatga

SEQ ID NO: 2078 - protein, 780 aa, Muscodor strobelii
  misc_feature: SGI Peptide ID NO. 560311
  misc_feature (92)..(157): Pfam Id: PF05180 Pfam Desc: DNL zinc finger
  misc_feature (27)..(175): NCBI GI: 261356497 Blast Desc: DNL zinc finger domain-containing protein [Verticillium albo-atrum VaMs.102]
  misc_feature (5)..(183): NCBI GI: 256734502 Blast Desc: NECHADRAFT_102372 [Nectria haematococca mpVI 77-13-4]
  misc_feature (45)..(182): NCBI GI: 46107370 Blast Desc: FG00568.1 [Gibberella zeae PH-1]
  misc_feature (68)..(176): NCBI GI: 39972871 Blast Desc: MGG_07730 [Magnaporthe grisea 70-15] gi|145012497|gb|EDJ97151.1| MGG_07730 [Magnaporthe grisea 70-15]
  misc_feature (90)..(173): NCBI GI: 85116624 Blast Desc: NCU02499 [Neurospora crassa OR74A] gi|28926895|gb|EAA35857.1| [Neurospora crassa OR74A] gi|38567090|emb|CAE76386.1| conserved [Neurospora crassa]
  misc_feature (1)..(177): NCBI GI: 116181018 Blast Desc: CHGG_01137 [Chaetomium globosum CBS 148.51] gi|88185434|gb|EAQ92902.1| CHGG_01137 [Chaetomium globosum CBS 148.51]
  misc_feature (92)..(173): NCBI GI: 171695480 Blast Desc: protein product [Podospora anserina] gi|170947982|emb|CAP60146.1| protein product [Podospora anserina]
  misc_feature (16)..(173): NCBI GI: 156034651 Blast Desc: SS1G_13260 [Sclerotinia sclerotiorum 1980] gi|154698664|gb|EDN98402.1| SS1G_13260 [Sclerotinia sclerotiorum 1980]
  misc_feature (92)..(173): NCBI GI: 154311106 Blast Desc: BC1G_06671 [Botryotinia fuckeliana B05.10] gi|150851075|gb|EDN26268.1| BC1G_06671 [Botryotinia fuckeliana B05.10]
  misc_feature (55)..(180): NCBI GI: 189211171 Blast Desc: DNL zinc finger domain containing protein [Pyrenophora tritici-repentis Pt-1C-BFP] gi|187978009|gb|EDU44635.1| DNL zinc finger domain containing protein [Pyrenophora tritici-repentis
  misc_feature: Useful for introducing or modulating the production of volatile compounds
MASRIATRYIPLIPPARRFVALQRHSLARATCRFAPPILVPATRRFAHSIPKPPRPATATTEPNADGAVSDAASSDAATSDAIPRKQLEPHYQLTFTCVPCGDRSSHTVSKQGYHKGSVLITCPQCRNRHVISDHLNIFGDRHLTVEDLMREKGQLVKRGTLGEDGDIEFWQDDVVSPSSNNTTPPVHPSVTAPSTRRQFSTSAISSRERRQTQVYTKSPHATTVDPKHENSNAEWSRLSESASPRVHAHSVDRPPPNRKGHTDTSSNHGAPVDLELSRKLNQLDRYLRENQIVKYQRFYFPSKRVSHKEMLQAQIQKLDDMRRTRRLQERKVRNQRIREKEERRRIHQAAERRRLAAAAPTENASVQPSETSKSSFRGASVANKSSKSSAAMHIPGRNSLGRQRHRPNIRFMDILKNEESVASAEEERQAFELVSSGYEGFEPKESVDPASDSIDSSSELRTASSSYEEFFGTTEPTRPSAGRITPRNYMRSALDSSQPQRRRWEPVWRSSKVKMKRSVQNRHGAGYEPRGGNPLVRKFFSKPADGLLNPHEAEREARLLMARSRISPIVRKIYRDDLPPLDAEKALASNPQILKNIPQPVRSSKSAISKRVRKVGISKEFTFKKVYDENPPPRPTSSERGFNLPGHLIGIKPDLPAGFSAAKAKAVDSVSKQNVSKSLGREFYPPGYLIGINPDLSSGFSAAQVKAMESIPKNKKFKVKGLPAKNPTKLNFLPEFKPANRILDKAEKGKREEKRRLESLATLPTEPRRVVRIGDQVCL

SEQ ID NO: 2079 - DNA, 9449 bp, Muscodor strobelii
  misc_feature: SGI EST ID NO. CUFF.5418.1
  misc_feature: Variant of the nucleotide sequence at SEQ ID NO 2077
cagaggtcgaacgataacgataagaccaatcgggttagtagaagaggaattgccaatgaaacttccaaatgcaacgagaagttgtacttgcatgcacctacgtaattcttcttcaagagccacttgattcgagagattccaactagcaacttccccttcgaccgttcccccccctttctcctaagtctggttgacggtgtgtggatgatgttttgaactcagccaaccatggcttcacgaatagcaacacgatacatccccctgatccctccagcacgtcggtttgttgctctccagcgccactcacttgctcgagctacatgccgttttgcgccgccgatcctcgtgccggcgacacgtcgatttgcacatagcatccccaagccaccgcgtccggctacagctaccaccgagcccaacgctgacggtgctgtctctgatgccgcctcttctgatgctgccacctcggacgcgatccccaggaagcagctcgagccccattaccagctgaccttcacctgtgtcccctgcggcgaccgctcctcgcacaccgtctccaagcagggctaccacaagggctccgtgctcatcacctgcccgcagtgccgcaaccgccatgtcatctccgaccacctcaacatcttcggcgaccgccacctcaccgtcgaggacctgatgcgcgagaagggccagctcgtcaagcgcggcaccctcggcgaggacggcgacatcgagttctggcaggacgatgtcgtatccccatcgagtaacaacaccactccgccggtgcacccaagcgtcaccgccccgtccacccgtcgccaattctctacctctgccatctcatccagagaacggagacagacacagcaatgctgaatggtcgcgcctctccgaatccgccagcccccgggtacatgcccattccgttgaccgaccgcctccgaaccgtaaaggtcatacggacacgtcatccaaccatggagcccccgtggacctagagctctcacgcaaactcaaccagcttgatcgatatctccgtgagaaccaaattgtaaaataccagcgcttttatttcccttccaaacgtgtgtcccacaaggaaatgctccaggcacaaatccagaagctcgacgacatgagaagaacgcgtcggttacaagaacgcaaggttcgaaatcaacgcatccgagaaaaagaagagagacgaaggatacaccaagcagcagagagacgaagacttgccgccgccgcacctaccgagaatgcatcagtgcaaccatcagagacttcgaagtcaagttttaggggcgcctctgtagctaataaatcgtctaagtcttctgccgccatgcacatccccggtagaaattcattggggcgacaacgccatcgtccaaatatccgttttatggacatcctcaagaatgaagaatcggttgcatccgccgaggaggagagacaagcattcgaactcgtatcttcaggttacgagggctttgagcccaaagaatcagtagatcctgcctccgactccattgacagttcatcggagctgcggacggcgtcttcaagttacgaggagttttttggtaccacagaaccgactaggccatcggctggacgtatcacgccaagaaattatatgcgctctgctctcgattcctcacagccccagcgtcgtcgctgggagccagtatggaggtcgagcaaagtcaaaatgaaacgaagtgttcaaaatagacatggagcaggctacgagcccaggggtgggaatcccttagtccgtaagttcttctcaaagccagctgatgggctactcaatccccatgaagcagagagagaagcgcgactcctgatggctcgatctcgcatatccccaatagtccgcaaaatatatagggatgatttaccacctcttgacgctgagaaagccttggctagcaatcctcaaattttgaaaaatataccacagcctgttcgaagcagtaaaagtgcaatatcgaaacgcgttcgaaaggttgggatctccaaggaattcaccttcaagaaagtctacgacgagaaccctcccccgagacctacgagttcggaaagagggtttaatctacctggtcatttgattggcattaagccggatcttcctgctggtttctctgctgctaaagcgaaggccgtggatagcgtttctaaacaaaacgtttcgaagagcttgggaagagaattctacccacctggttatttgataggtatcaacccggatcttagttcggggttctctgctgctcaagtaaaagctatggaaagcatccccaaaaataagaagtttaaggtgaagggtttaccggctaagaaccctacgaaactaaatttcttaccggagttcaaacccgcgaatcggatcttggataaagcggaaaagggaaagagggaggaaaagagacgcttggaaagtctcgctacgttaccgactgaaccaaggagggttgtgcgaattggcgatcaggtctgtttatgatcttgtgagacgtctgttttccttatgggcatggtgcaggttacggtgcattcgaatagcgggctggcatgaaaatattgttgtaacatcattgtatttgtactatatcaccagatacccaactgaaatattacggcatctctgtgcctttgtacaaatggcagacattttctcactattaagacagctcacgccgtcattctaagtcacttaaaactgtaagacatctgaagattaaaacttcaagtagacatataaaatctcaaactcaattgttaggtcttttcccatattccccaacaccacaaatgcaacccctaactaatactttccctgtcctctcctctctttattcgcaacacccttctccttcctcctcttaatcttcttctccaatcttcccttcttccacttcccatgtctctccggctgcaccacagcctctatcttcctcttcttactcctgccctctctcctattcctcgctctctctctcacggcaagtagttccttgctatactccgctgtgccgaatttgcgctgcagggcgtccatggtctctgtggctttggtcttgagcccctcgtgtcgaatcttgaaggcctcgtctaagacaaagggtgtcggtatggaggggtcggtgagttggtggagcgggatgaggagtgtgaagagtgatgggcgcagtgagggcggtgggagcgagctgatgagtagggatagaatgtctaatgctgcgactttgggaaggagaaagctggctttagcacgtgtctcttctatcagtgtgtccgagagccaggtgcagagggtgtataatgtgacgtgctgtgcttgtttatcgggttgctcatcggcgtctatcccgctccattcttcttcctcttcgccatctgaagaggcatcgtcgtccacattgttggtttcagagtccttcttggctgctcgtgtaccgggctcaaggaatttgctgagcataaggatgagtcggctggcatctgctgctaagccttcttctagttcctggggtcctttctcggcacttagatgagattccatgccgctaaaactctgtttttgcttcctcatccatcgcgctaccacattagggctcagtatactgttggcgcctacaattaggtgcttgatcattagcctgtctaacttcaatccgtgggatccgacaatgttctgctgctgagtgatagatgcgttgttcgcgtggaaatccgccaagtacatgaggattagctgtacagagcttccttggatcgaagcatcggagtgtgccagaggaatcggagtcagtctccacaactcgtcatttgcaaggaccgctgctgggtgttttcgtatcagcgtagctatggtttgtagaacaacatccaacagagttgtatccctcgcaaacgtagagtagttgtccaagactaatatcaaagcagcaaggattccttcaagatctttcttgtccttcgaggagggctctcgcgcttcgaaatagaggtcgaaagatcgaatgcctagttgtaataccgatgcattgtcattttgctctaaccagcctcgtgcaagagtcaaaaacttggacatgcgctccttatccgctttgcgaaagatctccttcatcaactcggcagcggcgaggcggcatttatcgctatcatcattgaccaacactagtactagcggaatgaaggtattggtggcaatttcttgcacgaaatcatcggctgacttggtgaggagatggtgaatgacttccatgactgacaatcggccgccttccctttcgtaagtcaggttggcaacaatgaatctcaattgcttcgcccaccgattcttcttttgcggatagtctcgtaggaattggaagaaggcacctcgtgcaaggtcacgggtatccttgtcgtcattggtaatcatcacggtacctacatagtctagagtatcatagactacagcggtttccaccttccggtccagcactgatcggaggaaattgaatgtgatatgacggtaaaggggctctgtcaggtcatctttcagtttattgagtagcatgtcgaccgctgcatccttgaccacaacatctcgtttatcgcgaagaataacagacataagctttaaagaagcttgagtgagatccgccgcaaacgaggtggatgtcgagacacattttgtggcttcctttgccgcgattttatagagttttaacgcgtcgtcggttttgaaaggaaccttagtgagaacattcaagagcttgaacgtagcaatcttaacctcttcctctcccccgaccactgcatctcccaagattggtatgaagcctgatatgttgctggcatttctcagactatcgtgcttcttgaacacggtgcgtaggacgtcaatagcaaagcgaacaagtttgaaagtatacttgcttgtgttgcttcgctcgccactcctcttcgctcctttctgcacgagatatcgtctgactcgcggatcaatcttgggctcgctttcggtcttctcgctcgcgtacacctgctcaatgacctcgtagcagaaaatgaggctatccctgcttgccgctgcagaattgccgagcaatccagacgtgattctcgaaagcaagtcatcaatcttgcggaccattttgatatcgagtttctccatgagtagcgcacggattggacgaatgagtgcaccaaagtgagtcacggaagcgtttcgagcgatgagttccatcgaatcctgactcttgctgctcttgacttccttggtcttgctcgtgtattcctctgcatccttttcctgcccagtaatgccgaatatgtcatccattattatggccatgatatcatcaagacaatagtccagatcccccggttcggaatggggtatgagatcaataagaatggtgtgcattgtataagacaaaacgtggagttgataaccatgcaacaaagctcctcgaagttctttcaggacaaacccaaagtacggaggacctaggagtaaggtcatcttggaaagggtatcgcgagtcatgtccctagcttccaccgctttgctgcgtagaatatggcagagatctgtaaggagacccggtagtttccgcctcattgattcgtctgggagaagctttagaagtttgacaataatgatgccgactggtactcgagagctgacggtagtttcgtccttctcgtgcatataatcgagtaaaggaggcaaaacattactaagaatatcttcattgaacttttctaaggagggccttgtttttgctagatgtgacttatggatctctgacgaagctggcatatcaacatccatttcgtcttgatttttctgatctgaaccaagggttagagtgtcgacaaattttccgagaagcctaactacttgcttctgctcatcaggtttcgtttcaatgtaactgatatatcggcgaagaattgcccggtactgtggccattcaagagacacagcaagatccgaaatcgttgtcgccgcttgagccccaacaccttggtcatcaacgccatctggccggttgaagatgaaatgctctagtagaggcacgaaaaattgcgatacgtgacggctgctcaatgatgtgcgtacgctgaccttagacaacagctgtagagcacgcatttgccttgccgtagctggactaagaatgttactaaaaaagctcggatcggggtctttgtcgtctggctgaggatcaagtgtgacgagatcagagaccaggctccagtctggtgtttgagaaatgatataacccataactctaacagtctctcgccgaacagtttccgaaagttccttgacgttagagtaaatagatggcatgatgatcgaagacagcatagcgtagaattggtccttcacttctaatgatgcaacaaccgcatcaacaaatctgcacattgcgtcggcggaatgggctgagagaacgccgtattcctcatcatgcttgatgtagaatacaaagttatagacaagaggtagccattctctcggcgtaaatgcgacgtctctagtgcttgataacttgttaaaggtagcaagacgtttcttgtagtctggttcgtcaatgcgttttgcgtcgaaggcattgatatcagcacatatcaaagcaatctcatcagtccgggactccctgcgaagtagaaccgcaagtacacttgacagagtctctcgactcttccggtccctaaagtagccataaagcgatgcaatggttgtataaatctgatccagtaaagccggctcgaaggatgtttcgtccagggcaagaaagccctcaatcatcagaagtattaaacctttagtcttcgggttgactcgttttgacgattcgttgagaaggaacacggaaatttcaaccaagctcgctacatggagagactgctgaatcataggagaaagttcaaccacagtttcaacacaggtcaagaggacgtctttgctgatatctgtctcggttttgagaagggagccgatagtttcaagtatcgtatcgatgttgggaccaatgacttcttcagcaaggagctcattgtattcgttctctgcggctggcaactgagcgagcttcaccaggctacgcacaatactcagagcaaatatcctgacctcgtctttacacttagcgaaggcaacaagactcatcaacttagagagaatgcggtcgtcgacagtgaaaaataaggcggtctcaggcaattgcgaaaaagtcgacagtagttgaagtgtgccagatattccttgagtattctcaataggcaacttgtcaagacgtgggctgataacttctctgatcagcatttcccggtaagacgtccacttagctttgggcgcattttgaagtaacaaaattatgcacttcaagctcgtagtccttataactcggaacaatgacgcatgctgaatggtgttatcttcttcatcgtcggaggctgtcagaagcttgcggcaagaggaaacgagacagtataggatggcgtgcaacaacttctcgacatattccacagcgcttgagcccaattctcggatcatagattccatcatgtttagaaaaccaacctgctttcgaggcgcgagcagatcttggtggaaaatttcctcgttgatagtcgcattgtcgatgactttgatatctcgaagattaccaagcgaaatgtctaagaagtcacccatatctttgactgtgaggtgtctcaagaccatcagacgggttgagtgcaagccttgccggccgctagacgcgcctttcttcgagattgatcggccatataaaagacggagaagaactggcataacttccgcgcgatgctcgggttgaatttggtgatctccttggaagagaactgtcagttcatttttgaatctagcttcatcaagcaaatactccagactttcttgatatggcttgacaccttcttgtttccacgccagaatagctttgagggcggatttttgaatttcgatatcaccatttccaagcagaacaagaagggcctcgtagacctgctgactctggtagagtacttttgggttcgaaaattgggcaaataccccgatcaagatcttcttgtcgaacagagaccatgacctatcagctgctgcgaattcatcatgggcgtcatcctcttcatgattaagaacccaagagagaaaaatcgggacgagcttccgagacttcttttccgcaagcgctggtgctgctaggaagactttcaatgattgcgatcgcgcgttgactggaatctcttgtaccaaattctgtcccttttcgaatgattctagcataatgtccggggcatttgcaatcacattctcggtatcttctgcttgagtgtgaagacttgaaagattcgtacactcgaaatcggtctggccagtacgagatgttgcctttgaatgggctgaggaaccttcccaacgtttggacggatgttccatccatttaaacgcaatttcacagatgacttgctccccggactgtgtctggccaatctgctgcaaagcatcgacagcagcgtcccaaataggagtcaactgtaccgtcatcaggccgaacagaaattgaggaattgcatctcgaagccacgatgtctcagtcaaatttggatatgcagcagccaggttccgcatgtgcatagagtaagctcggacgctttttaaatcaaccggggtttcctcggtctctaacatgagagcaagagggctccggtcctggttcaagttgtctggagcagaatcaagcttgctcaggagtcgtaaggcagctagtctatgggcatgagacggcatcgacagcccttgtatcaaactttgcaggaatggatcgacaacttctgtttcactcccattacttctttcactttgagattgtggacttctttcgccacataaattctcatattccaacattgactccaaaaatcccgtgagacgggaataacgtggcgtggcagctttgagaagtggcaagagtgcattgtctaattgaccaattactttagtcatccgaagataggcagaaaacccttgggtaacaatgaagcaagcttcctcagtcagcggagattgtgatggccgcagtgcaagttttaatttccgtagtaacaggtctgctattggactcatagtggatgggcggacattggtatactctagaagacggaggagggccgaatatttcggtaagcatttatcccgccatgtcttagagtctttgtcgtatccgccagatgcgctctgttcaggaaacggagatatttccaggcgctcaaatttactaacgatttggtcttgccatcgttgaggcaaagaaaatgcatctggttccgcagcggctggaagagatcgagattcaatcatctgcgggatgaaaacacaaagcatgtcttcgttagaaccatca

SEQ ID NO: 2080 - DNA, 2550 bp, Muscodor strobelii
  misc_feature: SGI cDNA ID NO. 560312
  misc_feature: Reduced expression when VOC is produced
  misc_feature: Encodes the peptide sequence at SEQ ID NO 2081
atgattacaggacggggagggtccatgggccgggccggtcgtattcgccctccgcgtagggttggcgccgagtccggaagcaaggccgagtttgacgaatgctgggataagctccgcaccgccctccgcgacatccacgccaaagacgccggcaacctctcgttcgagtctctctaccgctactcctacaagatcgtccttatgaaggctggtcatgtgctgtacgataaggtcaaggacttcgaggagcagtggttcgccgacgaggtcatgcccccgatcgccgccctcatcaccaagaacctcgtcagcatcaccctcgacggcgcccccggcatcagcatcgtcgagcgccgggccctaggcgagaagttcctcaagggcatccgcggctcgtgggagaaccacaacatgtcgatgaacatgatcgccgacgtcctcatgtacctcgaccgcggctacaccgccgagcaccaccgcccctccatctacaccaccaccatcggcctctaccgcgacaacatcctgcgctccaacctcggcgtcaccggcgccaccaccgcccacttcgccgtcttcgacatcctcaacgccaccatcaccgaccagatcaacatggagagagagggcgacgtcatcgacaaggccctcctgcgcagctgcgtcgccatgctcgagggcctcttcgagaccgacgacgagcgcgagcgcgagcgtctgtacctcaccactttcgagccctatctcctccgaacgagtcgagacttctaccaagccgagtgtgacagactgctgcgcgaaggaaatgccagtgcctggctgcgtcagacccagagccgactgaccgaggagaatgcgcgctgtcagaccaccatatctggactgtcgcaacagaagctggcgcaagtcgtagaggaagagctcatcacgaagcatctcgacgagtttctgcaactagacactagcggtatacggacgatgatcgaccatgacaagatcgaggacctgaagattctctatactctaatatcccgcgttgacgacaaagtcgtaaagctgcagaatgcccttgctgctcgtgtcatggatctcggaatggagattgagcagacgctcaacaacaccgatttcagtatcccgcaggagcccgcggctgaagcccccgagggtgcgaccgacaaacccaaaccaaaggtattaaatgctgctgctcagctttcagctgccgccatcaaatgggtcgacgatgtgctgtcgttaaaagacaaatttgatcggctttgggtcgagtgttttgagcggaaagctgtcctcgagacggccttgactcgcagcttctccagcttcatcaacagatttgatcgagcatccgagttcgtatctctcttcatagatgacaacctaaaacgcggcatcaaggggaaatccgatgcggaggtcgatattgttctcgacaaggctatcacccttctcaagcacctcaacgaaaaggacaaatttgaacagtattaccagaagcatctggctcgtcgactcttacatggcaagtccgagagccaggatattgaacaggagatgatctcccgcatgaagagagagctcggcaataattttactcaaagatttgagggcatgttcagagacatgaacacgtcgcgggagacaacggaagaatataggaaacatgtgcgaggtcttggcgaggtagacgaccgccgaatcgatctaagcatttccgtactcgctggtaacaactggcctaaaggggtcatgggaggaagcacgagtcttactgccgaaaacaaatccaatacaatatttccaaaaagcattcagaagctacaggaaagctttctcgatttctactcgaagagccgtaatggtcgcgttctcacatatgtgggaagcgctggcagcgctgacatcaaatgtacctttcccaaggtggccggcaaaacttcaggaccgctttccaaagaacgccgctacgaaatcaacattagcacctacggcatggttgtacttccgctgttcaatgacctcaaggaagacgagtggctgtcgtttgaggagatccaagccgccacacaaattcctcaggcggatctcatcaacgcgttaacgtcgatatcggtaatgaagccatacaagctacttatcaaagaccctccgaccaaagctgcggccaaaccaggtgataagttcacgtttaactctgagttcctcagtaaacaaatcaaaattaagattccgtcagtcaatgccgcgaacagggtagagaacgatgaggagcgcaaagagacggacgagaagaaccgagagaccagaaagcatattgctgactccgttattgtccgtatcatgaaacaacggaaagagctcagccacactcaactcgtgacggaagtgattcaggttttgagtggtcgcttcaagccagatatggccctcatcaagggccagattgaatcattaatcagtcgtgaatatctcgagcgagatgagctgcctgatggctcgccggctgacaactacaagtacatggcctag

SEQ ID NO: 2081 - protein, 849 aa, Muscodor strobelii
  misc_feature: SGI Peptide ID NO. 560312
  misc_feature (35)..(742): Pfam Id: PF00888 Pfam Desc: Cullin family
  misc_feature (10)..(849): NCBI GI: 38567091 Blast Desc: related to cullulin 3 [Neurospora crassa]
  misc_feature (1)..(849): NCBI GI: 256735323 Blast Desc: [Nectria haematococca mpVI 77-13-4]
  misc_feature (22)..(849): NCBI GI: 46105462 Blast Desc: FG00359.1 [Gibberella zeae PH-1]
  misc_feature (31)..(849): NCBI GI: 171695478 Blast Desc: protein product [Podospora anserina] gi|170947981|emb|CAP60145.1| protein product [Podospora anserina]
  misc_feature (30)..(849): NCBI GI: 116181016 Blast Desc: CHGG_01136 [Chaetomium globosum CBS 148.51] gi|88185433|gb|EAQ92901.1| CHGG_01136 [Chaetomium globosum CBS 148.51]
  misc_feature (9)..(849): NCBI GI: 39972873 Blast Desc: MGG_07731 [Magnaporthe grisea 70-15] gi|145012498|gb|EDJ97152.1| MGG_07731 [Magnaporthe grisea 70-15]
  misc_feature (42)..(849): NCBI GI: 164427918 Blast Desc: NCU02498 [Neurospora crassa OR74A] gi|157071935|gb|EAA35856.2| conserved [Neurospora crassa OR74A]
  misc_feature (25)..(849): NCBI GI: 154311108 Blast Desc: BC1G_06672 [Botryotinia fuckeliana B05.10] gi|150851076|gb|EDN26269.1| BC1G_06672 [Botryotinia fuckeliana B05.10]
  misc_feature (25)..(849): NCBI GI: 156034653 Blast Desc: SS1G_13261 [Sclerotinia sclerotiorum 1980] gi|154698665|gb|EDN98403.1| SS1G_13261 [Sclerotinia sclerotiorum 1980]
  misc_feature (1)..(849): NCBI GI: 261356498 Blast Desc: cullin-3 [Verticillium albo-atrum VaMs.102]
  misc_feature: Useful for introducing or modulating the production of volatile compounds
MITGRGGSMGRAGRIRPPRRVGAESGSKAEFDECWDKLRTALRDIHAKDAGNLSFESLYRYSYKIVLMKAGHVLYDKVKDFEEQWFADEVMPPIAALITKNLVSITLDGAPGISIVERRALGEKFLKGIRGSWENHNMSMNMIADVLMYLDRGYTAEHHRPSIYTTTIGLYRDNILRSNLGVTGATTAHFAVFDILNATITDQINMEREGDVIDKALLRSCVAMLEGLFETDDERERERLYLTTFEPYLLRTSRDFYQAECDRLLREGNASAWLRQTQSRLTEENARCQTTISGLSQQKLAQVVEEELITKHLDEFLQLDTSGIRTMIDHDKIEDLKILYTLISRVDDKVVKLQNALAARVMDLGMEIEQTLNNTDFSIPQEPAAEAPEGATDKPKPKVLNAAAQLSAAAIKWVDDVLSLKDKFDRLWVECFERKAVLETALTRSFSSFINRFDRASEFVSLFIDDNLKRGIKGKSDAEVDIVLDKAITLLKHLNEKDKFEQYYQKHLARRLLHGKSESQDIEQEMISRMKRELGNNFTQRFEGMFRDMNTSRETTEEYRKHVRGLGEVDDRRIDLSISVLAGNNWPKGVMGGSTSLTAENKSNTIFPKSIQKLQESFLDFYSKSRNGRVLTYVGSAGSADIKCTFPKVAGKTSGPLSKERRYEINISTYGMVVLPLFNDLKEDEWLSFEEIQAATQIPQADLINALTSISVMKPYKLLIKDPPTKAAAKPGDKFTFNSEFLSKQIKIKIPSVNAANRVENDEERKETDEKNRETRKHIADSVIVRIMKQRKELSHTQLVTEVIQVLSGRFKPDMALIKGQIESLISREYLERDELPDGSPADNYKYMA

SEQ ID NO: 2082 - DNA, 3506 bp, Muscodor strobelii
  misc_feature: SGI EST ID NO. CUFF.5303.0
  misc_feature: Variant of the nucleotide sequence at SEQ ID NO 2080
caagaactaaagctcatggaggggcaaatgcttccgtctctatctccgtctccgtggtttggggattcgtcaagtgtctatctcttttaaggttgaatagattgggagttcggctcgggttaggtctagatctttgtatgttttactaaagaacaaagtcgaaccataaccatagcattgcagtgcatttggaaacacccgctagagctagaaggtgttgggttgttgactgctcttccctcggaactgtctgaaccaatcaattcggacgaacgccgctgcctttggtgacgttttgtgacatgaatcccttcgtgaaccattttaattctttatatcgccgttttatgctaccgtttctcgctgccccagaaaacattcttgcttcctggattatccattacctcgcagaccatctgccataccaaacaagatacccgatactattctatatctgaccgtgacccttgctctcgtccaaagtcgtcggtcttgctgtcgagtcaacccgtctccaacctttgtgcctggccatattagtccccttattaatatacattccctctctccttccgacactccgtcctcccgacaactcactgttatactgcctactgccaagtcttagacatacacatacatactgcaagcatcgcccaacagtctctcgaggggtatgcaacatgattacaggacggggagggtccatgggccgggccggtcgtattcgccctccgcgtagggttggcgccgagtccggaagcaaggccgagtttgacgaatgctgggataagctccgcaccgccctccgcgacatccacgccaaagacgccggcaacctctcgttcgagtctctctaccgctactcctacaagatcgtccttatgaaggctggtcatgtgctgtacgataaggtcaaggacttcgaggagcagtggttcgccgacgaggtcatgcccccgatcgccgccctcatcaccaagaacctcgtcagcatcaccctcgacggcgcccccggcatcagcatcgtcgagcgccgggccctaggcgagaagttcctcaagggcatccgcggctcgtgggagaaccacaacatgtcgatgaacatgatcgccgacgtcctcatgtacctcgaccgcggctacaccgccgagcaccaccgcccctccatctacaccaccaccatcggcctctaccgcgacaacatcctgcgctccaacctcggcgtcaccggcgccaccaccgcccacttcgccgtcttcgacatcctcaacgccaccatcaccgaccagatcaacatggagagagagggcgacgtcatcgacaaggccctcctgcgcagctgcgtcgccatgctcgagggcctcttcgagaccgacgacgagcgcgagcgcgagcgtctgtacctcaccactttcgagccctatctcctccgaacgagtcgagacttctaccaagccgagtgtgacagactgctgcgcgaaggaaatgccagtgcctggctgcgtcagacccagagccgactgaccgaggagaatgcgcgctgtcagaccaccatatctggactgtcgcaacagaagctggcgcaagtcgtagaggaagagctcatcacgaagcatctcgacgagtttctgcaactagacactagcggtatacggacgatgatcgaccatgacaagatcgaggacctgaagattctctatactctaatatcccgcgttgacgacaaagtcgtaaagctgcagaatgcccttgctgctcgtgtcatggatctcggaatggagattgagcagacgctcaacaacaccgatttcagtatcccgcaggagcccgcggctgaagcccccgagggtgcgaccgacaaacccaaaccaaaggtattaaatgctgctgctcagctttcagctgccgccatcaaatgggtcgacgatgtgctgtcgttaaaagacaaatttgatcggctttgggtcgagtgttttgagcggaaagctgtcctcgagacggccttgactcgcagcttctccagcttcatcaacagatttgatcgagcatccgagttcgtatctctcttcatagatgacaacctaaaacgcggcatcaaggggaaatccgatgcggaggtcgatattgttctcgacaaggctatcacccttctcaagcacctcaacgaaaaggacaaatttgaacagtattaccagaagcatctggctcgtcgactcttacatggcaagtccgagagccaggatattgaacaggagatgatctcccgcatgaagagagagctcggcaataattttactcaaagatttgagggcatgttcagagacatgaacacgtcgcgggagacaacggaagaatataggaaacatgtgcgaggtcttggcgaggtagacgaccgccgaatcgatctaagcatttccgtactcgctggtaacaactggcctaaaggggtcatgggaggaagcacgagtcttactgccgaaaacaaatccaatacaatatttccaaaaagcattcagaagctacaggaaagctttctcgatttctactcgaagagccgtaatggtcgcgttctcacatatgtgggaagcgctggcagcgctgacatcaaatgtacctttcccaaggtggccggcaaaacttcaggaccgctttccaaagaacgccgctacgaaatcaacattagcacctacggcatggttgtacttccgctgttcaatgacctcaaggaagacgagtggctgtcgtttgaggagatccaagccgccacacaaattcctcaggcggatctcatcaacgcgttaacgtcgatatcggtaatgaagccatacaagctacttatcaaagaccctccgaccaaagctgcggccaaaccaggtgataagttcacgtttaactctgagttcctcagtaaacaaatcaaaattaagattccgtcagtcaatgccgcgaacagggtagagaacgatgaggagcgcaaagagacggacgagaagaaccgagagaccagaaagcatattgctgactccgttattgtccgtatcatgaaacaacggaaagagctcagccacactcaactcgtgacggaagtgattcaggttttgagtggtcgcttcaagccagatatggccctcatcaagggccagattgaatcattaatcagtcgtgaatatctcgagcgagatgagctgcctgatggctcgccggctgacaactacaagtacatggcctagttgtttctatctcttggtccttatgatttcacaaacgcattagcaatggcatggttcagtagtggaggccatgcgacacgattctaggcatcggacatgagaaagcgtgcattggtcggggttgggattgtacatgctcgcattactggcgtaaggtgctcggtcggttctttcaggtagacaatgcatcagttctactcgtaactactgaataattaaagaacttccacatcatcattcttgtctttcactggcactgggggactcttcccg

SEQ ID NO: 2083 - DNA, 2262 bp, Muscodor strobelii
  misc_feature: SGI cDNA ID NO. 560313
  misc_feature: Encodes the peptide sequence at SEQ ID NO 2084
atgccggctaatagacgatcggagagtctgcttagacttgagactcttggcgcgctgtctgagtgttacgatcatgttacgaaggccgcgagcgagagtggagttgggggagatgatgatgggcatgagagtcagtgggaggttgatagtgatgcgtccaaggcgagtactgttgccgtggtctttgataagccggctccgcctggggtcaagaaacttaggaagcgacaagctgagcttcaaacccaattccaaccccagcgcaggccgagcgagagtgcttggagcgatgatagtgaggatgagctttgcattaatgcttcgaagctcagacctgcgaagggtatgagacggctgccgagacctgggtcggcggtttatgctgagcagggtgaggctatgagacaccccagtgttcttcgacctggccctcgggatggtgtaaaggtgcagagtccggtcaggacgaatggctccaacccgccttcgccggtttatgctcagcctcaaggggatttgagatcgaggtattcggcttatcgtcctgaggagactgcgtctcctgttcatacgaggaccagtgcaactggaagccggcacacggggtcgtcgttcgttgatctatatgtcaatgcttcgaccccgtctgctagcaatagtgtatcggatatcaagcgtccaggcacttccttcgctgacagatatgccagagcctctgctccctctacgcctgtaagcaacacggaaaacagatatagcgggcattatcaggttcaaccccagccttgtccctcgcccgaaccagtactaaatcaaatatacggctcggatttcgaactcctcgggcctcccacaccaccggcccattatcccgtcgtgcaacctcctgttcagcattaccctgccgtccaacctccggctcaataccacgccgcaccgtctgttcccgcggtataccccgggcatcctcagactaggcgtaccgctcccgtcgaacttccgacacattacaatgtgaaggcatcactcgaccctcctcgagctgagaccccaacaaagaagcgcgcgtccttcatagagcgagcgcaggagcatatgcgtgcaagttatcacgagcacatggtgaaagcgggcttgaggcctaacgatcttcaaaccgccccaaggagccatacttctacgactaggtcgactgggttaaagactccctccagacctgcttcaacagcgcctcacaatcgtcccgcctctactgcacctcatagccgttctcaatctaggcatacttccacaccacatcaagaaaggggtcgtgtctcaacaaccaccgtctcaccccctgaacagcgtggccgtgccgaaacccgcaacatcagcacctctcgagtcccctcccgctcccccagtcccgcctacggctcctgggtcgacgaccatcccaaagcgaaacgcgcctccttcgtcgaccgcgcaaccgagcactgggacagatgggaaaacgaacacatgatcaaagccggtcggcgtcccaaccccaccttctccgtaagttccgtagccaagaacccctacccgcaaggccacgatgggctcatcgccgtgcaaaacgaggatcagctcgagttccaggcttggcggagggaacacgcggatgatttgcgtcgtcctgtttcggggtcgattgaccaatttaggcgtaaggatggggtagaaagtgtcgtggattggagaagtacgccggtcaatgggagaaaagaggagagtttgttctttgatgggaagaaaatgggggggaatccggcgggttactcgttttttagctcggattatgtgcagaggcagattgcttcgcaggcttctcgtgctgaacctcaagcggagacaaagacgcagccgctgcctcgttcacagtccgcgtctggcttcagagagacctttgaacttgagggctcacaaccatctattccacctcgtcctatgtctgtcgccggattcagagacacggattctactccggtgccaactcaacttcctagagctaagacgacacctgcgttgtcgaaggaagctcttgagtttgggcaattgcctagtcctcttgaggacctcaagaagaatgctctgccgagtcctctagaggatgtcaggcatgatgatcgttgggcgttaccgattcagcaacggtaccaggagcagtttggacagcatcagcctgctccgagcaggagtttggctaggaagaggggcatgcagttaagatga

SEQ ID NO: 2084 - protein, 753 aa, Muscodor strobelii
  misc_feature: SGI Peptide ID NO. 560313
MPANRRSESLLRLETLGALSECYDHVTKAASESGVGGDDDGHESQWEVDSDASKASTVAVVFDKPAPPGVKKLRKRQAELQTQFQPQRRPSESAWSDDSEDELCINASKLRPAKGMRRLPRPGSAVYAEQGEAMRHPSVLRPGPRDGVKVQSPVRTNGSNPPSPVYAQPQGDLRSRYSAYRPEETASPVHTRTSATGSRHTGSSFVDLYVNASTPSASNSVSDIKRPGTSFADRYARASAPSTPVSNTENRYSGHYQVQPQPCPSPEPVLNQIYGSDFELLGPPTPPAHYPVVQPPVQHYPAVQPPAQYHAAPSVPAVYPGHPQTRRTAPVELPTHYNVKASLDPPRAETPTKKRASFIERAQEHMRASYHEHMVKAGLRPNDLQTAPRSHTSTTRSTGLKTPSRPASTAPHNRPASTAPHSRSQSRHTSTPHQERGRVSTTTVSPPEQRGRAETRNISTSRVPSRSPSPAYGSWVDDHPKAKRASFVDRATEHWDRWENEHMIKAGRRPNPTFSVSSVAKNPYPQGHDGLIAVQNEDQLEFQAWRREHADDLRRPVSGSIDQFRRKDGVESVVDWRSTPVNGRKEESLFFDGKKMGGNPAGYSFFSSDYVQRQIASQASRAEPQAETKTQPLPRSQSASGFRETFELEGSQPSIPPRPMSVAGFRDTDSTPVPTQLPRAKTTPALSKEALEFGQLPSPLEDLKKNALPSPLEDVRHDDRWALPIQQRYQEQFGQHQPAPSRSLARKRGMQLR

SEQ ID NO: 2085 - DNA, 1540 bp, Muscodor strobelii
  misc_feature: SGI EST ID NO. CUFF.5306.0
  misc_feature: Variant of the nucleotide sequence at SEQ ID NO 2083
tgttcttcgacctggccctcgggatggtgtaaaggtgcagagtccggtcaggacgaatggctccaacccgccttcgccggtttatgctcagcctcaaggggatttgagatcgaggtattcggcttatcgtcctgaggagactgcgtctcctgttcatacgaggaccagtgcaactggaagccggcacacggggtcgtcgttcgttgatctatatgtcaatgcttcgaccccgtctgctagcaatagtgtatcggatatcaagcgtccaggcacttccttcgctgacagatatgccagagcctctgctccctctacgcctgtaagcaacacggaaaacagatatagcgggcattatcaggttcaaccccagccttgtccctcgcccgaaccagtactaaatcaaatatacggctcggatttcgaactcctcgggcctcccacaccaccggcccattatcccgtcgtgcaacctcctgttcagcattaccctgccgtccaacctccggctcaataccacgccgcaccgtctgttcccgcggtataccccgggcatcctcagactaggcgtaccgctcccgtcgaacttccgacacattacaatgtgaaggcatcactcgaccctcctcgagctgagaccccaacaaagaagcgcgcgtccttcatagagcgagcgcaggagcatatgcgtgcaagttatcacgagcacatggtgaaagcgggcttgaggcctaacgatcttcaaaccgccccaaggagccatacttctacgactaggtcgactgggttaaagactccctccagacctgcttcaacagcgcctcacaatcgtcccgcctctactgcacctcatagccgttctcaatctaggcatacttccacaccacatcaagaaaggggtcgtgtctcaacaaccaccgtctcaccccctgaacagcgtggccgtgccgaaacccgcaacatcagcacctctcgagtcccctcccgctcccccagtcccgcctacggctcctgggtcgacgaccatcccaaagcgaaacgcgcctccttcgtcgaccgcgcaaccgagcactgggacagatgggaaaacgaacacatgatcaaagccggtcggcgtcccaaccccaccttctccgtaagttccgtagccaagaacccctacccgcaaggccacgatgggctcatcgccgtgcaaaacgaggatcagctcgagttccaggcttggcggagggaacacgcggatgatttgcgtcgtcctgtttcggggtcgattgaccaatttaggcgtaaggatggggtagaaagtgtcgtggattggagaagtacgccggtcaatgggagaaaagaggagagtttgttctttgatgggaagaaaatgggggggaatccggcgggttactcgttttttagctcggattatgtgcagaggcagattgcttcgcaggcttctcgtgctgaacctcaagcggagacaaagacgcagccgctgcctcgttcacagtccgcgtctggcttcagagagacctttgaacttgagggctca

SEQ ID NO: 2086 - DNA, 3243 bp, Muscodor strobelii
  misc_feature: SGI cDNA ID NO. 560314
  misc_feature: Encodes the peptide sequence at SEQ ID NO 2087
atgtcggccccaaagacttccaacgggaatcacaagccggcgaatatctccgccgagctctcagacttgcactgctacacggagacagacggcgtgataacaaccaccatgtttgatgtaccaggctacaaagtcgtccgagtcctgggaacggtctacggcttgacagtccgatcgcgaaactgggcagccaccatgggaatggtggcgaaaagtggtacgtatagaaagatcccacgcgagttatttttaattgtattcctaagacatgtcactgacttctttataatcgttggcggcgagttgaagtggctcactaatatgatgtactcttgccgcaacgatgccatctcaagggtcgtggccgaggcgaagcaacgaggcggcaacgctgtcatctgtatccgatttgaatctggcgacttaggcgggtttgcgcactgctcggcttatggcacggctgcgattatcgagaaaatcgatccgagcgttgaggcaccacctcagctggcatcgccacgtccctcacacgactccctctcgtccgtgtcgactacgagcctagtcttcgagcgactcgccgagcgagagaaggctagcgagaagtatgtcgacaatgtctccgacctgaacgacgacgatcccctaggccatgaccatgacgacgagcgcggcgcattcctatccgagccgatgtcgcgaaagacccaaggcatggacaataagttcaaaagaatactgctgatagcatgcggtcttcttgtcacggcctgggtcgtcggtttggctacatttatcgcgtccaagtcttaccagcattcttccgagaaagaccacgatccaactgcgaccgcgtctcgtggatccggtaagaagatcacacttgaccaggtcctcaccggttactggtatgccgaatcccaccagatcagctggatcgatggtgccaacggcgaggatggactgctcctcgaagagaatgctcggggcaaggactatttggttgtcgaggatgtccgaagcatggaccccaacttcgctagctcgggtgccagtgttgcttcttctaagactctgatgaagcggtccattttcaatgcccccggccgaattctgcaaccggaaaacctatggcccagtccggatctcactaaagtcctcattgccaccgacatcaagcaggtctggagacattcattcactgccatatactggatcttcgatgtcgagacccaagaagccgagcctttggaccccaatgatgccaatctcagagttcagttggcccaatggaacccaaagagcaacgcgatatcttacaccagttccaataacttatacgtgcgacagctgcaaagcaagaaggtcattcaagttacaaaggatggcggaccagagtacttctacggaattcccgactgggtgtatgaggaagaagtatttagtgacaatagcgcaacctggtggtctggatcgggtgattacatggctttcctgcggacgaatgagacccgtgtgcccgaataccctattcagtatttcattgacagaccaagtggtgaacagccaccagagggcgaacagagctatccagaggtccagaggatcaaataccctaaagctggctcgcctaacccgacggttgagctcctattctatgacatgattaaggggaataccttcactgtcgagatcgagggcggctttgccgcagatgatcttctcatcactgatatcacatggatgggtaacaaagtaatgatcaaagaaaccaacagagtgagtgatattatgcgtgtggtcttggtcgatgttgttgctcgaacggggaagacagtccgaactgtggatgtgggcaagactgatgggggctggttcgagatatcgcacgacaccacctatatccccgcagaccctgacaacggaagatcggaagatggttatctcgacactgtcattcatgacaatggcgatcatttggcatacttcagtcctttggatacagacgaaccagtgatgttgaccaagggcgactgggaggtaacggaagcaccatcggctattgaccttaaaaataacctggcttacttcgttgccactaaagaatcttcgattcaacgccatgtctacagtgtcaagtttgacggctctgacctcaaagccataacggatactagcaaggatgggtattaccgcccttctttctctcgaaaagcaggatatgttcttatgtctaatggcggaccgggtataccaacccagaaagtcattagtacaccgagcaactccgaattctacgagtacgtaattgaggagaacaaggagctggcgaagaaagcgagccagcatgagctcccacttctcaaatacggcacaatcaatgttgatggcttcgacctcaactacgtggaacgtcgtccaccccatttcaacccgaagaaacaatatcctgttttgttccagcaatattctggccctggttcccagtctgtaacgaagagattctcggttgatttccaatcgtatgttgccgccaacttgggctatattgtagttacagtagatggtcgaggtacgggattcattggtcgtaaagcacgtgtcgttgttcgcaagaaccttggacaatgggaagcacatgatcaaattgccgccgctaagatatgggcagcgaagccgtacattgacgacgctagagttgccatctggggctggtcatatggcggctatcaaactcttaagacactagaggcggatgctggagagactttcaaatatggcatggctgttgcacccgtaactgattggcgtttttacgactcgatttacacagaacgatacatgctcacgccccaagagaatgcagctggatacgacaacaccgccgtcagcaatgtcacttctctcgcagagaacgtgcgattcctcatcatgcatggtctcgctgatgacaatgtccacatacaaaacactctcacactacttgacaaattggatctagcgggcatcgagaactacgatttgcatatgttccccgacagtaatcacggcatctatttccacaatgccaatcgtattgtctatgataaattaaacaactggctcatcaacgctttcaatggcaattggctcaagatcgcaaatgctaagccaaatcctttaaaggctaagagaaatgctactgaccaaatgaaagcatccttggaggaattgtcgtggtcggatgataccaatgattggtga

SEQ ID NO: 2087 - protein, 1080 aa, Muscodor strobelii
  misc_feature: SGI Peptide ID NO. 560314
  misc_feature (380)..(753): Pfam Id: PF00930 Pfam Desc: Dipeptidyl peptidase IV (DPP IV) N-terminal region
  misc_feature (32)..(158): Pfam Id: PF01906 Pfam Desc: Domain of function DUF74
  misc_feature (835)..(1042): Pfam Id: PF00326 Pfam Desc: Prolyl oligopeptidase family
  misc_feature (97)..(158): Pfam Id: PF01906 Pfam Desc: Domain of function DUF74
  misc_feature (32)..(61): Pfam Id: PF01906 Pfam Desc: Domain of function DUF74
  misc_feature (176)..(1057): NCBI GI: 85119501 Blast Desc: NCU02515 [Neurospora crassa OR74A] gi|28927458|gb|EAA36410.1| NCU02515 [Neurospora crassa OR74A]
  misc_feature (174)..(1056): NCBI GI: 171696292 Blast Desc: protein product [Podospora anserina] gi|170948388|emb|CAP60552.1| protein product [Podospora anserina]
  misc_feature (188)..(1058): NCBI GI: 156050315 Blast Desc: SS1G_07744 [Sclerotinia sclerotiorum 1980] gi|154692145|gb|EDN91883.1| SS1G_07744 [Sclerotinia sclerotiorum 1980]
  misc_feature (169)..(1058): NCBI GI: 154295025 Blast Desc: dipeptidyl aminopeptidase [Botryotinia fuckeliana B05.10] gi|150844417|gb|EDN19610.1| dipeptidyl aminopeptidase [Botryotinia fuckeliana B05.10]
  misc_feature (174)..(1060): NCBI GI: 116180972 Blast Desc: CHGG_01114 [Chaetomium globosum CBS 148.51] gi|88185411|gb|EAQ92879.1| CHGG_01114 [Chaetomium globosum CBS 148.51]
  misc_feature (182)..(1052): NCBI GI: 46122487 Blast Desc: FG05621.1 [Gibberella zeae PH-1]
  misc_feature (221)..(1054): NCBI GI: 39972901 Blast Desc: MGG_07745 [Magnaporthe grisea 70-15] gi|145012514|gb|EDJ97168.1| MGG_07745 [Magnaporthe grisea 70-15]
  misc_feature (174)..(1063): NCBI GI: 256729652 Blast Desc: [Nectria haematococca mpVI 77-13-4]
  misc_feature (172)..(1051): NCBI GI: 169602417 Blast Desc: SNOG_04207 [Phaeosphaeria nodorum SN15] gi|111066847|gb|EAT87967.1| SNOG_04207 [Phaeosphaeria nodorum SN15]
  misc_feature (170)..(1051): NCBI GI: 261356510 Blast Desc: dipeptidyl aminopeptidase B [Verticillium albo-atrum VaMs.102]
  misc_feature (376)..(1031): SWISSPROT Homolog: EC 3.4.14.5 Dipeptidyl-peptidase IV
MSAPKTSNGNHKPANISAELSDLHCYTETDGVITTTMFDVPGYKVVRVLGTVYGLTVRSRNWAATMGMVAKSGTYRKIPRELFLIVFLRHVTDFFIIVGGELKWLTNMMYSCRNDAISRVVAEAKQRGGNAVICIRFESGDLGGFAHCSAYGTAAIIEKIDPSVEAPPQLASPRPSHDSLSSVSTTSLVFERLAEREKASEKYVDNVSDLNDDDPLGHDHDDERGAFLSEPMSRKTQGMDNKFKRILLIACGLLVTAWVVGLATFIASKSYQHSSEKDHDPTATASRGSGKKITLDQVLTGYWYAESHQISWIDGANGEDGLLLEENARGKDYLVVEDVRSMDPNFASSGASVASSKTLMKRSIFNAPGRILQPENLWPSPDLTKVLIATDIKQVWRHSFTAIYWIFDVETQEAEPLDPNDANLRVQLAQWNPKSNAISYTSSNNLYVRQLQSKKVIQVTKDGGPEYFYGIPDWVYEEEVFSDNSATWWSGSGDYMAFLRTNETRVPEYPIQYFIDRPSGEQPPEGEQSYPEVQRIKYPKAGSPNPTVELLFYDMIKGNTFTVEIEGGFAADDLLITDITWMGNKVMIKETNRVSDIMRVVLVDVVARTGKTVRTVDVGKTDGGWFEISHDTTYIPADPDNGRSEDGYLDTVIHDNGDHLAYFSPLDTDEPVMLTKGDWEVTEAPSAIDLKNNLAYFVATKESSIQRHVYSVKFDGSDLKAITDTSKDGYYRPSFSRKAGYVLMSNGGPGIPTQKVISTPSNSEFYEYVIEENKELAKKASQHELPLLKYGTINVDGFDLNYVERRPPHFNPKKQYPVLFQQYSGPGSQSVTKRFSVDFQSYVAANLGYIVVTVDGRGTGFIGRKARVVVRKNLGQWEAHDQIAAAKIWAAKPYIDDARVAIWGWSYGGYQTLKTLEADAGETFKYGMAVAPVTDWRFYDSIYTERYMLTPQENAAGYDNTAVSNVTSLAENVRFLIMHGLADDNVHIQNTLTLLDKLDLAGIENYDLHMFPDSNHGIYFHNANRIVYDKLNNWLINAFNGNWLKIANAKPNPLKAKRNATDQMKASLEELSWSDDTNDW

SEQ ID NO: 2088 - DNA, 3393 bp, Muscodor strobelii
  misc_feature: SGI EST ID NO. CUFF.5325.0
  misc_feature: Variant of the nucleotide sequence at SEQ ID NO 2086
cttacttcctgcatttgatattcgcctggagcgtcatcaaccgtagaattcgaagagactaagatacaagccgagcagtcaatgaagtattgatcttgtaatatttggtctcctcgggctgcgagggacccctgggactgattgatcatggcatcgccacgtccctcacacgactccctctcgtccgtgtcgactacgagcctagtcttcgagcgactcgccgagcgagagaaggctagcgagaagtatgtcgacaatgtctccgacctgaacgacgacgatcccctaggccatgaccatgacgacgagcgcggcgcattcctatccgagccgatgtcgcgaaagacccaaggcatggacaataagttcaaaagaatactgctgatagcatgcggtcttcttgtcacggcctgggtcgtcggtttggctacatttatcgcgtccaagtcttaccagcattcttccgagaaagaccacgatccaactgcgaccgcgtctcgtggatccggtaagaagatcacacttgaccaggtcctcaccggttactggtatgccgaatcccaccagatcagctggatcgatggtgccaacggcgaggatggactgctcctcgaagagaatgctcggggcaaggactatttggttgtcgaggatgtccgaagcatggaccccaacttcgctagctcgggtgccagtgttgcttcttctaagactctgatgaagcggtccattttcaatgcccccggccgaattctgcaaccggaaaacctatggcccagtccggatctcactaaagtcctcattgccaccgacatcaagcaggtctggagacattcattcactgccatatactggatcttcgatgtcgagacccaagaagccgagcctttggaccccaatgatgccaatctcagagttcagttggcccaatggaacccaaagagcaacgcgatatcttacaccagttccaataacttatacgtgcgacagctgcaaagcaagaaggtcattcaagttacaaaggatggcggaccagagtacttctacggaattcccgactgggtgtatgaggaagaagtatttagtgacaatagcgcaacctggtggtctggatcgggtgattacatggctttcctgcggacgaatgagacccgtgtgcccgaataccctattcagtatttcattgacagaccaagtggtgaacagccaccagagggcgaacagagctatccagaggtccagaggatcaaataccctaaagctggctcgcctaacccgacggttgagctcctattctatgacatgattaaggggaataccttcactgtcgagatcgagggcggctttgccgcagatgatcttctcatcactgatatcacatggatgggtaacaaagtaatgatcaaagaaaccaacagagtgagtgatattatgcgtgtggtcttggtcgatgttgttgctcgaacggggaagacagtccgaactgtggatgtgggcaagactgatgggggctggttcgagatatcgcacgacaccacctatatccccgcagaccctgacaacggaagatcggaagatggttatctcgacactgtcattcatgacaatggcgatcatttggcatacttcagtcctttggatacagacgaaccagtgatgttgaccaagggcgactgggaggtaacggaagcaccatcggctattgaccttaaaaataacctggcttacttcgttgccactaaagaatcttcgattcaacgccatgtctacagtgtcaagtttgacggctctgacctcaaagccataacggatactagcaaggatgggtattaccgcccttctttctctcgaaaagcaggatatgttcttatgtctaatggcggaccgggtataccaacccagaaagtcattagtacaccgagcaactccgaattctacgagtacgtaattgaggagaacaaggagctggcgaagaaagcgagccagcatgagctcccacttctcaaatacggcacaatcaatgttgatggcttcgacctcaactacgtggaacgtcgtccaccccatttcaacccgaagaaacaatatcctgttttgttccagcaatattctggccctggttcccagtctgtaacgaagagattctcggttgatttccaatcgtatgttgccgccaacttgggctatattgtagttacagtagatggtcgaggtacgggattcattggtcgtaaagcacgtgtcgttgttcgcaagaaccttggacaatgggaagcacatgatcaaattgccgccgctaagatatgggcagcgaagccgtacattgacgacgctagagttgccatctggggctggtcatatggcggctatcaaactcttaagacactagaggcggatgctggagagactttcaaatatggcatggctgttgcacccgtaactgattggcgtttttacgactcgatttacacagaacgatacatgctcacgccccaagagaatgcagctggatacgacaacaccgccgtcagcaatgtcacttctctcgcagagaacgtgcgattcctcatcatgcatggtctcgctgatgacaatgtccacatacaaaacactctcacactacttgacaaattggatctagcgggcatcgagaactacgatttgcatatgttccccgacagtaatcacggcatctatttccacaatgccaatcgtattgtctatgataaattaaacaactggctcatcaacgctttcaatggcaattggctcaagatcgcaaatgctaagccaaatcctttaaaggctaagagaaatgctactgaccaaatgaaagcatccttggaggaattgtcgtggtcggatgataccaatgattggtgagtgtattatcgtagagcttgtattcatcttgttctagtcgtcttcgaaatcggcgtttagcgggagtttgtatactgggttttgttcctcagttctgcagtattgtacatagtcgagcattattttccgatattctatctgaaaaccccgttcctccattatgcagtcatccacgtgtgctcgtgttcggtggggttcaaaattgccacgatatcactagttctcgtccacgagatatcttaatcatggccacgatgcaaagtgccgagaatgcctagggtagaaaccaagtcgtagcagccaagtcgcagatcgtgactggaaccgccaggtcagtctctcgacccatgttccggagcgggtatcgttttgacattttgactggggcacgtcatccacgttctgcaagcccgctcgacaacgtacggacacgttctcggcacgtaattgaatcctattggattcgggtcttctgtccgacacgcgcgggacacccagaccgctggatcg

SEQ ID NO: 2089 - DNA, 717 bp, Muscodor strobelii
  misc_feature: SGI cDNA ID NO. 560315
  misc_feature: Encodes the peptide sequence at SEQ ID NO 2090
atggcaccgacgactgaagtcgtcgccttgacgctgttggacaacgctgataacagcgtcatcgctgagtcggcaaagatactcgtcacgctgccggggtgtgtgagagtcaggacgtctcgcatgggaaatgaggataaggttcattattttgtggattgggagagtctcgagaaacatgaggcggtggtgaagaatgccgagctgtattcttcgtaccaggtcgttttattgcctattattgccggtttctctcaaccttggattcgatcctacggctcttgggacatttgggaccacgtcgatttctcaccttacccttcagtcctcgataacaaaggaggcgctggcaagtctagcattgccgtcgtcggccaggccttcttccctgatagctccgaatacacggcggagcaaagagacaaagtaacgaagactttcgattcgtctgtagagtctctcaaacagcgcaaaggaaaatcgacggcgggttttagcggagagtctacttctgggtggtcacgggaggatatctatcataatggggagatgagccgagtcttcttttttgcatttggttgggatactatggagaactacgagaatttccgcgactcggaagtctttgatcggaatatcagggcgatcacgagtatagatgggttcaaagagctggaccttcgtgaaatacagactacgactttggaaaggccttga

SEQ ID NO: 2090 - protein, 238 aa, Muscodor strobelii
  misc_feature: SGI Peptide ID NO. 560315
  misc_feature (32)..(236): NCBI GI: 46117466 Blast Desc: FG04575.1 [Gibberella zeae PH-1]
MAPTTEVVALTLLDNADNSVIAESAKILVTLPGCVRVRTSRMGNEDKVHYFVDWESLEKHEAVVKNAELYSSYQVVLLPIIAGFSQPWIRSYGSWDIWDHVDFSPYPSVLDNKGGAGKSSIAVVGQAFFPDSSEYTAEQRDKVTKTFDSSVESLKQRKGKSTAGFSGESTSGWSREDIYHNGEMSRVFFFAFGWDTMENYENFRDSEVFDRNIRAITSIDGFKELDLREIQTTTLERP

SEQ ID NO: 2091 - DNA, 1008 bp, Muscodor strobelii
  misc_feature: SGI EST ID NO. CUFF.5337.0
  misc_feature: Variant of the nucleotide sequence at SEQ ID NO 2089
acgtcgatttctcaccttacccttcagtcctcgataacaaaggaggcgctggcaagtctagcattgccgtcgtcggccaggccttcttccctgatagctccgaatacacggcggagcaaagagacaaagtaacgaagactttcgattcgtctgtagagtctctcaaacagcgcaaaggaaaatcgacggcgggttttagcggagagtctacttctgggtggtcacgggaggatatctatcataatggggagatgagccgagtcttcttttttgcatttggttgggatactatggagaactacgagaatttccgcgactcggaagtctttgatcggaatatcagggcgatcacgagtatagatgggttcaaagagctggaccttcgtgaaatacagactacgactttggaaaggccttgaggcgcggtgtgcaagttaataatattggtatgaaagtttctagttcatagggtcggtgcatgttgacatatagagaaatataatacggcgcttgcaggcacgttaataggcgaaatggggaaaaaattatgacagtaaaaatgatctgtaaacggggagtcatagtgtgtctttccttattcgaaatgcgtgcacacgcgacccccctatcagatgcagtagtggattatacagttatctacaaatggaaaaacaatatttttctagttgttatccttcactcgacattcctgtttgcatcgcccatctggctggaccgaatagaatgctactaacttttcaagcgcttcgtgctattcattacaaagagacacagccgcccgcactatcttcaaggaacaatccgccatatatctgaccttcgttaagattcttctcctgataaccagagtttacgacatctgaagtgccagtaggtttcttgaggataccgatctggtattgcccgccaccggcattgttgttcgaaagtgccgaggtcacagctttgagcgcatcgtcgttctttgaatagtatacttgaagggta

SEQ ID NO: 2092 - DNA, 873 bp, Muscodor strobelii
  misc_feature: SGI cDNA ID NO. 560316
  misc_feature: Reduced expression when VOC is produced
  misc_feature: Encodes the peptide sequence at SEQ ID NO 2093
atggtctctcctatccttctgagcggtctcgtcgccgctgcgactctatcctcggctcggcctaccgttgcgaacagcagtagcagcacaggcgttattaaatgcccgattgtgttgaatggtcttgttaaaactactctaacaccaacggattttgactcttacgcaacaagcccattcaatccagactacgttcgcggtagcgaaaagttcagctcaagtctaaagttcccgacggtcgacaactcgcgctttgacaatgcgacgtataagtcgatcgaggtgacgatcaatgatcagtctatcttccagacacagaatgggttccgtcgtgctggtcttcagatccagggtgacaccaatgatggaggtcccggcactacggggatccgtacactgcatttcagcgttaagcaagatgcccagcgacctttgaatctgacacatgagtatttgaacgtctggcatgaaacatccgattacagcgccaaccagttcaacttcgaagccggcacgatcattggcaaatccggcgacaaaaacacattcaaggttcttgaccgaaacaacaaccaggtttggtcaacgcctatcgacaacacggcgtggcagaactttgccatcactctagactttgataagaatacccttcaagtatactattcaaagaacgacgatgcgctcaaagctgtgacctcggcactttcgaacaacaatgccggtggcgggcaataccagatcggtatcctcaagaaacctactggcacttcagatgtcgtaaactctggttatcaggagaagaatcttaacgaaggtcagatatatggcggattgttccttgaagatagtgcgggcggctgtgtctctttgtaa

SEQ ID NO: 2093 - protein, 290 aa, Muscodor strobelii
  misc_feature: SGI Peptide ID NO. 560316
  misc_feature (31)..(290): NCBI GI: 164427908 Blast Desc: NCU02516 [Neurospora crassa OR74A] gi|157071932|gb|EAA36411.2| conserved [Neurospora crassa OR74A]
  misc_feature (28)..(290): NCBI GI: 116180968 Blast Desc: CHGG_01112 [Chaetomium globosum CBS 148.51] gi|88185409|gb|EAQ92877.1| CHGG_01112 [Chaetomium globosum CBS 148.51]
  misc_feature (6)..(289): NCBI GI: 256733740 Blast Desc: NECHADRAFT_67676 [Nectria haematococca mpVI 77-13-4]
  misc_feature (1)..(289): NCBI GI: 169614478 Blast Desc: SNOG_10382 [Phaeosphaeria nodorum SN15] gi|160702749|gb|EAT81776.2| SNOG_10382 [Phaeosphaeria nodorum SN15]
  misc_feature (34)..(290): NCBI GI: 189207513 Blast Desc: conserved [Pyrenophora tritici-repentis Pt-1C-BFP] gi|187976183|gb|EDU42809.1| conserved [Pyrenophora tritici-repentis Pt-1C-BFP]
  misc_feature (20)..(290): NCBI GI: 171696296 Blast Desc: protein product [Podospora anserina] gi|170948390|emb|CAP60554.1| protein product [Podospora anserina]
  misc_feature (14)..(290): NCBI GI: 46130606 Blast Desc: FG08907.1 [Gibberella zeae PH-1]
  misc_feature (4)..(289): NCBI GI: 261356502 Blast Desc: conserved [Verticillium albo-atrum VaMs.102]
  misc_feature (25)..(290): NCBI GI: 145604535 Blast Desc: MGG_07767 [Magnaporthe grisea 70-15] gi|145012537|gb|EDJ97191.1| MGG_07767 [Magnaporthe grisea 70-15]
  misc_feature (5)..(290): NCBI GI: 189203799 Blast Desc: conserved [Pyrenophora tritici-repentis Pt-1C-BFP] gi|187985334|gb|EDU50822.1| conserved [Pyrenophora tritici-repentis Pt-1C-BFP]
  misc_feature: Useful for introducing or modulating the production of volatile compounds
MVSPILLSGLVAAATLSSARPTVANSSSSTGVIKCPIVLNGLVKTTLTPTDFDSYATSPFNPDYVRGSEKFSSSLKFPTVDNSRFDNATYKSIEVTINDQSIFQTQNGFRRAGLQIQGDTNDGGPGTTGIRTLHFSVKQDAQRPLNLTHEYLNVWHETSDYSANQFNFEAGTIIGKSGDKNTFKVLDRNNNQVWSTPIDNTAWQNFAITLDFDKNTLQVYYSKNDDALKAVTSALSNNNAGGGQYQIGILKKPTGTSDVVNSGYQEKNLNEGQIYGGLFLEDSAGGCVSL

SEQ ID NO: 2094 - DNA, 1572 bp, Muscodor strobelii
  misc_feature: SGI EST ID NO. CUFF.5338.1
  misc_feature: Variant of the nucleotide sequence at SEQ ID NO 2092
gcccggactgtcgatcatggcgccgtggcagctttcagctgcgtctgaacaaaaagccaagatctcccgttgtgtatgaacgtcttgatgttttttgtttcagatgtaagctgtacctatagtattttcaaagttcgaagtaaacaagatggtctctcctatccttctgagcggtctcgtcgccgctgcgactctatcctcggctcggcctaccgttgcgaacagcagtagcagcacaggcgttattaaatgcccgattgtgttgaatggtcttgttaaaactactctaacaccaacggattttgactcttacgcaacaagcccattcaatccagactacgttcgcggtagcgaaaagttcagctcaagtctaaagttcccgacggtcgacaactcgcgctttgacaatgcgacgtataagtcgatcgaggtgacgatcaatgatcagtctatcttccagacacagaatgggttccgtcgtgctggtcttcagatccagggtgacaccaatgatggaggtcccggcactacggggatccgtacactgcatttcagcgttaagcaagatgcccagcgacctttgaatctgacacatgagtatttgaacgtctggcatgaaacatccgattacagcgccaaccagttcaacttcgaagccggcacgatcattggcaaatccggcgacaaaaacacattcaaggttcttgaccgaaacaacaaccaggtttggtcaacgcctatcgacaacacggcgtggcagaactttgccatcactctagactttgataagaatacccttcaagtatactattcaaagaacgacgatgcgctcaaagctgtgacctcggcactttcgaacaacaatgccggtggcgggcaataccagatcggtatcctcaagaaacctactggcacttcagatgtcgtaaactctggttatcaggagaagaatcttaacgaaggtcagatatatggcggattgttccttgaagatagtgcgggcggctgtgtctctttgtaatgaatagcacgaagcgcttgaaaagttagtagcattctattcggtccagccagatgggcgatgcaaacaggaatgtcgagtgaaggataacaactagaaaaatattgtttttccatttgtagataactgtataatccactactgcatctgataggggggtcgcgtgtgcacgcatttcgaataaggaaagacacactatgactccccgtttacagatcatttttactgtcataattttttccccatttcgcctattaacgtgcctgcaagcgccgtattatatttctctatatgtcaacatgcaccgaccctatgaactagaaactttcataccaatattattaacttgcacaccgcgcctcaaggcctttccaaagtcgtagtctgtatttcacgaaggtccagctctttgaacccatctatactcgtgatcgccctgatattccgatcaaagacttccgagtcgcggaaattctcgtagttctccatagtatcccaaccaaatgcaaaaaagaagactcggctcatctccccattatgatagatatcct

SEQ ID NO: 2095 - DNA, 2064 bp, Muscodor strobelii
  misc_feature: SGI cDNA ID NO. 560317
  misc_feature: Reduced expression when VOC is produced
  misc_feature: Encodes the peptide sequence at SEQ ID NO 2096
atgggcaagaaatggcgatacggagtcatcctggacgctggatcttcagggacacgtctgcatatatatcgttggcaagatgcctctaagataattaaacaagcttctctcgaagaactgcgcagtctccctgaaatagtaaaccactataccaaaaagattcgtccaggcatttccacttttggggaccatcctgaagatgtcggacccgaacacctcgaggcccttattaagaaggcgaagaagaagatccccaacgaaaagcatgccgatacccccatatacttgatggcgacagctggcatgcgattgctcccaaaagatcaacaagccactctgctgtctgaggtttgcacctacttccgatctaacagcgccttctccctccccgactgcaatgccaacatacaggtcatccctggagatacagagggcttgtacggttggatagctgccaactacttgctggggggcttcgacaaccctgagggccacgctcacggcaaaggccatcacacctatggatttctcgacatgggtggtgcatcggcgcaaatcgcgtttgcgcccaacacgactgtcgccgaggaacacggcaacgacctgaaactcgtgcgcttaaggaccatggaaggtgcccccctggaatacaaggtcttttcctccacctggctcggcttcggtgtcaaccaggcccgcgctcgctatgtcgatcgtctgatcgacactctattgataaaaggagaacacgaagtacctgatccatgcttgccacgaggtctacgtactacgaaatcaggcgacgtcatcaatggcatctcaaaggagttgcaacttgtagggacaggcgaatttgcagaatgcatgcgcacgacgaaacctttgcttggtaaagatataccttgtgacgacgaaccttgtcttttcaatggccaacatgtaccaccgatcgattttgacgtcaatcatttcgtgggtgtttctgaatactggcacaccacacacggtgtatttgcaacgaaagaggacgataaagcatatgatttcaacacatatcagaaaaaggttctcaagttctgcagtcaaccatgggagaagatggagtcagggttggaggagagaaaaagcgactcgggcaaagaagcacaagaggcctgtttcaaagcctcttggcttatcaatgttctgcatgagggcatcggtgttccgagggttggaatagaggaaacgcctaccccagggatcaacgtctcggaagaggttggcgaagcggctaaggaaaagggctttttggaacccttccaagccgctgacgagattgatgacatggagatcagttggactcttggaaagatggtactatacgccgctggccaggtcccgccccaagatgaggatgttttgccggtgggcttcggaagtaatacaaaaggcattcccctggatttccaacctgctggctcgagctacaacgtaaccttggcagacgacgcagatgattggtctgagacagctgaagatcttatcgaccatgcgaaggccagatcggcatcaggcttcttcatttttgtcctcctgctcatcattgtcgcatttttctttaggaagagggaccgccgtatgcgcatgtacagccgcatcaaccacgcactcagacgtcaccgtcgacccggaagtcctcggaaagcaggaggcggactctcggctttaagaagcaaactctttggccaacgaggacatcattatgaaagagtgatggaagaaggcgatgttgatcaattcgagctcggcgacgtttcttctgacgacgaccactcggttgccagcggaggttctcgatttggactgagctctgggctcgccacacccaagctcaacgtttcgtctttcgatgatctgaaaaaggccgtgcccaaacacccaatcgaccgaagtgggttggtggtcaggaccgagagccgagaaagactggttcctcaaatgctacatgctggcaggaggagtagagcaggaagtccaacacggctgaagagtccacagctgggacccctcacggaagactga

SEQ ID NO: 2096 - protein, 687 aa, Muscodor strobelii
  misc_feature: SGI Peptide ID NO. 560317
  misc_feature (6)..(471): Pfam Id: PF01150 Pfam Desc: GDA1/CD39 (nucleoside phosphatase) family
  misc_feature (6)..(404): Pfam Id: PF01150 Pfam Desc: GDA1/CD39 (nucleoside phosphatase) family
  misc_feature (1)..(687): NCBI GI: 39971523 Blast Desc: MGG_07077 [Magnaporthe grisea 70-15] gi|145019541|gb|EDK03769.1| MGG_07077 [Magnaporthe grisea 70-15]
  misc_feature (1)..(686): NCBI GI: 116195964 Blast Desc: CHGG_04580 [Chaetomium globosum CBS 148.51] gi|88180493|gb|EAQ87961.1| CHGG_04580 [Chaetomium globosum CBS 148.51]
  misc_feature (4)..(686): NCBI GI: 154317629 Blast Desc: BC1G_03166 [Botryotinia fuckeliana B05.10] gi|150844340|gb|EDN19533.1| BC1G_03166 [Botryotinia fuckeliana B05.10]
  misc_feature (1)..(683): NCBI GI: 261359699 Blast Desc: golgi apyrase [Verticillium albo-atrum VaMs.102]
  misc_feature (4)..(686): NCBI GI: 156049525 Blast Desc: SS1G_08469 [Sclerotinia sclerotiorum 1980] gi|154692868|gb|EDN92606.1| SS1G_08469 [Sclerotinia sclerotiorum 1980]
  misc_feature (2)..(685): NCBI GI: 171690728 Blast Desc: protein product [Podospora anserina] gi|170945312|emb|CAP71424.1| protein product [Podospora anserina]
  misc_feature (6)..(684): NCBI GI: 85108997 Blast Desc: NCU08027 [Neurospora crassa OR74A] gi|28924308|gb|EAA33461.1| conserved [Neurospora crassa OR74A] gi|39979133|emb|CAE85507.1| related to apyrase (NDPase/NTPase)
  misc_feature (6)..(687): NCBI GI: 46116856 Blast Desc: FG04270.1 [Gibberella zeae PH-1]
  misc_feature (6)..(687): NCBI GI: 256725955 Blast Desc: NECHADRAFT_81390 [Nectria haematococca mpVI 77-13-4]
  misc_feature (4)..(687): NCBI GI: 242762307 Blast Desc: nucleoside diphosphatase (Ynd1), [Talaromyces stipitatus ATCC 10500] gi|218723545|gb|EED22962.1| nucleoside diphosphatase (Ynd1), [Talaromyces stipitatus ATCC 10500]
  misc_feature (6)..(468): SWISSPROT Homolog: EC 3.6.1.5 Apyrase
  misc_feature: Useful for introducing or modulating the production of volatile compounds
MGKKWRYGVILDAGSSGTRLHIYRWQDASKIIKQASLEELRSLPEIVNHYTKKIRPGISTFGDHPEDVGPEHLEALIKKAKKKIPNEKHADTPIYLMATAGMRLLPKDQQATLLSEVCTYFRSNSAFSLPDCNANIQVIPGDTEGLYGWIAANYLLGGFDNPEGHAHGKGHHTYGFLDMGGASAQIAFAPNTTVAEEHGNDLKLVRLRTMEGAPLEYKVFSSTWLGFGVNQARARYVDRLIDTLLIKGEHEVPDPCLPRGLRTTKSGDVINGISKELQLVGTGEFAECMRTTKPLLGKDIPCDDEPCLFNGQHVPPIDFDVNHFVGVSEYWHTTHGVFATKEDDKAYDFNTYQKKVLKFCSQPWEKMESGLEERKSDSGKEAQEACFKASWLINVLHEGIGVPRVGIEETPTPGINVSEEVGEAAKEKGFLEPFQAADEIDDMEISWTLGKMVLYAAGQVPPQDEDVLPVGFGSNTKGIPLDFQPAGSSYNVTLADDADDWSETAEDLIDHAKARSASGFFIFVLLLIIVAFFFRKRDRRMRMYSRINHALRRHRRPGSPRKAGGGLSALRSKLFGQRGHHYERVMEEGDVDQFELGDVSSDDDHSVASGGSRFGLSSGLATPKLNVSSFDDLKKAVPKHPIDRSGLVVRTESRERLVPQMLHAGRRSRAGSPTRLKSPQLGPLTED

SEQ ID NO: 2097 - DNA, 4251 bp, Muscodor strobelii
  misc_feature: SGI EST ID NO. CUFF.6004.1
  misc_feature: Variant of the nucleotide sequence at SEQ ID NO 2095
ctgaaagcctctgccgactgcccagtggcatcctggcaccctttttttgtacggaggtatgccttggctggcagacgtggaacctctttcatcactcgcattcaagcacctctttgcgttcttttcctcgtcaaacgccctgcagattgtctgttgatcactctaatcgtccattcgctatcttcgtcctcgattgtccgtcttcgcgtctttcgctatattcaattcatcctaatttccactaccaagccccctctttaccgcagcagttatacttcggcctctcgacgcgtaatctcccaccgaaagcccaatcgcctgcatcgaccgccttagcccaccacacttcggacgagtccctggctgtcgcatcgtcgcatcgtcgcactgtcgtctcgaatcgcatactcgctcgaacagccggatcatgtccccgtggtcgctctgatctgcacttctgcatttctgcatcttacaaacatcgtgcaaaccacgtcttgtcgccaccagccgcctgtggcctctcgaccctgtcattacacgactctcaaaggcaattgatacgagtactatcgtctataaatcccggctttggccgcaatgggcaagaaatggcgatacggagtcatcctggacgctggatcttcagggacacgtctgcatatatatcgttggcaagatgcctctaagataattaaacaagcttctctcgaagaactgcgcagtctccctgaaatagtaaaccactataccaaaaagattcgtccaggcatttccacttttggggaccatcctgaagatgtcggacccgaacacctcgaggcccttattaagaaggcgaagaagaagatccccaacgaaaagcatgccgatacccccatatacttgatggcgacagctggcatgcgattgctcccaaaagatcaacaagccactctgctgtctgaggtttgcacctacttccgatctaacagcgccttctccctccccgactgcaatgccaacatacaggtcatccctggagatacagagggcttgtacggttggatagctgccaactacttgctggggggcttcgacaaccctgagggccacgctcacggcaaaggccatcacacctatggatttctcgacatgggtggtgcatcggcgcaaatcgcgtttgcgcccaacacgactgtcgccgaggaacacggcaacgacctgaaactcgtgcgcttaaggaccatggaaggtgcccccctggaatacaaggtcttttcctccacctggctcggcttcggtgtcaaccaggcccgcgctcgctatgtcgatcgtctgatcgacactctattgataaaaggagaacacgaagtacctgatccatgcttgccacgaggtctacgtactacgaaatcaggcgacgtcatcaatggcatctcaaaggagttgcaacttgtagggacaggcgaatttgcagaatgcatgcgcacgacgaaacctttgcttggtaaagatataccttgtgacgacgaaccttgtcttttcaatggccaacatgtaccaccgatcgattttgacgtcaatcatttcgtgggtgtttctgaatactggcacaccacacacggtgtatttgcaacgaaagaggacgataaagcatatgatttcaacacatatcagaaaaaggttctcaagttctgcagtcaaccatgggagaagatggagtcagggttggaggagagaaaaagcgactcgggcaaagaagcacaagaggcctgtttcaaagcctcttggcttatcaatgttctgcatgagggcatcggtgttccgagggttggaatagaggaaacgcctaccccagggatcaacgtctcggaagaggttggcgaagcggctaaggaaaagggctttttggaacccttccaagccgctgacgagattgatgacatggagatcagttggactcttggaaagatggtactatacgccgctggccaggtcccgccccaagatgaggatgttttgccggtgggcttcggaagtaatacaaaaggcattcccctggatttccaacctgctggctcgagctacaacgtaaccttggcagacgacgcagatgattggtctgagacagctgaagatcttatcgaccatgcgaaggccagatcggcatcaggcttcttcatttttgtcctcctgctcatcattgtcgcatttttctttaggaagagggaccgccgtatgcgcatgtacagccgcatcaaccacgcactcagacgtcaccgtcgacccggaagtcctcggaaagcaggaggcggactctcggctttaagaagcaaactctttggccaacgaggacatcattatgaaagagtgatggaagaaggcgatgttgatcaattcgagctcggcgacgtttcttctgacgacgaccactcggttgccagcggaggttctcgatttggactgagctctgggctcgccacacccaagctcaacgtttcgtctttcgatgatctgaaaaaggccgtgcccaaacacccaatcgaccgaagtgggttggtggtcaggaccgagagccgagaaagactggttcctcaaatgctacatgctggcaggaggagtagagcaggaagtccaacacggctgaagagtccacagctgggacccctcacggaagactgagcgaggctgaaattgtctgtacctgttgtgttgatggtggaccataatggtcagagtctgtgcgtgtacataacgaagtggtttccggagttttgtggcaatttgttggtcatacatgggtgttaggcatggattggttgcatcggcgtttggtggatggctgtcatactattcgagtcgcgccatatcaatggccatgatatttattatcggtctagctctatcgctagtcgcctgaaaaatacacttttcaaaagaagcaattgcctgtagaccatttggcattccctgtgtagccttttgctatactcttgtatcacgcttataccgcaagccgtaattaaacaccacagatttctctctggcatatagcccccctcggtttttaatattgactgttatgtcgcggcttgatcgggtatgctgaaatacattcagtaggtggtgatagtagctcttaagacctggtgctacgactcgctggtggagatgcttgttcgtagacatcttatcgacatgtttctggtctttaaatctcgcgcgtgagcttcttcacaacattaatgcctcggcgcaatgcgcggtccggcgagtgccatctgctaaagaatctagcactgatactagcatcaaggagcagactgtcaatcctgttctctctcaagaaaactaggatccagcttgactttactctcgaacttcttccaccagtcctggaacgccttcaacgggacgacttcaatccccgaatcgccgacttgtccgctaaagctcgagaggaagttaaatgcgttttgtattattcgctgcgcgaggacttgcgtcgacggttgggctcccgtcccggtttttactaaagcctgcgacgctccttgggtggaggtttgttgttgttgaattcgctctgcgacggacgtagcgtcttcgacgtttattccgattacgacgccctcggcgctcgtgcttagtttgaatactgcgctttcttttccggggccgacacccccgaggaatttgaagccggctgctgattcgccggccccgcctggtaggaatgccgaggggttcgaggcgatgtatattgcggctgcggtgttttccgggagtgttataccggggaggagaaatacggcgaggtgggagaagggcttggggtttgagggcgttgtggaggggattgcgtagaggacggatgtgggcgatggttgggatgttgggaccgttatgaggctttggcctgcggggaggaggccgaagagtggttgggtggccatttgggttggttgttactttgggtattgatttggagattgtggaggattataaggagagggtggtgtttgtgaggatttccgagtaaagcttaaagatatcgtttaatgctgcaattagatgcgactatcaacctttgacttaaggtaggcaaataattcggtccatgtgcttcaatgcatttaagaatttcgcgcacaatgacagcatcaatcgatcatcatcaatctctcaggaatcgtccaacaaggaggctatcacaaggtttacatatctgcgatatgctaggctagccggaggttagatagagctggg

SEQ ID NO: 2098 - DNA, 1761 bp, Muscodor strobelii
  misc_feature: SGI cDNA ID NO. 560318
  misc_feature: Reduced expression when VOC is produced
  misc_feature: Encodes the peptide sequence at SEQ ID NO 2099
atgcgattgctcccaaaagatcaacaagccactctgctgtctgaggtttgcacctacttccgatctaacagcgccttctccctccccgactgcaatgccaacatacaggtcatccctggagatacagagggcttgtacggttggatagctgccaactacttgctggggggcttcgacaaccctgagggccacgctcacggcaaaggccatcacacctatggatttctcgacatgggtggtgcatcggcgcaaatcgcgtttgcgcccaacacgactgtcgccgaggaacacggcaacgacctgaaactcgtgcgcttaaggaccatggaaggtgcccccctggaatacaaggtcttttcctccacctggctcggcttcggtgtcaaccaggcccgcgctcgctatgtcgatcgtctgatcgacactctattgataaaaggagaacacgaagtacctgatccatgcttgccacgaggtctacgtactacgaaatcaggcgacgtcatcaatggcatctcaaaggagttgcaacttgtagggacaggcgaatttgcagaatgcatgcgcacgacgaaacctttgcttggtaaagatataccttgtgacgacgaaccttgtcttttcaatggccaacatgtaccaccgatcgattttgacgtcaatcatttcgtgggtgtttctgaatactggcacaccacacacggtgtatttgcaacgaaagaggacgataaagcatatgatttcaacacatatcagaaaaaggttctcaagttctgcagtcaaccatgggagaagatggagtcagggttggaggagagaaaaagcgactcgggcaaagaagcacaagaggcctgtttcaaagcctcttggcttatcaatgttctgcatgagggcatcggtgttccgagggttggaatagaggaaacgcctaccccagggatcaacgtctcggaagaggttggcgaagcggctaaggaaaagggctttttggaacccttccaagccgctgacgagattgatgacatggagatcagttggactcttggaaagatggtactatacgccgctggccaggtcccgccccaagatgaggatgttttgccggtgggcttcggaagtaatacaaaaggcattcccctggatttccaacctgctggctcgagctacaacgtaaccttggcagacgacgcagatgattggtctgagacagctgaagatcttatcgaccatgcgaaggccagatcggcatcaggcttcttcatttttgtcctcctgctcatcattgtcgcatttttctttaggaagagggaccgccgtatgcgcatgtacagccgcatcaaccacgcactcagacgtcaccgtcgacccggaagtcctcggaaagcaggaggcggactctcggctttaagaagcaaactctttggccaacgaggacatcattatgaaagagtgatggaagaaggcgatgttgatcaattcgagctcggcgacgtttcttctgacgacgaccactcggttgccagcggaggttctcgatttggactgagctctgggctcgccacacccaagctcaacgtttcgtctttcgatgatctgaaaaaggccgtgcccaaacacccaatcgaccgaagtgggttggtggtcaggaccgagagccgagaaagactggttcctcaaatgctacatgctggcaggaggagtagagcaggaagtccaacacggctgaagagtccacagctgggacccctcacggaagactga

SEQ ID NO: 2099 - protein, 586 aa, Muscodor strobelii
  misc_feature: SGI Peptide ID NO. 560318
  misc_feature (1)..(370): Pfam Id: PF01150 Pfam Desc: GDA1/CD39 (nucleoside phosphatase) family
  misc_feature (1)..(303): Pfam Id: PF01150 Pfam Desc: GDA1/CD39 (nucleoside phosphatase) family
  misc_feature (1)..(586): NCBI GI: 39971523 Blast Desc: MGG_07077 [Magnaporthe grisea 70-15] gi|145019541|gb|EDK03769.1| MGG_07077 [Magnaporthe grisea 70-15]
  misc_feature (1)..(585): NCBI GI: 116195964 Blast Desc: CHGG_04580 [Chaetomium globosum CBS 148.51] gi|88180493|gb|EAQ87961.1| CHGG_04580 [Chaetomium globosum CBS 148.51]
  misc_feature (1)..(585): NCBI GI: 154317629 Blast Desc: BC1G_03166 [Botryotinia fuckeliana B05.10] gi|150844340|gb|EDN19533.1| BC1G_03166 [Botryotinia fuckeliana B05.10]
  misc_feature (1)..(582): NCBI GI: 261359699 Blast Desc: golgi apyrase [Verticillium albo-atrum VaMs.102]
  misc_feature (1)..(585): NCBI GI: 156049525 Blast Desc: SS1G_08469 [Sclerotinia sclerotiorum 1980] gi|154692868|gb|EDN92606.1| SS1G_08469 [Sclerotinia sclerotiorum 1980]
  misc_feature (1)..(583): NCBI GI: 85108997 Blast Desc: NCU08027 [Neurospora crassa OR74A] gi|28924308|gb|EAA33461.1| conserved [Neurospora crassa OR74A] gi|39979133|emb|CAE85507.1| related to apyrase (NDPase/NTPase)
  misc_feature (1)..(586): NCBI GI: 46116856 Blast Desc: FG04270.1 [Gibberella zeae PH-1]
  misc_feature (1)..(586): NCBI GI: 256725955 Blast Desc: NECHADRAFT_81390 [Nectria haematococca mpVI 77-13-4]
  misc_feature (1)..(584): NCBI GI: 171690728 Blast Desc: protein product [Podospora anserina] gi|170945312|emb|CAP71424.1| protein product [Podospora anserina]
  misc_feature (1)..(586): NCBI GI: 242762307 Blast Desc: nucleoside diphosphatase (Ynd1), [Talaromyces stipitatus ATCC 10500] gi|218723545|gb|EED22962.1| nucleoside diphosphatase (Ynd1), [Talaromyces stipitatus ATCC 10500]
  misc_feature (1)..(367): SWISSPROT Homolog: EC 3.6.1.5 Apyrase
  misc_feature: Useful for introducing or modulating the production of volatile compounds
MRLLPKDQQATLLSEVCTYFRSNSAFSLPDCNANIQVIPGDTEGLYGWIAANYLLGGFDNPEGHAHGKGHHTYGFLDMGGASAQIAFAPNTTVAEEHGNDLKLVRLRTMEGAPLEYKVFSSTWLGFGVNQARARYVDRLIDTLLIKGEHEVPDPCLPRGLRTTKSGDVINGISKELQLVGTGEFAECMRTTKPLLGKDIPCDDEPCLFNGQHVPPIDFDVNHFVGVSEYWHTTHGVFATKEDDKAYDFNTYQKKVLKFCSQPWEKMESGLEERKSDSGKEAQEACFKASWLINVLHEGIGVPRVGIEETPTPGINVSEEVGEAAKEKGFLEPFQAADEIDDMEISWTLGKMVLYAAGQVPPQDEDVLPVGFGSNTKGIPLDFQPAGSSYNVTLADDADDWSETAEDLIDHAKARSASGFFIFVLLLIIVAFFFRKRDRRMRMYSRINHALRRHRRPGSPRKAGGGLSALRSKLFGQRGHHYERVMEEGDVDQFELGDVSSDDDHSVASGGSRFGLSSGLATPKLNVSSFDDLKKAVPKHPIDRSGLVVRTESRERLVPQMLHAGRRSRAGSPTRLKSPQLGPLTED

SEQ ID NO: 2100 - DNA, 4251 bp, Muscodor strobelii; identical to SEQ ID NO: 2097
  misc_feature: SGI EST ID NO. CUFF.6004.1
  misc_feature: Variant of the nucleotide sequence at SEQ ID NO 2098

SEQ ID NO: 2101 - DNA, 630 bp, Muscodor strobelii
  misc_feature: SGI cDNA ID NO. 560319
  misc_feature: Reduced expression when VOC is produced
  misc_feature: Encodes the peptide sequence at SEQ ID NO 2102
atggccacccaaccactcttcggcctcctccccgcaggccaaagcctcataacggtcccaacatcccaaccatcgcccacatccgtcctctacgcaatcccctccacaacgccctcaaaccccaagcccttctcccacctcgccgtatttctcctccccggtataacactcccggaaaacaccgcagccgcaatatacatcgcctcgaacccctcggcattcctaccaggcggggccggcgaatcagcagccggcttcaaattcctcgggggtgtcggccccggaaaagaaagcgcagtattcaaactaagcacgagcgccgagggcgtcgtaatcggaataaacgtcgaagacgctacgtccgtcgcagagcgaattcaacaacaacaaacctccacccaaggagcgtcgcaggctttagtaaaaaccgggacgggagcccaaccgtcgacgcaagtcctcgcgcagcgaataatacaaaacgcatttaacttcctctcgagctttagcggacaagtcggcgattcggggattgaagtcgtcccgttgaaggcgttccaggactggtggaagaagttcgagagtaaagtcaagctggatcctagttttcttgagagagaacaggattga

SEQ ID NO: 2102 - protein, 209 aa, Muscodor strobelii
  misc_feature: SGI Peptide ID NO. 560319
  misc_feature (6)..(206): Pfam Id: PF05603 Pfam Desc: Domain of function (DUF775)
  misc_feature (149)..(206): Pfam Id: PF05603 Pfam Desc: Domain of function (DUF775)
  misc_feature (3)..(209): NCBI GI: 46116858 Blast Desc: FG04271.1 [Gibberella zeae PH-1]
  misc_feature (3)..(209): NCBI GI: 85108999 Blast Desc: NCU08028 [Neurospora crassa OR74A] gi|28924309|gb|EAA33462.1| conserved [Neurospora crassa OR74A] gi|39979132|emb|CAE85506.1| conserved [Neurospora crassa]
  misc_feature (5)..(209): NCBI GI: 256725556 Blast Desc: [Nectria haematococca mpVI 77-13-4]
  misc_feature (1)..(208): NCBI GI: 39971525 Blast Desc: MGG_07078 [Magnaporthe grisea 70-15] gi|145019542|gb|EDK03770.1| MGG_07078 [Magnaporthe grisea 70-15]
  misc_feature (6)..(209): NCBI GI: 156049541 Blast Desc: SS1G_08477 [Sclerotinia sclerotiorum 1980] gi|154692876|gb|EDN92614.1| SS1G_08477 [Sclerotinia sclerotiorum 1980]
  misc_feature (7)..(207): NCBI GI: 171690726 Blast Desc: protein product [Podospora anserina] gi|170945311|emb|CAP71423.1| protein product [Podospora anserina]
  misc_feature (6)..(209): NCBI GI: 154317641 Blast Desc: BC1G_03172 [Botryotinia fuckeliana B05.10] gi|150844346|gb|EDN19539.1| BC1G_03172 [Botryotinia fuckeliana B05.10]
  misc_feature (6)..(207): NCBI GI: 238841149 Blast Desc: DUF775 domain-containing protein [Microsporum canis CBS 113480]
  misc_feature (6)..(207): NCBI GI: 119192582 Blast Desc: CIMG_00668 [Coccidioides immitis RS]
  misc_feature (6)..(207): NCBI GI: 240106038 Blast Desc: CPC735_056010 [Coccidioides posadasii C735 delta SOWgp]
  misc_feature: Useful for introducing or modulating the production of volatile compounds
MATQPLFGLLPAGQSLITVPTSQPSPTSVLYAIPSTTPSNPKPFSHLAVFLLPGITLPENTAAAIYIASNPSAFLPGGAGESAAGFKFLGGVGPGKESAVFKLSTSAEGVVIGINVEDATSVAERIQQQQTSTQGASQALVKTGTGAQPSTQVLAQRIIQNAFNFLSSFSGQVGDSGIEVVPLKAFQDWWKKFESKVKLDPSFLEREQD

SEQ ID NO: 2103 - DNA, 4326 bp, Muscodor strobelii
  misc_feature: SGI EST ID NO. CUFF.6004.0
  misc_feature: Variant of the nucleotide sequence at SEQ ID NO 2101
cccagctctatctaacctccggctagcctagcatatcgcagatatgtaaaccttgtgatagcctccttgttggacgattcctgagagattgatgatgatcgattgatgctgtcattgtgcgcgaaattcttaaatgcattgaagcacatggaccgaattatttgcctaccttaagtcaaaggttgatagtcgcatctaattgcagcattaaacgatatctttaagctttactcggaaatcctcacaaacaccaccctctccttataatcctccacaatctccaaatcaatacccaaagtaacaaccaacccaaatggccacccaaccactcttcggcctcctccccgcaggccaaagcctcataacggtcccaacatcccaaccatcgcccacatccgtcctctacgcaatcccctccacaacgccctcaaaccccaagcccttctcccacctcgccgtatttctcctccccggtataacactcccggaaaacaccgcagccgcaatatacatcgcctcgaacccctcggcattcctaccaggcggggccggcgaatcagcagccggcttcaaattcctcgggggtgtcggccccggaaaagaaagcgcagtattcaaactaagcacgagcgccgagggcgtcgtaatcggaataaacgtcgaagacgctacgtccgtcgcagagcgaattcaacaacaacaaacctccacccaaggagcgtcgcaggctttagtaaaaaccgggacgggagcccaaccgtcgacgcaagtcctcgcgcagcgaataatacaaaacgcatttaacttcctctcgagctttagcggacaagtcggcgattcggggattgaagtcgtcccgttgaaggcgttccaggactggtggaagaagttcgagagtaaagtcaagctggatcctagttttcttgagagagaacaggattgacagtctgctccttgatgctagtatcagtgctagattctttagcagatggcactcgccggaccgcgcattgcgccgaggcattaatgttgtgaagaagctcacgcgcgagatttaaagaccagaaacatgtcgataagatgtctacgaacaagcatctccaccagcgagtcgtagcaccaggtcttaagagctactatcaccacctactgaatgtatttcagcatacccgatcaagccgcgacataacagtcaatattaaaaaccgaggggggctatatgccagagagaaatctgtggtgtttaattacggcttgcggtataagcgtgatacaagagtatagcaaaaggctacacagggaatgccaaatggtctacaggcaattgcttcttttgaaaagtgtatttttcaggcgactagcgatagagctagaccgataataaatatcatggccattgatatggcgcgactcgaatagtatgacagccatccaccaaacgccgatgcaaccaatccatgcctaacacccatgtatgaccaacaaattgccacaaaactccggaaaccacttcgttatgtacacgcacagactctgaccattatggtccaccatcaacacaacaggtacagacaatttcagcctcgctcagtcttccgtgaggggtcccagctgtggactcttcagccgtgttggacttcctgctctactcctcctgccagcatgtagcatttgaggaaccagtctttctcggctctcggtcctgaccaccaacccacttcggtcgattgggtgtttgggcacggcctttttcagatcatcgaaagacgaaacgttgagcttgggtgtggcgagcccagagctcagtccaaatcgagaacctccgctggcaaccgagtggtcgtcgtcagaagaaacgtcgccgagctcgaattgatcaacatcgccttcttccatcactctttcataatgatgtcctcgttggccaaagagtttgcttcttaaagccgagagtccgcctcctgctttccgaggacttccgggtcgacggtgacgtctgagtgcgtggttgatgcggctgtacatgcgcatacggcggtccctcttcctaaagaaaaatgcgacaatgatgagcaggaggacaaaaatgaagaagcctgatgccgatctggccttcgcatggtcgataagatcttcagctgtctcagaccaatcatctgcgtcgtctgccaaggttacgttgtagctcgagccagcaggttggaaatccaggggaatgccttttgtattacttccgaagcccaccggcaaaacatcctcatcttggggcgggacctggccagcggcgtatagtaccatctttccaagagtccaactgatctccatgtcatcaatctcgtcagcggcttggaagggttccaaaaagcccttttccttagccgcttcgccaacctcttccgagacgttgatccctggggtaggcgtttcctctattccaaccctcggaacaccgatgccctcatgcagaacattgataagccaagaggctttgaaacaggcctcttgtgcttctttgcccgagtcgctttttctctcctccaaccctgactccatcttctcccatggttgactgcagaacttgagaacctttttctgatatgtgttgaaatcatatgctttatcgtcctctttcgttgcaaatacaccgtgtgtggtgtgccagtattcagaaacacccacgaaatgattgacgtcaaaatcgatcggtggtacatgttggccattgaaaagacaaggttcgtcgtcacaaggtatatctttaccaagcaaaggtttcgtcgtgcgcatgcattctgcaaattcgcctgtccctacaagttgcaactcctttgagatgccattgatgacgtcgcctgatttcgtagtacgtagacctcgtggcaagcatggatcaggtacttcgtgttctccttttatcaatagagtgtcgatcagacgatcgacatagcgagcgcgggcctggttgacaccgaagccgagccaggtggaggaaaagaccttgtattccaggggggcaccttccatggtccttaagcgcacgagtttcaggtcgttgccgtgttcctcggcgacagtcgtgttgggcgcaaacgcgatttgcgccgatgcaccacccatgtcgagaaatccataggtgtgatggcctttgccgtgagcgtggccctcagggttgtcgaagccccccagcaagtagttggcagctatccaaccgtacaagccctctgtatctccagggatgacctgtatgttggcattgcagtcggggagggagaaggcgctgttagatcggaagtaggtgcaaacctcagacagcagagtggcttgttgatcttttgggagcaatcgcatgccagctgtcgccatcaagtatatgggggtatcggcatgcttttcgttggggatcttcttcttcgccttcttaataagggcctcgaggtgttcgggtccgacatcttcaggatggtccccaaaagtggaaatgcctggacgaatctttttggtatagtggtttactatttcagggagactgcgcagttcttcgagagaagcttgtttaattatcttagaggcatcttgccaacgatatatatgcagacgtgtccctgaagatccagcgtccaggatgactccgtatcgccctgatagtaagagaagtccaggtcagcggcgcagtgttgggggtaaaagcaatccccgagcaacgagagactcacatttcttgcccattgcggccaaagccgggatttatagacgatagtactcgtatcaattgcctttgagagtcgtgtaatgacagggtcgagaggccacaggcggctggtggcgacaagacgtggtttgcacgatgtttgtaagatgcagaaatgcagaagtgcagatcagagcgaccacggggacatgatccggctgttcgagcgagtatgcgattcgagacgacagtgcgacgatgcgacgatgcgacagccagggactcgtccgaagtgtggtgggctaaggcggtcgatgcaggcgattgggctttcggtgggagattacgcgtcgagaggccgaagtataactgctgcggtaaagagggggcttggtagtggaaattaggatgaattgaatatagcgaaagacgcgaagacggacaatcgaggacgaagatagcgaatggacgattagagtgatcaacagacaatctgcagggcgtttgacgaggaaaagaacgcaaagaggtgcttgaatgcgagtgatgaaagaggttccacgtctgccagccaaggcatacctccgtacaaaaaaagggtgccaggatgccactgggcagtcggcagaggctttcag

SEQ ID NO: 2104 - DNA, 444 bp, Muscodor strobelii
  misc_feature: SGI cDNA ID NO. 560321
  misc_feature: Reduced expression when VOC is produced
  misc_feature: Encodes the peptide sequence at SEQ ID NO 2105
atggcgaacctcacaggcgacgcgcagctcttcgaagaggccttcaccatcaccaactacgaccagtccaagtacgaccgcgtcgcccgcatcactgccaactcggccgacaaccagaccgagatgatcctcgacatcaacatcgagctcttcccctgccacgtcggcgagaacctgcaggtcgtgctggccaccaccctcgccctcgacggcaaccgcgacaacgaggagaagggatggcgcgaggtccgcggcgagtccaccctcgctgacatgtacgactacgtgtgccacggcaagatctacaagttcgaggatggtcaagagggccagagccttcgtgcctacatctccttcggcggtctcttgatgatgcttgagggtccttaccctaagctaacccccctgcgtgtcgacaatacctaccttttggtcaagaagtga

SEQ ID NO: 2105 - protein, 147 aa, Muscodor strobelii
  misc_feature: SGI Peptide ID NO. 560321
  misc_feature (12)..(147): Pfam Id: PF03870 Pfam Desc: RNA polymerase Rpb8
  misc_feature (1)..(147): NCBI GI: 261359697 Blast Desc: DNA-directed RNA polymerases I [Verticillium albo-atrum VaMs.102]
  misc_feature (5)..(147): NCBI GI: 256725555 Blast Desc: [Nectria haematococca mpVI 77-13-4]
  misc_feature (5)..(147): NCBI GI: 46116862 Blast Desc: FG04273.1 [Gibberella zeae PH-1]
  misc_feature (1)..(146): NCBI GI: 39971529 Blast Desc: MGG_07080 [Magnaporthe grisea 70-15] gi|145019544|gb|EDK03772.1| MGG_07080 [Magnaporthe grisea 70-15]
  misc_feature (1)..(147): NCBI GI: 85109003 Blast Desc: NCU08030 [Neurospora crassa OR74A] gi|28924311|gb|EAA33464.1| NCU08030 [Neurospora crassa OR74A] gi|39979130|emb|CAE85504.1| related to DNA-directed RNA chain
  misc_feature (5)..(147): NCBI GI: 156049537 Blast Desc: UDP-glucose 4-epimerase Gal10 [Sclerotinia sclerotiorum 1980] gi|154692874|gb|EDN92612.1| UDP-glucose 4-epimerase Gal10 [Sclerotinia sclerotiorum 1980]
  misc_feature (7)..(147): NCBI GI: 154317637 Blast Desc: BC1G_03170 [Botryotinia fuckeliana B05.10] gi|150844344|gb|EDN19537.1| BC1G_03170 [Botryotinia fuckeliana B05.10]
  misc_feature (1)..(147): NCBI GI: 171690722 Blast Desc: protein product [Podospora anserina] gi|170945309|emb|CAP71421.1| protein product [Podospora anserina]
  misc_feature (7)..(147): NCBI GI: 238496015 Blast Desc: DNA-directed RNA polymerases i, ii, and iii 145 kDa polypeptide [Aspergillus flavus NRRL3357] gi|220694123|gb|EED50467.1| DNA-directed RNA polymerases i, ii,
  misc_feature (7)..(147): NCBI GI: 259489599 Blast Desc: TPA: DNA-directed RNA polymerases i, ii, and iii 145 kDa polypeptide (AFU_orthologue; AFUA_5G11120) [Aspergillus nidulans FGSC A4]
  misc_feature: Useful for introducing or modulating the production of volatile compounds
MANLTGDAQLFEEAFTITNYDQSKYDRVARITANSADNQTEMILDINIELFPCHVGENLQVVLATTLALDGNRDNEEKGWREVRGESTLADMYDYVCHGKIYKFEDGQEGQSLRAYISFGGLLMMLEGPYPKLTPLRVDNTYLLVKK

SEQ ID NO: 2106 - DNA, 3210 bp, Muscodor strobelii
  misc_feature: SGI EST ID NO. CUFF.5464.1
  misc_feature: Variant of the nucleotide sequence at SEQ ID NO 2104
gctgcagacttctcggacttggacgaagaacgagagtcagttgacaagcctgggagttcggcctgccagccttcatgtaagcccaaaacatgaatttggtgcccttggaccaggccttcagctacataatagcggatgaggagaccagcaaaatcagtcgtcccatgttctcctactaacagcgaggtacccagagggatccctgagtgaccagccaggagattatccaaggaggatgttcctgtcgacgttgtcgggcgtccatccaaaggggatggccgaacaccagggataggtgcattttcactcttgacttgtgctgtctgagcagagccagagctgctgatcacagcatttcttttccggaaagacattgctcggacataacaatggatagaaaccctgaaatgaatgtgtttcgcatatgttatgtaaattcgaactcgacaggagatttcaagctcttcaatgttccatctacaattgctctgcggtgaactttacccctctagcaccgataatccgttctgatggcacaattaggtggttgctcagatgccctagcgttgtagcctttggcggggcacgtacctggatttgcaactggagctaaaagaaacgtcccagggaattttcacggtggagcatcaccgctttcagtccaacatcaaagagaaaggtcaactgcgacatcaccgagtcctcgccgcacctcctaccacagcctgtccatacagcagccggcaccctctcgctctgccaattttgccattctaaaacccagtcagagacacaatcaacaccagatccaagatggcgaacctcacaggcgacgcgcagctcttcgaagaggccttcaccatcaccaactacgaccagtccaagtacgaccgcgtcgcccgcatcactgccaactcggccgacaaccagaccgagatgatcctcgacatcaacatcgagctcttcccctgccacgtcggcgagaacctgcaggtcgtgctggccaccaccctcgccctcgacggcaaccgcgacaacgaggagaagggatggcgcgaggtccgcggcgagtccaccctcgctgacatgtacgactacgtgtgccacggcaagatctacaagttcgaggatggtcaagagggccagagccttcgtgcctacatctccttcggcggtctcttgatgatgcttgagggtccttaccctaagctaacccccctgcgtgtcgacaatacctaccttttggtcaagaagtgatcatctagctgcatacgcatctgtacaagtacttacgcaacttacgcgacacgactgttacgaataaaaagggcaaaaggtgatcagggagacgctgacattgcgacgaggagatatctgacgggatgttctaaaagaggaggggtatcaagataacctcgccgtgccaatttagattcaggtctattttacatgtgaacaagcgttccgcccatcttccaattcccaattaccatactattccgaacccaacaaattgtgtgttgcatcctcggcaggccagcttcgagggtgaaaaggcaagacgggatgcttacgaggcgagagtggcagcagcatcagcatccgcagccgcgctcgcgttcaacgacgccgcgtaagcttgatgaggaccagggaagggcaatgttctgtgcatgcgctggacaatctctgcgtaatgaggctcattctccgccgtgatgatgccatggcgtacgaagaagtcgatgacgatgagcgcgcagttaggcttataggcacccttggcgaggttctcgcgcacctcgtccacggtcatcagatagaattcggcgacttcaccgtccttcggcgttggcgtgacgtccgctggtagctcgatatcgtacacccattgagtctcgggatatatctgtccagtctctccgcctgctcgctcgtctgtgatgtagatgtatgtgaccatgcctgtaaatttagctcgctctcgcatcaatttttctggtagtgctgcttcttcatctgcctcgcggattatgcactcgaaaggctcctcgcctgtcattagaccacctgctgctgtgttgtctagcatgccgggatatgtagacttgtcggccgcacggcgcggcacccagatgcgaataccgtgaggtgcggaatcatcacgcacgtagcctgtcatatgcacaccgtaccgcataacgccgagcatcccagtgccacttcgctcagcgctgtagagaatctctgtatcactgccatacaccggccacgcctcatcacgccagccccgtaggatatcgaagatctggttctcacgccagtaattcataacttttgctacaacttccgtacgcttggtttcatcctcttgctcgaaagcgcgaacggtctgcgccttctcgtcgacgatcacctcaccacggagttcctcaggaaccgccagcaaacggtttaccgtcgaagcaagcatgtagcctagcacggggccatcgttggccttccagactagtttgtagagagtcatggacagtttgtgataagcctctggctcttgagcttcgtagggaaagctagaggcattgtcaactctctgtccgtgatacactaagataatcgtgcaaaatggcaatagatagtatattcaagaaaatgcaacgctccaatatcaactatgagctgaggactgaggatatgataatgcatgttggagctaggtaaaatgggaggcagctggtcataaggttacactcacgcatcggcctcttttatgatatcgagattactgaaattcttcgccgccatgatgattggctgtgaccgatgttgtggtgatatttttgatatatttgaggaacgtctaatagtctgccgatcgcggggcttcgaggaggatatttgcttcttttttaatagtatcagagcccagattttgccttcaagagataatactctttgaggtcttaggacgagattcatccgctgcagaacggaatactagttgaaggtggaaacaccactaattaagttttggtaaaggcaagacccgttcccaagctcccatatagccacgttctccatctaggaacgcagacccatttcagtcctagctacgtggaactaaaaccacgtcgtcggagtctcggactatttgcaagatgtcctcttctacaacaagatatatagacttcctctataggattaatccca

SEQ ID NO: 2107 - DNA, 1155 bp, Muscodor strobelii
  misc_feature: SGI cDNA ID NO. 560322
  misc_feature: Encodes the peptide sequence at SEQ ID NO 2108
atgtctttccggaaaagaaatgctgtgatcagcagctctggctctgctcagacagcacaagtcaagagtgaaaatgcacctatccctggtgttcggccatcccctttggatggacgcccgacaacgtcgacaggaacatcctccttggataatctcctggctggtcactcagggatccctctgggtacctcgctgttagtaggagaacatgggacgactgattttgctggtctcctcatccgctattatgtagctgaaggcctggtccaagggcaccaaattcatgttttgggcttacatgaaggctggcaggccgaactcccaggcttgtcaactgactctcgttcttcgtccaagtccgagaagtctgcagcagataaaatgaagattgcttggagatatgagagtctagggtctgttggcgctccaagagatcgagaccaaaggcagagtttgcagaacactgcaaatagttcccccttttgccatgatttcgaccttacaaagaaattgaatcctggcgacgtaaagggcaagatcagctttcatcagtcgatgactactcccagcgcaggctctcgtcacggagagtcgcaatcgccatttgagctgttcatcagagacctgtcttccaagctggcaaattcaccgccagcctggatacatcgtgtgatagttcccagtatcttgtcaccgacaatgtactccagcatttcttcgcaaccccatgaagtcctacagtttctccacgctctaagagcactattaaggcaatatccgaaaaatcttaccgttgtcttgactctaccactctctttataccctcggtcaagtgggctcacgagatggatggaactcttgtgtgatggagtcctcgagttcatccctctccagtcgacgtcaatacacaacgcgccaccaaaggcgaagagcgagaacaaggatgatgagaaactacaaggcttagtcaaagtgcatagtctacctgtgttgcatgaaaaaggtggtggttcacattctgcccttgatgatcagtctttcagtctcagccgatcgcgtggccttgtgatcaagcccttctatctcccgcccgccgacggtgatgagcctgaggctaagaaccaacagactgagaaggctaaaattgatttctga

SEQ ID NO: 2108 - protein, 384 aa, Muscodor strobelii
  misc_feature: SGI Peptide ID NO. 560322
  misc_feature (1)..(384): Pfam Id: PF05625 Pfam Desc: PAXNEB protein
  misc_feature (1)..(171): Pfam Id: PF05625 Pfam Desc: PAXNEB protein
  misc_feature (221)..(384): Pfam Id: PF05625 Pfam Desc: PAXNEB protein
  misc_feature (1)..(373): NCBI GI: 156049535 Blast Desc: SS1G_08474 [Sclerotinia sclerotiorum 1980] gi|154692873|gb|EDN92611.1| SS1G_08474 [Sclerotinia sclerotiorum 1980]
  misc_feature (1)..(384): NCBI GI: 145612361 Blast Desc: MGG_07081 [Magnaporthe grisea 70-15] gi|145019545|gb|EDK03773.1| MGG_07081 [Magnaporthe grisea 70-15]
  misc_feature (1)..(384): NCBI GI: 212723368 Blast Desc: LOC100192504 [Zea mays] gi|194690840|gb|ACF79504.1| [Zea mays]
  misc_feature (1)..(373): NCBI GI: 154317635 Blast Desc: BC1G_03169 [Botryotinia fuckeliana B05.10] gi|150844343|gb|EDN19536.1| BC1G_03169 [Botryotinia fuckeliana B05.10]
  misc_feature (1)..(384): NCBI GI: 85109005 Blast Desc: NCU08031 [Neurospora crassa OR74A] gi|28924312|gb|EAA33465.1| conserved [Neurospora crassa OR74A] gi|39979129|emb|CAE85503.1| related to DNA-directed RNA II
  misc_feature (1)..(364): NCBI GI: 171690720 Blast Desc: protein product [Podospora anserina] gi|170945308|emb|CAP71420.1| protein product [Podospora anserina]
  misc_feature (1)..(384): NCBI GI: 238841152 Blast Desc: paxneb superfamily protein [Microsporum canis CBS 113480]
  misc_feature (1)..(384): NCBI GI: 240106041 Blast Desc: PAXNEB family protein [Coccidioides posadasii C735 delta SOWgp]
  misc_feature (1)..(384): NCBI GI: 119192576 Blast Desc: CIMG_00665 [Coccidioides immitis RS]
  misc_feature (1)..(384): NCBI GI: 212529724 Blast Desc: PAXNEB protein superfamily [Penicillium marneffei ATCC 18224] gi|210074417|gb|EEA28504.1| PAXNEB protein superfamily [Penicillium marneffei ATCC 18224]
MSFRKRNAVISSSGSAQTAQVKSENAPIPGVRPSPLDGRPTTSTGTSSLDNLLAGHSGIPLGTSLLVGEHGTTDFAGLLIRYYVAEGLVQGHQIHVLGLHEGWQAELPGLSTDSRSSSKSEKSAADKMKIAWRYESLGSVGAPRDRDQRQSLQNTANSSPFCHDFDLTKKLNPGDVKGKISFHQSMTTPSAGSRHGESQSPFELFIRDLSSKLANSPPAWIHRVIVPSILSPTMYSSISSQPHEVLQFLHALRALLRQYPKNLTVVLTLPLSLYPRSSGLTRWMELLCDGVLEFIPLQSTSIHNAPPKAKSENKDDEKLQGLVKVHSLPVLHEKGGGSHSALDDQSFSLSRSRGLVIKPFYLPPADGDEPEAKNQQTEKAKIDF

SEQ ID NO: 2109 - DNA, 5232 bp, Muscodor strobelii
  misc_feature: SGI EST ID NO. CUFF.5463.0
  misc_feature: Variant of the nucleotide sequence at SEQ ID NO 2107
tgggattaatcctatagaggaagtctatatatcttgttgtagaagaggacatcttgcaaatagtccgagactccgacgacgtggttttagttccacgtagctaggactgaaatgggtctgcgttcctagatggagaacgtggctatatgggagcttgggaacgggtcttgcctttaccaaaacttaattagtggtgtttccaccttcaactagtattccgttctgcagcggatgaatctcgtcctaagacctcaaagagtattatctcttgaaggcaaaatctgggctctgatactattaaaaaagaagcaaatatcctcctcgaagccccgcgatcggcagactattagacgttcctcaaatatatcaaaaatatcaccacaacatcggtcacagccaatcatcatggcggcgaagaatttcagtaatctcgatatcataaaagaggccgatgcctttccctacgaagctcaagagccagaggcttatcacaaactgtccatgactctctacaaactagtctggaaggccaacgatggccccgtgctaggctacatgcttgcttcgacggtaaaccgtttgctggcggttcctgaggaactccgtggtgaggtgatcgtcgacgagaaggcgcagaccgttcgcgctttcgagcaagaggatgaaaccaagcgtacggaagttgtagcaaaagttatgaattactggcgtgagaaccagatcttcgatatcctacggggctggcgtgatgaggcgtggccggtgtatggcagtgatacagagattctctacagcgctgagcgaagtggcactgggatgctcggcgttatgcggtacggtgtgcatatgacaggctacgtgcgtgatgattccgcacctcacggtattcgcatctgggtgccgcgccgtgcggccgacaagtctacatatcccggcatgctagacaacacagcagcaggtggtctaatgacaggcgaggagcctttcgagtgcataatccgcgaggcagatgaagaagcagcactaccagaaaaattgatgcgagagcgagctaaatttacaggcatggtcacatacatctacatcacagacgagcgagcaggcggagagactggacagatatatcccgagactcaatgggtgtacgatatcgagctaccagcggacgtcacgccaacgccgaaggacggtgaagtcgccgaattctatctgatgaccgtggacgaggtgcgcgagaacctcgccaagggtgcctataagcctaactgcgcgctcatcgtcatcgacttcttcgtacgccatggcatcatcacggcggagaatgagcctcattacgcagagattgtccagcgcatgcacagaacattgcccttccctggtcctcatcaagcttacgcggcgtcgttgaacgcgagcgcggctgcggatgctgatgctgctgccactctcgcctcgtaagcatcccgtcttgccttttcaccctcgaagctggcctgccgaggatgcaacacacaatttgttgggttcggaatagtatggtaattgggaattggaagatgggcggaacgcttgttcacatgtaaaatagacctgaatctaaattggcacggcgaggttatcttgatacccctcctcttttagaacatcccgtcagatatctcctcgtcgcaatgtcagcgtctccctgatcaccttttgccctttttattcgtaacagtcgtgtcgcgtaagttgcgtaagtacttgtacagatgcgtatgcagctagatgatcacttcttgaccaaaaggtaggtattgtcgacacgcaggggggttagcttagggtaaggaccctcaagcatcatcaagagaccgccgaaggagatgtaggcacgacttgtttgacctgtcagcatactgctcccctagacctatttgtatgcaactcacaggctctggccctcttgaccatcctcgaacttgtagatcttgccgtggcacacgtagtcgtacatgtcagcgagggtggactcgccgcggacctcgcgccatcccttctcctcgttgtcgcggttgccgtcgagggcgagggtggtggccagcacgacctgcaggttctcgccgacgtggcaggggaagagctcgatgttgatgtcgaggatcatctcggtctggttgtcggccgagttggcagtgatgcgggcgacgcggtcgtacttggactggtcgtagttggtgatggtgaaggcctcttcgaagagctgcgcgtcgcctgtgaggttcgccatcttggatctggtgttgattgtgtctctgactgggttttagaatggcaaaattggcagagcgagagggtgccggctgctgtatggacaggctgtggtaggaggtgcggcgaggactcggtgatgtcgcagttgacctttctctttgatgttggactgaaagcggtgatgctccaccgtgaaaattccctgggacgtttcttttagctccagttgcaaatccaggtacgtgccccgccaaaggctacaacgctagggcatctgagcaaccacctaattgtgccatcagaacggattatcggtgctagaggggtaaagttcaccgcagagcaattgtagatggaacattgaagagcttgaaatctcctgtcgagttcgaatttacataacatatgcgaaacacattcatttcagggtttctatccattgttatgtccgagcaatgtctttccggaaaagaaatgctgtgatcagcagctctggctctgctcagacagcacaagtcaagagtgaaaatgcacctatccctggtgttcggccatcccctttggatggacgcccgacaacgtcgacaggaacatcctccttggataatctcctggctggtcactcagggatccctctgggtacctcgctgttagtaggagaacatgggacgactgattttgctggtctcctcatccgctattatgtagctgaaggcctggtccaagggcaccaaattcatgttttgggcttacatgaaggctggcaggccgaactcccaggcttgtcaactgactctcgttcttcgtccaagtccgagaagtctgcagcagataaaatgaagattgcttggagatatgagagtctagggtctgttggcgctccaagagatcgagaccaaaggcagagtttgcagaacactgcaaatagttcccccttttgccatgatttcgaccttacaaagaaattgaatcctggcgacgtaaagggcaagatcagctttcatcagtcgatgactactcccagcgcaggctctcgtcacggagagtcgcaatcgccatttgagctgttcatcagagacctgtcttccaagctggcaaattcaccgccagcctggatacatcgtgtgatagttcccagtatcttgtcaccgacaatgtactccagcatttcttcgcaaccccatgaagtcctacagtttctccacgctctaagagcactattaaggcaatatccgaaaaatcttaccgttgtcttgactctaccactctctttataccctcggtcaagtgggctcacgagatggatggaactcttgtgtgatggagtcctcgagttcatccctctccagtcgacgtcaatacacaacgcgccaccaaaggcgaagagcgagaacaaggatgatgagaaactacaaggcttagtcaaagtgcatagtctacctgtgttgcatgaaaaaggtggtggttcacattctgcccttgatgatcagtctttcagtctcagccgatcgcgtggccttgtgatcaagcccttctatctcccgcccgccgacggtgatgagcctgaggctaagaaccaacagactgagaaggctaaaattgatttctgaagtgcaaggccatctagtgttcgttcctgttgatcttgcaaacacgtctaagtgtgttttttgcacggagcgctgctagtgcaacttggggctttgagccgtgccggacccacgcagttgcacgcctaccccactgtggtgactctcaaaaacttttctccaaattttgcgagcacccagaacttcttcaactcttcaagcatgtaaatacaagaaagcaatgagtcagaccatggattcagacgcaccctctgctcgccctcttgtgaggatatcaaagcttgcaggccgttacctgctgttcgacatagatgatgtgatgtatatacgcagaaatcacaacatatgctctgtcttcgtaggcacagtgcctcagaacccacagcaaaacttgttcatgggtctgccactcgagctcatgcctgaagaggcgcaagtcttggtcgatcggagggtcgcttatgtcgctgacgatgccacttttcatccggctcggttaggtcaggccgatgagttgatgcgacgctcttacgtacaagcacttcgtgacgagggtaagaacttacagctagctgctgcagagcagaaaagactcaacatgtcagaaaaaagcaaggtcaatcagaaaagcaagaaggtgggcaagcccaaaccgacaacagatggtgcccaggagacagcagacactagtctctttaacacagaaactcccactcccaagaaggctccaaatgctcccattcgaactgagggctttacgctcacacccacaacaagcaagtttctcctcccaaccacttccgatgcgcaggaccccgagcctcgtgtttctgtagatacacctgcctccttttcattgttccaacatttgcatgcaaagggatactatatgatgcccgggcttcgttttggttgtgattacaacgtctatcctggcgatcctctgcgctttcatagtcattttgcagcggtgcactttggtccagatgaggagatcacgacgatggacctcatcggtggtggacgacttggcactgctgtgaagaagggctacttagttggcggcgctgttgtgccgaacgaagaaaacctaaacaagtcgcaagttgaggaggagaaggatagtcatactgatgagcgcactacccaagacaaagatgatcctagcaaatgcgacgaaccccctccggtcaggacttttactctcgagtgggctggcatgtaggaccaagcaagatgaaattaattaatggatggctatatgacgcgactctccctttatggctagtgatcatgacttagctcaattgcttcttgatatacaggttactaagcaacatggtacacactcattatcaccttacctcat

SEQ ID NO: 2110 - DNA, 993 bp, Muscodor strobelii
  misc_feature: SGI cDNA ID NO. 560323
  misc_feature: Encodes the peptide sequence at SEQ ID NO 2111
atggattcagacgcaccctctgctcgccctcttgtgaggatatcaaagcttgcaggccgttacctgctgttcgacatagatgatgtgatgtatatacgcagaaatcacaacatatgctctgtcttcgtaggcacagtgcctcagaacccacagcaaaacttgttcatgggtctgccactcgagctcatgcctgaagaggcgcaagtcttggtcgatcggagggtcgcttatgtcgctgacgatgccacttttcatccggctcggttaggtcaggccgatgagttgatgcgacgctcttacgtacaagcacttcgtgacgagggtaagaacttacagctagctgctgcagagcagaaaagactcaacatgtcagaaaaaagcaaggtcaatcagaaaagcaagaaggtgggcaagcccaaaccgacaacagatggtgcccaggagacagcagacactagtctctttaacacagaaactcccactcccaagaaggctccaaatgctcccattcgaactgagggctttacgctcacacccacaacaagcaagtttctcctcccaaccacttccgatgcgcaggaccccgagcctcgtgtttctgtagatacacctgcctccttttcattgttccaacatttgcatgcaaagggatactatatgatgcccgggcttcgttttggttgtgattacaacgtctatcctggcgatcctctgcgctttcatagtcattttgcagcggtgcactttggtccagatgaggagatcacgacgatggacctcatcggtggtggacgacttggcactgctgtgaagaagggctacttagttggcggcgctgttgtgccgaacgaagaaaacctaaacaagtcgcaagttgaggaggagaaggatagtcatactgatgagcgcactacccaagacaaagatgatcctagcaaatgcgacgaaccccctccggtcaggacttttactctcgagtgggctggcatgtag

SEQ ID NO: 2111 - protein, 330 aa, Muscodor strobelii
  misc_feature: SGI Peptide ID NO. 560323
  misc_feature (12)..(330): NCBI GI: 154317645 Blast Desc: BC1G_03174 [Botryotinia fuckeliana B05.10] gi|150844348|gb|EDN19541.1| BC1G_03174 [Botryotinia fuckeliana B05.10]
  misc_feature (12)..(330): NCBI GI: 225558379 Blast Desc: tRNA-splicing endonuclease subunit sen34 [Ajellomyces capsulatus G186AR]
  misc_feature (12)..(330): NCBI GI: 154286126 Blast Desc: conserved [Ajellomyces capsulatus NAm1] gi|150407499|gb|EDN03040.1| conserved [Ajellomyces capsulatus NAm1]
  misc_feature (12)..(330): NCBI GI: 240274809 Blast Desc: tRNA-splicing endonuclease subunit SEN34 [Ajellomyces capsulatus H143]
  misc_feature (12)..(330): NCBI GI: 261201918 Blast Desc: tRNA-splicing endonuclease subunit sen34 [Ajellomyces dermatitidis SLH14081] gi|239590270|gb|EEQ72851.1| tRNA-splicing endonuclease subunit sen34 [Ajellomyces dermatitidis SLH14081]
  misc_feature (12)..(330): NCBI GI: 240106042 Blast Desc: tRNA-splicing endonuclease subunit, [Coccidioides posadasii C735 delta SOWgp]
  misc_feature (12)..(330): NCBI GI: 239611983 Blast Desc: tRNA-splicing endonuclease subunit sen34 [Ajellomyces dermatitidis ER-3]
  misc_feature (12)..(330): NCBI GI: 119192574 Blast Desc: CIMG_00664 [Coccidioides immitis RS]
  misc_feature (12)..(330): NCBI GI: 121713594 Blast Desc: tRNA-splicing endonuclease subunit sen34 [Aspergillus clavatus NRRL 1] gi|119402561|gb|EAW12982.1| tRNA-splicing endonuclease subunit sen34 [Aspergillus clavatus NRRL 1]
  misc_feature (12)..(330): NCBI GI: 226293979 Blast Desc: tRNA-splicing endonuclease subunit sen34 [Paracoccidioides brasiliensis Pb18]
  misc_feature (12)..(330): SWISSPROT Homolog: EC 3.1.27.9 tRNA-intron endonuclease
MDSDAPSARPLVRISKLAGRYLLFDIDDVMYIRRNHNICSVFVGTVPQNPQQNLFMGLPLELMPEEAQVLVDRRVAYVADDATFHPARLGQADELMRRSYVQALRDEGKNLQLAAAEQKRLNMSEKSKVNQKSKKVGKPKPTTDGAQETADTSLFNTETPTPKKAPNAPIRTEGFTLTPTTSKFLLPTTSDAQDPEPRVSVDTPASFSLFQHLHAKGYYMMPGLRFGCDYNVYPGDPLRFHSHFAAVHFGPDEEITTMDLIGGGRLGTAVKKGYLVGGAVVPNEENLNKSQVEEEKDSHTDERTTQDKDDPSKCDEPPPVRTFTLEWAGM

SEQ ID NO: 2112 - DNA, 5232 bp, Muscodor strobelii; identical to SEQ ID NO: 2109
  misc_feature: SGI EST ID NO. CUFF.5463.0
  misc_feature: Variant of the nucleotide sequence at SEQ ID NO 2110

SEQ ID NO: 2113 - DNA, 1080 bp, Muscodor strobelii
  misc_feature: SGI cDNA ID NO. 560324
  misc_feature: Elevated expression when VOC is produced
  misc_feature: Encodes the peptide sequence at SEQ ID NO 2114
atgttgactcaacagctagctttcgctgctggccttcttggctcggcagtggcctatccttcctccaacaccaatggctttcctacacctaatgcacaacaactcttggctaccgagcagcaagcacttggcaagctttccaatgcgagtccgccaccaaaactaagcccggcgggcgtcacaaacttccaactcattgccttcaacgagaacacggaggtggctttcttcagtgaactcctctacaacattaccaataatgttcccgggtttgattataaatcagagcatcgttctaaagccgagatcgttgagatactacagactgtcttggcacaggaagagctacacgcatacacagccaagaatatcctcgataatttcggggcgttcgcgcctccaccttgcacatacaagtttcccgtctcgaatctcgaagatgccataaacttagccgagaccctcacggctgttgtcttgggtacattgcaagacgctgaacagagctttgctcagaatggcgacgatggacctgtgcgcgcagtagcatctgtcatcgggcaagaaggagagcagaatgggttttatcgttttctcctcgaccgcaagccatctgagaagcccttcatcactaccaatgtcgcacctttcgcgtggtcggctcttcaaggtttcgtcgatgaatgccctttcgatgtagcacagattcctattcctatcttcacaccactaaacgtcctgtcgaaagcctatccaagggactcttacctctccttttccgctgacttgtctggtcttccggaatacgacgacgaatctgatttcagcaaactcttcgtcacctacttcagcggcaccctaaatcctatctcagagccgatcatgaacgcgaagtgcactgatcacgtcttgacattcgatgcgctattccctttcaatgacaatttgatgtttggcctcagcatcgcgtcgctgaccaattcatcgggcttcaccaatcccgatgatgttgtggcgtcgactctcgcagcgcccggactgatcgaagttgatattcctctttcgtcttattcctcctaa

SEQ ID NO: 2114 - protein, 359 aa, Muscodor strobelii
  misc_feature: SGI Peptide ID NO. 560324
  misc_feature (18)..(351): NCBI GI: 256724153 Blast Desc: NECHADRAFT_97154 [Nectria haematococca mpVI 77-13-4]
  misc_feature (1)..(350): NCBI GI: 170940390 Blast Desc: protein product [Podospora anserina]
  misc_feature (9)..(356): NCBI GI: 256729455 Blast Desc: NECHADRAFT_47297 [Nectria haematococca mpVI 77-13-4]
  misc_feature (9)..(354): NCBI GI: 46117076 Blast Desc: FG04380.1 [Gibberella zeae PH-1]
  misc_feature (25)..(351): NCBI GI: 189208903 Blast Desc: late sexual development protein [Pyrenophora tritici-repentis Pt-1C-BFP] gi|187976877|gb|EDU43503.1| late sexual development protein [Pyrenophora tritici-repentis
  misc_feature (25)..(351): NCBI GI: 121713428 Blast Desc: sexual development protein (LsdA), [Aspergillus clavatus NRRL 1] gi|119402478|gb|EAW12899.1| sexual development protein (LsdA), [Aspergillus clavatus NRRL 1]
  misc_feature (3)..(351): NCBI GI: 238506981 Blast Desc: LsdA family protein [Aspergillus flavus NRRL3357] gi|220689405|gb|EED45756.1| LsdA family protein [Aspergillus flavus NRRL3357]
  misc_feature (21)..(351): NCBI GI: 70997733 Blast Desc: sexual development protein (LsdA) [Aspergillus fumigatus Af293] gi|66851238|gb|EAL91564.1| sexual development protein (LsdA), [Aspergillus fumigatus Af293]
  misc_feature (21)..(351): NCBI GI: 119479239 Blast Desc: sexual development protein (LsdA), [Neosartorya fischeri NRRL 181] gi|119407802|gb|EAW17751.1| sexual development protein (LsdA), [Neosartorya fischeri NRRL 181]
  misc_feature (21)..(351): NCBI GI: 159126664 Blast Desc: sexual development protein (LsdA), [Aspergillus fumigatus A1163]
  misc_feature: Useful for introducing or modulating the production of volatile compounds
MLTQQLAFAAGLLGSAVAYPSSNTNGFPTPNAQQLLATEQQALGKLSNASPPPKLSPAGVTNFQLIAFNENTEVAFFSELLYNITNNVPGFDYKSEHRSKAEIVEILQTVLAQEELHAYTAKNILDNFGAFAPPPCTYKFPVSNLEDAINLAETLTAVVLGTLQDAEQSFAQNGDDGPVRAVASVIGQEGEQNGFYRFLLDRKPSEKPFITTNVAPFAWSALQGFVDECPFDVAQIPIPIFTPLNVLSKAYPRDSYLSFSADLSGLPEYDDESDFSKLFVTYFSGTLNPISEPIMNAKCTDHVLTFDALFPFNDNLMFGLSIASLTNSSGFTNPDDVVASTLAAPGLIEVDIPLSSYSS

SEQ ID NO: 2115 - DNA, 1749 bp, Muscodor strobelii
  misc_feature: SGI EST ID NO. CUFF.5350.0
  misc_feature: Variant of the nucleotide sequence at SEQ ID NO 2113
gccacatggaagaatgccggtcggtaggatctaagctagaggccaagccattgatcgctggggaacctgggtccgcgccagtgtgccggatgatgccggcgagggtagacactattttgtgaactttgccctgccacgcttacatggccgtgagtttgtaattgcacagacagagtagtttagggacatcaataggacctcgatgctaaagtacaaatgaacgctatgatcgctcagaaatcgaaagaatatcctcagttcttatcaccaccattacaataatctttcttgtctcaagcgctagatacatctgttatatatttcctagatttctagactgccttcgtcagcgtttaatatttattaatcgatcacatcatgttgactcaacagctagctttcgctgctggccttcttggctcggcagtggcctatccttcctccaacaccaatggctttcctacacctaatgcacaacaactcttggctaccgagcagcaagcacttggcaagctttccaatgcgagtccgccaccaaaactaagcccggcgggcgtcacaaacttccaactcattgccttcaacgagaacacggaggtggctttcttcagtgaactcctctacaacattaccaataatgttcccgggtttgattataaatcagagcatcgttctaaagccgagatcgttgagatactacagactgtcttggcacaggaagagctacacgcatacacagccaagaatatcctcgataatttcggggcgttcgcgcctccaccttgcacatacaagtttcccgtctcgaatctcgaagatgccataaacttagccgagaccctcacggctgttgtcttgggtacattgcaagacgctgaacagagctttgctcagaatggcgacgatggacctgtgcgcgcagtagcatctgtcatcgggcaagaaggagagcagaatgggttttatcgttttctcctcgaccgcaagccatctgagaagcccttcatcactaccaatgtcgcacctttcgcgtggtcggctcttcaaggtttcgtcgatgaatgccctttcgatgtagcacagattcctattcctatcttcacaccactaaacgtcctgtcgaaagcctatccaagggactcttacctctccttttccgctgacttgtctggtcttccggaatacgacgacgaatctgatttcagcaaactcttcgtcacctacttcagcggcaccctaaatcctatctcagagccgatcatgaacgcgaagtgcactgatcacgtcttgacattcgatgcgctattccctttcaatgacaatttgatgtttggcctcagcatcgcgtcgctgaccaattcatcgggcttcaccaatcccgatgatgttgtggcgtcgactctcgcagcgcccggactgatcgaagttgatattcctctttcgtcttattcctcctaagttctcgatcgggaccttttcagcgtcgtatagacctcataggtttttgcgatgtgttatctatgcacatagacactttatagcatagcatctgtccaaatcatcaaggtagcttggcgttggtgttgtgggtttggtacgacttcggtagcgtctggttattgggctacgttaatgatattcacttgtacttaaacataaatgtcttaggactcacgttcaaacaatttgttctgcgctaaatacatcgaaaatgatgtgaaaataaagatatgttctcgtgtgctagca

SEQ ID NO: 2116 - DNA, 417 bp, Muscodor strobelii
  misc_feature: SGI cDNA ID NO. 560325
  misc_feature: Encodes the peptide sequence at SEQ ID NO 2117
atggcagaactggcaatgacaccagcggtacgcgagctattcaaggttctcgtctctggctgggcttctcgggtccgccgtcggctcgcaagaaaatctaagaaagataaagcagctgagcaagcagctaaggaagcagctgagcaggaccgggcgaatgcgttgatcgataacctcgaaaattcgttcgtcccaactgtgcagcgacctccatccgtggcagagcaaggcgagttaggacatgatatcattctttgttatgattcatggccaccaccgcaggaaggaattccgactatgcagggacccccatctataactctatcaccaccactccagccgagacggatgccttctgtacagtcgttgatggacgacgctgatcatagcaaaggcgagcaggaagagaagcgttag

SEQ ID NO: 2117 - protein, 138 aa, Muscodor strobelii
  misc_feature: SGI Peptide ID NO. 560325
MAELAMTPAVRELFKVLVSGWASRVRRRLARKSKKDKAAEQAAKEAAEQDRANALIDNLENSFVPTVQRPPSVAEQGELGHDIILCYDSWPPPQEGIPTMQGPPSITLSPPLQPRRMPSVQSLMDDADHSKGEQEEKR

SEQ ID NO: 2118 - DNA, 1089 bp, Muscodor strobelii
  misc_feature: SGI cDNA ID NO. 560326
  misc_feature: Encodes the peptide sequence at SEQ ID NO 2119
atgccgcacaagacagagcctctcggtggcaaggagtttactcccgatcaatatccaggctttccagagggtttcccaaccgtggaccttgaaacgatttcccttacaaagctgcttgtcgatcgtgatccagctgagcaagaccgcgtattcgagatctgcaaagggcgtggattcttctacctagacctcgtaggatgcgaggcaggagatacaattgccaaaggcgctgatgaaattgccgcggtcgccgaaaatgcattcggactaccgcttgacgagaagatgaaatatgcctatcataagcaaggtgccggtggttcattagatggctacaaaatggttggtgcaacagtcaccgataaagatggcaccagagatactgctgagtttttcaacattacgaagaatgaaatgattgtaccggacgatcaaatgcaaaaagcttggccggaagttatcaaggctgcgaaaccgctgttcagcgattatatgcgggcttcacatggtgtcggcatgggcattatggctataattgccacaaagctcggcgtcgaccctgaggagtttgcaagtcgacatcgcattcacgaatcatcgggtgaccatgttcgtctgacccggggcccacctagagagaaagaagagttacctgagatccaaacgccctcgcataccgactttggaaccatcacggttctcatgaactggctcggcggtctgcaagtttggtcagaatcatcacgcaaagcccaacttttaaattacgagccagattctcccggtgaatggctatgggtaaaacccaagaaaggatgtgcgatcataaatctcggtgatgcagcagtaaaattcaccaacggcgttctctgtgctgggagacatcgcgtgattccagccccaggtgtgcaagggaagtaccctcgttacagcgttgtctactttgtgcgaccggaaaacgcatgcatcatgaagcagctgagaagtccgcaaattcctgatggtccagaagaagaacgagagatcactgcgaaagaatggattcaggcacaggcagcggggttgggtttcaattggaaaaagaaatga

SEQ ID NO: 2119 - protein, 362 aa, Muscodor strobelii
  misc_feature: SGI Peptide ID NO. 560326
  misc_feature (200)..(318): Pfam Id: PF03171 Pfam Desc: 2OG-Fe(II) oxygenase superfamily
  misc_feature (14)..(362): NCBI GI: 212529716 Blast Desc: oxidoreductase, 2OG-Fe(II) oxygenase family, [Penicillium marneffei ATCC 18224] gi|210074413|gb|EEA28500.1| oxidoreductase, 2OG-Fe(II) oxygenase family, [Penicillium ATCC
  misc_feature (19)..(354): NCBI GI: 70997577 Blast Desc: oxidoreductase, 2OG-Fe(II) oxygenase family [Aspergillus fumigatus Af293] gi|66851168|gb|EAL91494.1| oxidoreductase, 2OG-Fe(II) oxygenase family, [Aspergillus Af293]
  misc_feature (19)..(362): NCBI GI: 240106044 Blast Desc: 1-aminocyclopropane-1-carboxylate oxidase, [Coccidioides posadasii C735 delta SOWgp]
  misc_feature (19)..(362): NCBI GI: 119192568 Blast Desc: CIMG_00661 [Coccidioides immitis RS]
  misc_feature (16)..(362): NCBI GI: 242762390 Blast Desc: oxidoreductase, 2OG-Fe(II) oxygenase family, [Talaromyces stipitatus ATCC 10500] gi|218723564|gb|EED22981.1| oxidoreductase, 2OG-Fe(II) oxygenase family, [Talaromyces ATCC
  misc_feature (19)..(354): NCBI GI: 119479097 Blast Desc: oxidoreductase, 2OG-Fe(II) oxygenase family, [Neosartorya fischeri NRRL 181] gi|119407731|gb|EAW17680.1| oxidoreductase, 2OG-Fe(II) oxygenase family, [Neosartorya NRRL
  misc_feature (16)..(327): NCBI GI: 116206990 Blast Desc: CHGG_02788 [Chaetomium globosum CBS 148.51] gi|88183385|gb|EAQ90853.1| CHGG_02788 [Chaetomium globosum CBS 148.51]
  misc_feature (19)..(354): NCBI GI: 226293982 Blast Desc: oxidoreductase [Paracoccidioides brasiliensis Pb18]
  misc_feature (19)..(360): NCBI GI: 115401474 Blast Desc: conserved [Aspergillus terreus NIH2624] gi|114190266|gb|EAU31966.1| conserved [Aspergillus terreus NIH2624]
  misc_feature (19)..(354): NCBI GI: 159126736 Blast Desc: oxidoreductase, 2OG-Fe(II) oxygenase family, [Aspergillus fumigatus A1163]
  misc_feature (21)..(318): SWISSPROT Homolog: EC 1.14.11.9 Flavanone 3-dioxygenase
MPHKTEPLGGKEFTPDQYPGFPEGFPTVDLETISLTKLLVDRDPAEQDRVFEICKGRGFFYLDLVGCEAGDTIAKGADEIAAVAENAFGLPLDEKMKYAYHKQGAGGSLDGYKMVGATVTDKDGTRDTAEFFNITKNEMIVPDDQMQKAWPEVIKAAKPLFSDYMRASHGVGMGIMAIIATKLGVDPEEFASRHRIHESSGDHVRLTRGPPREKEELPEIQTPSHTDFGTITVLMNWLGGLQVWSESSRKAQLLNYEPDSPGEWLWVKPKKGCAIINLGDAAVKFTNGVLCAGRHRVIPAPGVQGKYPRYSVVYFVRPENACIMKQLRSPQIPDGPEEEREITAKEWIQAQAAGLGFNWKKK

SEQ ID NO: 2120 - DNA, 3480 bp, Muscodor strobelii
  misc_feature: SGI EST ID NO. CUFF.5354.0
  misc_feature: Variant of the nucleotide sequence at SEQ ID NO 2118
actcgttgatgcctatttgcgcactctcgagtgtgtctttcgagtcgtacatgttcctacttttcagcgtgaatatgaacagtactgggcgtcaccggacactgcgcgaacacatttcgtcattcttctccagctgatcatgtgtatcggagccactgtgtatgacaccaagttttctctgcgcaaatctgccattcagtgggtaatggaggcacagtattggcttcttagcttacccgccaagggtaaactcacaattgctgggatacagatcatgattcttattaccattgcccgcggtactgcatctgttggaggtgatctagtctggatacacgtcggctccttgttgcgtagcgccatgtacatgggactacatcgagatccatctcggcttccacctatgtctcgacttgatgcagagatgcgtcgccggctttggaatacaataatcgagttagaggttcaaacctccattgatgctggcggctttccaatgatctctctcgacaactcggatacaagagcaccggcaaatctggatgacgtcgaactcatggatgtcgatccgtcaacacgtgagaaagagacggatagatttacagacatgagcgtagctcttgctcttcgagacagcttgaaagagagacttgccgtatgccagctactcaatgtaacgtcttaccaaggcgcttatgaggacacaatacacctacatgggcggtttagtaaagcgtggaagtcgttggccgcaaagctcaagagttatccaccttcaagtcgacaaccaagttcgttcaccaagagatttctcgaggtcttcatacgtcggtatttcttagccttgcatctcccttacctggcgcctggcgcttcagaaccagctttcgctttctcaaggaaaactgtcatagagtcagcatccaagatctataccgctgtgtttcctaccgcagcgcagatacgggtctcgcaagacgatgaattagaaggcatgactaaaggtgatgacttggtgcgcttggtagtgtgcagtgctggattctggcgtgcaattatgggtcagacagccatgacaatcgcacttgaattacagcaatgcattatcgaagaagaaggcatggggcctcccacacttcgaccggatctgttgaatatcctgtaccattcgcttgctctgtttctcaatcgaattagagccggcgaaacaaatgtcaagggatatcttttttctgtcgcattggtggcaagcgtggatagtctcatgaacggcagaagagatattgcgaatatggtactcgaagccgcactagtcactgagaagaaatgcctctccatattgagagagcatgccagcttagctgactcaacagagacaaatacaggagcggagcagttcgactgggaaaattcaatggcaatcgacgagggttgggactctacaatgccctctatgggctccttgttcgacgttactggtgtcgaatctttcctgggcgctgacagcgacttcgaattcatgacgccgatgcctttttggggcagaaactaattggtctggacgtcatttcggtccaatgtcgttatgttgaataatttcatgagactgccacgtaaaatattgttcacgcatgttacgtgagaagcttggtagggacttgccgtgacgatctggtgcagcaatggatcatcacttggtatgcggggttcaatcagagcggcaggtatagaaggcgttgtaagtttaattagtgttagcacctgatacccctcaatcatacgacatgtgtacattcatagcggcattccgtttcgtagctcggattgaagcgtgtgcattgatcaattctttcattgatgagaagtaggcacatagacttaggtagatagtagtgcagtgtaagagcgagacaggtgcccggtgtaccaagtctactgtctagctggtggccgtttgtaaccaaagtaaaagatccgggtgtggttgagtaacgtggcagcaaaaggtacgtaataactgattgcagtatcccctcttcagcatggagttattgccgctctgtcgttgtattgatttccgcacgttccggtcttctcttcattttgaaagccgagctccatttctcttttcaccttgaaccttcagattcagattcaaacgagtatttgagtcactgctagacagtagtcatgccgcacaagacagagcctctcggtggcaaggagtttactcccgatcaatatccaggctttccagagggtttcccaaccgtggaccttgaaacgatttcccttacaaagctgcttgtcgatcgtgatccagctgagcaagaccgcgtattcgagatctgcaaagggcgtggattcttctacctagacctcgtaggatgcgaggcaggagatacaattgccaaaggcgctgatgaaattgccgcggtcgccgaaaatgcattcggactaccgcttgacgagaagatgaaatatgcctatcataagcaaggtgccggtggttcattagatggctacaaaatggttggtgcaacagtcaccgataaagatggcaccagagatactgctgagtttttcaacattacgaagaatgaaatgattgtaccggacgatcaaatgcaaaaagcttggccggaagttatcaaggctgcgaaaccgctgttcagcgattatatgcgggcttcacatggtgtcggcatgggcattatggctataattgccacaaagctcggcgtcgaccctgaggagtttgcaagtcgacatcgcattcacgaatcatcgggtgaccatgttcgtctgacccggggcccacctagagagaaagaagagttacctgagatccaaacgccctcgcataccgactttggaaccatcacggttctcatgaactggctcggcggtctgcaagtttggtcagaatcatcacgcaaagcccaacttttaaattacgagccagattctcccggtgaatggctatgggtaaaacccaagaaaggatgtgcgatcataaatctcggtgatgcagcagtaaaattcaccaacggcgttctctgtgctgggagacatcgcgtgattccagccccaggtgtgcaagggaagtaccctcgttacagcgttgtctactttgtgcgaccggaaaacgcatgcatcatgaagcagctgagaagtccgcaaattcctgatggtccagaagaagaacgagagatcactgcgaaagaatggattcaggcacaggcagcggggttgggtttcaattggaaaaagaaatgagccacctgtaaggacgagaagattgagccatgcaatttgtattctatgaggacatatcataaaaacattcttatcagttatgcagaatcattgcgtcttcataatgatagttcggacttgagcctcgagtgttagtaacctacttctattgcacgcttgatacctacagagtcgtcaaacttctcaagaatcggcgagtag

SEQ ID NO: 2121 - DNA, 1791 bp, Muscodor strobelii
  misc_feature: SGI cDNA ID NO. 560327
  misc_feature: Encodes the peptide sequence at SEQ ID NO 2122
atgacgagaggagtcgtttcaaagactagatacttcggtcagagtcattgggttaatggagtggttcaattcagagccatactcgagatattcgaggcacagtctcaagatgccaagtccgaagctctccaagttctgaccaagtgcaaggcacttggtcgaactataaaagcccgacgcgcgcctggcatcatcaccaagtttggaacaaacattccatccaaagatgtggcagacaaactcgttgatgcctatttgcgcactctcgagtgtgtctttcgagtcgtacatgttcctacttttcagcgtgaatatgaacagtactgggcgtcaccggacactgcgcgaacacatttcgtcattcttctccagctgatcatgtgtatcggagccactgtgtatgacaccaagttttctctgcgcaaatctgccattcagtgggtaatggaggcacagtattggcttcttagcttacccgccaagggtaaactcacaattgctgggatacagatcatgattcttattaccattgcccgcggtactgcatctgttggaggtgatctagtctggatacacgtcggctccttgttgcgtagcgccatgtacatgggactacatcgagatccatctcggcttccacctatgtctcgacttgatgcagagatgcgtcgccggctttggaatacaataatcgagttagaggttcaaacctccattgatgctggcggctttccaatgatctctctcgacaactcggatacaagagcaccggcaaatctggatgacgtcgaactcatggatgtcgatccgtcaacacgtgagaaagagacggatagatttacagacatgagcgtagctcttgctcttcgagacagcttgaaagagagacttgccgtatgccagctactcaatgtaacgtcttaccaaggcgcttatgaggacacaatacacctacatgggcggtttagtaaagcgtggaagtcgttggccgcaaagctcaagagttatccaccttcaagtcgacaaccaagttcgttcaccaagagatttctcgaggtcttcatacgtcggtatttcttagccttgcatctcccttacctggcgcctggcgcttcagaaccagctttcgctttctcaaggaaaactgtcatagagtcagcatccaagatctataccgctgtgtttcctaccgcagcgcagatacgggtctcgcaagacgatgaattagaaggcatgactaaaggtgatgacttggtgcgcttggtagtgtgcagtgctggattctggcgtgcaattatgggtcagacagccatgacaatcgcacttgaattacagcaatgcattatcgaagaagaaggcatggggcctcccacacttcgaccggatctgttgaatatcctgtaccattcgcttgctctgtttctcaatcgaattagagccggcgaaacaaatgtcaagggatatcttttttctgtcgcattggtggcaagcgtggatagtctcatgaacggcagaagagatattgcgaatatggtactcgaagccgcactagtcactgagaagaaatgcctctccatattgagagagcatgccagcttagctgactcaacagagacaaatacaggagcggagcagttcgactgggaaaattcaatggcaatcgacgagggttgggactctacaatgccctctatgggctccttgttcgacgttactggtgtcgaatctttcctgggcgctgacagcgacttcgaattcatgacgccgatgcctttttggggcagaaactaa

SEQ ID NO: 2122 - protein, 596 aa, Muscodor strobelii
  misc_feature: SGI Peptide ID NO. 560327
  misc_feature (165)..(263): Pfam Id: PF04082 Pfam Desc: Fungal specific transcription factor domain
  misc_feature (5)..(564): NCBI GI: 259479345 Blast Desc: TPA: Zn(II)2Cys6 transcription factor (Eurofung) [Aspergillus nidulans FGSC A4]
  misc_feature (5)..(549): NCBI GI: 67540520 Blast Desc: AN6430.2 [Aspergillus nidulans FGSC A4] gi|40739262|gb|EAA58452.1| AN6430.2 [Aspergillus nidulans FGSC A4]
  misc_feature (1)..(563): NCBI GI: 240279207 Blast Desc: C6 zinc finger protein [Ajellomyces capsulatus H143]
  misc_feature (1)..(562): NCBI GI: 238492317 Blast Desc: conserved [Aspergillus flavus NRRL3357] gi|220695889|gb|EED52231.1| conserved [Aspergillus flavus NRRL3357]
  misc_feature (2)..(562): NCBI GI: 121712457 Blast Desc: C6 transcription factor, [Aspergillus clavatus NRRL 1] gi|119401992|gb|EAW12414.1| C6 transcription factor, [Aspergillus clavatus NRRL 1]
  misc_feature (1)..(563): NCBI GI: 242785721 Blast Desc: conserved [Talaromyces stipitatus ATCC 10500] gi|218720801|gb|EED20220.1| conserved [Talaromyces stipitatus ATCC 10500]
  misc_feature (1)..(570): NCBI GI: 256729961 Blast Desc: NECHADRAFT_47048 [Nectria haematococca mpVI 77-13-4]
  misc_feature (3)..(560): NCBI GI: 256725617 Blast Desc: NECHADRAFT_43226 [Nectria haematococca mpVI 77-13-4]
  misc_feature (6)..(572): NCBI GI: 115388303 Blast Desc: [Aspergillus terreus NIH2624] gi|114195741|gb|EAU37441.1| [Aspergillus terreus NIH2624]
  misc_feature (46)..(570): NCBI GI: 225562302 Blast Desc: C6 zinc finger domain-containing protein [Ajellomyces capsulatus G186AR]
MTRGVVSKTRYFGQSHWVNGVVQFRAILEIFEAQSQDAKSEALQVLTKCKALGRTIKARRAPGIITKFGTNIPSKDVADKLVDAYLRTLECVFRVVHVPTFQREYEQYWASPDTARTHFVILLQLIMCIGATVYDTKFSLRKSAIQWVMEAQYWLLSLPAKGKLTIAGIQIMILITIARGTASVGGDLVWIHVGSLLRSAMYMGLHRDPSRLPPMSRLDAEMRRRLWNTIIELEVQTSIDAGGFPMISLDNSDTRAPANLDDVELMDVDPSTREKETDRFTDMSVALALRDSLKERLAVCQLLNVTSYQGAYEDTIHLHGRFSKAWKSLAAKLKSYPPSSRQPSSFTKRFLEVFIRRYFLALHLPYLAPGASEPAFAFSRKTVIESASKIYTAVFPTAAQIRVSQDDELEGMTKGDDLVRLVVCSAGFWRAIMGQTAMTIALELQQCIIEEEGMGPPTLRPDLLNILYHSLALFLNRIRAGETNVKGYLFSVALVASVDSLMNGRRDIANMVLEAALVTEKKCLSILREHASLADSTETNTGAEQFDWENSMAIDEGWDSTMPSMGSLFDVTGVESFLGADSDFEFMTPMPFWGRN

SEQ ID NO: 2123 - DNA, 3480 bp, Muscodor strobelii; identical to SEQ ID NO: 2120
  misc_feature: SGI EST ID NO. CUFF.5354.0
  misc_feature: Variant of the nucleotide sequence at SEQ ID NO 2121

SEQ ID NO: 2124 - DNA, 1185 bp, Muscodor strobelii
  misc_feature: SGI cDNA ID NO. 560328
  misc_feature: Encodes the peptide sequence at SEQ ID NO 2125
atgggccgtacagaacagactatcgtcaaaccaccacaagcattccgtcgtgacgctcgagcaaaacgagcccggaacacactaaacaaagtgatcccatcactactcattgcacatccacgcgcaaagagaggcatagagcgctcagagttgatcatagatccacctcccttcaccctgggtcaagcttgcctcttcggtgaagcggcaaagaagcaagatcaagatgatacagatgatcgcaaaacgagtcgagcaaaaaagggcaggaaaaggagcaaaagcacagacgaaactcactcactccaagaacctctcaaagctctacctatcctccaacccatcaaaccaaaaatccaaatccttgccatcgatactctaacagccgcccacactctcctatccccaaaaaccaaagtaggcctcctaaacatggcttcccccctctcaccaggcggcggcttcctcaacggcgcaacatcccaagaagaatccctctgcatgcggaccacactcctgccctcccttcacgactcatactacaggcttccagagctaggcatagtgtacacacccgacgtgctagtgttccgccacgcatcctcactcacgcaaactgccaccggcgcagaagaagatgatgtcttaccgaaaacccagcgctggcacgtagacatcgcatccgcagccatgctccgcctccccgaggtggaagatggtgtttatgagaccaagaaaaacagcggtgatagagaagaatggcagaattacttcgaagaaataatcttcgccatcaaagatcctaaaatggccttagcattcgcaaagtcgttcggggaggagaatctaagcagtcctttcgttgaacaagatatatgtgaggggagtgaggagagtggtgagagagaaagcgagagggaagtagaactcagggctaagatacgggagctggagacgcagatcgaacaagtgcgcagtccgcatttgaagtcgggtctagagtctgttctcgcttcgctcaggagtcaattggattcgatgactgaggataacgatgctgatgatcgtagcttggatcaagccaagtcaggatcgaaacaagatgaggacgatgaagacgatgacgatgagccagatgatgagttggatgcatactcagacgacttagcagatgacaaaaaataa

SEQ ID NO: 2125 - protein, 394 aa, Muscodor strobelii
  misc_feature: SGI Peptide ID NO. 560328
  misc_feature (1)..(355): NCBI GI: 46114250 Blast Desc: FG02967.1 [Gibberella zeae PH-1]
  misc_feature (1)..(344): NCBI GI: 119177912 Blast Desc: CIMG_07849 [Coccidioides immitis RS]
  misc_feature (1)..(372): NCBI GI: 169614217 Blast Desc: SNOG_10246 [Phaeosphaeria nodorum SN15] gi|111061461|gb|EAT82581.1| SNOG_10246 [Phaeosphaeria nodorum SN15]
  misc_feature (1)..(344): NCBI GI: 240107537 Blast Desc: CPC735_041600 [Coccidioides posadasii C735 delta SOWgp]
  misc_feature (1)..(344): NCBI GI: 189200264 Blast Desc: conserved [Pyrenophora tritici-repentis Pt-1C-BFP] gi|187983568|gb|EDU49056.1| conserved [Pyrenophora tritici-repentis Pt-1C-BFP]
  misc_feature (1)..(238): NCBI GI: 256722908 Blast Desc: NECHADRAFT_16676 [Nectria haematococca mpVI 77-13-4]
  misc_feature (1)..(238): NCBI GI: 261352932 Blast Desc: conserved [Verticillium albo-atrum VaMs.102]
  misc_feature (1)..(252): NCBI GI: 258576951 Blast Desc: [Uncinocarpus reesii 1704] gi|237902923|gb|EEP77324.1| [Uncinocarpus reesii 1704]
  misc_feature (116)..(235): NCBI GI: 255948032 Blast Desc: Pc22g07660 [Penicillium chrysogenum Wisconsin 54-1255] gi|211591800|emb|CAP98054.1| Pc22g07660 [Penicillium chrysogenum Wisconsin 54-1255]
  misc_feature (107)..(269): NCBI GI: 119498123 Blast Desc: NFIA_034900 [Neosartorya fischeri NRRL 181] gi|119413983|gb|EAW23922.1| conserved [Neosartorya fischeri NRRL 181]
MGRTEQTIVKPPQAFRRDARAKRARNTLNKVIPSLLIAHPRAKRGIERSELIIDPPPFTLGQACLFGEAAKKQDQDDTDDRKTSRAKKGRKRSKSTDETHSLQEPLKALPILQPIKPKIQILAIDTLTAAHTLLSPKTKVGLLNMASPLSPGGGFLNGATSQEESLCMRTTLLPSLHDSYYRLPELGIVYTPDVLVFRHASSLTQTATGAEEDDVLPKTQRWHVDIASAAMLRLPEVEDGVYETKKNSGDREEWQNYFEEIIFAIKDPKMALAFAKSFGEENLSSPFVEQDICEGSEESGERESEREVELRAKIRELETQIEQVRSPHLKSGLESVLASLRSQLDSMTEDNDADDRSLDQAKSGSKQDEDDEDDDDEPDDELDAYSDDLADDKK

SEQ ID NO: 2126 - DNA, 1368 bp, Muscodor strobelii
  misc_feature: SGI cDNA ID NO. 560329
  misc_feature: Reduced expression when VOC is produced
  misc_feature: Encodes the peptide sequence at SEQ ID NO 2127
atgctcggcgccgtactcagaaggcagggcatgctgcggaccgctgccctccgcaacatgtctgccagattctatgcctccttcccaccacacactgtcatcaagatgcccgctctatcgcccaccatgacggcgggtaacatcggtgcatggcagaagaaggctggtgatagcattgcccccggtgacgtccttgtcgagatcgagaccgacaaggcccagatggacttcgagttccaggaggagggtgtcatcgccaaggtcctcaaggacgctggcgagaaggacgtccccgtcggaaaccccattgccatcttagtcgaggagggtgccgatgtttccgctttcgagtctttcagcctcgaagacgccggtggtgacgcctctaagcctgcccccaaggaggagaagaagtcggacgagtcttccagcgactctgccccagctccatcgtccgccccagagaccaccgagtacgcctccgagggcaagcttgagaccgctctggaccgtgagcccaacatcagccctgccgccaagcgattggccaaggagaacggtgtcaagatctcgagcttgaagggtaccggctccggcggtaagatcaccgaggaggatgtcaagaaggcctcctctggatcctcttcgggcgctgtggccactgctgccgcctacgaggatacgcccctatccaacatgcgcaagaccatcgccaagcgtctccaagagtccgtccagactaacccccacttcttcgtcaccagcaacatctccgtgtccaagctcttgaagctgcgccaggccttgaacagctctgccgatggcaagtacaagctctccgtcaatgacttcctcatcaaggccgtcgctgctgctagcaagaaggtccccgctgtcaacgccgcatggcagggtgatgccatccgccagtacagcaacgtcgatgtttccgtcgccgttgccacccctactggtctgatcactcccatcgttaccaacgtcggtggccgtggtctcgaatccatctcttctgccgtcaaggacctcgctaagaaggcccgcgacaacaagcttaagcccgaggagtaccagggtggcactatctccatctccaacttgggcatgaactcagccgtcgaccacttcaccgccatcatcaaccctccacaagccgctatcctcgccgttggcacgacgaagaaggtccccgtccccgttgagactgaagacggcacttcgatcgattgggaggaccagataactgtcactgctagcttcgaccaccgtgtcgttgatggcgccgttggtggcgagtggatcaaggagttcaagaaggtcctcgagaaccctcttgagttgctactataa

SEQ ID NO: 2127 - protein, 455 aa, Muscodor strobelii
  misc_feature: SGI Peptide ID NO. 560329
  misc_feature (222)..(455): Pfam Id: PF00198 Pfam Desc: 2-oxoacid dehydrogenases acyltransferase (catalytic domain)
  misc_feature (32)..(106): Pfam Id: PF00364 Pfam Desc: Biotin-requiring enzyme
  misc_feature (171)..(209): Pfam Id: PF02817 Pfam Desc: e3 binding domain
  misc_feature (1)..(455): NCBI GI: 171688112 Blast Desc: protein product [Podospora anserina] gi|170944018|emb|CAP70128.1| protein product [Podospora anserina]
  misc_feature (1)..(455): NCBI GI: 256725615 Blast Desc: [Nectria haematococca mpVI 77-13-4]
  misc_feature (1)..(455): NCBI GI: 46116658 Blast Desc: FG04171.1 [Gibberella zeae PH-1]
  misc_feature (4)..(455): NCBI GI: 212537093 Blast Desc: pyruvate dehydrogenase complex, dihydrolipoamide acetyltransferase component, [Penicillium marneffei ATCC 18224] gi|210068444|gb|EEA22535.1| pyruvate dehydrogenase complex, ATCC
  misc_feature (1)..(455): NCBI GI: 116197068 Blast Desc: CHGG_05132 [Chaetomium globosum CBS 148.51] gi|88181045|gb|EAQ88513.1| CHGG_05132 [Chaetomium globosum CBS 148.51]
  misc_feature (22)..(455): NCBI GI: 119482980 Blast Desc: dihydrolipoamide acetyltransferase component of pyruvate dehydrogenase [Neosartorya fischeri NRRL 181] gi|119409673|gb|EAW19621.1| dihydrolipoamide acetyltransferase of
  misc_feature (22)..(455): NCBI GI: 70986903 Blast Desc: pyruvate dehydrogenase complex, dihydrolipoamide acetyltransferase component [Aspergillus fumigatus Af293] gi|66846568|gb|EAL86900.1| pyruvate dehydrogenase complex, Af293]
  misc_feature (22)..(455): NCBI GI: 238482693 Blast Desc: pyruvate dehydrogenase complex, dihydrolipoamide acetyltransferase [Aspergillus flavus NRRL3357] gi|220700635|gb|EED56973.1| pyruvate dehydrogenase complex,
  misc_feature (22)..(455): NCBI GI: 169766062 Blast Desc: [Aspergillus oryzae RIB40] gi|83765357|dbj|BAE55500.1| protein product [Aspergillus oryzae]
  misc_feature (23)..(455): NCBI GI: 242810228 Blast Desc: pyruvate dehydrogenase complex, dihydrolipoamide acetyltransferase component, [Talaromyces stipitatus ATCC 10500] gi|218716163|gb|EED15585.1| pyruvate dehydrogenase complex, ATCC
  misc_feature (1)..(455): SWISSPROT Homolog: EC 2.3.1.12 Dihydrolipoyllysine-residue acetyltransferase
  misc_feature: Useful for introducing or modulating the production of volatile compounds
MLGAVLRRQGMLRTAALRNMSARFYASFPPHTVIKMPALSPTMTAGNIGAWQKKAGDSIAPGDVLVEIETDKAQMDFEFQEEGVIAKVLKDAGEKDVPVGNPIAILVEEGADVSAFESFSLEDAGGDASKPAPKEEKKSDESSSDSAPAPSSAPETTEYASEGKLETALDREPNISPAAKRLAKENGVKISSLKGTGSGGKITEEDVKKASSGSSSGAVATAAAYEDTPLSNMRKTIAKRLQESVQTNPHFFVTSNISVSKLLKLRQALNSSADGKYKLSVNDFLIKAVAAASKKVPAVNAAWQGDAIRQYSNVDVSVAVATPTGLITPIVTNVGGRGLESISSAVKDLAKKARDNKLKPEEYQGGTISISNLGMNSAVDHFTAIINPPQAAILAVGTTKKVPVPVETEDGTSIDWEDQITVTASFDHRVVDGAVGGEWIKEFKKVLENPLELLL

SEQ ID NO: 2128 - DNA, 3282 bp, Muscodor strobelii
  misc_feature: SGI EST ID NO. CUFF.5372.0
  misc_feature: Variant of the nucleotide sequence at SEQ ID NO 2126
ttttgctcaacgcataatcgcgcctcgtagtaatatctcgactcccgacatcctctccctctcacctgtcacgaaccccgacgacgagtctctcccccgattgacacgcacggcttctccctcgagcagccagtagcccattgccgtcggctgtgtcctcaaatcctccaacaagaaaagagacccgcgtgtccttaatcgaggtcaggtagctctcgactccgggccctccttttcccccgatctcgtcgtcgccccgggcctctcttcgatcaccatctccatctccgaccgcataacccccaagtcgccatcatgctcggcgccgtactcagaaggcagggcatgctgcggaccgctgccctccgcaacatgtctgccagattctatgcctccttcccaccacacactgtcatcaagatgcccgctctatcgcccaccatgacggcgggtaacatcggtgcatggcagaagaaggctggtgatagcattgcccccggtgacgtccttgtcgagatcgagaccgacaaggcccagatggacttcgagttccaggaggagggtgtcatcgccaaggtcctcaaggacgctggcgagaaggacgtccccgtcggaaaccccattgccatcttagtcgaggagggtgccgatgtttccgctttcgagtctttcagcctcgaagacgccggtggtgacgcctctaagcctgcccccaaggaggagaagaagtcggacgagtcttccagcgactctgccccagctccatcgtccgccccagagaccaccgagtacgcctccgagggcaagcttgagaccgctctggaccgtgagcccaacatcagccctgccgccaagcgattggccaaggagaacggtgtcaagatctcgagcttgaagggtaccggctccggcggtaagatcaccgaggaggatgtcaagaaggcctcctctggatcctcttcgggcgctgtggccactgctgccgcctacgaggatacgcccctatccaacatgcgcaagaccatcgccaagcgtctccaagagtccgtccagactaacccccacttcttcgtcaccagcaacatctccgtgtccaagctcttgaagctgcgccaggccttgaacagctctgccgatggcaagtacaagctctccgtcaatgacttcctcatcaaggccgtcgctgctgctagcaagaaggtccccgctgtcaacgccgcatggcagggtgatgccatccgccagtacagcaacgtcgatgtttccgtcgccgttgccacccctactggtctgatcactcccatcgttaccaacgtcggtggccgtggtctcgaatccatctcttctgccgtcaaggacctcgctaagaaggcccgcgacaacaagcttaagcccgaggagtaccagggtggcactatctccatctccaacttgggcatgaactcagccgtcgaccacttcaccgccatcatcaaccctccacaagccgctatcctcgccgttggcacgacgaagaaggtccccgtccccgttgagactgaagacggcacttcgatcgattgggaggaccagataactgtcactgctagcttcgaccaccgtgtcgttgatggcgccgttggtggcgagtggatcaaggagttcaagaaggtcctcgagaaccctcttgagttgctactataagatatttgaaggcgagggttaacaaggggcgtctgggcatgacagttatatagaccaaggttggatccttttgtagcattatgccacgaattcctgtaataatacatttttctcaaactcgtatttaattcctttgcgcgaggatccaatggtccgacggcgcagaagaacgttatcgatggcttagctatatacctagaaataccacatatgtttgcgacaaagtcctagctacaattattttttgtcatctgctaagtcgtctgagtatgcatccaactcatcatctggctcatcgtcatcgtcttcatcgtcctcatcttgtttcgatcctgacttggcttgatccaagctacgatcatcagcatcgttatcctcagtcatcgaatccaattgactcctgagcgaagcgagaacagactctagacccgacttcaaatgcggactgcgcacttgttcgatctgcgtctccagctcccgtatcttagccctgagttctacttccctctcgctttctctctcaccactctcctcactcccctcacatatatcttgttcaacgaaaggactgcttagattctcctccccgaacgactttgcgaatgctaaggccattttaggatctttgatggcgaagattatttcttcgaagtaattctgccattcttctctatcaccgctgtttttcttggtctcctttttggtgtttcgggttgagaggccgagaacacggcgccaggcatgagcgatttcgccaacggggtttctatacgcgccgcatccccatgcgccgagcactattttttacacccctttgatgcgaagaggcgcatcacggcgcgcatctttcggtatactagctccctatctgccgaactcacataaacaccatcttccacctcggggaggcggagcatggctgcggatgcgatgtctacgtgccagcgctgggttttcggtaagacatcatcttcttctgcgccggtggcagtttgcgtgagtgaggatgcgtggcggaacactagcacgtcgggtgtgtacactatgcctagctctggaagcctgtagtatgagtcgtgaagggagggcaggagtgtggtccgcatgcagagggattcttcttgggatgttgcgccgttgaggaagccgccgcctggtgagaggggggaagccatgtttaggaggcctactttggtttttggggataggagagtgtgggcggctgttagagtatcgatggcaaggatttggatttttggtttgatgggttggaggataggtagagctttgagaggttcttggagtgagtgagtttcgtctgtgcttttgctccttttcctgcccttttttgctcgactcgttttgcgatcatctgtatcatcttgatcttgcttctttgccgcttcaccgaagaggcaagcttgacccagggtgaagggaggtggatctatgatcaactctgagcgctctatgcctctctttgcgcgtggatgtgcaatgagtagtgatgggatcactttgtttagtgtgttccgggctcgttttgctcgagcgtcacgacggaatgcttgtggtggtttgacgatagtctgttctgta

SEQ ID NO: 2129 - DNA, 5544 bp, Muscodor strobelii
  misc_feature: SGI cDNA ID NO. 560330
  misc_feature: Reduced expression when VOC is produced
  misc_feature: Encodes the peptide sequence at SEQ ID NO 2130
atgagctccctagtctttgtcgtctcctcgctcgagaccattgccgcctcccgagatgcgcagcggaataagcagctggccgagctggccgagaaggccctcgccgccatcaaggaagggggctcgcagcctcccagcccgcaggtcgtcttcgcgcccctgcagctcgccaccaagacgggcagccctcaattgatcaacacggcgctcgactcgatccagaagctcatctcctcggcctacctgtcctccgacgccaccaccggcgcaacccaagacgacggcaccgagaaggcccccatgctcgaccgcgccatcgacaccatctgcgactgcttccaaggcgagaccacccccgtcgacgtccagcgccacatcgtccaggccctgttggcggccgtcttgaacgataaggtcgtcgtccacggcgccggcttgctcaaggcggtccggcaagtgtataacgtatttttgctgtcgcgaagcaccgacaaccagcaggccgctcagggcaccctcgctcagatggtaggcatggtttttgagcgcgtcaagcttaggttacacatgaaggaagcccgcatcaacttgggcaagctgaagcatggctcgagcaacgctaccttcgaccaagctgactctgtgacaaacgagaacggggtgggcggcgaggaggatgactctccggaagatgtcaacgccgaggatgcatctgaagctgcgccctccgaaggtaccggtgaaggtcccaagttgactctcaaggatctcgagcacagaaagagcttcgacgactctaatttggcggatggcccgaccatggtgacccaagtaaaaccggctcggaagccagcgagaagcatatccgaacaaaccacccagagcgatgcgccacccaccgaagcagaagagaccgccgactccctagaggccgaggatgaagtgtatatcaaagacgcttacctcgtcttcaggtccttctgcaacctttccaccaagagcttagctaccgatcacttatacgaccaccgcggccagccaatgcggtccaagttgatatccctccatctaatccgcacactattgaacaaccacattgccgttttcacttctcctctatgtaccattaccaacaccaagaccaacgagcccacgacattcttgcaagctattaaatattatttgttattggccgttctaaagaacggtgccagttcagtagatagggtcttcgaggtctgctgtgagatcttctggctcatgctaaaattcatgcgcgctcctttcaagaaagaaatcgaagtctttctgaacgagatttaccttgcgcttctggcgaggcggaatgcacctccctcacaaaagatttactttctaaacgtactcactagattctgcggggatcctcgagggctggtggagatgtacctgaactacgactgtgattctcacgtagataacatcttccaaacgcttgttgaggatctttcaaggctcgcagtcactcctgtgctcgtcactgctgcccaagagcaacagttcgaggatcgaaattcatccaataatgcggaatggcaattgaagggcatgttgcctccgccacttaatgttcgagatatcatcccgcccacagagcccgaagcagatattcctaaagagtacgtgatcaagcgcgcagccttggactctttagttgaggctttgcggtctctcgtgaactggtcggtcgcaggacgcccaaccgccaatggaacagcgcgcggagacagcgagatccgagcatccgaagacgttcgcgagtcgattgacccctcaatagccgaaaccagtactcgcgatactcccatcatgccctcgacacctatcatcgaggatgatccagaccacttgggcaaagagaaggcaaggaaaactgctttgtctaatggcattcggcaattcaatttcaaacccaagcgaggtatcaaagtcttgatcgaaggcggatttatcccaagtgatgaccccctggatgtcgccaaattcttgctctcggatgaacgtcttgacaaggcccagatcggtgagtatctcggagagggcgagcagaagaatattgatgtgatgcatgctttcgttgagaccatggacttcacacggagacgtttcgttgacgctcttcgacaatttcttcaatctttccgtctacctggcgaggcgcaaaagatcgatcgcttcatgttgaaatttgctcagcaatatgtcgatggaaacccaaatgcttttgcaaacgcggacactgcgtatgttctcgcttattcggtcattctcttaaacacagatctacacagtagcaagatcgccagacacatgacgaaagacgattttcttaaaaacaaccgaggaatcaacgataatgccgatctacctgcagagtatcttctaggcatatatgatgagattgccggcaatgagatcgtgcttcaaagtgaacgtgatgccgcagcggcagcgggtacccaacctgcccaagcgaccgggtttgctgcaggcctgggacaagccctttccaacgtcggtagagatctacagcgagaagcctatgtgcagcaatcagaggaaatctcgctgaggtcggagcaacttttcaagaacctgttcaaaagtcaacgccggaacgcagcgaaagcaggcatcaaatatataccggcaacctctttcaagcacgttggctccatgtttgatgtgacatggatgtccttcttctctgctttctcaagtcaaatgcagagagctcagaaccttgaagtcagcaaactgtgtctggagggaatgggacaggcaaccaagattgcctgcttgtttgatcttgcaaccccacgcgaggcgttcatatccgccctgaaaaatgccacaaatctgaacagcccgcaagatattcttgcaaaaaatgtcgaagcactcaaagtgattttagatctgggtcagaccgagggcaactatctcaaagaatcgtggaaagatgtacttatgtgtatcagtcagctcgatcgactccaactcatctcagggggtgtcgacgaaggttctattcccgatgtctctaaagcacgttttatgccacccgagagaactagcaccaatgaccctcgaaagtcgatggcaacggcgcggcgccggaatcgttccaatgctagcataagaggattctcagctgctcttgagaacagatcagacgaattcgttaagagcgttgatcgtatcttcggcaacacggcgaacctcgatggaaaagctattgtccacttcgctcaagccctcacagaaattagctgggatgagatcaaggtatctggctcgaatgattcgccccgtacctacagtttgcaaaagattgttgaaatcagctattacaacatgacccgagtacgtttcgagtggaccaatatctgggtagtgctcggtgaacatttcaacaaaatcgggtgccacaacaacacagccattgtctatttcgctcttgattctctgcgacaactttccatgcgtttcctggaactcgaggagcttccaggattcaagttccaaaaggacttcttgaagcccttcgagcatgtgttatcgaattccacaaatgtgactgtcaaagacatggcattgagatgtctcattcagatgattcaagctcgtggagagaacatccgatctggttggcggaccatgtttggtgtctttacagtcgcagctcgtgatccaaacgaggtcatagttaatctggccttcgaaaacgtgacattggtgtacaagacacgttttggtgtcgtcatctcgcaaggcgcttttacagatttaattgtctgtctcacagagttctctaagaatatccggttccaaaagagaagtctacaggctatggaaaccctgaagtcgataattccccgcatgctgaagacccctgagtgtcctttatcaagcaagcacaccatggaaaagagcagttcgcgaccaaagggaacatcgctagaggaagggtactggttccccatattatttgcatttcatgatgttttgatgacaggtgaagatctcgaggtccggtcgaatgccctcaactacttcttcgaagcccttctgcggtatggaggagattttcctggggaattctgggatatcctatggagacagcagctctacccgatttttatggttctgcgatccagaccggaaatgaccaatgccctcaatcacgaggagctctcggtctggctttctaccaccatgatacaagcccttcgcaacatgatagtcttgttcacacactactttgacgcgcttgagtacatgttggatcgattcttagagttactggctctttgcatttgccaggagaacgataccatcgcacggataggtagcaattgcttgcaacaacttatcctccagaatgtgaccaaattctctgagcagcattgggccaagattgtgggttcattctgtgaattgttcgagagaactacagcgtatcagctcttctcagcggcaactatcaatgtaccagcatccctttcgtcaccagctcctaatggtcttggttttgacatcccacttacacccacagccgaggtcaccccagatgagaagtcgctgaaggtgaacggtctctcgaagaacactcacgattctgcgaatgaatcttcaccaggagctatctcacaagactctgcgccgaacgacgcaaaccatgctttgaacagcagcccagtgccttcaacgcctctagaagactataagcctacttcctcacttcagcaacagcctgttgtagtaacagctgctcgccggcgtttcttcaaccgcattatatcgcgttgcgtcttacagttattgatgatagaaacggtcaacgagctcttctcgaatgatgcagtgtatgctcaaatcccatcaacagagctcctgcgcctcatggctttgcttaagaaatccttcctttttgcccggcgtttcaacgaggataaggacctcaggatgcgactgtggcgagagggattcatgaaacagccacctaatctcttgaagcaggagagcggcgcggcggcaacttacatacaaatcctcttccgcatgtttggagatacttcaccatcaagggcggagagtagacctgaggtcgagaacgcgcttgtaccactttgcaaggacattattaagggctatcttgcgcttgaagaggagtcgcagcagaggaatattgcggcatggagacctgttgttgttgatgtgctggaggggtattcactatggcctgaagctgagttcgggaaacatgttagagcattttatccgcttgtcgttgaactactggggaaagaagtcagcacggatctacgcgctgcgctgttaggtgtgttgagacgagtgggtgaggttggcttggggatcgagagtatgagtctcaatgggaggagggagagtgtcgtcagtacggcgactgagacgcagggcgagttggatcagcatggacaggaagatggggagatgggtacgagggcgttgaatggttag

SEQ ID NO: 2130 - protein, 1847 aa, Muscodor strobelii
  misc_feature: SGI Peptide ID NO. 560330
  misc_feature (1175)..(1260): Pfam Id: PF09324 Pfam Desc: Domain of function (DUF1981)
  misc_feature (633)..(819): Pfam Id: PF01369 Pfam Desc: Sec7 domain
  misc_feature (1)..(1828): NCBI GI: 145602795 Blast Desc: MGG_14173 [Magnaporthe grisea 70-15] gi|145011185|gb|EDJ95841.1| MGG_14173 [Magnaporthe grisea 70-15]
  misc_feature (1)..(1837): NCBI GI: 171688114 Blast Desc: protein product [Podospora anserina] gi|170944019|emb|CAP70129.1| protein product [Podospora anserina]
  misc_feature (1)..(1833): NCBI GI: 256725618 Blast Desc: [Nectria haematococca mpVI 77-13-4]
  misc_feature (1)..(1824): NCBI GI: 46116652 Blast Desc: FG04168.1 [Gibberella zeae PH-1]
  misc_feature (1)..(1810): NCBI GI: 164424043 Blast Desc: NCU07658 [Neurospora crassa OR74A] gi|157070346|gb|EAA33549.2| NCU07658 [Neurospora crassa OR74A]
  misc_feature (1)..(1807): NCBI GI: 156031303 Blast Desc: SS1G_14073 [Sclerotinia sclerotiorum 1980] gi|154699475|gb|EDN99213.1| SS1G_14073 [Sclerotinia sclerotiorum 1980]
  misc_feature (373)..(1824): NCBI GI: 116197066 Blast Desc: CHGG_05131 [Chaetomium globosum CBS 148.51] gi|88181044|gb|EAQ88512.1| CHGG_05131 [Chaetomium globosum CBS 148.51]
  misc_feature (1)..(1807): NCBI GI: 239610411 Blast Desc: guanyl-nucleotide exchange factor [Ajellomyces dermatitidis ER-3]
  misc_feature (1)..(1807): NCBI GI: 261195644 Blast Desc: guanyl-nucleotide exchange factor [Ajellomyces dermatitidis SLH14081] gi|239588098|gb|EEQ70741.1| guanyl-nucleotide exchange factor [Ajellomyces dermatitidis
  misc_feature (1)..(1807): NCBI GI: 225563436 Blast Desc: protein transporter SEC7 [Ajellomyces capsulatus G186AR]
  misc_feature: Useful for introducing or modulating the production of volatile compounds
MSSLVFVVSSLETIAASRDAQRNKQLAELAEKALAAIKEGGSQPPSPQVVFAPLQLATKTGSPQLINTALDSIQKLISSAYLSSDATTGATQDDGTEKAPMLDRAIDTICDCFQGETTPVDVQRHIVQALLAAVLNDKVVVHGAGLLKAVRQVYNVFLLSRSTDNQQAAQGTLAQMVGMVFERVKLRLHMKEARINLGKLKHGSSNATFDQADSVTNENGVGGEEDDSPEDVNAEDASEAAPSEGTGEGPKLTLKDLEHRKSFDDSNLADGPTMVTQVKPARKPARSISEQTTQSDAPPTEAEETADSLEAEDEVYIKDAYLVFRSFCNLSTKSLATDHLYDHRGQPMRSKLISLHLIRTLLNNHIAVFTSPLCTITNTKTNEPTTFLQAIKYYLLLAVLKNGASSVDRVFEVCCEIFWLMLKFMRAPFKKEIEVFLNEIYLALLARRNAPPSQKIYFLNVLTRFCGDPRGLVEMYLNYDCDSHVDNIFQTLVEDLSRLAVTPVLVTAAQEQQFEDRNSSNNAEWQLKGMLPPPLNVRDIIPPTEPEADIPKEYVIKRAALDSLVEALRSLVNWSVAGRPTANGTARGDSEIRASEDVRESIDPSIAETSTRDTPIMPSTPIIEDDPDHLGKEKARKTALSNGIRQFNFKPKRGIKVLIEGGFIPSDDPLDVAKFLLSDERLDKAQIGEYLGEGEQKNIDVMHAFVETMDFTRRRFVDALRQFLQSFRLPGEAQKIDRFMLKFAQQYVDGNPNAFANADTAYVLAYSVILLNTDLHSSKIARHMTKDDFLKNNRGINDNADLPAEYLLGIYDEIAGNEIVLQSERDAAAAAGTQPAQATGFAAGLGQALSNVGRDLQREAYVQQSEEISLRSEQLFKNLFKSQRRNAAKAGIKYIPATSFKHVGSMFDVTWMSFFSAFSSQMQRAQNLEVSKLCLEGMGQATKIACLFDLATPREAFISALKNATNLNSPQDILAKNVEALKVILDLGQTEGNYLKESWKDVLMCISQLDRLQLISGGVDEGSIPDVSKARFMPPERTSTNDPRKSMATARRRNRSNASIRGFSAALENRSDEFVKSVDRIFGNTANLDGKAIVHFAQALTEISWDEIKVSGSNDSPRTYSLQKIVEISYYNMTRVRFEWTNIWVVLGEHFNKIGCHNNTAIVYFALDSLRQLSMRFLELEELPGFKFQKDFLKPFEHVLSNSTNVTVKDMALRCLIQMIQARGENIRSGWRTMFGVFTVAARDPNEVIVNLAFENVTLVYKTRFGVVISQGAFTDLIVCLTEFSKNIRFQKRSLQAMETLKSIIPRMLKTPECPLSSKHTMEKSSSRPKGTSLEEGYWFPILFAFHDVLMTGEDLEVRSNALNYFFEALLRYGGDFPGEFWDILWRQQLYPIFMVLRSRPEMTNALNHEELSVWLSTTMIQALRNMIVLFTHYFDALEYMLDRFLELLALCICQENDTIARIGSNCLQQLILQNVTKFSEQHWAKIVGSFCELFERTTAYQLFSAATINVPASLSSPAPNGLGFDIPLTPTAEVTPDEKSLKVNGLSKNTHDSANESSPGAISQDSAPNDANHALNSSPVPSTPLEDYKPTSSLQQQPVVVTAARRRFFNRIISRCVLQLLMIETVNELFSNDAVYAQIPSTELLRLMALLKKSFLFARRFNEDKDLRMRLWREGFMKQPPNLLKQESGAAATYIQILFRMFGDTSPSRAESRPEVENALVPLCKDIIKGYLALEEESQQRNIAAWRPVVVDVLEGYSLWPEAEFGKHVRAFYPLVVELLGKEVSTDLRAALLGVLRRVGEVGLGIESMSLNGRRESVVSTATETQGELDQHGQEDGEMGTRALNG

SEQ ID NO: 2131 - DNA, 6019 bp, Muscodor strobelii
  misc_feature: SGI EST ID NO. CUFF.5380.0
  misc_feature: Variant of the nucleotide sequence at SEQ ID NO 2129
ccaaaaaccaacaggggataataaaaaaagagaggaagccatcacgacaatacgatccccccttggtcaaacactccatagacgagtattgaccactaatttcttctcccatccggtgccgaattctcttgctattccgatttccgtcatcaatcgcaacgtctgcgtacgagcacatagtaccgtcatccggatgcgcatgctatagctgttcctccctcgccggccgcaaaagctatcgactcccgcgacctcgaccagctcgactcggtcgcgtatggcacatacatatccccgcccgccatgagctccctagtctttgtcgtctcctcgctcgagaccattgccgcctcccgagatgcgcagcggaataagcagctggccgagctggccgagaaggccctcgccgccatcaaggaagggggctcgcagcctcccagcccgcaggtcgtcttcgcgcccctgcagctcgccaccaagacgggcagccctcaattgatcaacacggcgctcgactcgatccagaagctcatctcctcggcctacctgtcctccgacgccaccaccggcgcaacccaagacgacggcaccgagaaggcccccatgctcgaccgcgccatcgacaccatctgcgactgcttccaaggcgagaccacccccgtcgacgtccagcgccacatcgtccaggccctgttggcggccgtcttgaacgataaggtcgtcgtccacggcgccggcttgctcaaggcggtccggcaagtgtataacgtatttttgctgtcgcgaagcaccgacaaccagcaggccgctcagggcaccctcgctcagatggtaggcatggtttttgagcgcgtcaagcttaggttacacatgaaggaagcccgcatcaacttgggcaagctgaagcatggctcgagcaacgctaccttcgaccaagctgactctgtgacaaacgagaacggggtgggcggcgaggaggatgactctccggaagatgtcaacgccgaggatgcatctgaagctgcgccctccgaaggtaccggtgaaggtcccaagttgactctcaaggatctcgagcacagaaagagcttcgacgactctaatttggcggatggcccgaccatggtgacccaagtaaaaccggctcggaagccagcgagaagcatatccgaacaaaccacccagagcgatgcgccacccaccgaagcagaagagaccgccgactccctagaggccgaggatgaagtgtatatcaaagacgcttacctcgtcttcaggtccttctgcaacctttccaccaagagcttagctaccgatcacttatacgaccaccgcggccagccaatgcggtccaagttgatatccctccatctaatccgcacactattgaacaaccacattgccgttttcacttctcctctatgtaccattaccaacaccaagaccaacgagcccacgacattcttgcaagctattaaatattatttgttattggccgttctaaagaacggtgccagttcagtagatagggtcttcgaggtctgctgtgagatcttctggctcatgctaaaattcatgcgcgctcctttcaagaaagaaatcgaagtctttctgaacgagatttaccttgcgcttctggcgaggcggaatgcacctccctcacaaaagatttactttctaaacgtactcactagattctgcggggatcctcgagggctggtggagatgtacctgaactacgactgtgattctcacgtagataacatcttccaaacgcttgttgaggatctttcaaggctcgcagtcactcctgtgctcgtcactgctgcccaagagcaacagttcgaggatcgaaattcatccaataatgcggaatggcaattgaagggcatgttgcctccgccacttaatgttcgagatatcatcccgcccacagagcccgaagcagatattcctaaagagtacgtgatcaagcgcgcagccttggactctttagttgaggctttgcggtctctcgtgaactggtcggtcgcaggacgcccaaccgccaatggaacagcgcgcggagacagcgagatccgagcatccgaagacgttcgcgagtcgattgacccctcaatagccgaaaccagtactcgcgatactcccatcatgccctcgacacctatcatcgaggatgatccagaccacttgggcaaagagaaggcaaggaaaactgctttgtctaatggcattcggcaattcaatttcaaacccaagcgaggtatcaaagtcttgatcgaaggcggatttatcccaagtgatgaccccctggatgtcgccaaattcttgctctcggatgaacgtcttgacaaggcccagatcggtgagtatctcggagagggcgagcagaagaatattgatgtgatgcatgctttcgttgagaccatggacttcacacggagacgtttcgttgacgctcttcgacaatttcttcaatctttccgtctacctggcgaggcgcaaaagatcgatcgcttcatgttgaaatttgctcagcaatatgtcgatggaaacccaaatgcttttgcaaacgcggacactgcgtatgttctcgcttattcggtcattctcttaaacacagatctacacagtagcaagatcgccagacacatgacgaaagacgattttcttaaaaacaaccgaggaatcaacgataatgccgatctacctgcagagtatcttctaggcatatatgatgagattgccggcaatgagatcgtgcttcaaagtgaacgtgatgccgcagcggcagcgggtacccaacctgcccaagcgaccgggtttgctgcaggcctgggacaagccctttccaacgtcggtagagatctacagcgagaagcctatgtgcagcaatcagaggaaatctcgctgaggtcggagcaacttttcaagaacctgttcaaaagtcaacgccggaacgcagcgaaagcaggcatcaaatatataccggcaacctctttcaagcacgttggctccatgtttgatgtgacatggatgtccttcttctctgctttctcaagtcaaatgcagagagctcagaaccttgaagtcagcaaactgtgtctggagggaatgggacaggcaaccaagattgcctgcttgtttgatcttgcaaccccacgcgaggcgttcatatccgccctgaaaaatgccacaaatctgaacagcccgcaagatattcttgcaaaaaatgtcgaagcactcaaagtgattttagatctgggtcagaccgagggcaactatctcaaagaatcgtggaaagatgtacttatgtgtatcagtcagctcgatcgactccaactcatctcagggggtgtcgacgaaggttctattcccgatgtctctaaagcacgttttatgccacccgagagaactagcaccaatgaccctcgaaagtcgatggcaacggcgcggcgccggaatcgttccaatgctagcataagaggattctcagctgctcttgagaacagatcagacgaattcgttaagagcgttgatcgtatcttcggcaacacggcgaacctcgatggaaaagctattgtccacttcgctcaagccctcacagaaattagctgggatgagatcaaggtatctggctcgaatgattcgccccgtacctacagtttgcaaaagattgttgaaatcagctattacaacatgacccgagtacgtttcgagtggaccaatatctgggtagtgctcggtgaacatttcaacaaaatcgggtgccacaacaacacagccattgtctatttcgctcttgattctctgcgacaactttccatgcgtttcctggaactcgaggagcttccaggattcaagttccaaaaggacttcttgaagcccttcgagcatgtgttatcgaattccacaaatgtgactgtcaaagacatggcattgagatgtctcattcagatgattcaagctcgtggagagaacatccgatctggttggcggaccatgtttggtgtctttacagtcgcagctcgtgatccaaacgaggtcatagttaatctggccttcgaaaacgtgacattggtgtacaagacacgttttggtgtcgtcatctcgcaaggcgcttttacagatttaattgtctgtctcacagagttctctaagaatatccggttccaaaagagaagtctacaggctatggaaaccctgaagtcgataattccccgcatgctgaagacccctgagtgtcctttatcaagcaagcacaccatggaaaagagcagttcgcgaccaaagggaacatcgctagaggaagggtactggttccccatattatttgcatttcatgatgttttgatgacaggtgaagatctcgaggtccggtcgaatgccctcaactacttcttcgaagcccttctgcggtatggaggagattttcctggggaattctgggatatcctatggagacagcagctctacccgatttttatggttctgcgatccagaccggaaatgaccaatgccctcaatcacgaggagctctcggtctggctttctaccaccatgatacaagcccttcgcaacatgatagtcttgttcacacactactttgacgcgcttgagtacatgttggatcgattcttagagttactggctctttgcatttgccaggagaacgataccatcgcacggataggtagcaattgcttgcaacaacttatcctccagaatgtgaccaaattctctgagcagcattgggccaagattgtgggttcattctgtgaattgttcgagagaactacagcgtatcagctcttctcagcggcaactatcaatgtaccagcatccctttcgtcaccagctcctaatggtcttggttttgacatcccacttacacccacagccgaggtcaccccagatgagaagtcgctgaaggtgaacggtctctcgaagaacactcacgattctgcgaatgaatcttcaccaggagctatctcacaagactctgcgccgaacgacgcaaaccatgctttgaacagcagcccagtgccttcaacgcctctagaagactataagcctacttcctcacttcagcaacagcctgttgtagtaacagctgctcgccggcgtttcttcaaccgcattatatcgcgttgcgtcttacagttattgatgatagaaacggtcaacgagctcttctcgaatgatgcagtgtatgctcaaatcccatcaacagagctcctgcgcctcatggctttgcttaagaaatccttcctttttgcccggcgtttcaacgaggataaggacctcaggatgcgactgtggcgagagggattcatgaaacagccacctaatctcttgaagcaggagagcggcgcggcggcaacttacatacaaatcctcttccgcatgtttggagatacttcaccatcaagggcggagagtagacctgaggtcgagaacgcgcttgtaccactttgcaaggacattattaagggctatcttgcgcttgaagaggagtcgcagcagaggaatattgcggcatggagacctgttgttgttgatgtgctggaggggtattcactatggcctgaagctgagttcgggaaacatgttagagcattttatccgcttgtcgttgaactactggggaaagaagtcagcacggatctacgcgctgcgctgttaggtgtgttgagacgagtgggtgaggttggcttggggatcgagagtatgagtctcaatgggaggagggagagtgtcgtcagtacggcgactgagacgcagggcgagttggatcagcatggacaggaagatggggagatgggtacgagggcgttgaatggttaggcgagatcctattgttttagactaggcgacattgctggtgtagtgaactttcacggaaaatggtgttacattagatgaaaggctgtaaaattaggtcttttggtgttcgtgtcttggcttggcgcgaggaccatcgatgtagaatttgcttttgatatattgtgcatgaaca

SEQ ID NO: 2132 - DNA, 1596 bp, Muscodor strobelii
  misc_feature: SGI cDNA ID NO. 560331
  misc_feature: Encodes the peptide sequence at SEQ ID NO 2133
atggtcggggtgccgaaaagcaagcgctgtacgttttgtaaggcacggaagaccaagtgcgatgagaaatggccaacctgcggcacatgttctcgagcgggcaaagtctgctcaggcgccagaacaactttcaaattcgtggtgaatggaagccataacgaagcacaagcttacgcagacttcgcaaatgaagaagtgacttcgccaacaccgcggagagagaggcgggcattagaagcgcggcatcgagaaaatcaccaaatattgacattaatcgatctcaagcaggaatcaatcaatggagatattacgaaacagcagcgttggcgaccttggcgagtcccgcccgagcaccctccgccattacaggcgacggacaaagtcatcacgcagttcgtttactgtctcgaagctgctcctgggacgggcaacgatttacgcatcataggcgcctttctcgaactcatcccacagcaactgagccatagtggcagcaattcggtgcttgggcacgcggttgagctcttgattggtgcatggacgaatagtcagagaggtctggagccatcttcatggttagatctcaggatgtataacaaggctcttcgaagtcttaagaatgcacttgacgatgctcgtgtggaggaggacactcttgcggcgcagtgtatgcttcagaagactgaggtgctgtacgacttttcaaggggttccaatcaggagaaccacgcggccgggcttatcgcagtcatcagcaaggccgggccgaatcaacacatgtcggatgtagaactgcatgttatgttcgagggcctttttcacatgctacaagaagatatccgccaggatcgatcaagcgcattccatacgccagaatggatgtccgcacttagacgagtgctcaacagcaacgcgtccatcaacgacatccttaaacagacgtacgatatatggattgaggtaacagcatggcctggtcttgtctgtatggtacggaagttgcaaaagaacccatcagataagaccactgcaacaaccttgcgtcgcagagcgggtgctttagcggaatacctacagcgcaaagacgacaccacattaagatctctgttcaagtctggcgctatcacagaagttgacaatagctctggctcaccgctaatccctacacgctacgaattcgccgactacgtgacgtctaagatgttctgcttacacgccatgtttggtgttgttgcttgtcgattcctacaagaagccgatcgagccctaggacgcgacgatccatccttagaagaaaaggccaaggaactcagcagaagaatatggaaagcgcatccttggctgaagagcaaaatgccgctagcggtcgactttacggccgcacttgtctttgcctacgagtctggggatcaagaagagcgcgcgttctgcatcagaagtctcagtgaaatggagtctttccgacaaccgccacctattgggcaatgggttgaacagacgattatggcaaatgcaaaagcttattctggacgccttccatttttgaaaacacaagatccgaaagtcgagtatgacggattgggatgtcggagctag

SEQ ID NO: 2133 - protein, 531 aa, Muscodor strobelii
  misc_feature: SGI Peptide ID NO. 560331
  misc_feature (1)..(280): NCBI GI: 212529186 Blast Desc: cysteine-binding protein FliY, [Penicillium marneffei ATCC 18224] gi|210074148|gb|EEA28235.1| cysteine-binding protein FliY, [Penicillium marneffei ATCC 18224]
  misc_feature (1)..(304): NCBI GI: 212534114 Blast Desc: conserved [Penicillium marneffei ATCC 18224] gi|210069612|gb|EEA23702.1| conserved [Penicillium marneffei ATCC 18224]
  misc_feature (1)..(338): NCBI GI: 119491369 Blast Desc: C6 zinc finger domain protein [Neosartorya fischeri NRRL 181] gi|119411399|gb|EAW21342.1| C6 zinc finger domain protein [Neosartorya fischeri NRRL 181]
  misc_feature (1)..(295): NCBI GI: 116182346 Blast Desc: [Chaetomium globosum CBS 148.51] gi|88186098|gb|EAQ93566.1| [Chaetomium globosum CBS 148.51]
  misc_feature (10)..(119): NCBI GI: 145254182 Blast Desc: An18g00860 [Aspergillus niger] gi|134084130|emb|CAK43158.1| protein product [Aspergillus niger]
  misc_feature (1)..(274): NCBI GI: 242789355 Blast Desc: conserved [Talaromyces stipitatus ATCC 10500] gi|218717931|gb|EED17351.1| conserved [Talaromyces stipitatus ATCC 10500]
  misc_feature (1)..(273): NCBI GI: 169768354 Blast Desc: [Aspergillus oryzae RIB40] gi|83766505|dbj|BAE56645.1| protein product [Aspergillus oryzae]
  misc_feature (1)..(273): NCBI GI: 238497642 Blast Desc: conserved [Aspergillus flavus NRRL3357] gi|220693330|gb|EED49675.1| conserved [Aspergillus flavus NRRL3357]
  misc_feature (1)..(46): NCBI GI: 159128990 Blast Desc: conserved [Aspergillus fumigatus A1163]
  misc_feature (1)..(50): NCBI GI: 255932643 Blast Desc: Pc12g10570 [Penicillium chrysogenum Wisconsin 54-1255] gi|211582497|emb|CAP80684.1| Pc12g10570 [Penicillium chrysogenum Wisconsin 54-1255]
MVGVPKSKRCTFCKARKTKCDEKWPTCGTCSRAGKVCSGARTTFKFVVNGSHNEAQAYADFANEEVTSPTPRRERRALEARHRENHQILTLIDLKQESINGDITKQQRWRPWRVPPEHPPPLQATDKVITQFVYCLEAAPGTGNDLRIIGAFLELIPQQLSHSGSNSVLGHAVELLIGAWTNSQRGLEPSSWLDLRMYNKALRSLKNALDDARVEEDTLAAQCMLQKTEVLYDFSRGSNQENHAAGLIAVISKAGPNQHMSDVELHVMFEGLFHMLQEDIRQDRSSAFHTPEWMSALRRVLNSNASINDILKQTYDIWIEVTAWPGLVCMVRKLQKNPSDKTTATTLRRRAGALAEYLQRKDDTTLRSLFKSGAITEVDNSSGSPLIPTRYEFADYVTSKMFCLHAMFGVVACRFLQEADRALGRDDPSLEEKAKELSRRIWKAHPWLKSKMPLAVDFTAALVFAYESGDQEERAFCIRSLSEMESFRQPPPIGQWVEQTIMANAKAYSGRLPFLKTQDPKVEYDGLGCRS

SEQ ID NO: 2134 - DNA, 3955 bp, Muscodor strobelii
  misc_feature: SGI EST ID NO. CUFF.5491.0
  misc_feature: Variant of the nucleotide sequence at SEQ ID NO 2132
caataaggtaaccaccgttaggtcggagggtcgggcatttttgggattgggccagctaagaaccacacccagaccgtcggtctctgtctcgctgcaccagcctgcattgccatatagtcatagcagtatactcggtttagataagatgcgcatggcatccaatatgcccgctgcacgcgcttgttgtttgaccaaaagaaaagcaaccaatataggattcaacccaacgtccaacgccgttttaaccagtactgttacaacggatacggcagccagccacagtaactagacagggacataccctattggaccacccgcatactacctggagatggtcggggtgccgaaaagcaagcgctgtacgttttgtaaggcacggaagaccaagtgcgatgagaaatggccaacctgcggcacatgttctcgagcgggcaaagtctgctcaggcgccagaacaactttcaaattcgtggtgaatggaagccataacgaagcacaagcttacgcagacttcgcaaatgaagaagtgacttcgccaacaccgcggagagagaggcgggcattagaagcgcggcatcgagaaaatcaccaaatattgacattaatcgatctcaagcaggaatcaatcaatggagatattacgaaacagcagcgttggcgaccttggcgagtcccgcccgagcaccctccgccattacaggcgacggacaaagtcatcacgcagttcgtttactgtctcgaagctgctcctgggacgggcaacgatttacgcatcataggcgcctttctcgaactcatcccacagcaactgagccatagtggcagcaattcggtgcttgggcacgcggttgagctcttgattggtgcatggacgaatagtcagagaggtctggagccatcttcatggttagatctcaggatgtataacaaggctcttcgaagtcttaagaatgcacttgacgatgctcgtgtggaggaggacactcttgcggcgcagtgtatgcttcagaagactgaggtgctgtacgacttttcaaggggttccaatcaggagaaccacgcggccgggcttatcgcagtcatcagcaaggccgggccgaatcaacacatgtcggatgtagaactgcatgttatgttcgagggcctttttcacatgctacaagaagatatccgccaggatcgatcaagcgcattccatacgccagaatggatgtccgcacttagacgagtgctcaacagcaacgcgtccatcaacgacatccttaaacagacgtacgatatatggattgaggtaacagcatggcctggtcttgtctgtatggtacggaagttgcaaaagaacccatcagataagaccactgcaacaaccttgcgtcgcagagcgggtgctttagcggaatacctacagcgcaaagacgacaccacattaagatctctgttcaagtctggcgctatcacagaagttgacaatagctctggctcaccgctaatccctacacgctacgaattcgccgactacgtgacgtctaagatgttctgcttacacgccatgtttggtgttgttgcttgtcgattcctacaagaagccgatcgagccctaggacgcgacgatccatccttagaagaaaaggccaaggaactcagcagaagaatatggaaagcgcatccttggctgaagagcaaaatgccgctagcggtcgactttacggccgcacttgtctttgcctacgagtctggggatcaagaagagcgcgcgttctgcatcagaagtctcagtgaaatggagtctttccgacaaccgccacctattgggcaatgggttgaacagacgattatggcaaatgcaaaagcttattctggacgccttccatttttgaaaacacaagatccgaaagtcgagtatgacggattgggatgtcggagctagtcattaagcacggtcgggatggaaccgccttcgcagcttcatccgatagatctccgaccacgctataacatcgacattgtaccttatatcggaaagaatcaccagcaaaatcactccacagcggggtcttgcaaccatatcagtgctgaacaaacaatgagagtgatgaactcatgagagtatcagatgaacatgttgtcgatgtatgacacgtgctatcccttagtctcttagacgatacacatcgtacacacacgtctcgaagaagatggacccatggagacacgtgggataccatcttgacctgcactggagctcgatctaaagcagagctagccatgaagcatgtctacctcttatgcttaatgtggaaatttagatctattcacagagcgacaagccccgcgcgcagatgacgacagacctttcaccggcttcttcagtccttagtgacttcgtggataaattgtctcagctcgtcagcttcctctgggatcgtgcgttcgggaaggcttagtctgagcattaggagcatgtcagcatttcgtgtattcgtctataggatgtatggcgccgtatatcagggatatagaattgtacatactagaaagtgtcagcttatcaataagagatcaaggacttttccttggagcgattatacaagagaaacataaggaattacgacttaccatgttctttctcaaaatgtcgtcggattcggttgcatctcggtagagcttccgaagagtgtccatcttgtatgtcgagaagggtgtaatgcgttgaatactcaacaacgtctcgaagaaatcaaccaagctcatatgcataaggagatcctctttattaatcactctcagagccgcaaactgcaatagtccgtaatcacctccaacatgcccgtatcgttcgttcagctccggaaaatctgttcttgttacctcgccaaggtttaaggcagcaagacgagggaggagccgtagtaaacggccatgggacagtgttacttgctgagccgtttgtccatcttcatcgttctgatgcgggcctgaggtgcagagtgagaggatcaggccatagttatcgcgatcatggaatagcctccgccacatgaacccttgccctggtggccttcgaactgcaatttcgactccgctcactgccaggccttgcggaggtcgggtatcacaatcgacatcgagtagatcaccaagaactctcgaggccttctctcccacctcaacctgcggggcatttaaccaccgtgttagaaaactactgatgacgttcttaagcgcagcaagtatggcagtatcgcctggtgactttgtggccttctcgagaatagtgatggctaagatgttggcagatggcgccggagaagcaagagcctgtattaaagcctcttctgatgccaaggacagaacttgtgtaaagttgagagggctcaagagcttgatggccaagctacagagcacggctggatcttgttgatactgctttagtatgtccgtaatcttagggagaagccgtgggatgagaggtgggatattggcatctatgatcgttagctatatacgtaagaatattgtgacgtgaactctcacatgcctgttaactggagctcaacatcgtcgaatagcttgttgttgagtggtagagtcgagtccgcaaggatgtcgtcaagatgcttttccagctcctcaacacccgtcacagggatggaatctgccatgtcgactgcgatgcgattcatgaggagtgaagaggcaacgaggttcgagccttgatgatgccggagaaaaggcaagtggtaggcagcacgatgtacgtaaactaggagtgaggtacctctcctaatggttgcaagcaaggtggacagttgagatgagactgagactctcatgcaagattttgtccacctgcgtcttttcgaggttcaaatttgacagttgctatattatcaatatgtctaaagattgtcggtattatgaagaacactgaagtcatctaggctcaacgttctca

SEQ ID NO: 2135 - DNA, 1053 bp, Muscodor strobelii
  misc_feature: SGI cDNA ID NO. 560332
  misc_feature: Encodes the peptide sequence at SEQ ID NO 2136
atgaatcgcatcgcagtcgacatggcagattccatccctgtgacgggtgttgaggagctggaaaagcatcttgacgacatccttgcggactcgactctaccactcaacaacaagctattcgacgatgttgagctccagttaacagatgccaatatcccacctctcatcccacggcttctccctaagattacggacatactaaagcagtatcaacaagatccagccgtgctctgtagcttggccatcaagctcttgagccctctcaactttacacaagttctgtccttggcatcagaagaggctttaatacaggctcttgcttctccggcgccatctgccaacatcttagccatcactattctcgagaaggccacaaagtcaccaggcgatactgccatacttgctgcgcttaagaacgtcatcagtagttttctaacacggtggttaaatgccccgcaggttgaggtgggagagaaggcctcgagagttcttggtgatctactcgatgtcgattgtgatacccgacctccgcaaggcctggcagtgagcggagtcgaaattgcagttcgaaggccaccagggcaagggttcatgtggcggaggctattccatgatcgcgataactatggcctgatcctctcactctgcacctcaggcccgcatcagaacgatgaagatggacaaacggctcagcaagtaacactgtcccatggccgtttactacggctcctccctcgtcttgctgccttaaaccttggcgaggtaacaagaacagattttccggagctgaacgaacgatacgggcatgttggaggtgattacggactattgcagtttgcggctctgagagtgattaataaagaggatctccttatgcatatgagcttggttgatttcttcgagacgttgttgagtattcaacgcattacacccttctcgacatacaagatggacactcttcggaagctctaccgagatgcaaccgaatccgacgacattttgagaaagaacatgactaagccttcccgaacgcacgatcccagaggaagctga

SEQ ID NO: 2136 - protein, 350 aa, Muscodor strobelii
  misc_feature: SGI Peptide ID NO. 560332
  misc_feature (10)..(344): NCBI GI: 171688116 Blast Desc: protein product [Podospora anserina] gi|170944020|emb|CAP70130.1| protein product [Podospora anserina]
  misc_feature (10)..(346): NCBI GI: 39971351 Blast Desc: MGG_10696 [Magnaporthe grisea 70-15] gi|145009415|gb|EDJ94115.1| MGG_10696 [Magnaporthe grisea 70-15]
  misc_feature (10)..(338): NCBI GI: 156035903 Blast Desc: SS1G_13156 [Sclerotinia sclerotiorum 1980] gi|154698560|gb|EDN98298.1| SS1G_13156 [Sclerotinia sclerotiorum 1980]
  misc_feature (9)..(338): NCBI GI: 154312647 Blast Desc: BC1G_05926 [Botryotinia fuckeliana B05.10] gi|150850027|gb|EDN25220.1| BC1G_05926 [Botryotinia fuckeliana B05.10]
  misc_feature (11)..(344): NCBI GI: 256726024 Blast Desc: NECHADRAFT_70112 [Nectria haematococca mpVI 77-13-4]
  misc_feature (8)..(346): NCBI GI: 85109162 Blast Desc: NCU07657 [Neurospora crassa OR74A] gi|28924417|gb|EAA33548.1| [Neurospora crassa OR74A]
  misc_feature (2)..(344): NCBI GI: 46116650 Blast Desc: FG04167.1 [Gibberella zeae PH-1]
  misc_feature (11)..(344): NCBI GI: 261359960 Blast Desc: conserved [Verticillium albo-atrum VaMs.102]
  misc_feature (10)..(260): NCBI GI: 116197064 Blast Desc: CHGG_05130 [Chaetomium globosum CBS 148.51] gi|88181043|gb|EAQ88511.1| CHGG_05130 [Chaetomium globosum CBS 148.51]
  misc_feature (20)..(318): NCBI GI: 242818357 Blast Desc: conserved [Talaromyces stipitatus ATCC 10500] gi|218713566|gb|EED12990.1| conserved [Talaromyces stipitatus ATCC 10500]
MNRIAVDMADSIPVTGVEELEKHLDDILADSTLPLNNKLFDDVELQLTDANIPPLIPRLLPKITDILKQYQQDPAVLCSLAIKLLSPLNFTQVLSLASEEALIQALASPAPSANILAITILEKATKSPGDTAILAALKNVISSFLTRWLNAPQVEVGEKASRVLGDLLDVDCDTRPPQGLAVSGVEIAVRRPPGQGFMWRRLFHDRDNYGLILSLCTSGPHQNDEDGQTAQQVTLSHGRLLRLLPRLAALNLGEVTRTDFPELNERYGHVGGDYGLLQFAALRVINKEDLLMHMSLVDFFETLLSIQRITPFSTYKMDTLRKLYRDATESDDILRKNMTKPSRTHDPRGS

SEQ ID NO: 2137 - DNA, 3646 bp, Muscodor strobelii
  misc_feature: SGI EST ID NO. CUFF.5492.1
  misc_feature: Variant of the nucleotide sequence at SEQ ID NO 2135
agaacgttgagcctagatgacttcagtgttcttcataataccgacaatctttagacatattgataatatagcaactgtcaaatttgaacctcgaaaagacgcaggtggacaaaatcttgcatgagagtctcagtctcatctcaactgtccaccttgcttgcaaccattaggagaggtacctcactcctagtttacgtacatcgtgctgcctaccacttgccttttctccggcatcatcaaggctcgaacctcgttgcctcttcactcctcatgaatcgcatcgcagtcgacatggcagattccatccctgtgacgggtgttgaggagctggaaaagcatcttgacgacatccttgcggactcgactctaccactcaacaacaagctattcgacgatgttgagctccagttaacagatgccaatatcccacctctcatcccacggcttctccctaagattacggacatactaaagcagtatcaacaagatccagccgtgctctgtagcttggccatcaagctcttgagccctctcaactttacacaagttctgtccttggcatcagaagaggctttaatacaggctcttgcttctccggcgccatctgccaacatcttagccatcactattctcgagaaggccacaaagtcaccaggcgatactgccatacttgctgcgcttaagaacgtcatcagtagttttctaacacggtggttaaatgccccgcaggttgaggtgggagagaaggcctcgagagttcttggtgatctactcgatgtcgattgtgatacccgacctccgcaaggcctggcagtgagcggagtcgaaattgcagttcgaaggccaccagggcaagggttcatgtggcggaggctattccatgatcgcgataactatggcctgatcctctcactctgcacctcaggcccgcatcagaacgatgaagatggacaaacggctcagcaagtaacactgtcccatggccgtttactacggctcctccctcgtcttgctgccttaaaccttggcgaggtaacaagaacagattttccggagctgaacgaacgatacgggcatgttggaggtgattacggactattgcagtttgcggctctgagagtgattaataaagaggatctccttatgcatatgagcttggttgatttcttcgagacgttgttgagtattcaacgcattacacccttctcgacatacaagatggacactcttcggaagctctaccgagatgcaaccgaatccgacgacattttgagaaagaacatggtaagtcgtaattccttatgtttctcttgtataatcgctccaaggaaaagtccttgatctcttattgataagctgacactttctagtatgtacaattctatatccctgatatacggcgccatacatcctatagacgaatacacgaaatgctgacatgctcctaatgctcagactaagccttcccgaacgcacgatcccagaggaagctgacgagctgagacaatttatccacgaagtcactaaggactgaagaagccggtgaaaggtctgtcgtcatctgcgcgcggggcttgtcgctctgtgaatagatctaaatttccacattaagcataagaggtagacatgcttcatggctagctctgctttagatcgagctccagtgcaggtcaagatggtatcccacgtgtctccatgggtccatcttcttcgagacgtgtgtgtacgatgtgtatcgtctaagagactaagggatagcacgtgtcatacatcgacaacatgttcatctgatactctcatgagttcatcactctcattgtttgttcagcactgatatggttgcaagaccccgctgtggagtgattttgctggtgattctttccgatataaggtacaatgtcgatgttatagcgtggtcggagatctatcggatgaagctgcgaaggcggttccatcccgaccgtgcttaatgactagctccgacatcccaatccgtcatactcgactttcggatcttgtgttttcaaaaatggaaggcgtccagaataagcttttgcatttgccataatcgtctgttcaacccattgcccaataggtggcggttgtcggaaagactccatttcactgagacttctgatgcagaacgcgcgctcttcttgatccccagactcgtaggcaaagacaagtgcggccgtaaagtcgaccgctagcggcattttgctcttcagccaaggatgcgctttccatattcttctgctgagttccttggccttttcttctaaggatggatcgtcgcgtcctagggctcgatcggcttcttgtaggaatcgacaagcaacaacaccaaacatggcgtgtaagcagaacatcttagacgtcacgtagtcggcgaattcgtagcgtgtagggattagcggtgagccagagctattgtcaacttctgtgatagcgccagacttgaacagagatcttaatgtggtgtcgtctttgcgctgtaggtattccgctaaagcacccgctctgcgacgcaaggttgttgcagtggtcttatctgatgggttcttttgcaacttccgtaccatacagacaagaccaggccatgctgttacctcaatccatatatcgtacgtctgtttaaggatgtcgttgatggacgcgttgctgttgagcactcgtctaagtgcggacatccattctggcgtatggaatgcgcttgatcgatcctggcggatatcttcttgtagctaagacgattattagctacactaaatcgtgggataagccatgattgatgtgggccatgtatgaggttcgtaccatgtgaaaaaggccctcgaacataacatgcagttctacatccgacatgtgttgattcggcccggccttgctgatgactgcgataagcccggccgcgtggttctcctgattggaaccccttgaaaagtcgtacagcacctgtcacacggaaattagcataaacttgacaatcccgatgaaagggggccggctgacctcagtcttctgaagcatacactgcgccgcaagagtgtcctcctccacacgagcatcgtcaagtgcattcttaagacttcgaagagccttgttatacatcctgagatctaaccatgaagatggctccagacctctctgactattcgtccatgcaccaatcaagagctcaaccgcgtgcccaagcaccgaattgctgccactatggctcagttgctgtgggatgagttcgagaaaggcgcctatgatgcgtaaatcgttgcccgtcccaggagcagcttcgagacagtaaacgaactgcgtgatgactttgtccgtcgcctgtaatggcggagggtgctcgggcgggactcgccaaggtcgccaacgctgctgtttcgtaatatctccattgattgattcctgcttgagatcgattaatgtcaatatttggtgattttctcgatgccgcgcttctaatgcccgcctctctctccgcggtgttggcgaagtcacttcttcatttgcgaagtctgcgtaagcttgtgcttcgttatggcttccattcaccacgaatttgaaagttgttctggcgcctgagcagactttgcccgctcgagaacatgtgccgcaggttggccatttctcatcgcactgt

SEQ ID NO: 2138 - DNA, 897 bp, Muscodor strobelii
  misc_feature: SGI cDNA ID NO. 560333
  misc_feature: Reduced expression when VOC is produced
  misc_feature: Encodes the peptide sequence at SEQ ID NO 2139
atgtctgcacgcggaggcagaggcggccgtggtgggcgcgggggacgaggcggcagaggaggaaaggccccccctccagggctggctggcggcgatgatcccggcctcactgccaacatcagcgacgagcctcaagagaactatcccaaatggtacagaccaccgcccgctccgcccatcaccgagctcgaggaccgcgccatcaccagcttcaccgccttccgccgcatctaccacaactcgccgctctacacacatcgccacatggtccccgagagccagtcggcccgcgaccccgtcctcccccgccacggccaggcccagttgaacgcccgctttggcgtcaagaatcgcgccaccgtcgaccctttccttgctgtccccatgcacagcagcaagttcgaagacgacacccgcaccctccccaagctcagacacacccgcccctgggtctactcgctgtttccagaggaattacatgccactctagacggtcaagacacaggtggtccaaagggcgggtacccatctcacgacaagcccaagaagggcaccaagcgcaggctggccaacggccacgacgaagagcactggggtcatgaagaagaagcagatgatgtcttcggttctggccgcccgcacaaaagacacgagaacgagactgaggagcaacgtaaagcccgcattgagcaggctgtcaaggacggcgacaacgaagatggcgagggcgccgaggatcttgacgaggacgaagccgagatgtcactcgaagatgacgactattccgaggatgaggatgacgagggtggcgactacaacgctgaggcatacttcgacgatggcgacgcagatgattatggcgatgacgacggtgtcggcgaaagcacgatggactag

SEQ ID NO: 2139 - protein, 298 aa, Muscodor strobelii
  misc_feature: SGI Peptide ID NO. 560333
  misc_feature (28)..(279): NCBI GI: 39971353 Blast Desc: MGG_10697 [Magnaporthe grisea 70-15] gi|145009414|gb|EDJ94114.1| MGG_10697 [Magnaporthe grisea 70-15]
  misc_feature (43)..(279): NCBI GI: 116197062 Blast Desc: CHGG_05129 [Chaetomium globosum CBS 148.51] gi|88181042|gb|EAQ88510.1| CHGG_05129 [Chaetomium globosum CBS 148.51]
  misc_feature (44)..(280): NCBI GI: 256725619 Blast Desc: NECHADRAFT_100852 [Nectria haematococca mpVI 77-13-4]
  misc_feature (51)..(280): NCBI GI: 171688118 Blast Desc: protein product [Podospora anserina] gi|170944021|emb|CAP70131.1| protein product [Podospora anserina]
  misc_feature (44)..(280): NCBI GI: 46116648 Blast Desc: FG04166.1 [Gibberella zeae PH-1]
  misc_feature (39)..(167): NCBI GI: 261359959 Blast Desc: conserved [Verticillium albo-atrum VaMs.102]
  misc_feature (42)..(278): NCBI GI: 240273050 Blast Desc: conserved [Ajellomyces capsulatus H143]
  misc_feature (42)..(278): NCBI GI: 225562081 Blast Desc: conserved [Ajellomyces capsulatus G186AR]
  misc_feature (42)..(278): NCBI GI: 154283925 Blast Desc: [Ajellomyces capsulatus NAm1] gi|150410938|gb|EDN06326.1| [Ajellomyces capsulatus NAm1]
  misc_feature (37)..(167): NCBI GI: 85109160 Blast Desc: NCU07656 [Neurospora crassa OR74A] gi|28924416|gb|EAA33547.1| [Neurospora crassa OR74A]
  misc_feature: Useful for introducing or modulating the production of volatile compounds
MSARGGRGGRGGRGGRGGRGGKAPPPGLAGGDDPGLTANISDEPQENYPKWYRPPPAPPITELEDRAITSFTAFRRIYHNSPLYTHRHMVPESQSARDPVLPRHGQAQLNARFGVKNRATVDPFLAVPMHSSKFEDDTRTLPKLRHTRPWVYSLFPEELHATLDGQDTGGPKGGYPSHDKPKKGTKRRLANGHDEEHWGHEEEADDVFGSGRPHKRHENETEEQRKARIEQAVKDGDNEDGEGAEDLDEDEAEMSLEDDDYSEDEDDEGGDYNAEAYFDDGDADDYGDDDGVGESTMD

SEQ ID NO: 2140 - DNA, 1464 bp, Muscodor strobelii
  misc_feature: SGI EST ID NO. CUFF.5460.1
  misc_feature: Variant of the nucleotide sequence at SEQ ID NO 2138
cagcgaatcacatgtacaattctactttaataccctccgagtcacagctccaatggccccaccaaatttttcagaatcggtcggcgcattgggaaatgttcctcctttgacacgccgcttcacgctcacgctttcgctctcgcaagctgccccacaacctactatgatctacgcactctcctgaccttggcatatgtgctgaaatgtctgcacgcggaggcagaggcggccgtggtgggcgcgggggacgaggcggcagaggaggaaaggccccccctccagggctggctggcggcgatgatcccggcctcactgccaacatcagcgacgagcctcaagagaactatcccaaatggtacagaccaccgcccgctccgcccatcaccgagctcgaggaccgcgccatcaccagcttcaccgccttccgccgcatctaccacaactcgccgctctacacacatcgccacatggtccccgagagccagtcggcccgcgaccccgtcctcccccgccacggccaggcccagttgaacgcccgctttggcgtcaagaatcgcgccaccgtcgaccctttccttgctgtccccatgcacagcagcaagttcgaagacgacacccgcaccctccccaagctcagacacacccgcccctgggtctactcgctgtttccagaggaattacatgccactctagacggtcaagacacaggtggtccaaagggcgggtacccatctcacgacaagcccaagaagggcaccaagcgcaggctggccaacggccacgacgaagagcactggggtcatgaagaagaagcagatgatgtcttcggttctggccgcccgcacaaaagacacgagaacgagactgaggagcaacgtaaagcccgcattgagcaggctgtcaaggacggcgacaacgaagatggcgagggcgccgaggatcttgacgaggacgaagccgagatgtcactcgaagatgacgactattccgaggatgaggatgacgagggtggcgactacaacgctgaggcatacttcgacgatggcgacgcagatgattatggcgatgacgacggtgtcggcgaaagcacgatggactagtaacaaaagtcccattcactgatcatgaagggtttccaacaactggttgcatggcaaaggcgttaaaagggatacgggacggaatctgctcaacaaagtgccagcgagacatttgtctaaaccgtgtatatattgcgcttggttggcctttacatagatattggcacatgtcacataggttcctcttaggggctagaggaatgtcttgatggtgatacccaaaatagcgagacctacaaattacgctgatcgctcagtctacctttgctgctcgtgcctgtatttgttcttcgccgaatggaaaattcgactatggggtattctttattgacctgttgaagagcttggaaataaaccccttggc

SEQ ID NO: 2141 - DNA, 900 bp, Muscodor strobelii
  misc_feature: SGI cDNA ID NO. 560334
  misc_feature: Encodes the peptide sequence at SEQ ID NO 2142
atgtctgcacgcggaggcagaggcggccgtggtgggcgcgggggacgaggcggcagaggaggaaaggccccccctccagggctggctggcggcgatgatcccggcctcactgccaacatcagcgacgagcctcaagagaactatcccaaatggtacagaccaccgcccgctccgcccatcaccgagctcgaggaccgcgccatcaccagcttcaccgccttccgccgcatctaccacaactcgccgctctacacacatcgccacatggtccccgagagccagtcggcccgcgaccccgtcctcccccgccacggccaggcccagttgaacgcccgctttggcgtcaagaatcgcgccaccgtcgaccctttccttgctgtccccatgcacagcagcaagttcgaagacgacacccgcaccctccccaagctcagacacacccgcccctgggtctactcgctgtttccagaggaattacatgccactctagacggtcaagacacaggtggtccaaagggcgggtacccatctcacgacaagcccaagaagggcaccaagcgcaggctggccaacggccacgacgaagagcactggggtcatgaagaagaagcagatgatgtcttcggttctggccgcccgcacaaaagacacgagaacgagactgaggagcaacgtaaagcccgcattgagcaggctgtcaaggacggcgacaacgaagatggcgagggcgccgaggatcttgacgaggacgaagccgagatgtcactcgaagatgacgactattccgaggatgaggatgacgagggtggcgactacaacgctgaggcatacttcgacgatggcgacgcagatgattatggcgatgacgacggtgtcggcgaaaggtgcgttctgttctaa

SEQ ID NO: 2142 - protein, 299 aa, Muscodor strobelii
  misc_feature: SGI Peptide ID NO. 560334
  misc_feature (28)..(279): NCBI GI: 39971353 Blast Desc: MGG_10697 [Magnaporthe grisea 70-15] gi|145009414|gb|EDJ94114.1| MGG_10697 [Magnaporthe grisea 70-15]
  misc_feature (43)..(279): NCBI GI: 116197062 Blast Desc: CHGG_05129 [Chaetomium globosum CBS 148.51] gi|88181042|gb|EAQ88510.1| CHGG_05129 [Chaetomium globosum CBS 148.51]
  misc_feature (44)..(280): NCBI GI: 256725619 Blast Desc: NECHADRAFT_100852 [Nectria haematococca mpVI 77-13-4]
  misc_feature (51)..(280): NCBI GI: 171688118 Blast Desc: protein product [Podospora anserina] gi|170944021|emb|CAP70131.1| protein product [Podospora anserina]
  misc_feature (44)..(280): NCBI GI: 46116648 Blast Desc: FG04166.1 [Gibberella zeae PH-1]
  misc_feature (39)..(167): NCBI GI: 261359959 Blast Desc: conserved [Verticillium albo-atrum VaMs.102]
  misc_feature (42)..(278): NCBI GI: 240273050 Blast Desc: conserved [Ajellomyces capsulatus H143]
  misc_feature (42)..(278): NCBI GI: 225562081 Blast Desc: conserved [Ajellomyces capsulatus G186AR]
  misc_feature (42)..(278): NCBI GI: 154283925 Blast Desc: [Ajellomyces capsulatus NAm1] gi|150410938|gb|EDN06326.1| [Ajellomyces capsulatus NAm1]
  misc_feature (37)..(167): NCBI GI: 85109160 Blast Desc: NCU07656 [Neurospora crassa OR74A] gi|28924416|gb|EAA33547.1| [Neurospora crassa OR74A]
MSARGGRGGRGGRGGRGGRGGKAPPPGLAGGDDPGLTANISDEPQENYPKWYRPPPAPPITELEDRAITSFTAFRRIYHNSPLYTHRHMVPESQSARDPVLPRHGQAQLNARFGVKNRATVDPFLAVPMHSSKFEDDTRTLPKLRHTRPWVYSLFPEELHATLDGQDTGGPKGGYPSHDKPKKGTKRRLANGHDEEHWGHEEEADDVFGSGRPHKRHENETEEQRKARIEQAVKDGDNEDGEGAEDLDEDEAEMSLEDDDYSEDEDDEGGDYNAEAYFDDGDADDYGDDDGVGERCVLF

SEQ ID NO: 2143 - DNA, 1611 bp, Muscodor strobelii
  misc_feature: SGI EST ID NO. CUFF.5460.0
  misc_feature: Variant of the nucleotide sequence at SEQ ID NO 2141
cagcgaatcacatgtacaattctactttaataccctccgagtcacagctccaatggccccaccaaatttttcagaatcggtcggcgcattgggaaatgttcctcctttgacacgccgcttcacgctcacgctttcgctctcgcaagctgccccacaacctactatgatctacgcactctcctgaccttggcatatgtgctgaaatgtctgcacgcggaggcagaggcggccgtggtgggcgcgggggacgaggcggcagaggaggaaaggccccccctccagggctggctggcggcgatgatcccggcctcactgccaacatcagcgacgagcctcaagagaactatcccaaatggtacagaccaccgcccgctccgcccatcaccgagctcgaggaccgcgccatcaccagcttcaccgccttccgccgcatctaccacaactcgccgctctacacacatcgccacatggtccccgagagccagtcggcccgcgaccccgtcctcccccgccacggccaggcccagttgaacgcccgctttggcgtcaagaatcgcgccaccgtcgaccctttccttgctgtccccatgcacagcagcaagttcgaagacgacacccgcaccctccccaagctcagacacacccgcccctgggtctactcgctgtttccagaggaattacatgccactctagacggtcaagacacaggtggtccaaagggcgggtacccatctcacgacaagcccaagaagggcaccaagcgcaggctggccaacggccacgacgaagagcactggggtcatgaagaagaagcagatgatgtcttcggttctggccgcccgcacaaaagacacgagaacgagactgaggagcaacgtaaagcccgcattgagcaggctgtcaaggacggcgacaacgaagatggcgagggcgccgaggatcttgacgaggacgaagccgagatgtcactcgaagatgacgactattccgaggatgaggatgacgagggtggcgactacaacgctgaggcatacttcgacgatggcgacgcagatgattatggcgatgacgacggtgtcggcgaaaggtgcgttctgttctaaatccttctatccctggtgtccctcccctattttatagatcacgcgtgggaaatgaagtaccattacccgcccaacacagcattgccggtcatggaacccctcattacttatactgactttcggccttgtagcacgatggactagtaacaaaagtcccattcactgatcatgaagggtttccaacaactggttgcatggcaaaggcgttaaaagggatacgggacggaatctgctcaacaaagtgccagcgagacatttgtctaaaccgtgtatatattgcgcttggttggcctttacatagatattggcacatgtcacataggttcctcttaggggctagaggaatgtcttgatggtgatacccaaaatagcgagacctacaaattacgctgatcgctcagtctacctttgctgctcgtgcctgtatttgttcttcgccgaatggaaaattcgactatggggtattctttattgacctgttgaagagcttggaaataaaccccttggc

SEQ ID NO: 2144 - DNA, 1911 bp, Muscodor strobelii
  misc_feature: SGI cDNA ID NO. 560335
  misc_feature: Reduced expression when VOC is produced
  misc_feature: Encodes the peptide sequence at SEQ ID NO 2145
atgggcaggggattcagctggcgaagggcgataggctgggaccgccatcccgctcataaccagcacctatggtctttgcatgaatcaagacgacgattgcttcctttccatcgtgatgaatcctcaattcactctgcgattgagcccgttgaagtcacaaaggttgcacttcgtttgcgctatctcatcgaggagagcgtcccttgcgagcttgacgaaagcaaaatcacacaacctcatagcaaagtcatcactcagaatgtcattcaagccgccaaggaagctggtggtgcagaggctaaatcatgtgtcgtgtactgtctccttattgcaaagcgatggttcaaacaccaggcaatgagtgagctttgggacgccgatcttcaccttctccgcgctaccgcgtgtgaggttattgcgaagcagatcatcgaaaatgaagagaatatggcatatatgctacattctgttcttctcaagcgctacgcaatcattgttgacaaggagcctacggttccggtcaatgctatcgaactggccgtggaccttcacgctttgcgtgtcatcggatcctcaggctaccagaaatgcatccaatatctctggaaaggctggctcgttcaagatgaggatgatcctgcgagcttcgtggagtacagagatcgagataacacgtcattcttccctcacttggaccccgatcgaatgagagctcccatgtatcagaacgcattccagctcttgatctcaatcgcctatctggctttgtacactggtgctattaacactatcaaccccacgggtgatttagactttgtcgaaatacttctttacatcttcactttcggcttcgtctttgacgagcttaccaaattctacaaagccggttggaatatactgggtttttggaatgccttcaacaacacgctttactcacttctaatggtttcactggcactacgttttgttgcactgagccgctcgtcggacgatcatgaggggcgtgccaagttcaactcgatgagttacaactttcttgccttcacagctccaatgttctgggctcgtctactactgtatcttgactccttccgcttcttcggcgcaatgctcgttgttctcaaggtgatgatgaaagaaagcattatcttctttgcgctattgatcgttgtaatcgttggctttctgcaagctttcattgggatggattacgcagacgacatggctggcgaagataccatcttcattttacaggcaatggcaaatgccatcatgcaaagtcctgatttcagcggtttcgaacgctttagcccgccattcggaatcattctgtactatctcttcacgttcatcgtcatggtcgtcctcttaaacgttcttattgcactatacaacagtgcatacgaggatatctatgacaactcagacgatgaatatcttgcgctgttttctcagaaaaccatgcagtttgttcgtgcaccagacgagaatgtcttcattgcaccatttaatctgatcgaaatcttcttcttgatcctgcctttcgaatggtggttgcctaagaagcagtatgagcgcttgaacgacatcatcatgggtttcatctatttccctctgcttttctgcgcggctatctttgaagtccagatcgccaaggatattcgcaggaacaggagtagaggcgaagaagacgatgatacggttgaagagtgggagcaattgcaagatcaagttgacttcgaaggcgaaggctggaccaagaaagtgaaagagagtaaggccaatgtggaagaggatggggctgtgctcgagataagaaaactgcagggagacgtcgacagactcaccagcctcatagaaaaactgagcaagaaactcgaggagaaggccagtgacgaaagtctgatctga

SEQ ID NO: 2145 - protein, 636 aa, Muscodor strobelii
  misc_feature: SGI Peptide ID NO. 560335
  misc_feature (1)..(624): NCBI GI: 171688166 Blast Desc: protein product [Podospora anserina] gi|170944045|emb|CAP70155.1| protein product [Podospora anserina]
  misc_feature (4)..(631): NCBI GI: 116196952 Blast Desc: CHGG_05074 [Chaetomium globosum CBS 148.51] gi|88180987|gb|EAQ88455.1| CHGG_05074 [Chaetomium globosum CBS 148.51]
  misc_feature (3)..(626): NCBI GI: 39964249 Blast Desc: MGG_09828 [Magnaporthe grisea 70-15] gi|145011132|gb|EDJ95788.1| MGG_09828 [Magnaporthe grisea 70-15]
  misc_feature (6)..(619): NCBI GI: 156048869 Blast Desc: SS1G_08141 [Sclerotinia sclerotiorum 1980] gi|154692540|gb|EDN92278.1| SS1G_08141 [Sclerotinia sclerotiorum 1980]
  misc_feature (6)..(612): NCBI GI: 154317204 Blast Desc: BC1G_03504 [Botryotinia fuckeliana B05.10] gi|150844921|gb|EDN20114.1| BC1G_03504 [Botryotinia fuckeliana B05.10]
  misc_feature (7)..(625): NCBI GI: 169620153 Blast Desc: SNOG_13279 [Phaeosphaeria nodorum SN15] gi|160703973|gb|EAT79163.2| SNOG_13279 [Phaeosphaeria nodorum SN15]
  misc_feature (18)..(622): NCBI GI: 261193517 Blast Desc: potassium ion channel Yvc1 [Ajellomyces dermatitidis SLH14081] gi|239588769|gb|EEQ71412.1| potassium ion channel Yvc1 [Ajellomyces dermatitidis SLH14081]
  misc_feature (7)..(627): NCBI GI: 225685325 Blast Desc: conserved [Paracoccidioides brasiliensis Pb03]
  misc_feature (33)..(627): NCBI GI: 226279218 Blast Desc: vacuolar conductance [Paracoccidioides brasiliensis Pb01]
  misc_feature (7)..(627): NCBI GI: 226294662 Blast Desc: vacuolar cation channel [Paracoccidioides brasiliensis Pb18]
  misc_feature: Useful for introducing or modulating the production of volatile compounds
MGRGFSWRRAIGWDRHPAHNQHLWSLHESRRRLLPFHRDESSIHSAIEPVEVTKVALRLRYLIEESVPCELDESKITQPHSKVITQNVIQAAKEAGGAEAKSCVVYCLLIAKRWFKHQAMSELWDADLHLLRATACEVIAKQIIENEENMAYMLHSVLLKRYAIIVDKEPTVPVNAIELAVDLHALRVIGSSGYQKCIQYLWKGWLVQDEDDPASFVEYRDRDNTSFFPHLDPDRMRAPMYQNAFQLLISIAYLALYTGAINTINPTGDLDFVEILLYIFTFGFVFDELTKFYKAGWNILGFWNAFNNTLYSLLMVSLALRFVALSRSSDDHEGRAKFNSMSYNFLAFTAPMFWARLLLYLDSFRFFGAMLVVLKVMMKESIIFFALLIVVIVGFLQAFIGMDYADDMAGEDTIFILQAMANAIMQSPDFSGFERFSPPFGIILYYLFTFIVMVVLLNVLIALYNSAYEDIYDNSDDEYLALFSQKTMQFVRAPDENVFIAPFNLIEIFFLILPFEWWLPKKQYERLNDIIMGFIYFPLLFCAAIFEVQIAKDIRRNRSRGEEDDDTVEEWEQLQDQVDFEGEGWTKKVKESKANVEEDGAVLEIRKLQGDVDRLTSLIEKLSKKLEEKASDESLI

SEQ ID NO: 2146 - DNA, 2554 bp, Muscodor strobelii
  misc_feature: SGI EST ID NO. CUFF.5424.0
  misc_feature: Variant of the nucleotide sequence at SEQ ID NO 2144
cgctgcaggctcttttcacctagtttgaaacgaggtcgcatgtctgggagaatcatcttctcaattgacttgtccgcattctaattgattcatcgagaggacgtattgcctgtcactgctagctataacgtcgcctcgcttttgtttgagctccagaccgatacatcagcatgggcaggggattcagctggcgaagggcgataggctgggaccgccatcccgctcataaccagcacctatggtctttgcatgaatcaagacgacgattgcttcctttccatcgtgatgaatcctcaattcactctgcgattgagcccgttgaagtcacaaaggttgcacttcgtttgcgctatctcatcgaggagagcgtcccttgcgagcttgacgaaagcaaaatcacacaacctcatagcaaagtcatcactcagaatgtcattcaagccgccaaggaagctggtggtgcagaggctaaatcatgtgtcgtgtactgtctccttattgcaaagcgatggttcaaacaccaggcaatgagtgagctttgggacgccgatcttcaccttctccgcgctaccgcgtgtgaggttattgcgaagcagatcatcgaaaatgaagagaatatggcatatatgctacattctgttcttctcaagcgctacgcaatcattgttgacaaggagcctacggttccggtcaatgctatcgaactggccgtggaccttcacgctttgcgtgtcatcggatcctcaggctaccagaaatgcatccaatatctctggaaaggctggctcgttcaagatgaggatgatcctgcgagcttcgtggagtacagagatcgagataacacgtcattcttccctcacttggaccccgatcgaatgagagctcccatgtatcagaacgcattccagctcttgatctcaatcgcctatctggctttgtacactggtgctattaacactatcaaccccacgggtgatttagactttgtcgaaatacttctttacatcttcactttcggcttcgtctttgacgagcttaccaaattctacaaagccggttggaatatactgggtttttggaatgccttcaacaacacgctttactcacttctaatggtttcactggcactacgttttgttgcactgagccgctcgtcggacgatcatgaggggcgtgccaagttcaactcgatgagttacaactttcttgccttcacagctccaatgttctgggctcgtctactactgtatcttgactccttccgcttcttcggcgcaatgctcgttgttctcaaggtgatgatgaaagaaagcattatcttctttgcgctattgatcgttgtaatcgttggctttctgcaagctttcattgggatggattacgcagacgacatggctggcgaagataccatcttcattttacaggcaatggcaaatgccatcatgcaaagtcctgatttcagcggtttcgaacgctttagcccgccattcggaatcattctgtactatctcttcacgttcatcgtcatggtcgtcctcttaaacgttcttattgcactatacaacagtgcatacgaggatatctatgacaactcagacgatgaatatcttgcgctgttttctcagaaaaccatgcagtttgttcgtgcaccagacgagaatgtcttcattgcaccatttaatctgatcgaaatcttcttcttgatcctgcctttcgaatggtggttgcctaagaagcagtatgagcgcttgaacgacatcatcatgggtttcatctatttccctctgcttttctgcgcggctatctttgaagtccagatcgccaaggatattcgcaggaacaggagtagaggcgaagaagacgatgatacggttgaagagtgggagcaattgcaagatcaagttgactgtacgtatttctctccatatcttttccccgccccttttccccttcgcattagatggacaaactttggttctagaacatgctcggatcacacatcaagagagctggcgctaactctacatagtcgaaggcgaaggctggaccaagaaagtgaaagagagtaaggccaatgtggaagaggatggggctgtgctcgagataagaaaactgcagggagacgtcgacagactcaccagcctcatagaaaaactgagcaagaaactcgaggagaaggccagtgacgaaagtctgatctgagcggacagacgaaatctcaggtctgtcacagtgaaatgaaccattcgaacttcctccacgaacaattacctggtacatgctggtgattaaagattgccctagcgcaagacgcaataaagctgctggtgatttcagccacatggacgcctgtgggaattaatcatatagtacatattctatgactggataagcagatctggaaaatgacttgagggtcattgtaatggatacgtaatatcaaaagcactgtttaaagattacttcgatcccagtaccatgttacactagaccgtactattgacatcaatattcgtaaagtaacggttactatatctaggtcttgggccaccga

SEQ ID NO: 2147 - DNA, 1920 bp, Muscodor strobelii
  misc_feature: SGI cDNA ID NO. 560336
  misc_feature: Reduced expression when VOC is produced
  misc_feature: Encodes the peptide sequence at SEQ ID NO 2148
atggagatcaacattccgaacctcgtcaacgcagcgttgccagatcgtaaaaaggaaggaaagaacgctgtcattctatcaagcaacatgggatcaaatcataacgagtcaggatttctgtcaagtaatttccctaggtcgccacccaagctcttcattacagccgaagacgatgtgtttgacgaactcacattacgtgaatggcgcgacgagggtttcagcgtcgagtatctgccgatggggaagagtgaggccgagtacaagatcaatctcaggactctgaagtcaacggccgaactgggactttgcgaaacttacggcatcatcgcgtatggtgatgcggcgagcatttgtttggagtatttccatgttttggataacaaccccgagttcaaactctgctgtcttgttgcttattaccctacccgaattccggacactcgggctcaattccctggcggtatcaccgtcttggcgcatctggcggagggcgaagatgtgggagttgtgagccacgggcaaattgtcgggatccaggggaagaggcgtgtaacgagacggaagattgagcgtgggctgggatccggcggaacaaataaacttgcgtatccgagctacacatacaatgcccagccaggcttcgcagaacacgacttagaagaatacgagaagatcagcgcggagctggcatggagccgcagtttggctgctgtgcgtaaggcgttccggaaggatgtggatctggagttggtaattgaggaaaatgtcgagagcaagttttatactcgaaatctaggaaagaccatgtctggctacacaacacacaagtcaccacatgtgacatactcccctactctcacaggtgctataggttcggaggaattacagcggttctattcgcaatatttccttagctgcaacccaccatcaatgaagctcacgcttatctcacgaaccatgggctcggaccgtgtggtagatgagctacacgttgctttcaagcacacgcaagagatgccctggatacttcctggtgtccctcctacacagaaaagggtcgagataatggtgatcagcattgtgactttgcgcggtgggttactgtatcatgaacacatctattgggaccaggcaagtgtgttactacaggttgggcttctcgatcccaaattagtgccaagtaaagcaaaggaaaaaggcgtaaagtcgttaccagtggtgggtcgtgaagcggcgagaaggctgattaaggcatttgatgacgaggaagaaggtgaagcggataacgagttgataccaggttggtatgacgatgacgaagcagaggagacgacgatcacgccgccgaaaaagaagagcgcaccccagacgcaaagcagtgccccatctaagaagaccaatgggtcgacggtagtaggcagggatactacgtctaaaaagcaggagcaaaaggaaccggaactacaacctcaatcgcagataaaatcagaagatgtggagcctcagatcgaaccaaaagaggttgaatcgaatgaagctacgcatgagtctactaaaaagaaagaggacatcgctacaaagccagaaacttcgaaatcaccatctacactacctgcctcgactgaggaatataaggacgaaggaaaggaggaaccagaaaaggaggaaccagaaaaggaggaaccagaaaaggaggagtcaggggccgaggaggaaatggagaatgaatctgagcagacaccagagcagcaaccagagcagcaacccgcaaacccaaatgacgacccaaaagtgagcgatgaggtggcttcacagtttccttcgatgaaccccacagatgttgaaacacaggaggtggaagaaacgagacaaccccccggagcaacaacggaagggaagtcgaacgaagctagcacgtaa

SEQ ID NO: 2148 - protein, 639 aa, Muscodor strobelii
  misc_feature: SGI Peptide ID NO. 560336
  misc_feature (1)..(453): NCBI GI: 256725029 Blast Desc: NECHADRAFT_58722 [Nectria haematococca mpVI 77-13-4]
  misc_feature (1)..(443): NCBI GI: 46115496 Blast Desc: FG03590.1 [Gibberella zeae PH-1]
  misc_feature (37)..(432): NCBI GI: 238492739 Blast Desc: dienelactone hydrolase [Aspergillus flavus NRRL3357] gi|220696100|gb|EED52442.1| dienelactone hydrolase [Aspergillus flavus NRRL3357]
  misc_feature (37)..(432): NCBI GI: 169782996 Blast Desc: [Aspergillus oryzae RIB40] gi|83774704|dbj|BAE64827.1| protein product [Aspergillus oryzae]
  misc_feature (38)..(432): NCBI GI: 255938538 Blast Desc: Pc14g00450 [Penicillium chrysogenum Wisconsin 54-1255] gi|211584660|emb|CAP74186.1| Pc14g00450 [Penicillium chrysogenum Wisconsin 54-1255]
  misc_feature (39)..(416): NCBI GI: 242815127 Blast Desc: dienelactone hydrolase [Talaromyces stipitatus ATCC 10500] gi|218714848|gb|EED14271.1| dienelactone hydrolase [Talaromyces stipitatus ATCC 10500]
  misc_feature (37)..(432): NCBI GI: 115387707 Blast Desc: conserved [Aspergillus terreus NIH2624] gi|114195443|gb|EAU37143.1| conserved [Aspergillus terreus NIH2624]
  misc_feature (37)..(432): NCBI GI: 145248862 Blast Desc: An14g01430 [Aspergillus niger] gi|134081441|emb|CAK41923.1| protein product [Aspergillus niger]
  misc_feature (25)..(432): NCBI GI: 121714481 Blast Desc: dienelactone hydrolase [Aspergillus clavatus NRRL 1] gi|119403005|gb|EAW13425.1| dienelactone hydrolase [Aspergillus clavatus NRRL 1]
  misc_feature (38)..(416): NCBI GI: 259483530 Blast Desc: TPA: dienelactone hydrolase (AFU_orthologue; AFUA_4G03730) [Aspergillus nidulans FGSC A4]
  misc_feature: Useful for introducing or modulating the production of volatile compounds
MEINIPNLVNAALPDRKKEGKNAVILSSNMGSNHNESGFLSSNFPRSPPKLFITAEDDVFDELTLREWRDEGFSVEYLPMGKSEAEYKINLRTLKSTAELGLCETYGIIAYGDAASICLEYFHVLDNNPEFKLCCLVAYYPTRIPDTRAQFPGGITVLAHLAEGEDVGVVSHGQIVGIQGKRRVTRRKIERGLGSGGTNKLAYPSYTYNAQPGFAEHDLEEYEKISAELAWSRSLAAVRKAFRKDVDLELVIEENVESKFYTRNLGKTMSGYTTHKSPHVTYSPTLTGAIGSEELQRFYSQYFLSCNPPSMKLTLISRTMGSDRVVDELHVAFKHTQEMPWILPGVPPTQKRVEIMVISIVTLRGGLLYHEHIYWDQASVLLQVGLLDPKLVPSKAKEKGVKSLPVVGREAARRLIKAFDDEEEGEADNELIPGWYDDDEAEETTITPPKKKSAPQTQSSAPSKKTNGSTVVGRDTTSKKQEQKEPELQPQSQIKSEDVEPQIEPKEVESNEATHESTKKKEDIATKPETSKSPSTLPASTEEYKDEGKEEPEKEEPEKEEPEKEESGAEEEMENESEQTPEQQPEQQPANPNDDPKVSDEVASQFPSMNPTDVETQEVEETRQPPGATTEGKSNEAST

SEQ ID NO: 2149 - DNA, 3457 bp, Muscodor strobelii
  misc_feature: SGI EST ID NO. CUFF.5526.0
  misc_feature: Variant of the nucleotide sequence at SEQ ID NO 2147
caaccaccataataatcttaataggaatcaattcgcagtcattaaactctttaagggatatacgaattctaagagaggagagacaaatctttcacggattgcactgcggccgatcgctagttccagagattgatgccaagcagagccagagaaatcccacttacacgccgcatagatggagatcaacattccgaacctcgtcaacgcagcgttgccagatcgtaaaaaggaaggaaagaacgctgtcattctatcaagcaacatgggatcaaatcataacgagtcaggatttctgtcaagtaatttccctaggtcgccacccaagctcttcattacagccgaagacgatgtgtttgacgaactcacattacgtgaatggcgcgacgagggtttcagcgtcgagtatctgccgatggggaagagtgaggccgagtacaagatcaatctcaggactctgaagtcaacggccgaactgggactttgcgaaacttacggcatcatcgcgtatggtgatgcggcgagcatttgtttggagtatttccatgttttggataacaaccccgagttcaaactctgctgtcttgttgcttattaccctacccgaattccggacactcgggctcaattccctggcggtatcaccgtcttggcgcatctggcggagggcgaagatgtgggagttgtgagccacgggcaaattgtcgggatccaggggaagaggcgtgtaacgagacggaagattgagcgtgggctgggatccggcggaacaaataaacttgcgtatccgagctacacatacaatgcccagccaggcttcgcagaacacgacttagaagaatacgagaagatcagcgcggagctggcatggagccgcagtttggctgctgtgcgtaaggcgttccggaaggatgtggatctggagttggtaattgaggaaaatgtcgagagcaagttttatactcgaaatctaggaaagaccatgtctggctacacaacacacaagtcaccacatgtgacatactcccctactctcacaggtgctataggttcggaggaattacagcggttctattcgcaatatttccttagctgcaacccaccatcaatgaagctcacgcttatctcacgaaccatgggctcggaccgtgtggtagatgagctacacgttgctttcaagcacacgcaagagatgccctggatacttcctggtgtccctcctacacagaaaagggtcgagataatggtgatcagcattgtgactttgcgcggtgggttactgtatcatgaacacatctattgggaccaggcaagtgtgttactacaggttgggcttctcgatcccaaattagtgccaagtaaagcaaaggaaaaaggcgtaaagtcgttaccagtggtgggtcgtgaagcggcgagaaggctgattaaggcatttgatgacgaggaagaaggtgaagcggataacgagttgataccaggttggtatgacgatgacgaagcagaggagacgacgatcacgccgccgaaaaagaagagcgcaccccagacgcaaagcagtgccccatctaagaagaccaatgggtcgacggtagtaggcagggatactacgtctaaaaagcaggagcaaaaggaaccggaactacaacctcaatcgcagataaaatcagaagatgtggagcctcagatcgaaccaaaagaggttgaatcgaatgaagctacgcatgagtctactaaaaagaaagaggacatcgctacaaagccagaaacttcgaaatcaccatctacactacctgcctcgactgaggaatataaggacgaaggaaaggaggaaccagaaaaggaggaaccagaaaaggaggaaccagaaaaggaggagtcaggggccgaggaggaaatggagaatgaatctgagcagacaccagagcagcaaccagagcagcaacccgcaaacccaaatgacgacccaaaagtgagcgatgaggtggcttcacagtttccttcgatgaaccccacagatgttgaaacacaggaggtggaagaaacgagacaaccccccggagcaacaacggaagggaagtcgaacgaagctagcacgtaacggcgtaggaaacttagtgtttggttcaaacattattgcagaagcaaaacactgcactggaaagtatgtataataaagtctcattaatcgacgtctcataagcagtgatggtatctaatgcgaaattgctgagtcaaggaagtttatgatcatcatcgttggtaccattcgctcgcttcgctcaaatagcccatcattcatcccgctccatatccagtcacgtaaattcatgagtctaaccctacactgccttcaagattatgagtgagtagaatttcctttctcggcgtcaccaatatcgcttccggaaccatctgcgtggtggaccttctcagggatgtgatgaccggtcgcttccgctgcgtcagtgtcatggttcacgtccatgcgtctgccgagatgctcagggcccaagacggcaagtaggatcgtgtaggcgtagacggcacccatcagaatcgcaacgaccttgccgtattcgtatctcgaggttccgtcctctagtggcggtagagggaacctctcaccaatggtcgcttcaatggtagaactagcagaggacacgaggttgcctagttggtaagatgtaccgacaacgaacgttcggaatgcgcctggagacagttccattaagtgaacaggcacaacgccccatgcaccctgaactgcgaattgctcaaagaaggccgcggcaatgattctctcgttagaaatgaatccataggggtatagtagagcgccaccaaggatacacattgcgatgatggagaatcggcggccgaatatctgtgaactgaaaccaacgaccgtgccgccagtgatagctccgacgttggcaacaacttgggtcacggtcacctgatctttatcgaacccaaactgattctcaagaagagtcgggtatagatcttgagaaccatgagacatgaagttgaatcccgtcattaaaagaacgagataaatgagaataagccaatggcgcttcacggcaaccttgccctcagcgatgaaagtcttgccaatgctgccattttgccgacgaagctcttggtgagcaatataggtgttcgtctcaggcatgaaaaatcgccacacgatgaaaatagccggaaccgcagctccgaaccagaagagtggccgccaggtgtatggcgtggtgttgacgagggctcgtgcaaatgcggtagcaagcaaatagccaaatgcataaccttgctgtaatataccgctcatcaaaccgcgagcctcatctggaatatcttcgagcgctgtggcagcggcgttgccatacatacctcccatagcaatgccgaaaagactgcgaacgccaagaaactgggagtatgtgttcgtgaaacccgt

SEQ ID NO: 2150 - DNA, 1536 bp, Muscodor strobelii
  misc_feature: SGI cDNA ID NO. 560337
  misc_feature: Elevated expression when VOC is produced
  misc_feature: Encodes the peptide sequence at SEQ ID NO 2151
atggccgccgctcaatccgatgtcgaccacaatggctttctcgccgatgagtctaatgcctaccctccgcatcatgggatgtccgtcgggcaatatctggcaacgcgcattagctcgcttaagcctccaatgaacaaggctccgaatccgatccgtctgctgatgatgctgaaccgctccaactggaactttttcgccattgctttctgtggttggacgtgggatgctttcgacttcttctctgtgtcacttacggctacgagccttgcgaaagatttcgacgtgtctgtcaaggatattacatggggcatcacactcgtcttaatgttgcgatctgttggatccgcaatctttggatacgctgctgatcgctatgggcgcaaatggcccttcattatcaactgcctccttttcattgtaattgaactggcaacgggtttcacgaacacatactcccagtttcttggcgttcgcagtcttttcggcattgctatgggaggtatgtatggcaacgccgctgccacagcgctcgaagatattccagatgaggctcgcggtttgatgagcggtatattacagcaaggttatgcatttggctatttgcttgctaccgcatttgcacgagccctcgtcaacaccacgccatacacctggcggccactcttctggttcggagctgcggttccggctattttcatcgtgtggcgatttttcatgcctgagacgaacacctatattgctcaccaagagcttcgtcggcaaaatggcagcattggcaagactttcatcgctgagggcaaggttgccgtgaagcgccattggcttattctcatttatctcgttcttttaatgacgggattcaacttcatgtctcatggttctcaagatctatacccgactcttcttgagaatcagtttgggttcgataaagatcaggtgaccgtgacccaagttgttgccaacgtcggagctatcactggcggcacggtcgttggtttcagttcacagatattcggccgccgattctccatcatcgcaatgtgtatccttggtggcgctctactatacccctatggattcatttctaacgagagaatcattgccgcggccttctttgagcaattcgcagttcagggtgcatggggcgttgtgcctgttcacttaatggaactgtctccaggcgcattccgaacgttcgttgtcggtacatcttaccaactaggcaacctcgtgtcctctgctagttctaccattgaagcgaccattggtgagaggttccctctaccgccactagaggacggaacctcgagatacgaatacggcaaggtcgttgcgattctgatgggtgccgtctacgcctacacgatcctacttgccgtcttgggccctgagcatctcggcagacgcatggacgtgaaccatgacactgacgcagcggaagcgaccggtcatcacatccctgagaaggtccaccacgcagatggttccggaagcgatattggtgacgccgagaaaggaaattctactcactcataa

SEQ ID NO: 2151 - protein, 511 aa, Muscodor strobelii
  misc_feature: SGI Peptide ID NO. 560337
  misc_feature (67)..(416): Pfam Id: PF07690 Pfam Desc: Major Facilitator Superfamily
  misc_feature (62)..(474): Pfam Id: PF00083 Pfam Desc: Sugar (and other) transporter
  misc_feature (62)..(242): Pfam Id: PF00083 Pfam Desc: Sugar (and other) transporter
  misc_feature (5)..(480): NCBI GI: 39964238 Blast Desc: MGG_09827 [Magnaporthe grisea 70-15] gi|145011131|gb|EDJ95787.1| MGG_09827 [Magnaporthe grisea 70-15]
  misc_feature (23)..(489): NCBI GI: 212537037 Blast Desc: sugar transporter family protein [Penicillium marneffei ATCC 18224] gi|210068416|gb|EEA22507.1| sugar transporter family protein [Penicillium marneffei ATCC 18224]
  misc_feature (27)..(508): NCBI GI: 145237382 Blast Desc: An07g02540 [Aspergillus niger] gi|134075808|emb|CAK39343.1| protein product [Aspergillus niger]
  misc_feature (11)..(477): NCBI GI: 164424073 Blast Desc: NCU07607 [Neurospora crassa OR74A] gi|157070360|gb|EAA33605.2| NCU07607 [Neurospora crassa OR74A]
  misc_feature (16)..(489): NCBI GI: 154317617 Blast Desc: BC1G_03160 [Botryotinia fuckeliana B05.10] gi|150844334|gb|EDN19527.1| BC1G_03160 [Botryotinia fuckeliana B05.10]
  misc_feature (25)..(511): NCBI GI: 115399936 Blast Desc: ATEG_06379 [Aspergillus terreus NIH2624] gi|114191223|gb|EAU32923.1| ATEG_06379 [Aspergillus terreus NIH2624]
  misc_feature (27)..(485): NCBI GI: 255931905 Blast Desc: Pc12g06700 [Penicillium chrysogenum Wisconsin 54-1255] gi|211582128|emb|CAP80297.1| Pc12g06700 [Penicillium chrysogenum Wisconsin 54-1255]
  misc_feature (23)..(511): NCBI GI: 242810392 Blast Desc: sugar transporter family protein [Talaromyces stipitatus ATCC 10500] gi|218716197|gb|EED15619.1| sugar transporter family protein [Talaromyces stipitatus ATCC 10500]
  misc_feature (22)..(483): NCBI GI: 189198081 Blast Desc: sugar transporter family protein [Pyrenophora tritici-repentis Pt-1C-BFP] gi|187981326|gb|EDU47952.1| sugar transporter family protein [Pyrenophora tritici-repentis
  misc_feature (27)..(507): NCBI GI: 169766034 Blast Desc: [Aspergillus oryzae RIB40] gi|83765343|dbj|BAE55486.1| protein product [Aspergillus oryzae]
  misc_feature: Useful for introducing or modulating the production of volatile compounds
MAAAQSDVDHNGFLADESNAYPPHHGMSVGQYLATRISSLKPPMNKAPNPIRLLMMLNRSNWNFFAIAFCGWTWDAFDFFSVSLTATSLAKDFDVSVKDITWGITLVLMLRSVGSAIFGYAADRYGRKWPFIINCLLFIVIELATGFTNTYSQFLGVRSLFGIAMGGMYGNAAATALEDIPDEARGLMSGILQQGYAFGYLLATAFARALVNTTPYTWRPLFWFGAAVPAIFIVWRFFMPETNTYIAHQELRRQNGSIGKTFIAEGKVAVKRHWLILIYLVLLMTGFNFMSHGSQDLYPTLLENQFGFDKDQVTVTQVVANVGAITGGTVVGFSSQIFGRRFSIIAMCILGGALLYPYGFISNERIIAAAFFEQFAVQGAWGVVPVHLMELSPGAFRTFVVGTSYQLGNLVSSASSTIEATIGERFPLPPLEDGTSRYEYGKVVAILMGAVYAYTILLAVLGPEHLGRRMDVNHDTDAAEATGHHIPEKVHHADGSGSDIGDAEKGNSTHS

SEQ ID NO: 2152 - DNA, 3902 bp, Muscodor strobelii
  misc_feature: SGI EST ID NO. CUFF.5527.1
  misc_feature: Variant of the nucleotide sequence at SEQ ID NO 2150
gtcgaacattacaacagccaagacagaaacgtaatctgctcaagggcttgtcgcccttacagttgtggaggcgtctctctttccactaataccgccacaccaaaaaacattgatcgaataagcagcaaaccccaagctcgaggcgggaacaagactaacaactcatggggaggaaattgactggtataacccgagtccgccgacgagaagttacacagcttaaggacgatgcagaaagccatttgtagtacagtttcgacctctgcttatttgacacatttccaccctgtcgattatgctacttgactataattacgacgaatctgcaacaactttcttgtgaaagggtacagagtttttcatacaacgatcccagagaaggtaaagcggagctccgtaggaaacacattcatcgtcattgaatgccaggccaatgtcctcaagatcaacggcgacctgcattgttatgatcggcagataatgtcggcctcgccgcttagactgctgaggctctgtcctctcacgatagatttcgcggacttgacgggtcagctgcgtgtgccatgcggtctgatagatattaccatgagtacttttttaatccctacacaccattcatccttgcaaacattgcgtcgtccaattggtatgcatcattatgacaaggtccaggatcccccacaagaagacccgcacccccgaagtggcttgccagccgaagcgtagtcgcatttgaatcggttgcctttcggatgaagaacagggttgagaggatactcactgcgaggttggttggtctgcgctaatgtacgtgggcgagggcacgatccatgtggtgagtgattactcactcgactgccttattaccatgccaatcatataagattggctcggctcccttcgtgtcttagatttatcgtgcctttcgcttgatctgtttcgcgacactgtcgggagacaaccatctatcaccatggccgccgctcaatccgatgtcgaccacaatggctttctcgccgatgagtctaatgcctaccctccgcatcatgggatgtccgtcgggcaatatctggcaacgcgcattagctcgcttaagcctccaatgaacaaggctccgaatccgatccgtctgctgatgatgctgaaccgctccaactggaactttttcgccattgctttctgtggttggacgtgggatgctttcgacttcttctctgtgtcacttacggctacgagccttgcgaaagatttcgacgtgtctgtcaaggatattacatggggcatcacactcgtcttaatgttgcgatctgttggatccgcaatctttggatacgctgctgatcgctatgggcgcaaatggcccttcattatcaactgcctccttttcattgtaattgaactggcaacgggtttcacgaacacatactcccagtttcttggcgttcgcagtcttttcggcattgctatgggaggtatgtatggcaacgccgctgccacagcgctcgaagatattccagatgaggctcgcggtttgatgagcggtatattacagcaaggttatgcatttggctatttgcttgctaccgcatttgcacgagccctcgtcaacaccacgccatacacctggcggccactcttctggttcggagctgcggttccggctattttcatcgtgtggcgatttttcatgcctgagacgaacacctatattgctcaccaagagcttcgtcggcaaaatggcagcattggcaagactttcatcgctgagggcaaggttgccgtgaagcgccattggcttattctcatttatctcgttcttttaatgacgggattcaacttcatgtctcatggttctcaagatctatacccgactcttcttgagaatcagtttgggttcgataaagatcaggtgaccgtgacccaagttgttgccaacgtcggagctatcactggcggcacggtcgttggtttcagttcacagatattcggccgccgattctccatcatcgcaatgtgtatccttggtggcgctctactatacccctatggattcatttctaacgagagaatcattgccgcggccttctttgagcaattcgcagttcagggtgcatggggcgttgtgcctgttcacttaatggaactgtctccaggcgcattccgaacgttcgttgtcggtacatcttaccaactaggcaacctcgtgtcctctgctagttctaccattgaagcgaccattggtgagaggttccctctaccgccactagaggacggaacctcgagatacgaatacggcaaggtcgttgcgattctgatgggtgccgtctacgcctacacgatcctacttgccgtcttgggccctgagcatctcggcagacgcatggacgtgaaccatgacactgacgcagcggaagcgaccggtcatcacatccctgagaaggtccaccacgcagatggttccggaagcgatattggtgacgccgagaaaggaaattctactcactcataatcttgaaggcagtgtagggttagactcatgaatttacgtgactggatatggagcgggatgaatgatgggctatttgagcgaagcgagcgaatggtaccaacgatgatgatcataaacttccttgactcagcaatttcgcattagataccatcactgcttatgagacgtcgattaatgagactttattatacatactttccagtgcagtgttttgcttctgcaataatgtttgaaccaaacactaagtttcctacgccgttacgtgctagcttcgttcgacttcccttccgttgttgctccggggggttgtctcgtttcttccacctcctgtgtttcaacatctgtggggttcatcgaaggaaactgtgaagccacctcatcgctcacttttgggtcgtcatttgggtttgcgggttgctgctctggttgctgctctggtgtctgctcagattcattctccatttcctcctcggcccctgactcctccttttctggttcctccttttctggttcctccttttctggttcctcctttccttcgtccttatattcctcagtcgaggcaggtagtgtagatggtgatttcgaagtttctggctttgtagcgatgtcctctttctttttagtagactcatgcgtagcttcattcgattcaacctcttttggttcgatctgaggctccacatcttctgattttatctgcgattgaggttgtagttccggttccttttgctcctgctttttagacgtagtatccctgcctactaccgtcgacccattggtcttcttagatggggcactgctttgcgtctggggtgcgctcttctttttcggcggcgtgatcgtcgtctcctctgcttcgtcatcgtcataccaacctggtatcaactcgttatccgcttcaccttcttcctcgtcatcaaatgccttaatcagccttctcgccgcttcacgacccaccactggtaacgactttacgcctttttcctttgctttacttggcactaatttgggatcgagaagcccaacctgtagtaacacacttgcctggtcccaatagatgtgttcatgatacagtaacccaccgcgcaaagtcacaatgctgatcaccattatctcgacccttttctgtgtaggagggacaccaggaagtatccagggcatctcttgcgtgtgcttgaaagcaacgtgtagctcatctaccacacggtccgagcccatggttcgtgagataagcgtgagcttcattgatggtgggttgcagctaaggaaatattgcgaatagaaccgctgtaattcctccgaacctatagcacctgtgagagtaggggagtatgtcacatgtggtgacttgtgtgttgtgtagccagacatggtctttcctagatttcga

SEQ ID NO: 2153 - DNA, 768 bp, Muscodor strobelii
  misc_feature: SGI cDNA ID NO. 560338
  misc_feature: Elevated expression when VOC is produced
  misc_feature: Encodes the peptide sequence at SEQ ID NO 2154
atggcgctgatatctgccgaggagatacccaccttggcccttctctacaaactgaagaagatcgagccttcacttcttggccctgtgcctaccggcacatctgctcacaatgagaaaatcggtgtcattcgtggcgacattaccacactggctgtagatgccatcgtcaatgccgccaacacttctctgcttggaggtgggggtgttgatggagccatccaccgtgctgctggacgtggactcctagcggaatgcaagacgctcaatggttgtgatactggaagctccaagatcaccaacgcctacgaactcccttgccgaaaggtcatccacacggttggtcccgtctatagcgacgccaatgtccacgagagccaagacaagctccacggctgctataagtccagcctgcaactcgccgtcgaaaacggattgaagacgatcgcttttagcggtattagtacaggcatctatggctacccaccccttgacgctgcagtcatcgcttgtcgaactgtgaaggaatttcttgacggtgaggatggcaagaaacttgacaaggtcatctttgtcacctttgagcggaaggacgtccttgcttacagcaccattctgcctcgattcttcccagaaaagaacccagctccaattgctgagcagattgctgaagctgaagcccaggctgctcagctacccagcgtaccgaagactgaccctgccgattccgagcatgttcagaagaagcagaagcaggatgacggtagctag

SEQ ID NO: 2154 - protein, 255 aa, Muscodor strobelii
  misc_feature: SGI Peptide ID NO. 560338
  misc_feature (56)..(169): Pfam Id: PF01661 Pfam Desc: Macro domain
  misc_feature (1)..(253): NCBI GI: 156032822 Blast Desc: SS1G_13817 [Sclerotinia sclerotiorum 1980] gi|154699219|gb|EDN98957.1| SS1G_13817 [Sclerotinia sclerotiorum 1980]
  misc_feature (1)..(248): NCBI GI: 171676886 Blast Desc: protein product [Podospora anserina] gi|170936510|emb|CAP61170.1| protein product [Podospora anserina]
  misc_feature (1)..(253): NCBI GI: 154309011 Blast Desc: BC1G_07400 [Botryotinia fuckeliana B05.10] gi|150852443|gb|EDN27635.1| BC1G_07400 [Botryotinia fuckeliana B05.10]
  misc_feature (1)..(251): NCBI GI: 116196750 Blast Desc: CHGG_04973 [Chaetomium globosum CBS 148.51] gi|88180886|gb|EAQ88354.1| CHGG_04973 [Chaetomium globosum CBS 148.51]
  misc_feature (1)..(250): NCBI GI: 189198521 Blast Desc: MACRO domain containing protein 1 [Pyrenophora tritici-repentis Pt-1C-BFP] gi|187981546|gb|EDU48172.1| MACRO domain containing protein 1 [Pyrenophora tritici-repentis
  misc_feature (6)..(239): NCBI GI: 261359930 Blast Desc: MACRO domain-containing protein [Verticillium albo-atrum VaMs.102]
  misc_feature (2)..(241): NCBI GI: 240106483 Blast Desc: Appr-1-p processing enzyme family protein [Coccidioides posadasii C735 delta SOWgp]
  misc_feature (2)..(241): NCBI GI: 119191426 Blast Desc: CIMG_00090 [Coccidioides immitis RS]
  misc_feature (2)..(239): NCBI GI: 258572997 Blast Desc: protein LRP16 [Uncinocarpus reesii 1704] gi|237900946|gb|EEP75347.1| protein LRP16 [Uncinocarpus reesii 1704]
  misc_feature (4)..(239): NCBI GI: 261193501 Blast Desc: LRP16 family protein [Ajellomyces dermatitidis SLH14081] gi|239588761|gb|EEQ71404.1| LRP16 family protein [Ajellomyces dermatitidis SLH14081] gi|239613915|gb|EEQ90902.1|
  misc_feature (39)..(202): SWISSPROT Homolog: EC 2.4.2.30 NAD(+) ADP-ribosyltransferase
  misc_feature: Useful for introducing or modulating the production of volatile compounds
MALISAEEIPTLALLYKLKKIEPSLLGPVPTGTSAHNEKIGVIRGDITTLAVDAIVNAANTSLLGGGGVDGAIHRAAGRGLLAECKTLNGCDTGSSKITNAYELPCRKVIHTVGPVYSDANVHESQDKLHGCYKSSLQLAVENGLKTIAFSGISTGIYGYPPLDAAVIACRTVKEFLDGEDGKKLDKVIFVTFERKDVLAYSTILPRFFPEKNPAPIAEQIAEAEAQAAQLPSVPKTDPADSEHVQKKQKQDDGS

SEQ ID NO: 2155 - DNA, 1201 bp, Muscodor strobelii
  misc_feature: SGI EST ID NO. CUFF.5431.0
  misc_feature: Variant of the nucleotide sequence at SEQ ID NO 2153
gctaccttcaaaccacaaagaggtacctaagtcgcctcacacttccatccaaacacaaacacgtcgacaaaatagatcattgcgaagctccgccagatattgccatctaggcgcagacaatcaaacctaagtacctcactgctacatgcttcgcgcagtcgccagaatggcgctgatatctgccgaggagatacccaccttggcccttctctacaaactgaagaagatcgagccttcacttcttggccctgtgcctaccggcacatctgctcacaatgagaaaatcggtgtcattcgtggcgacattaccacactggctgtagatgccatcgtcaatgccgccaacacttctctgcttggaggtgggggtgttgatggagccatccaccgtgctgctggacgtggactcctagcggaatgcaagacgctcaatggttgtgatactggaagctccaagatcaccaacgcctacgaactcccttgccgaaaggtcatccacacggttggtcccgtctatagcgacgccaatgtccacgagagccaagacaagctccacggctgctataagtccagcctgcaactcgccgtcgaaaacggattgaagacgatcgcttttagcggtattagtacaggcatctatggctacccaccccttgacgctgcagtcatcgcttgtcgaactgtgaaggaatttcttgacggtgaggatggcaagaaacttgacaaggtcatctttgtcacctttgagcggaaggacgtccttgcttacagcaccattctgcctcgattcttcccagaaaagaacccagctccaattgctgagcagattgctgaagctgaagcccaggctgctcagctacccagcgtaccgaagactgaccctgccgattccgagcatgttcagaagaagcagaagcaggatgacggtagctaggttgagccgccacactgtttacgctctaaggaaatgatgtgatgagagacgctgctcatgactcgacgaggcaagataggtgcgttcggtcaaggagtttagggataggacaaggagttcggcgaaaaaaggtttctctgcctgctcggctgtcacgacctttgatacagaacagaggcgactttgttctattctaaatgcgaatagaaaaaatttgattatcagcagtttgtaacgctccgttgtcacgtcaaaaatcaatttctt

SEQ ID NO: 2156 - DNA, 468 bp, Muscodor strobelii
  misc_feature: SGI cDNA ID NO. 560339
  misc_feature: Encodes the peptide sequence at SEQ ID NO 2157
atggatgccccagttgtagtcatcctggtaggctgggctgttggggtttgcgcgatctggtcgttcatgggcctcaaagagcggaagaaacggcaacccttggacgatgttgagaagggcaatagtgcaaacgataatgcaagttccatcgcgcagagtgaactttcacagcgcgtagcatcgatgcattcatcagttacatcagatgttgccagtcaagccggattgtcgaaagtcagaagcaaattcaagaaacttttcaaagccaaaggcaagaccgaggatcacgatgacgatgctcagtccgaagttgctgcgtccgcgattcgagacttcgagcgttcccgcgtcactggaggccagagagacatgcaagacgtagcactcgacgatctgccgtcgcaaaatgctgcaaaacaaagcacaacaccgtacccaacggaaaaggatgacaatattcctggatag

SEQ ID NO: 2157 - protein, 155 aa, Muscodor strobelii
  misc_feature: SGI Peptide ID NO. 560339
MDAPVVVILVGWAVGVCAIWSFMGLKERKKRQPLDDVEKGNSANDNASSIAQSELSQRVASMHSSVTSDVASQAGLSKVRSKFKKLFKAKGKTEDHDDDAQSEVAASAIRDFERSRVTGGQRDMQDVALDDLPSQNAAKQSTTPYPTEKDDNIPG

SEQ ID NO: 2158 - DNA, 702 bp, Muscodor strobelii
  misc_feature: SGI cDNA ID NO. 560340
  misc_feature: Encodes the peptide sequence at SEQ ID NO 2159
atgttcataatctcttacggcacttacttcttcgagatggccggagtaggaaatgcattcgaaaactcctgtatcttgactggcgcaggagttgcctccttgttattcaatgccctggtcattacgaagtacggacgacggcgagcgatgatgctttccggcttcatactctgtggtctgactcagctggctatggcggttgtgtacacggttgaaccgggtactactagagctggaaaagcccttgtggggttgagcgtcgtctatattgtgtcttataacgccttgatatctacctatgcatggctttcaggcggcgaacttgcttctcagcgcctgcgtagtcatacctttggtttggctacggctgttggcttctttggggcatggcttaccacctttactgcgccgtactttatcaacccttacgagttaaattggggcccgaaatacggatatatctggtttggcagttgtgttatcacagctatttggatttggttctacctgccagaagtcaaggatcgtagactggaagaaatcgacgagatgtttgaggcgaaggtgccggcacgtagattccgaaagtaccaatgcgttggacttcatgcaaccatcgacaaggagcttcatgcaactcatatcgagaacagcaatgagggcaaaaagcaagaacccgaaacgaagacctctgagctgtga

SEQ ID NO: 2159 - protein, 233 aa, Muscodor strobelii
  misc_feature: SGI Peptide ID NO. 560340
  misc_feature (1)..(185): Pfam Id: PF00083 Pfam Desc: Sugar (and other) transporter
  misc_feature (1)..(225): NCBI GI: 212532729 Blast Desc: maltose permease, [Penicillium marneffei ATCC 18224] gi|210071885|gb|EEA25974.1| maltose permease, [Penicillium marneffei ATCC 18224]
  misc_feature (1)..(232): NCBI GI: 189207749 Blast Desc: conserved [Pyrenophora tritici-repentis Pt-1C-BFP] gi|187976301|gb|EDU42927.1| conserved [Pyrenophora tritici-repentis Pt-1C-BFP]
  misc_feature (1)..(232): NCBI GI: 116194081 Blast Desc: CHGG_06758 [Chaetomium globosum CBS 148.51] gi|88182671|gb|EAQ90139.1| CHGG_06758 [Chaetomium globosum CBS 148.51]
  misc_feature (1)..(224): NCBI GI: 39972779 Blast Desc: MGG_07691 [Magnaporthe grisea 70-15] gi|145016913|gb|EDK01343.1| MGG_07691 [Magnaporthe grisea 70-15]
  misc_feature (1)..(228): NCBI GI: 170940358 Blast Desc: protein product [Podospora anserina]
  misc_feature (1)..(201): NCBI GI: 256726309 Blast Desc: NECHADRAFT_94696 [Nectria haematococca mpVI 77-13-4]
  misc_feature (1)..(202): NCBI GI: 189195986 Blast Desc: sugar transport protein 4 [Pyrenophora tritici-repentis Pt-1C-BFP] gi|187980210|gb|EDU46836.1| sugar transport protein 4 [Pyrenophora tritici-repentis Pt-1C-BFP]
  misc_feature (1)..(220): NCBI GI: 169615048 Blast Desc: SNOG_10678 [Phaeosphaeria nodorum SN15] gi|160702873|gb|EAT82072.2| SNOG_10678 [Phaeosphaeria nodorum SN15]
  misc_feature (1)..(163): NCBI GI: 164424540 Blast Desc: NCU07054 [Neurospora crassa OR74A] gi|157070557|gb|EAA30900.2| conserved [Neurospora crassa OR74A]
  misc_feature (1)..(229): NCBI GI: 169596749 Blast Desc: SNOG_01143 [Phaeosphaeria nodorum SN15] gi|160707365|gb|EAT90792.2| SNOG_01143 [Phaeosphaeria nodorum SN15]
MFIISYGTYFFEMAGVGNAFENSCILTGAGVASLLFNALVITKYGRRRAMMLSGFILCGLTQLAMAVVYTVEPGTTRAGKALVGLSVVYIVSYNALISTYAWLSGGELASQRLRSHTFGLATAVGFFGAWLTTFTAPYFINPYELNWGPKYGYIWFGSCVITAIWIWFYLPEVKDRRLEEIDEMFEAKVPARRFRKYQCVGLHATIDKELHATHIENSNEGKKQEPETKTSEL

SEQ ID NO: 2160 - DNA, 963 bp, Muscodor strobelii
  misc_feature: SGI EST ID NO. CUFF.5445.0
  misc_feature: Variant of the nucleotide sequence at SEQ ID NO 2158
cgaaaactcctgtatcttgactggcgcaggagttgcctccttgttattcaatgccctggtcattacgaagtacggacgacggcgagcgatgatgctttccggcttcatactctgtggtctgactcagctggctatggcggttgtgtacacggttgaaccgggtactactagagctggaaaagcccttgtggggttgagcgtcgtctatattgtgtcttataacgccttgatatctacctatgcatggctttcaggcggcgaacttgcttctcagcgcctgcgtagtcatacctttggtttggctacggctgttggcttctttggggcatggcttaccacctttactgcgccgtactttatcaacccttacgagttaaattggggcccgaaatacggatatatctggtttggcagttgtgttatcacagctatttggatttggttctacctgccagaagtcaaggatcgtagactggaagaaatcgacgagatgtttgaggcgaaggtgccggcacgtagattccgaaagtaccaatgcgttggacttcatgcaaccatcgacaaggagcttcatgcaactcatatcgagaacagcaatgagggcaaaaagcaagaacccgaaacgaagacctctgagctgtgagtgaagcgatacgagctcgagatcgcattcttgagccctatgttacaattcgtgacggactctgcttcacgagagaaagtaaatgtgtttagcgtatgccacgccgggtgatgatacccggaaactgacacaacgactgctgagagtggtgtgagatatagcatagtgtgttgggggatttctgcttaaagactgatcaaaacgagtgctgcggtcgttgaggaatgtcaggcaatatctgatcgaataatacatattcttactgtttctttttgtttccccgcgcataacagcattctgggcctcacagtaacacgaac

SEQ ID NO: 2161 - DNA, 1290 bp, Muscodor strobelii
  misc_feature: SGI cDNA ID NO. 560341
  misc_feature: Encodes the peptide sequence at SEQ ID NO 2162
atggctgatgttccaaatggaagtcaccggtcaccgacaggcatcaaagtgatcgtagtcggtgctggcttcggcggcctgggtgcagcaattgaatgccatcgacaaggtcatgacgtcgagatttttgaagcatttccagagctgaaagctctcggcgacataatatctttcatgccaaatgcaggtcgaatcttctacagatggtctaacggtgaaatagtccgtcgattacgacctcttagcattgatctgaggaaatacggtttcaacatccataaatatgatacgggcgagattgtgatcaatcaaccgaatccggggtttgacgagaaggcacccaatttcaatgggcaccgaggagagctgcatgaggttgtgtttaactatgcgaaagatgatttgggcattcctattcatctagggcagaagattggcagctacttcgaggatgagaatgaagcagggatcgtgcttgaaaacggcgacaagataacagcggacgttgttattgccgcggacggcgttcgatcaagagctagaaagattgttcttggctacgaagataaacccaagagcagcggatatgccgtgtggcgagcttggttctcaaacgaagacatgctcgcagatccactgacttctcagtactgcgagaacggtgacacgttcaatggctggatagggccggatatgcatttcttattttcgacaatcaaaaatggctcggactgctgttgggtcctgacacatcctgatgtccatgatatcgatgagtcgtggagctttcccgggaagctatcggaagtgcaagaagcggtgaaagattgggacccaatgtgttggaggatcatgtcgaaaactccagaggacaaagtagtcgactggaaactagtgtatcgtgacccattgccaacatgggtctcccctaaagcacgaattgttctcctaggcgatgccgcacatcctttcctacccacaagtgctcagggagcaacgcaagctctagaagatggggtttgtcttgcaatatgtctacgtcgcggcaagaaagaaaacgtgcctgtatccgttagagcacatgagaagattcgatatgatcgcgtccgcgaaacgcaaaagactggcgagacgacgcgagatatgtggcataagacggattgggcaaaggtgaaggagaaccctgaaattatccagttcccgagacaagattggatattccagtttgatgtggagaaggagactgaaaatatttatgatagcgtcgttagagacatggctcctgcatga

SEQ ID NO: 2162 - protein, 429 aa, Muscodor strobelii
  misc_feature: SGI Peptide ID NO. 560341
  misc_feature (16)..(296): Pfam Id: PF01266 Pfam Desc: FAD dependent oxidoreductase
  misc_feature (11)..(427): NCBI GI: 256725906 Blast Desc: NECHADRAFT_43749 [Nectria haematococca mpVI 77-13-4]
  misc_feature (11)..(427): NCBI GI: 171682920 Blast Desc: protein product [Podospora anserina] gi|170941419|emb|CAP67070.1| protein product [Podospora anserina]
  misc_feature (11)..(427): NCBI GI: 46115708 Blast Desc: FG03696.1 [Gibberella zeae PH-1]
  misc_feature (4)..(424): NCBI GI: 212532731 Blast Desc: MAK1-like monooxygenase, [Penicillium marneffei ATCC 18224] gi|210071886|gb|EEA25975.1| MAK1-like monooxygenase, [Penicillium marneffei ATCC 18224]
  misc_feature (6)..(424): NCBI GI: 189207751 Blast Desc: monoxygenase [Pyrenophora tritici-repentis Pt-1C-BFP] gi|187976302|gb|EDU42928.1| monoxygenase [Pyrenophora tritici-repentis Pt-1C-BFP]
  misc_feature (4)..(424): NCBI GI: 242776268 Blast Desc: MAK1-like monooxygenase, [Talaromyces stipitatus ATCC 10500] gi|218722430|gb|EED21848.1| MAK1-like monooxygenase, [Talaromyces stipitatus ATCC 10500]
  misc_feature (1)..(418): NCBI GI: 169615050 Blast Desc: SNOG_10679 [Phaeosphaeria nodorum SN15] gi|111060953|gb|EAT82073.1| SNOG_10679 [Phaeosphaeria nodorum SN15]
  misc_feature (10)..(424): NCBI GI: 85095757 Blast Desc: NCU07055 [Neurospora crassa OR74A] gi|28921620|gb|EAA30908.1| conserved [Neurospora crassa OR74A]
  misc_feature (29)..(427): NCBI GI: 116203293 Blast Desc: conserved [Chaetomium globosum CBS 148.51] gi|88178049|gb|EAQ85517.1| conserved [Chaetomium globosum CBS 148.51]
  misc_feature (10)..(422): NCBI GI: 145608542 Blast Desc: MGG_06552 [Magnaporthe grisea 70-15] gi|145016007|gb|EDK00497.1| MGG_06552 [Magnaporthe grisea 70-15]
  misc_feature (35)..(394): SWISSPROT Homolog: EC 1.14.13.24 3-hydroxybenzoate 6-monooxygenase
MADVPNGSHRSPTGIKVIVVGAGFGGLGAAIECHRQGHDVEIFEAFPELKALGDIISFMPNAGRIFYRWSNGEIVRRLRPLSIDLRKYGFNIHKYDTGEIVINQPNPGFDEKAPNFNGHRGELHEVVFNYAKDDLGIPIHLGQKIGSYFEDENEAGIVLENGDKITADVVIAADGVRSRARKIVLGYEDKPKSSGYAVWRAWFSNEDMLADPLTSQYCENGDTFNGWIGPDMHFLFSTIKNGSDCCWVLTHPDVHDIDESWSFPGKLSEVQEAVKDWDPMCWRIMSKTPEDKVVDWKLVYRDPLPTWVSPKARIVLLGDAAHPFLPTSAQGATQALEDGVCLAICLRRGKKENVPVSVRAHEKIRYDRVRETQKTGETTRDMWHKTDWAKVKENPEIIQFPRQDWIFQFDVEKETENIYDSVVRDMAPA

SEQ ID NO: 2163 - DNA, 525 bp, Muscodor strobelii
  misc_feature: SGI EST ID NO. CUFF.5449.0
  misc_feature: Variant of the nucleotide sequence at SEQ ID NO 2161
ttgggacccaatgtgttggaggatcatgtcgaaaactccagaggacaaagtagtcgactggaaactagtgtatcgtgacccattgccaacatgggtctcccctaaagcacgaattgttctcctaggcgatgccgcacatcctttcctacccacaagtgctcagggagcaacgcaagctctagaagatggggtttgtcttgcaatatgtctacgtcgcggcaagaaagaaaacgtgcctgtatccgttagagcacatgagaagattcgatatgatcgcgtccgcgaaacgcaaaagactggcgagacgacgcgagatatgtggcataagacggattgggcaaaggtgaaggagaaccctgaaattatccagttcccgagacaagattggatattccagtttgatgtggagaaggagactgaaaatatttatgatagcgtcgttagagacatggctcctgcatgaggtctggttttcatttgaagtacacgtctttagaggcagtcaggtagctatatagggtgtgt

SEQ ID NO: 2164 - DNA, 1020 bp, Muscodor strobelii
  misc_feature: SGI cDNA ID NO. 560342
  misc_feature: Encodes the peptide sequence at SEQ ID NO 2165
atgactacaactagaccagaatggggggaaaggcaatctgcattggcggtagcaagtgaatatgcagatagaatccgcgggaaaaacattcttatcaccggtgttgcaccggagggtgtaggcgaaggtaccgcgaatgcattcgcctcgcaaaagcccgccaatttgattctgctgtcgagaacaaaatccaaacttgatgccgtagcagactccatccggggttcgtatcccgagaccacagtccacacagtagttgtggacctggggtctcagaaatcgatccgaggagctgcggaagaagtcaaaagccttgtagaaaccctcgataccatcgtgaataatgccggctgcactcttcggctaagacaatggactgaagaagggatagaaatgcaacttggtgcaaaccacgttggtcatttccttcttgtaaaacttctatatccactgctcaaagcagcagcgaggaaatcaccaaaaggagctactcgtgtaatcaacctctcaagtcacggtcataggctatcgccaattcggttccatgattacaacatagagaacaagacggctttgcctcctgaagaacagcccgcctcccccatgccgccttcgtttgccaagaagcaaccggatgggtatcagtcgattattgcctatgctcaaagtaaaacggcaaacgtcctcttcaccttgtctttacaggagcatgcggaatcatcgggaatcatgtcgtacgctgtgcatccaggatctgtgacgagccatctcggacgagagcacgagccagatgtcgcagagtcaatagcacagacggcgaagtactggaaaactagtgatgaaggcgcgtcgacaacacttgttgcttgtctggaccccatgctcgacgatcgacaagccctatatctatcggactgtcaattcttcccttgtgctgattttgcgagagactcgaacacggctcagcgcctgtggcaactgagtgagaagttgatcggagaaagcttcgtcgttgattaa

SEQ ID NO: 2165 - protein, 339 aa, Muscodor strobelii
  misc_feature: SGI Peptide ID NO. 560342
  misc_feature (2)..(336): NCBI GI: 169615052 Blast Desc: SNOG_10680 [Phaeosphaeria nodorum SN15] gi|160702874|gb|EAT82074.2| SNOG_10680 [Phaeosphaeria nodorum SN15]
  misc_feature (2)..(332): NCBI GI: 189207753 Blast Desc: retinol dehydrogenase 13 [Pyrenophora tritici-repentis Pt-1C-BFP] gi|187976303|gb|EDU42929.1| retinol dehydrogenase 13 [Pyrenophora tritici-repentis Pt-1C-BFP]
  misc_feature (35)..(338): NCBI GI: 171678235 Blast Desc: protein product [Podospora anserina] gi|170937187|emb|CAP61844.1| protein product [Podospora anserina]
  misc_feature (7)..(296): NCBI GI: 116205730 Blast Desc: CHGG_02158 [Chaetomium globosum CBS 148.51] gi|88182755|gb|EAQ90223.1| CHGG_02158 [Chaetomium globosum CBS 148.51]
  misc_feature (3)..(333): NCBI GI: 242776273 Blast Desc: short-chain dehydrogenase, [Talaromyces stipitatus ATCC 10500] gi|218722431|gb|EED21849.1| short-chain dehydrogenase, [Talaromyces stipitatus ATCC 10500]
  misc_feature (3)..(339): NCBI GI: 85093255 Blast Desc: NCU08164 [Neurospora crassa OR74A] gi|28921103|gb|EAA30420.1| [Neurospora crassa OR74A]
  misc_feature (4)..(333): NCBI GI: 212532733 Blast Desc: short-chain dehydrogenase, [Penicillium marneffei ATCC 18224] gi|210071887|gb|EEA25976.1| short-chain dehydrogenase, [Penicillium marneffei ATCC 18224]
  misc_feature (3)..(336): NCBI GI: 226291192 Blast Desc: retinol dehydrogenase [Paracoccidioides brasiliensis Pb18]
  misc_feature (3)..(338): NCBI GI: 256726310 Blast Desc: NECHADRAFT_82086 [Nectria haematococca mpVI 77-13-4]
  misc_feature (3)..(336): NCBI GI: 226281700 Blast Desc: retinol dehydrogenase [Paracoccidioides brasiliensis Pb01]
  misc_feature (25)..(333): SWISSPROT Homolog: EC 1.3.1.33 Protochlorophyllide reductase
MTTTRPEWGERQSALAVASEYADRIRGKNILITGVAPEGVGEGTANAFASQKPANLILLSRTKSKLDAVADSIRGSYPETTVHTVVVDLGSQKSIRGAAEEVKSLVETLDTIVNNAGCTLRLRQWTEEGIEMQLGANHVGHFLLVKLLYPLLKAAARKSPKGATRVINLSSHGHRLSPIRFHDYNIENKTALPPEEQPASPMPPSFAKKQPDGYQSIIAYAQSKTANVLFTLSLQEHAESSGIMSYAVHPGSVTSHLGREHEPDVAESIAQTAKYWKTSDEGASTTLVACLDPMLDDRQALYLSDCQFFPCADFARDSNTAQRLWQLSEKLIGESFVVD

SEQ ID NO: 2166 - DNA, 3168 bp, Muscodor strobelii
  misc_feature: SGI cDNA ID NO. 560343
  misc_feature: Encodes the peptide sequence at SEQ ID NO 2167
atgcctactctccagatcaccccagacacgcccgacctcctccagcatgtggccgacatgctcaccaagtcccgcaagatggtcatcatcaccggcgcaggcatcagcacaaactcgggcattcccgatttccggtccgagaacggcctgtactccctgatccaggaacaattcgagcgtgccgaagccaatgccaggaaagaactcgagcaagacgaccaatcatccttcgacatcaacaacagaccctcgaagcgaaggagactgtctggtcccgacagtgatgcttcctccgagccaaacactctggatcagcccttgacgtcgtccacccaagccaatgcatctgagaaagagacgtcacctgccacagatgctggctcaggcacctcaagcgctgagacgacacacgcgcacacccccgcgcccgaaacggaagagaaccctttccggcgccttacacgatcacgcatgaatgctctacgaccaccaatacctcggcatctaacacaggagtccataggttcgtcgacgacccgaggctcgacgtcttcagatcaggcacaatcctctagctcgtcgcaaacagatgtctctgtcgcagacgacgccattgaacgagcaagccctaagcccactatttatacacccaaaagaacgcgtcttgacctcacgagctcatcgcctttgtcgtccccgccgccgattctctttgatccgtatgaaaatttgaactcgtccaccgacggcagttctcctatggacacggattcgttcgaaggctcggattgtgacgaaacacagcagtcgatggacccgttttccttgcaaaactctaactctaacattcggaacatgaaaggacgtgatctttttgattgcaacatatgggccgatccattgaagacatctgttttctaccgtttcgccacgtcattgcggcagcgcgtgaaggaagtcgagcctacagtcacgcatcgtttcattgctcaaatgcgtgatgttgggaagcttgccagggtctacacccagaatatcgacgaaatcgaaaagaaaatcggcctctcgactgacttgaagcatggcgccggcaataagaggaggaaatccaccaagcagccacttccagagccaggaaaactcgagaaagagagcccagagtctctcgatgatggacatacacggagtggcgtggatccggcgcaagctgatcagcaatcagaagatcaaacgctggctaaatcccgacagagcacgaaccctgacaaaggcgttgagtgtgttttcttacacgggtctctgcactctctgcggtgcttcgtctgcggtaaactctgtgattgggatgaagagggccgtgagtcgtgtacattatctggcgaacagccagaatgcccacattgcgcaggcgctactgctgcccgcctagagagaggaaaacgagccctagggataggcaagctacgcccggatatcgttctgtatggcgaagaacatcctcaatcggacttgatatcgcccatcgtgcagcacgatctcgcagggaatccagatttgcttctcgtactcggaaccagcctccgtgtacacggtctcaaggtcatggtaagggaattcgccaaggctgtccacaagaagggtggtaaggttgtcttcatcaactttaccaagccgtctgacagtgtttggggagatgtgcttgactactggatcgattgggactgcgacgcctgggttgaggacttaaaatctcgcaagccaaatctttggctctctctggaagagctccaagaacttgacagacagaagcgcgaagccttagctgacaagaaaagagaaacattgaaaaagcgagagagtatgaacgagaagaagagagagagtatcggagataaagatcagcagacctcggaagaactcaaacctcggattccgcccaagaaccctgcggctatgcggaatgactaccactgtggtgcatatgttgtgtgggagatattccaaactctcgcaaagataggaggtcgtccctttgacaagcttggatatacagcgcccactgctagccctagtcaggacccgaaactgcaagaatcctcaagtggcgcgacagacactaaaattgagccttgtatcacagctgcaggcacccaaccaggtcccaaagtcgaaggagagcagagaccagatgcgaagaaaatacgacatcgtctgccaacgaaacgttccgcttcacggcgcacgaaactccagcccagcacagacccggttcgcacctcgatacaaccatcgacccctagtggtgaggctgtgaacaaactttcactgtccagtgcgacgagcttgcctcaaccgctcaataatcatcaggaccagaaggtaatagtcaaagcctccaaagctaggaggaaccgaaagtcggcgcccgccgtcctagattccgttaccaatacaggtcatcagccccagggtgtagcgcaagaaaaaggccacgaccagagcgttggaaaggaccagtatttgaaagctgtcagacaattagcgaaatcaaggaagacgccgacgccgaggcactcgatgcccagcaatatatcagctacgccagatcatcagcatctatctttcgaaccatactcagctcctctccatccagctctcaaacttcgtcctattcaagaacaagcgcgaatagacgaaagtcatggtatgcatttgaccaccccttacatggcacagccgcggcccatactcccaccaccagactgctatacgtcgagccaacctggttcggctcatcatctttccgccatgacggtatcacgggttgagaccaactacaaaggtcctgcgctcgcgcctcttcttagttggaatttgaaaaagtctcccccggaaaagatcaagccgatggagccatcgccgttgttctcgccattgagtcctctggctgacatgagaacaagtccaacgcagccaccctacacagccatgcatccacctaagcaggtcattcataatagatcgctgatggaagcaccaaatcagccaggtccgcgaaacatgagatcagatttgttcagatcgccacacgacaacacacccagtccttcggaccagttacgactagaagccgcgtatcagctctcgcaaatgagcggaaaggcatga

SEQ ID NO: 2167 - protein, 1055 aa, Muscodor strobelii
  misc_feature: SGI Peptide ID NO. 560343
  misc_feature (284)..(531): Pfam Id: PF02146 Pfam Desc: Sir2 family
  misc_feature (32)..(52): Pfam Id: PF02146 Pfam Desc: Sir2 family
  misc_feature (430)..(531): Pfam Id: PF02146 Pfam Desc: Sir2 family
  misc_feature (304)..(358): Pfam Id: PF02146 Pfam Desc: Sir2 family
  misc_feature (236)..(675): NCBI GI: 261360046 Blast Desc: hst3 protein [Verticillium albo-atrum VaMs.102]
  misc_feature (236)..(696): NCBI GI: 46111169 Blast Desc: FG02466.1 [Gibberella zeae PH-1]
  misc_feature (238)..(675): NCBI GI: 256726041 Blast Desc: NECHADRAFT_81543 [Nectria haematococca mpVI 77-13-4]
  misc_feature (278)..(591): NCBI GI: 85091876 Blast Desc: NCU04859 [Neurospora crassa OR74A] gi|28920516|gb|EAA29880.1| [Neurospora crassa OR74A]
  misc_feature (236)..(586): NCBI GI: 145616472 Blast Desc: MGG_09320 [Magnaporthe grisea 70-15] gi|145010107|gb|EDJ94763.1| MGG_09320 [Magnaporthe grisea 70-15]
  misc_feature (285)..(591): NCBI GI: 156059336 Blast Desc: SS1G_03680 [Sclerotinia sclerotiorum 1980] gi|154701467|gb|EDO01206.1| SS1G_03680 [Sclerotinia sclerotiorum 1980]
  misc_feature (285)..(590): NCBI GI: 154317254 Blast Desc: BC1G_03529 [Botryotinia fuckeliana B05.10] gi|150844946|gb|EDN20139.1| BC1G_03529 [Botryotinia fuckeliana B05.10]
  misc_feature (236)..(533): NCBI GI: 116197120 Blast Desc: CHGG_05158 [Chaetomium globosum CBS 148.51] gi|88181071|gb|EAQ88539.1| CHGG_05158 [Chaetomium globosum CBS 148.51]
  misc_feature (286)..(596): NCBI GI: 255732329 Blast Desc: CTRG_05386 [Candida tropicalis MYA-3404] gi|240131374|gb|EER30934.1| CTRG_05386 [Candida tropicalis MYA-3404]
  misc_feature (288)..(641): NCBI GI: 156840997 Blast Desc: Kpol_495p15 [Vanderwaltozyma polyspora DSM 70294] gi|156114503|gb|EDO16017.1| Kpol_495p15 [Vanderwaltozyma polyspora DSM 70294]
MPTLQITPDTPDLLQHVADMLTKSRKMVIITGAGISTNSGIPDFRSENGLYSLIQEQFERAEANARKELEQDDQSSFDINNRPSKRRRLSGPDSDASSEPNTLDQPLTSSTQANASEKETSPATDAGSGTSSAETTHAHTPAPETEENPFRRLTRSRMNALRPPIPRHLTQESIGSSTTRGSTSSDQAQSSSSSQTDVSVADDAIERASPKPTIYTPKRTRLDLTSSSPLSSPPPILFDPYENLNSSTDGSSPMDTDSFEGSDCDETQQSMDPFSLQNSNSNIRNMKGRDLFDCNIWADPLKTSVFYRFATSLRQRVKEVEPTVTHRFIAQMRDVGKLARVYTQNIDEIEKKIGLSTDLKHGAGNKRRKSTKQPLPEPGKLEKESPESLDDGHTRSGVDPAQADQQSEDQTLAKSRQSTNPDKGVECVFLHGSLHSLRCFVCGKLCDWDEEGRESCTLSGEQPECPHCAGATAARLERGKRALGIGKLRPDIVLYGEEHPQSDLISPIVQHDLAGNPDLLLVLGTSLRVHGLKVMVREFAKAVHKKGGKVVFINFTKPSDSVWGDVLDYWIDWDCDAWVEDLKSRKPNLWLSLEELQELDRQKREALADKKRETLKKRESMNEKKRESIGDKDQQTSEELKPRIPPKNPAAMRNDYHCGAYVVWEIFQTLAKIGGRPFDKLGYTAPTASPSQDPKLQESSSGATDTKIEPCITAAGTQPGPKVEGEQRPDAKKIRHRLPTKRSASRRTKLQPSTDPVRTSIQPSTPSGEAVNKLSLSSATSLPQPLNNHQDQKVIVKASKARRNRKSAPAVLDSVTNTGHQPQGVAQEKGHDQSVGKDQYLKAVRQLAKSRKTPTPRHSMPSNISATPDHQHLSFEPYSAPLHPALKLRPIQEQARIDESHGMHLTTPYMAQPRPILPPPDCYTSSQPGSAHHLSAMTVSRVETNYKGPALAPLLSWNLKKSPPEKIKPMEPSPLFSPLSPLADMRTSPTQPPYTAMHPPKQVIHNRSLMEAPNQPGPRNMRSDLFRSPHDNTPSPSDQLRLEAAYQLSQMSGKA

SEQ ID NO: 2168 - DNA, 5726 bp, Muscodor strobelii
  misc_feature: SGI EST ID NO. CUFF.5479.1
  misc_feature: Variant of the nucleotide sequence at SEQ ID NO 2166
aattgggagtgaaagtgtcgttactgaaatttcgacagcgcgtcaagcagtctctggtaccttaggtactgtaaactgtacagtgcacttagagcctccacgacttcagcccgccctcgcactcactatcgcgccaggcgcgccagacacgcctcgccctacaattcgcccttctttccaccaccgacgccagacggacaccgaggacctctacattgacaccagaccagcatcatgaccatcaattgttgacttcagtctcgccttcccatgctcccggcacctgcgcgtcccgcgctgagtccgcactcacatacgcgagccctcgctcgactgggtccaatatgcctactctccagatcaccccagacacgcccgacctcctccagcatgtggccgacatgctcaccaagtcccgcaagatggtcatcatcaccggcgcaggcatcagcacaaactcgggcattcccgatttccggtccgagaacggcctgtactccctgatccaggaacaattcgagcgtgccgaagccaatgccaggaaagaactcgagcaagacgaccaatcatccttcgacatcaacaacagaccctcgaagcgaaggagactgtctggtcccgacagtgatgcttcctccgagccaaacactctggatcagcccttgacgtcgtccacccaagccaatgcatctgagaaagagacgtcacctgccacagatgctggctcaggcacctcaagcgctgagacgacacacgcgcacacccccgcgcccgaaacggaagagaaccctttccggcgccttacacgatcacgcatgaatgctctacgaccaccaatacctcggcatctaacacaggagtccataggttcgtcgacgacccgaggctcgacgtcttcagatcaggcacaatcctctagctcgtcgcaaacagatgtctctgtcgcagacgacgccattgaacgagcaagccctaagcccactatttatacacccaaaagaacgcgtcttgacctcacgagctcatcgcctttgtcgtccccgccgccgattctctttgatccgtatgaaaatttgaactcgtccaccgacggcagttctcctatggacacggattcgttcgaaggctcggattgtgacgaaacacagcagtcgatggacccgttttccttgcaaaactctaactctaacattcggaacatgaaaggacgtgatctttttgattgcaacatatgggccgatccattgaagacatctgttttctaccgtttcgccacgtcattgcggcagcgcgtgaaggaagtcgagcctacagtcacgcatcgtttcattgctcaaatgcgtgatgttgggaagcttgccagggtctacacccagaatatcgacgaaatcgaaaagaaaatcggcctctcgactgacttgaagcatggcgccggcaataagaggaggaaatccaccaagcagccacttccagagccaggaaaactcgagaaagagagcccagagtctctcgatgatggacatacacggagtggcgtggatccggcgcaagctgatcagcaatcagaagatcaaacgctggctaaatcccgacagagcacgaaccctgacaaaggcgttgagtgtgttttcttacacgggtctctgcactctctgcggtgcttcgtctgcggtaaactctgtgattgggatgaagagggccgtgagtcgtgtacattatctggcgaacagccagaatgcccacattgcgcaggcgctactgctgcccgcctagagagaggaaaacgagccctagggataggcaagctacgcccggatatcgttctgtatggcgaagaacatcctcaatcggacttgatatcgcccatcgtgcagcacgatctcgcagggaatccagatttgcttctcgtactcggaaccagcctccgtgtacacggtctcaaggtcatggtaagggaattcgccaaggctgtccacaagaagggtggtaaggttgtcttcatcaactttaccaagccgtctgacagtgtttggggagatgtgcttgactactggatcgattgggactgcgacgcctgggttgaggacttaaaatctcgcaagccaaatctttggctctctctggaagagctccaagaacttgacagacagaagcgcgaagccttagctgacaagaaaagagaaacattgaaaaagcgagagagtatgaacgagaagaagagagagagtatcggagataaagatcagcagacctcggaagaactcaaacctcggattccgcccaagaaccctgcggctatgcggaatgactaccactgtggtgcatatgttgtgtgggagatattccaaactctcgcaaagataggaggtcgtccctttgacaagcttggatatacagcgcccactgctagccctagtcaggacccgaaactgcaagaatcctcaagtggcgcgacagacactaaaattgagccttgtatcacagctgcaggcacccaaccaggtcccaaagtcgaaggagagcagagaccagatgcgaagaaaatacgacatcgtctgccaacgaaacgttccgcttcacggcgcacgaaactccagcccagcacagacccggttcgcacctcgatacaaccatcgacccctagtggtgaggctgtgaacaaactttcactgtccagtgcgacgagcttgcctcaaccgctcaataatcatcaggaccagaaggtaatagtcaaagcctccaaagctaggaggaaccgaaagtcggcgcccgccgtcctagattccgttaccaatacaggtcatcagccccagggtgtagcgcaagaaaaaggccacgaccagagcgttggaaaggaccagtatttgaaagctgtcagacaattagcgaaatcaaggaagacgccgacgccgaggcactcgatgcccagcaatatatcagctacgccagatcatcagcatctatctttcgaaccatactcagctcctctccatccagctctcaaacttcgtcctattcaagaacaagcgcgaatagacgaaagtcatggtatgcatttgaccaccccttacatggcacagccgcggcccatactcccaccaccagactgctatacgtcgagccaacctggttcggctcatcatctttccgccatgacggtatcacgggttgagaccaactacaaaggtcctgcgctcgcgcctcttcttagttggaatttgaaaaagtctcccccggaaaagatcaagccgatggagccatcgccgttgttctcgccattgagtcctctggctgacatgagaacaagtccaacgcagccaccctacacagccatgcatccacctaagcaggtcattcataatagatcgctgatggaagcaccaaatcagccaggtccgcgaaacatgagatcagatttgttcagatcgccacacgacaacacacccagtccttcggaccagttacgactagaagccgcgtatcagctctcgcaaatgagcggaaaggcatgaaataggcatcacggaaaccacgtatttgtatagagcgaaacatcatagatacccatcatcattatcattgttcaaagatagtggacgttcgtgaaattttcagaattgcagcgttgtcaataaccttgcgtgaattatatgagagcaaggtatcttttatcatctatctacaagccggtcttgcaaccacgtgtgctcgttcttgacactgcccgattgccgttgacgtaaaaaaattaggttaaggtgagtcgttttggttcgtttcgcggaaaattcccggagcctgatacacccctctttctgttttatccttgttatcaaaatctaaaaacatatcatcaatcttggcaagaccttcggcatgagctttcaactctgacgtcagcgtcgtgcggttcgcatatgcgttgggaaatggcagaattgtgttaggtgcaacttgtagtccctggggacctcccattcgcgcttgttggcttcgtatcacatctggtaagttggcactattcaggactgcttgcgagacgccgcccaatgcccttctatccggagatcgacgagtggttatcctaccacttgccactctcctcaaggcattttcacctaacccatatttcgtgaaagcttcacgtcccgaagctcgtcgtggtggaccaccacctaatcttgatggcccgccgggtgttccaaaaactataccgcccgttccggcagaggacgatgactgaggacgagccaaatcgccgctcataggcatctcaggaacgaagactggtggcggaggttcccttctcagtcctgagaagtcaaagagtccacgtcgtttgttagtgatgtctcctgctatgggatcccaggatggcaaatcccgcagcagtttctcaacctctgctacagaggcaggtccctgtatttcgagtgcgttgccgtggtaagcattgagctcgctgagtacctcatccaccactcgacggattacagggtccgcgcgactgtattcacgaaatgcgagtttctcgaggcgctgggagttcagcttccaatatgccgaaggtatacgaggaaatctgcttctccaattctgattggaggggtcgattgtgtcgcgtgtatcaatacaatgcacgagagtcaggtaattttgcctgatagcctcgaaacgtgctcgccacgcgtcgaacttatccttgacctcgaaaagagctgaaactgtcatcaatgtcccagtcgtgaaagtgatgttctcgcaaaacttgatacatgagagcatacgagcataagctacgccaagcggagtagtagcaccttgcacctggccggcgtacaagaagctacgtctttgaggatcaactgtgaggaagtcgaataccatgcgctcgaggataccgagatcctctcgcataagctcataaacatctacaaggcgggtcatgatccacccaccatcgcgaaattccgaaacgaagttatcctctaactctgcatcccattcgtcacgcgttttgggattggggccattttcaacggagtatttcacataaagtgcgtctctgaaggctccttcgctatgccagtcgtcgcacagtcttttcccctcagcaaactcgtcgtgtagaatcccgcaggcctcctcaagcggatcgacgatatttggccgccagagtgcgacatcttccgcccatcgatggagcatctggtttcgaccaagcacctcaatcaagagggcatgtatatattccgccaggataccgtgacgcccgtctcttaagatcttgggtacggcattaaggaattgccacctgttgtcgccgaatgtttgaagtcccgtggcgtgatctagtccgtgctgacgcataagacttaagaggggctgggagcccggcagttttttaaaagctgcatgtccatactggttgtacacctcagtccaccagtctttggtgaaatattgggctatgtgcgagatcggaattggcctattgtataagtcaaagccgggctgaacggtatggagcagaatgggctcgtcagttccgctaggccatgggagcgccgctacggctatcgggagcgcccgcaaaaaattagctggggaaccctcgaacaaatggacgatgttgtgaccccagatcgcattctctaactgattacccacttcgcagtaccctacgtcctcgaaagttggctcgccgttacctgccgtcaaatccc

SEQ ID NO: 2169 - DNA, 3141 bp, Muscodor strobelii
  misc_feature: SGI cDNA ID NO. 560344
  misc_feature: Encodes the peptide sequence at SEQ ID NO 2170
atggttgatttcgtgaaccaagtcgacatgctgagcgacagggaaagagaggaggctgagcgattgagtaaaaagatctactccagagacaaacagacggctcctcaggggcaagagattcttcccatagttatgtcggaaattttaaaacagcatggggtgctgaacaatgtcgcgttgatgtctttcctgcgacattattctaccactacttttaacctgaatcaaattttcgaagacatgaacaagaagaatcccgatcacaaaaaagcgcatatgactttcttcgatatggtgcaacaggatcaggactatcaacgactgctcatagcggacatgaccaccgacgaagccatacagcacggcattcacacaatggatgataatgtcccagatccagacctggataacccaattattcctttattcgcgagacagagatgggataactccgcctggagaggggctcagagaagatcgccaaagtatgcgtatagcctcgggaacagtagagaattatgggatgtgacgacaaacgataaattatggactgttctgcagcctgccctgcgacttgcctcgaaagttttcatgaccaagcatccgcactatgaagcccttttcgacatgagaactaggcaaaggatagattaccgacgagatggaagaaagaaccctcggacacctcagctcgccaagtatgttttgccagaggatattgatatgaggctgacctggccccaaatccgtgaactgcacgaagtccacaactacgactggaagaccgaagttatcaattttctccgagcgcatttgcgcctcgacatcggttcggcatattcccacgtaggattaagcgatccgcattcagatgggccacgacagacgggttttcactatggatcgacacattgtgtcatgagtgatcagagaggtattatcaccttaaagatcagcgctgatatcatctggccactgttagtagatggatacagcaaaagtgagaagctagcgtgttcttttcttattgcgaacacactcctgcatgaactggctcactgcattgtccaagcacagcaactgctcacatccgggttgccatggacacgtcctcaggggcagagccatcgagtagcgaacttactccactcactaggacaagacatatgggatttgacggcaggtaacggcgagccaactttcgaggacgtagggtactgcgaagtgggtaatcagttagagaatgcgatctggggtcacaacatcgtccatttgttcgagggttccccagctaattttttgcgggcgctcccgatagccgtagcggcgctcccatggcctagcggaactgacgagcccattctgctccataccgttcagcccggctttgacttatacaataggccaattccgatctcgcacatagcccaatatttcaccaaagactggtggactgaggtgtacaaccagtatggacatgcagcttttaaaaaactgccgggctcccagcccctcttaagtcttatgcgtcagcacggactagatcacgccacgggacttcaaacattcggcgacaacaggtggcaattccttaatgccgtacccaagatcttaagagacgggcgtcacggtatcctggcggaatatatacatgccctcttgattgaggtgcttggtcgaaaccagatgctccatcgatgggcggaagatgtcgcactctggcggccaaatatcgtcgatccgcttgaggaggcctgcgggattctacacgacgagtttgctgaggggaaaagactgtgcgacgactggcatagcgaaggagccttcagagacgcactttatgtgaaatactccgttgaaaatggccccaatcccaaaacgcgtgacgaatgggatgcagagttagaggataacttcgtttcggaatttcgcgatggtgggtggatcatgacccgccttgtagatgtttatgagcttatgcgagaggatctcggtatcctcgagcgcatggtattcgacttcctcacagttgatcctcaaagacgtagcttcttgtacgccggccaggtgcaaggtgctactactccgcttggcgtagcttatgctcgtatgctctcatgtatcaagttttgcgagaacatcactttcacgactgggacattgatgacagtttcagctcttttcgaggtcaaggataagttcgacgcgtggcgagcacgtttcgaggctatcaggcaaaattacctgactctcgtgcattgtattgatacacgcgacacaatcgacccctccaatcagaattggagaagcagatttcctcgtataccttcggcatattggaagctgaactcccagcgcctcgagaaactcgcatttcgtgaatacagtcgcgcggaccctgtaatccgtcgagtggtggatgaggtactcagcgagctcaatgcttaccacggcaacgcactcgaaatacagggacctgcctctgtagcagaggttgagaaactgctgcgggatttgccatcctgggatcccatagcaggagacatcactaacaaacgacgtggactctttgacttctcaggactgagaagggaacctccgccaccagtcttcgttcctgagatgcctatgagcggcgatttggctcgtcctcagtcatcgtcctctgccggaacgggcggtatagtttttggaacacccggcgggccatcaagattaggtggtggtccaccacgacgagcttcgggacgtgaagctttcacgaaatatgggttaggtgaaaatgccttgaggagagtggcaagtggtaggataaccactcgtcgatctccggatagaagggcattgggcggcgtctcgcaagcagtcctgaatagtgccaacttaccagatgtgatacgaagccaacaagcgcgaatgggaggtccccagggactacaagttgcacctaacacaattctgccatttcccaacgcatatgcgaaccgcacgacgctgacgtcagagttgaaagctcatgccgaaggtcttgccaagattgatgatatgtttttagattttgataacaaggataaaacagaaagaggggtgtatcaggctccgggaattttccgcgaaacgaaccaaaacgactcaccttaa

SEQ ID NO: 2170 - protein, 1046 aa, Muscodor strobelii
  misc_feature: SGI Peptide ID NO. 560344
  misc_feature (78)..(574): NCBI GI: 85107761 Blast Desc: NCU07924 [Neurospora crassa OR74A] gi|28924046|gb|EAA33204.1| [Neurospora crassa OR74A]
  misc_feature (81)..(574): NCBI GI: 46116676 Blast Desc: FG04180.1 [Gibberella zeae PH-1]
  misc_feature (135)..(858): NCBI GI: 256725608 Blast Desc: NECHADRAFT_81502 [Nectria haematococca mpVI 77-13-4]
  misc_feature (103)..(574): NCBI GI: 145601215 Blast Desc: [Magnaporthe grisea 70-15] gi|145009247|gb|EDJ93958.1| [Magnaporthe grisea 70-15]
  misc_feature (103)..(428): NCBI GI: 154304310 Blast Desc: [Botryotinia fuckeliana B05.10] gi|150854227|gb|EDN29419.1| [Botryotinia fuckeliana B05.10]
MVDFVNQVDMLSDREREEAERLSKKIYSRDKQTAPQGQEILPIVMSEILKQHGVLNNVALMSFLRHYSTTTFNLNQIFEDMNKKNPDHKKAHMTFFDMVQQDQDYQRLLIADMTTDEAIQHGIHTMDDNVPDPDLDNPIIPLFARQRWDNSAWRGAQRRSPKYAYSLGNSRELWDVTTNDKLWTVLQPALRLASKVFMTKHPHYEALFDMRTRQRIDYRRDGRKNPRTPQLAKYVLPEDIDMRLTWPQIRELHEVHNYDWKTEVINFLRAHLRLDIGSAYSHVGLSDPHSDGPRQTGFHYGSTHCVMSDQRGIITLKISADIIWPLLVDGYSKSEKLACSFLIANTLLHELAHCIVQAQQLLTSGLPWTRPQGQSHRVANLLHSLGQDIWDLTAGNGEPTFEDVGYCEVGNQLENAIWGHNIVHLFEGSPANFLRALPIAVAALPWPSGTDEPILLHTVQPGFDLYNRPIPISHIAQYFTKDWWTEVYNQYGHAAFKKLPGSQPLLSLMRQHGLDHATGLQTFGDNRWQFLNAVPKILRDGRHGILAEYIHALLIEVLGRNQMLHRWAEDVALWRPNIVDPLEEACGILHDEFAEGKRLCDDWHSEGAFRDALYVKYSVENGPNPKTRDEWDAELEDNFVSEFRDGGWIMTRLVDVYELMREDLGILERMVFDFLTVDPQRRSFLYAGQVQGATTPLGVAYARMLSCIKFCENITFTTGTLMTVSALFEVKDKFDAWRARFEAIRQNYLTLVHCIDTRDTIDPSNQNWRSRFPRIPSAYWKLNSQRLEKLAFREYSRADPVIRRVVDEVLSELNAYHGNALEIQGPASVAEVEKLLRDLPSWDPIAGDITNKRRGLFDFSGLRREPPPPVFVPEMPMSGDLARPQSSSSAGTGGIVFGTPGGPSRLGGGPPRRASGREAFTKYGLGENALRRVASGRITTRRSPDRRALGGVSQAVLNSANLPDVIRSQQARMGGPQGLQVAPNTILPFPNAYANRTTLTSELKAHAEGLAKIDDMFLDFDNKDKTERGVYQAPGIFRETNQNDSP

SEQ ID NO: 2171 - DNA, 3717 bp, Muscodor strobelii
  misc_feature: SGI cDNA ID NO. 560345
  misc_feature: Encodes the peptide sequence at SEQ ID NO 2172
atgaatttggattttgaggaaccggcactgcttgcgtttaacccttcgccagccgaaagagcagcacaaaattggatcaacaaccaagaagaaattcccaaggatatcggttatgattggctgccattatgcacggctctcgtagagccatttctagaagtagaacaaaatgccaacaatggaaacatagtcagaccagtggatattatgggcaacgtcccgggcttttggcagaatcaatcatcaagcccctcgaaacaacaagaccatgttcatattgaaaaagtacccgacaggctcataccgagtaaagacccgtcaactggtgcatgggattacgtcgttttcctaccagaatggaccgatccggagtttaaaaacactgtgaatgtactcgaaagcggtaagagataccgaaacaccgtcaaagattcgattcacgatctccgaccagcgctacgtttagaggaccagattcgaaatccaacagagtatgccaaacgctttggtattgctaacgatcgccttgacgggcgcagtcgaatgagtccgacatgggccccgtcgcgagatacgatggttgatttcgtgaaccaagtcgacatgctgagcgacagggaaagagaggaggctgagcgattgagtaaaaagatctactccagagacaaacagacggctcctcaggggcaagagattcttcccatagttatgtcggaaattttaaaacagcatggggtgctgaacaatgtcgcgttgatgtctttcctgcgacattattctaccactacttttaacctgaatcaaattttcgaagacatgaacaagaagaatcccgatcacaaaaaagcgcatatgactttcttcgatatggtgcaacaggatcaggactatcaacgactgctcatagcggacatgaccaccgacgaagccatacagcacggcattcacacaatggatgataatgtcccagatccagacctggataacccaattattcctttattcgcgagacagagatgggataactccgcctggagaggggctcagagaagatcgccaaagtatgcgtatagcctcgggaacagtagagaattatgggatgtgacgacaaacgataaattatggactgttctgcagcctgccctgcgacttgcctcgaaagttttcatgaccaagcatccgcactatgaagcccttttcgacatgagaactaggcaaaggatagattaccgacgagatggaagaaagaaccctcggacacctcagctcgccaagtatgttttgccagaggatattgatatgaggctgacctggccccaaatccgtgaactgcacgaagtccacaactacgactggaagaccgaagttatcaattttctccgagcgcatttgcgcctcgacatcggttcggcatattcccacgtaggattaagcgatccgcattcagatgggccacgacagacgggttttcactatggatcgacacattgtgtcatgagtgatcagagaggtattatcaccttaaagatcagcgctgatatcatctggccactgttagtagatggatacagcaaaagtgagaagctagcgtgttcttttcttattgcgaacacactcctgcatgaactggctcactgcattgtccaagcacagcaactgctcacatccgggttgccatggacacgtcctcaggggcagagccatcgagtagcgaacttactccactcactaggacaagacatatgggatttgacggcaggtaacggcgagccaactttcgaggacgtagggtactgcgaagtgggtaatcagttagagaatgcgatctggggtcacaacatcgtccatttgttcgagggttccccagctaattttttgcgggcgctcccgatagccgtagcggcgctcccatggcctagcggaactgacgagcccattctgctccataccgttcagcccggctttgacttatacaataggccaattccgatctcgcacatagcccaatatttcaccaaagactggtggactgaggtgtacaaccagtatggacatgcagcttttaaaaaactgccgggctcccagcccctcttaagtcttatgcgtcagcacggactagatcacgccacgggacttcaaacattcggcgacaacaggtggcaattccttaatgccgtacccaagatcttaagagacgggcgtcacggtatcctggcggaatatatacatgccctcttgattgaggtgcttggtcgaaaccagatgctccatcgatgggcggaagatgtcgcactctggcggccaaatatcgtcgatccgcttgaggaggcctgcgggattctacacgacgagtttgctgaggggaaaagactgtgcgacgactggcatagcgaaggagccttcagagacgcactttatgtgaaatactccgttgaaaatggccccaatcccaaaacgcgtgacgaatgggatgcagagttagaggataacttcgtttcggaatttcgcgatggtgggtggatcatgacccgccttgtagatgtttatgagcttatgcgagaggatctcggtatcctcgagcgcatggtattcgacttcctcacagttgatcctcaaagacgtagcttcttgtacgccggccaggtgcaaggtgctactactccgcttggcgtagcttatgctcgtatgctctcatgtatcaagttttgcgagaacatcactttcacgactgggacattgatgacagtttcagctcttttcgaggtcaaggataagttcgacgcgtggcgagcacgtttcgaggctatcaggcaaaattacctgactctcgtgcattgtattgatacacgcgacacaatcgacccctccaatcagaattggagaagcagatttcctcgtataccttcggcatattggaagctgaactcccagcgcctcgagaaactcgcatttcgtgaatacagtcgcgcggaccctgtaatccgtcgagtggtggatgaggtactcagcgagctcaatgcttaccacggcaacgcactcgaaatacagggacctgcctctgtagcagaggttgagaaactgctgcgggatttgccatcctgggatcccatagcaggagacatcactaacaaacgacgtggactctttgacttctcaggactgagaagggaacctccgccaccagtcttcgttcctgagatgcctatgagcggcgatttggctcgtcctcagtcatcgtcctctgccggaacgggcggtatagtttttggaacacccggcgggccatcaagattaggtggtggtccaccacgacgagcttcgggacgtgaagctttcacgaaatatgggttaggtgaaaatgccttgaggagagtggcaagtggtaggataaccactcgtcgatctccggatagaagggcattgggcggcgtctcgcaagcagtcctgaatagtgccaacttaccagatgtgatacgaagccaacaagcgcgaatgggaggtccccagggactacaagttgcacctaacacaattctgccatttcccaacgcatatgcgaaccgcacgacgctgacgtcagagttgaaagctcatgccgaaggtcttgccaagattgatgatatgtttttagattttgataacaaggataaaacagaaagaggggtgtatcaggctccgggaattttccgcgaaacgaaccaaaacgactcaccttaa

SEQ ID NO: 2172 - protein, 1238 aa, Muscodor strobelii
  misc_feature: SGI Peptide ID NO. 560345
  misc_feature (102)..(766): NCBI GI: 46116676 Blast Desc: FG04180.1 [Gibberella zeae PH-1]
  misc_feature (77)..(1050): NCBI GI: 256725608 Blast Desc: NECHADRAFT_81502 [Nectria haematococca mpVI 77-13-4]
  misc_feature (270)..(766): NCBI GI: 85107761 Blast Desc: NCU07924 [Neurospora crassa OR74A] gi|28924046|gb|EAA33204.1| [Neurospora crassa OR74A]
  misc_feature (80)..(766): NCBI GI: 145601215 Blast Desc: [Magnaporthe grisea 70-15] gi|145009247|gb|EDJ93958.1| [Magnaporthe grisea 70-15]
  misc_feature (96)..(369): NCBI GI: 145601213 Blast Desc: [Magnaporthe grisea 70-15] gi|145009246|gb|EDJ93957.1| [Magnaporthe grisea 70-15]
  misc_feature (295)..(620): NCBI GI: 154304310 Blast Desc: [Botryotinia fuckeliana B05.10] gi|150854227|gb|EDN29419.1| [Botryotinia fuckeliana B05.10]
MNLDFEEPALLAFNPSPAERAAQNWINNQEEIPKDIGYDWLPLCTALVEPFLEVEQNANNGNIVRPVDIMGNVPGFWQNQSSSPSKQQDHVHIEKVPDRLIPSKDPSTGAWDYVVFLPEWTDPEFKNTVNVLESGKRYRNTVKDSIHDLRPALRLEDQIRNPTEYAKRFGIANDRLDGRSRMSPTWAPSRDTMVDFVNQVDMLSDREREEAERLSKKIYSRDKQTAPQGQEILPIVMSEILKQHGVLNNVALMSFLRHYSTTTFNLNQIFEDMNKKNPDHKKAHMTFFDMVQQDQDYQRLLIADMTTDEAIQHGIHTMDDNVPDPDLDNPIIPLFARQRWDNSAWRGAQRRSPKYAYSLGNSRELWDVTTNDKLWTVLQPALRLASKVFMTKHPHYEALFDMRTRQRIDYRRDGRKNPRTPQLAKYVLPEDIDMRLTWPQIRELHEVHNYDWKTEVINFLRAHLRLDIGSAYSHVGLSDPHSDGPRQTGFHYGSTHCVMSDQRGIITLKISADIIWPLLVDGYSKSEKLACSFLIANTLLHELAHCIVQAQQLLTSGLPWTRPQGQSHRVANLLHSLGQDIWDLTAGNGEPTFEDVGYCEVGNQLENAIWGHNIVHLFEGSPANFLRALPIAVAALPWPSGTDEPILLHTVQPGFDLYNRPIPISHIAQYFTKDWWTEVYNQYGHAAFKKLPGSQPLLSLMRQHGLDHATGLQTFGDNRWQFLNAVPKILRDGRHGILAEYIHALLIEVLGRNQMLHRWAEDVALWRPNIVDPLEEACGILHDEFAEGKRLCDDWHSEGAFRDALYVKYSVENGPNPKTRDEWDAELEDNFVSEFRDGGWIMTRLVDVYELMREDLGILERMVFDFLTVDPQRRSFLYAGQVQGATTPLGVAYARMLSCIKFCENITFTTGTLMTVSALFEVKDKFDAWRARFEAIRQNYLTLVHCIDTRDTIDPSNQNWRSRFPRIPSAYWKLNSQRLEKLAFREYSRADPVIRRVVDEVLSELNAYHGNALEIQGPASVAEVEKLLRDLPSWDPIAGDITNKRRGLFDFSGLRREPPPPVFVPEMPMSGDLARPQSSSSAGTGGIVFGTPGGPSRLGGGPPRRASGREAFTKYGLGENALRRVASGRITTRRSPDRRALGGVSQAVLNSANLPDVIRSQQARMGGPQGLQVAPNTILPFPNAYANRTTLTSELKAHAEGLAKIDDMFLDFDNKDKTERGVYQAPGIFRETNQNDSP

SEQ ID NO: 2173 - DNA, 930 bp, Muscodor strobelii
  misc_feature: SGI cDNA ID NO. 560346
  misc_feature: Reduced expression when VOC is produced
  misc_feature: Encodes the peptide sequence at SEQ ID NO 2174
atggctcagactatatgttctataaactctttacccaatgagatcctcatcaatgccttagaatcattcgatactcggtccttgctacagattgctgcagtatcccaccgctttcgaggcgtagtcggacgtcttcactactatcgattagttcatgcgacaatcctcaaggaccatgagttgattctcgagtgctatcacccggccgacaaactctcgacaccatatcttttctgcagatatctggacacccatggcctctcggaagcaggcgaagaggccgacttggaagacatgactcatctctatacacgatttgagcccttcctcagcgaagagaaccgatgctctcagatcagaaggccaaccgctttggtgtgcgatggtattgacgaacctctcctcgagaagtcgccgtctcagactatccagctcgatgaaggcgaactattcacgcaactttgcgtgttgacgaacctaattaaggtgggacctgggagaggcttattcctcagcgacaccaatgtcaccgacggtgtaattcgggtgtggcggagttggctccaggaccaagcagcgcggtcggcagcggaagaggagcagcgacacaagccgatattgagcattgatgatccatctatcctatgggcggattcttcaaagaacgtcggcctcaagtttcgtgttaaggcaaacgacgcgacgccagtgctcaccgatgggggagaagaacccgctgtctcttacaccctagaatatgaggaattaatcgtgcggacgaatcgattgatgctaagcaccgagacctcagaagtagaggaagccactcatgcagaaaccgtctttcttcttggtagttcgattccgacgccgaatatagaaatccagtatccttggacagcatcaccagccgcagtacacgcacattag

SEQ ID NO: 2174 - protein, 309 aa, Muscodor strobelii
  misc_feature: SGI Peptide ID NO. 560346
  misc_feature (6)..(53): Pfam Id: PF00646 Pfam Desc: F-box domain
  misc_feature (1)..(286): NCBI GI: 156032567 Blast Desc: SS1G_13981 [Sclerotinia sclerotiorum 1980] gi|154699383|gb|EDN99121.1| SS1G_13981 [Sclerotinia sclerotiorum 1980]
  misc_feature (2)..(299): NCBI GI: 145612009 Blast Desc: MGG_08019 [Magnaporthe grisea 70-15] gi|145019253|gb|EDK03481.1| MGG_08019 [Magnaporthe grisea 70-15]
  misc_feature (10)..(286): NCBI GI: 115384478 Blast Desc: conserved [Aspergillus terreus NIH2624] gi|114196478|gb|EAU38178.1| conserved [Aspergillus terreus NIH2624]
  misc_feature (1)..(286): NCBI GI: 154298618 Blast Desc: BC1G_11564 [Botryotinia fuckeliana B05.10] gi|150857736|gb|EDN32928.1| BC1G_11564 [Botryotinia fuckeliana B05.10]
  misc_feature (6)..(283): NCBI GI: 164424405 Blast Desc: NCU07257 [Neurospora crassa OR74A] gi|157070498|gb|EAA32875.2| [Neurospora crassa OR74A]
  misc_feature (8)..(283): NCBI GI: 119481189 Blast Desc: F-box domain protein [Neosartorya fischeri NRRL 181] gi|119408777|gb|EAW18726.1| F-box domain protein [Neosartorya fischeri NRRL 181]
  misc_feature (7)..(290): NCBI GI: 255938943 Blast Desc: Pc15g00130 [Penicillium chrysogenum Wisconsin 54-1255] gi|211584863|emb|CAP82899.1| Pc15g00130 [Penicillium chrysogenum Wisconsin 54-1255]
  misc_feature (8)..(288): NCBI GI: 121715666 Blast Desc: F-box domain protein [Aspergillus clavatus NRRL 1] gi|119403599|gb|EAW14016.1| F-box domain protein [Aspergillus clavatus NRRL 1]
  misc_feature (6)..(286): NCBI GI: 169618814 Blast Desc: SNOG_12599 [Phaeosphaeria nodorum SN15] gi|111058777|gb|EAT79897.1| SNOG_12599 [Phaeosphaeria nodorum SN15]
  misc_feature (4)..(291): NCBI GI: 242787925 Blast Desc: F-box domain protein [Talaromyces stipitatus ATCC 10500] gi|218721263|gb|EED20682.1| F-box domain protein [Talaromyces stipitatus ATCC 10500]
  misc_feature: Useful for introducing or modulating the production of volatile compounds
MAQTICSINSLPNEILINALESFDTRSLLQIAAVSHRFRGVVGRLHYYRLVHATILKDHELILECYHPADKLSTPYLFCRYLDTHGLSEAGEEADLEDMTHLYTRFEPFLSEENRCSQIRRPTALVCDGIDEPLLEKSPSQTIQLDEGELFTQLCVLTNLIKVGPGRGLFLSDTNVTDGVIRVWRSWLQDQAARSAAEEEQRHKPILSIDDPSILWADSSKNVGLKFRVKANDATPVLTDGGEEPAVSYTLEYEELIVRTNRLMLSTETSEVEEATHAETVFLLGSSIPTPNIEIQYPWTASPAAVHAH

SEQ ID NO: 2175 - DNA, 1732 bp, Muscodor strobelii
  misc_feature: SGI EST ID NO. CUFF.7199.1
  misc_feature: Variant of the nucleotide sequence at SEQ ID NO 2173
catcaattgagccagctcatcacaccaccgctattcgcgtttcgcgtcctgggatggctggtgcgcatgatgtaggtataagacttcgaagatttcctagtagacacagatactgtacactagtattcaccaacaaatctgatctatcatcttgacttcattattgaataatcattgctgtgcatcacatcatggctcagactatatgttctataaactctttacccaatgagatcctcatcaatgccttagaatcattcgatactcggtccttgctacagattgctgcagtatcccaccgctttcgaggcgtagtcggacgtcttcactactatcgattagttcatgcgacaatcctcaaggaccatgagttgattctcgagtgctatcacccggccgacaaactctcgacaccatatcttttctgcagatatctggacacccatggcctctcggaagcaggcgaagaggccgacttggaagacatgactcatctctatacacgatttgagcccttcctcagcgaagagaaccgatgctctcagatcagaaggccaaccgctttggtgtgcgatggtattgacgaacctctcctcgagaagtcgccgtctcagactatccagctcgatgaaggcgaactattcacgcaactttgcgtgttgacgaacctaattaaggtgggacctgggagaggcttattcctcagcgacaccaatgtcaccgacggtgtaattcgggtgtggcggagttggctccaggaccaagcagcgcggtcggcagcggaagaggagcagcgacacaagccgatattgagcattgatgatccatctatcctatgggcggattcttcaaagaacgtcggcctcaagtttcgtgttaaggcaaacgacgcgacgccagtgctcaccgatgggggagaagaacccgctgtctcttacaccctagaatatgaggaattaatcgtgcggacgaatcgattgatgctaagcaccgagacctcagaagtagaggaagccactcatgcagaaaccgtctttcttcttggtagttcgattccgacgccgaatatagaaatccagtatccttggacagcatcaccagccgcagtacacgcacattagttctgcgatgtccatttcttagttggatacaccaggccagactcgaacaatctggtcacacacttttccgcatttgtcacagagcgacgattgttgggaatactttatgcatacaggagacggcgcccattaaaagcattcatacagacaggaattttcgaaagaataggagcatggtgtttggcgcctttagattagagaataaaacgggtagaatattttttgggaaatatggtgttatataaaatcggcgcgtccgatagatgaatgtcgggacagatacctcttttacatgctacctgcctagattttgctcaaggtcgttcatcatcaattcagtcggctgcgttcggaaagaaaatcctacaatttgtaggaaacacagtccgaggctcaatggctaaagctgaatcaatattccaacgaaattaattgacaccagagagtcgaaagtttaatgagttactggaaacttgcataggcgcattagtttcatcaataaaccagctcttgctttcctatagtcgcaaagaaatcttccggcagcgtacacaatcgtaagcatacgaacataattactcgccatgtcgcgtcaattgatcaagactgga

SEQ ID NO: 2176 - DNA, 855 bp, Muscodor strobelii
  misc_feature: SGI cDNA ID NO. 560347
  misc_feature: Encodes the peptide sequence at SEQ ID NO 2177
atggctcagactatatgttctataaactctttacccaatgagatcctcatcaatgccttagaatcattcgatactcggtccttgctacagattgctgcagtatcccaccgctttcgaggcgtagtcggacgtcttcactactatcgattagttcatgcgacaatcctcaaggaccatgagttgattctcgagtgctatcacccggccgacaaactctcgacaccatatcttttctgcagatatctggacacccatggcctctcggaagcaggcgaagaggccgacttggaagacatgactcatctctatacacgatttgagcccttcctcagcgaagagaaccgatgctctcagatcagaaggccaaccgctttggtgtgcgatggtattgacgaacctctcctcgagaagtcgccgtctcagactatccagctcgatgaaggcgaactattcacgcaactttgcgtgttgacgaacctaattaaggtgggacctgggagaggcttattcctcagcgacaccaatgtcaccgacggtgtaattcgggtgtggcggagttggctccaggaccaagcagcgcggtcggcagcggaagaggagcagcgacacaagccgatattgagcattgatgatccatctatcctatgggcggattcttcaaagaacgtcggcctcaagtttcgtgttaaggcaaacgacgcgacgccagtgctcaccgatgggggagaagaacccgctgtctcttacaccctagaatatgaggaattaatcgtgcggacgaatcgattgatgctaagcaccgagacctcagaagtagaggaagccactcatgcaggtaaatcatcatcgttttga

SEQ ID NO: 2177 - protein, 284 aa, Muscodor strobelii
  misc_feature: SGI Peptide ID NO. 560347
  misc_feature (6)..(53): Pfam Id: PF00646 Pfam Desc: F-box domain
  misc_feature (1)..(281): NCBI GI: 156032567 Blast Desc: SS1G_13981 [Sclerotinia sclerotiorum 1980] gi|154699383|gb|EDN99121.1| SS1G_13981 [Sclerotinia sclerotiorum 1980]
  misc_feature (2)..(281): NCBI GI: 145612009 Blast Desc: MGG_08019 [Magnaporthe grisea 70-15] gi|145019253|gb|EDK03481.1| MGG_08019 [Magnaporthe grisea 70-15]
  misc_feature (10)..(278): NCBI GI: 115384478 Blast Desc: conserved [Aspergillus terreus NIH2624] gi|114196478|gb|EAU38178.1| conserved [Aspergillus terreus NIH2624]
  misc_feature (6)..(271): NCBI GI: 164424405 Blast Desc: NCU07257 [Neurospora crassa OR74A] gi|157070498|gb|EAA32875.2| [Neurospora crassa OR74A]
  misc_feature (1)..(281): NCBI GI: 154298618 Blast Desc: BC1G_11564 [Botryotinia fuckeliana B05.10] gi|150857736|gb|EDN32928.1| BC1G_11564 [Botryotinia fuckeliana B05.10]
  misc_feature (8)..(274): NCBI GI: 119481189 Blast Desc: F-box domain protein [Neosartorya fischeri NRRL 181] gi|119408777|gb|EAW18726.1| F-box domain protein [Neosartorya fischeri NRRL 181]
  misc_feature (6)..(284): NCBI GI: 169618814 Blast Desc: SNOG_12599 [Phaeosphaeria nodorum SN15] gi|111058777|gb|EAT79897.1| SNOG_12599 [Phaeosphaeria nodorum SN15]
  misc_feature (8)..(277): NCBI GI: 121715666 Blast Desc: F-box domain protein [Aspergillus clavatus NRRL 1] gi|119403599|gb|EAW14016.1| F-box domain protein [Aspergillus clavatus NRRL 1]
  misc_feature (7)..(277): NCBI GI: 255938943 Blast Desc: Pc15g00130 [Penicillium chrysogenum Wisconsin 54-1255] gi|211584863|emb|CAP82899.1| Pc15g00130 [Penicillium chrysogenum Wisconsin 54-1255]
  misc_feature (4)..(274): NCBI GI: 242787925 Blast Desc: F-box domain protein [Talaromyces stipitatus ATCC 10500] gi|218721263|gb|EED20682.1| F-box domain protein [Talaromyces stipitatus ATCC 10500]
MAQTICSINSLPNEILINALESFDTRSLLQIAAVSHRFRGVVGRLHYYRLVHATILKDHELILECYHPADKLSTPYLFCRYLDTHGLSEAGEEADLEDMTHLYTRFEPFLSEENRCSQIRRPTALVCDGIDEPLLEKSPSQTIQLDEGELFTQLCVLTNLIKVGPGRGLFLSDTNVTDGVIRVWRSWLQDQAARSAAEEEQRHKPILSIDDPSILWADSSKNVGLKFRVKANDATPVLTDGGEEPAVSYTLEYEELIVRTNRLMLSTETSEVEEATHAGKSSSF

SEQ ID NO: 2178 - DNA, 1732 bp, Muscodor strobelii; identical to SEQ ID NO: 2175
  misc_feature: SGI EST ID NO. CUFF.7199.1
  misc_feature: Variant of the nucleotide sequence at SEQ ID NO 2176

SEQ ID NO: 2179 - DNA, 3165 bp, Muscodor strobelii
  misc_feature: SGI cDNA ID NO. 560348
  misc_feature: Reduced expression when VOC is produced
  misc_feature: Encodes the peptide sequence at SEQ ID NO 2180
atgccttccgagaacgcccagtctgtcaaggtccttgacgacctgatgcagaagctcaccatctccaaggacgccgctgccaccaaggaggcatccgtcgcccttgcctctttcatcaacggctctattgaggatcaggaagcccccacaagaaccgtcgaagctctgcagaagcagctcagcaacaagaaggatgctgccgtccgtgagaaggccgccgtggccattcaggccattgctcagcactctgagatctccccaagcgttgagccttacctcatcgtcatgcttccattagtgctggccgctattggtgacaagatcaccgccgtcaagacggccgctaccgccgcgacgctcgccattgttgaggctatcaaccccaactctgtcaaggctgtcatctcccacctttccaactccatcctcactgcccagaagtggcccgagaagatggctgcccttgacggcatcgatgctctcgtccgtactgccccggctcagctcgcctaccgcgtccccgaactcatccccgtcatctctgagtccatgtgggacaccaagaaggaggtcaaggaccgtgcctacaagaccatggagaagctctgcgagttgatcgtcaacagggatatcgagcgcttcattcctgagctcatcaagtgtatcgccaagcctgagaatgtccccgagactgttcacttgttgggtgccaccactttcgtcactgaggttcaggagcctactcttgccctcatggttcctctccttgatcgtggccttgccgagcgcgagactgctatcaagcgaaaggctgccgtcattgttgacaacatgtgcaagctcgtcgacgacccgaacatcgttgctcctttcttgcccaagatgatgcccggtctaaccaagaactacgatacgcttgccgaccccgaggctcgcgagaagaccaagcaagccttggacactcttgttcgtgtcggtaacatcaaggacggcaagattcctgaggttcgccatgacggtgacattgctaccgtagttgctcacctcaagacggtcatccccgccaagcacgccaaagttgccgagaagctcggcgccgttgtcaaccacattggtgctattggtggtcaactcgttgacgagaaggaggtcgagccgatcagctgggctactactgtcaagcccttcgtcgctgttcttgtcggtgaggctgatgctgagtctgttgtcgaggctctccgaaagcgcgcttctcctggtattgaggacgaggctgctgaggagatcgacgatgacgagggtgaagacctttgcaactgcacattctcactcgcttatggtgctaagattctcctcaaccaaactgcccttcgtttgaagcgtggtcgccgttacggtctgtgcggtcctaacggatctggaaagtccactctcatgcgcgccatcaacaacgagcaggttgagggtttccccaagcaaagcgaagtcaagactgtcttcgtcgagcacgatctggactccgccgatactgagatgactacaatcgactggacgatgaagaagttgcaggaagctaacgtcagctcctctcaagatgaggtcattgcccgcctcgatgagttcggtttcaccgaggccatgatcaagggtgaaatcactgctctgtctggtggctggaagatgaagttggctctttgccgtgccgtctttgaggctcccgatattctgctactcgacgagcccaccaaccatcttgatgtgaagaacgtcaagtggctcgaggactaccttatcaactctccttgcacttctattatcgtttcccacgatagtggcttcttggataacgtcacccagtacattattcattacgaacgtttcaagctcaagaagtacaagggtaacttgaaggagttcgtacgcaagaatccttccgctaagtcctactacgaacttggtgaatccgagatcgagttccagttccccgagcctggtttcttagaaggtgttaagaccaaggcgaaggccatcttgcgtgcaaccaagatgagcttccagtaccctggcactcccaagcctcaaattaccgatatcagcttccagtgctccttgggctctcgtattgctgtcattggtcccaacggtgccggaaagtccactttgatcaatgtcctcacgggtgaactcatccccaccgccggtgagatctaccagcacgagaacattcgtattgcctacattaagcagcatgccttcgctcacatcgacaaccatcttgacaagacaccctctgagtacatccagtggcgcttccagactggtgaggatcgtgaaaccatggatcgtgccaacaagatcatcactgaggatgatgagaaggccatggacaagatcttcaagattgaaggttcccagagacgtgtcatcggcatcaacggccgaagaaagttcaagaacagctacgagtatgagtgttcgtttgctttaggcgagaatgttggcatgaagaacgagcgatgggtacctatgatgacggccgataacgtttggctcccccgttctgagctgcttgcgtcgcatcagaaaatggtcgccgatgtcgatatgaaagaggccctagcttctggtcagttccgacctttggtccgtaaggagattgagagccactgttccaacttcggtcttgacgctgagttggtgtcacactctcgcatgaagggtttgtctggtggccagcgtgtcaaggttgttctttccgcttgctcttggcagcgacctcacttgatcgtcctcgacgagccaaccaactacttggaccgtgactctcttggcgccttgtccaaggccctgaagaagtttgagggtggtgtcattattattacccacagtgctgagtttaccaaggacttgactgaggaggtttgggccgtcatggacggaaagatgacaccctctggacacaactgggtacaaggccaaggcagtggcccccgtctcaccgacaagggcgatgatgatgaggagaagttcgacgccatgggcaacaagattgtcacgacgaagaagaaggctaagctcacatcatctgaggcccgaaagaagaagaaggagcgtatggctcgccgtaagaggggtgaggaggtattctccgacgaggacgagtaa

SEQ ID NO: 2180 - protein, 1054 aa, Muscodor strobelii
  misc_feature: SGI Peptide ID NO. 560348
  misc_feature (705)..(980): Pfam Id: PF00005 Pfam Desc: ABC transporter
  misc_feature (462)..(627): Pfam Id: PF00005 Pfam Desc: ABC transporter
  misc_feature (528)..(627): Pfam Id: PF00005 Pfam Desc: ABC transporter
  misc_feature (3)..(1052): NCBI GI: 19075785 Blast Desc: translation elongation factor eEF3 [Schizosaccharomyces pombe 972h-] gi|15213983|sp|O94489.1|EF3_SCHPO RecName: Full=Elongation factor
  misc_feature (3)..(1017): NCBI GI: 256274162 Blast Desc: Hef3p [Saccharomyces cerevisiae JAY291]
  misc_feature (3)..(1015): NCBI GI: 260940118 Blast Desc: elongation factor 3 [Clavispora lusitaniae ATCC 42720] gi|238852253|gb|EEQ41717.1| elongation factor 3 [Clavispora lusitaniae ATCC 42720]
  misc_feature (16)..(1054): NCBI GI: 171676896 Blast Desc: protein product [Podospora anserina] gi|170936515|emb|CAP61175.1| protein product [Podospora anserina]
  misc_feature (1)..(1054): NCBI GI: 256726019 Blast Desc: [Nectria haematococca mpVI 77-13-4]
  misc_feature (3)..(1054): NCBI GI: 116196752 Blast Desc: conserved [Chaetomium globosum CBS 148.51] gi|88180887|gb|EAQ88355.1| conserved [Chaetomium globosum CBS 148.51]
  misc_feature (4)..(1054): NCBI GI: 85107753 Blast Desc: elongation factor 3 [Neurospora crassa OR74A] gi|28924044|gb|EAA33202.1| elongation factor 3 [Neurospora crassa OR74A]
  misc_feature (1)..(1054): NCBI GI: 46116678 Blast Desc: FG04181.1 [Gibberella zeae PH-1]
  misc_feature (3)..(1054): NCBI GI: 156032854 Blast Desc: SS1G_13833 [Sclerotinia sclerotiorum 1980] gi|154699235|gb|EDN98973.1| SS1G_13833 [Sclerotinia sclerotiorum 1980]
  misc_feature (3)..(1054): NCBI GI: 189198041 Blast Desc: elongation factor 3 [Pyrenophora tritici-repentis Pt-1C-BFP] gi|187981306|gb|EDU47932.1| elongation factor 3 [Pyrenophora tritici-repentis Pt-1C-BFP]
  misc_feature: Useful for introducing or modulating the production of volatile compounds
MPSENAQSVKVLDDLMQKLTISKDAAATKEASVALASFINGSIEDQEAPTRTVEALQKQLSNKKDAAVREKAAVAIQAIAQHSEISPSVEPYLIVMLPLVLAAIGDKITAVKTAATAATLAIVEAINPNSVKAVISHLSNSILTAQKWPEKMAALDGIDALVRTAPAQLAYRVPELIPVISESMWDTKKEVKDRAYKTMEKLCELIVNRDIERFIPELIKCIAKPENVPETVHLLGATTFVTEVQEPTLALMVPLLDRGLAERETAIKRKAAVIVDNMCKLVDDPNIVAPFLPKMMPGLTKNYDTLADPEAREKTKQALDTLVRVGNIKDGKIPEVRHDGDIATVVAHLKTVIPAKHAKVAEKLGAVVNHIGAIGGQLVDEKEVEPISWATTVKPFVAVLVGEADAESVVEALRKRASPGIEDEAAEEIDDDEGEDLCNCTFSLAYGAKILLNQTALRLKRGRRYGLCGPNGSGKSTLMRAINNEQVEGFPKQSEVKTVFVEHDLDSADTEMTTIDWTMKKLQEANVSSSQDEVIARLDEFGFTEAMIKGEITALSGGWKMKLALCRAVFEAPDILLLDEPTNHLDVKNVKWLEDYLINSPCTSIIVSHDSGFLDNVTQYIIHYERFKLKKYKGNLKEFVRKNPSAKSYYELGESEIEFQFPEPGFLEGVKTKAKAILRATKMSFQYPGTPKPQITDISFQCSLGSRIAVIGPNGAGKSTLINVLTGELIPTAGEIYQHENIRIAYIKQHAFAHIDNHLDKTPSEYIQWRFQTGEDRETMDRANKIITEDDEKAMDKIFKIEGSQRRVIGINGRRKFKNSYEYECSFALGENVGMKNERWVPMMTADNVWLPRSELLASHQKMVADVDMKEALASGQFRPLVRKEIESHCSNFGLDAELVSHSRMKGLSGGQRVKVVLSACSWQRPHLIVLDEPTNYLDRDSLGALSKALKKFEGGVIIITHSAEFTKDLTEEVWAVMDGKMTPSGHNWVQGQGSGPRLTDKGDDDEEKFDAMGNKIVTTKKKAKLTSSEARKKKKERMARRKRGEEVFSDEDE

SEQ ID NO: 2181 - DNA, 4172 bp, Muscodor strobelii
  misc_feature: SGI EST ID NO. CUFF.5946.0
  misc_feature: Variant of the nucleotide sequence at SEQ ID NO 2179
caggcggccacgcaccaagcagtgtcggagaaatgttgggcgcattaaaaaaatttctgaagtgaaataaaatcccgttcgaagcctctcctctgtctcacaactccctttttctgaactcctcccactttccatccttttcttcacacctctggaagacgacctgagtcccctccgctcagcaatcttccctctgccctttggtccatccaccaaagccagattaaagtcggccctgttctgatccctccatcagcaggccattccttctcattttagattccgtttctcatagactccggtttctcatcactcacgatcggtcggataaaacgattcacttcgatagattccctctctagaccccgaccccgacgacgaaacggactccgcttcgtcaactatcataccacgcttattctcatcacctctaatctcatccaaaatgccttccgagaacgcccagtctgtcaaggtccttgacgacctgatgcagaagctcaccatctccaaggacgccgctgccaccaaggaggcatccgtcgcccttgcctctttcatcaacggctctattgaggatcaggaagcccccacaagaaccgtcgaagctctgcagaagcagctcagcaacaagaaggatgctgccgtccgtgagaaggccgccgtggccattcaggccattgctcagcactctgagatctccccaagcgttgagccttacctcatcgtcatgcttccattagtgctggccgctattggtgacaagatcaccgccgtcaagacggccgctaccgccgcgacgctcgccattgttgaggctatcaaccccaactctgtcaaggctgtcatctcccacctttccaactccatcctcactgcccagaagtggcccgagaagatggctgcccttgacggcatcgatgctctcgtccgtactgccccggctcagctcgcctaccgcgtccccgaactcatccccgtcatctctgagtccatgtgggacaccaagaaggaggtcaaggaccgtgcctacaagaccatggagaagctctgcgagttgatcgtcaacagggatatcgagcgcttcattcctgagctcatcaagtgtatcgccaagcctgagaatgtccccgagactgttcacttgttgggtgccaccactttcgtcactgaggttcaggagcctactcttgccctcatggttcctctccttgatcgtggccttgccgagcgcgagactgctatcaagcgaaaggctgccgtcattgttgacaacatgtgcaagctcgtcgacgacccgaacatcgttgctcctttcttgcccaagatgatgcccggtctaaccaagaactacgatacgcttgccgaccccgaggctcgcgagaagaccaagcaagccttggacactcttgttcgtgtcggtaacatcaaggacggcaagattcctgaggttcgccatgacggtgacattgctaccgtagttgctcacctcaagacggtcatccccgccaagcacgccaaagttgccgagaagctcggcgccgttgtcaaccacattggtgctattggtggtcaactcgttgacgagaaggaggtcgagccgatcagctgggctactactgtcaagcccttcgtcgctgttcttgtcggtgaggctgatgctgagtctgttgtcgaggctctccgaaagcgcgcttctcctggtattgaggacgaggctgctgaggagatcgacgatgacgagggtgaagacctttgcaactgcacattctcactcgcttatggtgctaagattctcctcaaccaaactgcccttcgtttgaagcgtggtcgccgttacggtctgtgcggtcctaacggatctggaaagtccactctcatgcgcgccatcaacaacgagcaggttgagggtttccccaagcaaagcgaagtcaagactgtcttcgtcgagcacgatctggactccgccgatactgagatgactacaatcgactggacgatgaagaagttgcaggaagctaacgtcagctcctctcaagatgaggtcattgcccgcctcgatgagttcggtttcaccgaggccatgatcaagggtgaaatcactgctctgtctggtggctggaagatgaagttggctctttgccgtgccgtctttgaggctcccgatattctgctactcgacgagcccaccaaccatcttgatgtgaagaacgtcaagtggctcgaggactaccttatcaactctccttgcacttctattatcgtttcccacgatagtggcttcttggataacgtcacccagtacattattcattacgaacgtttcaagctcaagaagtacaagggtaacttgaaggagttcgtacgcaagaatccttccgctaagtcctactacgaacttggtgaatccgagatcgagttccagttccccgagcctggtttcttagaaggtgttaagaccaaggcgaaggccatcttgcgtgcaaccaagatgagcttccagtaccctggcactcccaagcctcaaattaccgatatcagcttccagtgctccttgggctctcgtattgctgtcattggtcccaacggtgccggaaagtccactttgatcaatgtcctcacgggtgaactcatccccaccgccggtgagatctaccagcacgagaacattcgtattgcctacattaagcagcatgccttcgctcacatcgacaaccatcttgacaagacaccctctgagtacatccagtggcgcttccagactggtgaggatcgtgaaaccatggatcgtgccaacaagatcatcactgaggatgatgagaaggccatggacaagatcttcaagattgaaggttcccagagacgtgtcatcggcatcaacggccgaagaaagttcaagaacagctacgagtatgagtgttcgtttgctttaggcgagaatgttggcatgaagaacgagcgatgggtacctatgatgacggccgataacgtttggctcccccgttctgagctgcttgcgtcgcatcagaaaatggtcgccgatgtcgatatgaaagaggccctagcttctggtcagttccgacctttggtccgtaaggagattgagagccactgttccaacttcggtcttgacgctgagttggtgtcacactctcgcatgaagggtttgtctggtggccagcgtgtcaaggttgttctttccgcttgctcttggcagcgacctcacttgatcgtcctcgacgagccaaccaactacttggaccgtgactctcttggcgccttgtccaaggccctgaagaagtttgagggtggtgtcattattattacccacagtgctgagtttaccaaggacttgactgaggaggtttgggccgtcatggacggaaagatgacaccctctggacacaactgggtacaaggccaaggcagtggcccccgtctcaccgacaagggcgatgatgatgaggagaagttcgacgccatgggcaacaagattgtcacgacgaagaagaaggctaagctcacatcatctgaggcccgaaagaagaagaaggagcgtatggctcgccgtaagaggggtgaggaggtattctccgacgaggacgagtaaactcgtttcacaactctacccatatgatcaatgacttgcgctcctttacgaattcttgacgacctaatactgcatggcggacatagaaaccgccaaatttcctttgttatacgcgcaatgaaaccaaaagttcggttttgttcggttagggtatgctcaaactctttcatacgattgcagcgggttgggtgaatatacggccatgaaagcgcaatgctttcacctatggtggatcaggatcttgaagaagacgtctcaacggattggaggcccagagagacaagtcttttcggaattttcggtcgcggaagataccatagtaaggaagccgacttcctgataaatagacatgattgatagaccaaaaaaactcaattattttcacatagataagtatgtgatgagacggttacaacgcgaagacagactgtgatggcagaacctcatggaacaccttggccacattaatttgattgcaatgtcgtcgaatttgtaaagatggtctggaggcaaagacctgtttgaaacatcgctgagatttctttcactgtcttgaccaaat

SEQ ID NO: 2182 - DNA, 939 bp, Muscodor strobelii
  misc_feature: SGI cDNA ID NO. 560349
  misc_feature: Reduced expression when VOC is produced
  misc_feature: Encodes the peptide sequence at SEQ ID NO 2183
atgtctcagccaagcggtccgccttatgcatctccaaatgcgagcccgggaggcttgccgagcattatacccgatgttcctatcgacgcagtaggaatcgttatctatctgagctttgcgatcatgaacatgacgatattacaaacaaacttaaaacgcggtcacaaattcatcatgtcgggcatgctttttggtttctctatgtccagaatagtaacgctgacattgagaatcgtctgggctactcggcagcacaatgttcgtcttgcgatagccgccaatgtcttcgtcaatgcaggagttctcttgctctacatcatcaatctcattttcgcccagcgaattctccgcgccaaacagccaaggcttggctggcatcgaagcattagcctcgctctcaaggtcttctacgtcggtatcggagctgccctcatcctcgttatctactctgtcgttcagagctcttatacaaaaaacctacacatcctgcacgccacacgagatattcaacttgcagccaccacctatttgctcgtttttaccaccctgccattctggttactgctcgctgctcatatactcctacctaagtcagctgatgcggagttattcggtcacggaagcatgcgcagcaaagtcattatcctaacgatcacgacttgccttgcaatcattatcgctgggttcaagaccggggtggcgtgggaaacgcctcgtccagtttcaaatccagcttggtaccacaagaagcctgccttctacgtcttcaattttgtcctggagattctcattttgagcattttcaccttctcccgagtcgacaagcgattccacatccccaacggcagcaagggcccgggcgattactcacgacccgcgagcgagtcagtaacaatggagaagaacgaggccagtgatacagggagtgacaaggtttag

SEQ ID NO: 2183 - protein, 312 aa, Muscodor strobelii
  misc_feature: SGI Peptide ID NO. 560349
  misc_feature (3)..(311): NCBI GI: 67903228 Blast Desc: AN8601.2 [Aspergillus nidulans FGSC A4] gi|40741445|gb|EAA60635.1| AN8601.2 [Aspergillus nidulans FGSC A4] gi|259483184|tpe|CBF78354.1| TPA: conserved [Aspergillus FGSC
  misc_feature (1)..(312): NCBI GI: 119499728 Blast Desc: NFIA_102080 [Neosartorya fischeri NRRL 181] gi|119414786|gb|EAW24724.1| conserved [Neosartorya fischeri NRRL 181]
  misc_feature (4)..(312): NCBI GI: 115383662 Blast Desc: conserved [Aspergillus terreus NIH2624] gi|114196070|gb|EAU37770.1| conserved [Aspergillus terreus NIH2624]
  misc_feature (5)..(296): NCBI GI: 121708851 Blast Desc: conserved [Aspergillus clavatus NRRL 1] gi|119400415|gb|EAW10841.1| conserved [Aspergillus clavatus NRRL 1]
  misc_feature (1)..(306): NCBI GI: 159125679 Blast Desc: conserved [Aspergillus fumigatus A1163]
  misc_feature (3)..(309): NCBI GI: 169785453 Blast Desc: [Aspergillus oryzae RIB40] gi|83775935|dbj|BAE66054.1| protein product [Aspergillus oryzae]
  misc_feature (1)..(306): NCBI GI: 70993126 Blast Desc: conserved [Aspergillus fumigatus Af293] gi|66849045|gb|EAL89373.1| conserved [Aspergillus fumigatus Af293]
  misc_feature (44)..(309): NCBI GI: 238506457 Blast Desc: conserved [Aspergillus flavus NRRL3357] gi|220689143|gb|EED45494.1| conserved [Aspergillus flavus NRRL3357]
  misc_feature (1)..(310): NCBI GI: 256726981 Blast Desc: NECHADRAFT_99262 [Nectria haematococca mpVI 77-13-4]
  misc_feature (14)..(311): NCBI GI: 46136597 Blast Desc: FG09814.1 [Gibberella zeae PH-1]
  misc_feature: Useful for introducing or modulating the production of volatile compounds
MSQPSGPPYASPNASPGGLPSIIPDVPIDAVGIVIYLSFAIMNMTILQTNLKRGHKFIMSGMLFGFSMSRIVTLTLRIVWATRQHNVRLAIAANVFVNAGVLLLYIINLIFAQRILRAKQPRLGWHRSISLALKVFYVGIGAALILVIYSVVQSSYTKNLHILHATRDIQLAATTYLLVFTTLPFWLLLAAHILLPKSADAELFGHGSMRSKVIILTITTCLAIIIAGFKTGVAWETPRPVSNPAWYHKKPAFYVFNFVLEILILSIFTFSRVDKRFHIPNGSKGPGDYSRPASESVTMEKNEASDTGSDKV

SEQ ID NO: 2184 - DNA, 1464 bp, Muscodor strobelii
  misc_feature: SGI cDNA ID NO. 560350
  misc_feature: Elevated expression when VOC is produced
  misc_feature: Encodes the peptide sequence at SEQ ID NO 2185
atggcgagcgtaataacagaaaaacctggggaggtttcgcatatagagaaggggcaacttgatatgagcaatggcaaactagcacattcttacaccgagattctcgacgagagacgtaataggcaatttaaccgtcgccttgatatccgcatcatacctctgtgttgctggctgtatctgttgaattttctcgacagaggtaatattgggaacgccaaagtcctcaaccaggaaacgggtaacgatttgttgcagcagactggaatgtcggcttatggctattcgctcaccgtgaccctattctcattggcgtatgccatatttgaagtaccatcaaattggattatgaagcaccgcgtgccgccaaacatctggcttgctacattgcttggtgcatggggagctgtcacccttggattcgctggcgtccagaattacccgaccgtattggttcttcgacttctcatcggaatcttcgaagcaggtttctttcctggcattgtatatctgatcacgatttggtatcgttacaatgaacgcgctctacgcatagcacttgtcgtggctttttgcaatcttgccggtgcgttcggtgggagcatagcctatggtattgggcaggtcaatggagcgagcggtctccaggggtttcgatggctgttcatcgtggaaggggtcatcaccatcttgactgtgataccgacggtgctcattctccccaattatccgtcgaaagcgaaatttcttagtgaagccgaccgaaactttgcacaagaaagactcagagaacgaggcggtggccataacagagaacacgcctctcgccgagaattgctcgagactttcttcaatcctcggatgctggcacattacattgcctatattgctaatgtgatcactcagggttcttttacttttttcgcaccgacgatcgtcactggtcttgggttcaaatccatcgaagctcagcttctcacagttcctccctgggtagtgggcttcattgtggctataattctctcgtactctgccgatcatttcaacgccagaggctggcatatcagcgctatatctgtggtaggaggttcaggatggttaactgcaggattactcccacccgatgcttatatcaagcgatatggatgtctagtcctagctgctgcaggagcatttccagcagctccagcgatgacaaattgggtgacctgcaacagccccagcctattcacaattccattcgcaattgctctacataattcttcggctggaattggccagatcatcgcgcaatggatctggcggccaagcgaagcaaagcaaggatatcctaccggaaatttcgtgtgcgcagcgagtaactttttcgtcgctttcgtgacactcggtctcaggctctggtacggaaggatgaacaagatcggtgcattagacgcgagaggcgagaagcggacctggtcatattaa

SEQ ID NO: 2185 - protein, 487 aa, Muscodor strobelii
  misc_feature: SGI Peptide ID NO. 560350
  misc_feature (55)..(430): Pfam Id: PF07690 Pfam Desc: Major Facilitator Superfamily
  misc_feature (7)..(486): NCBI GI: 189209990 Blast Desc: MFS transporter [Pyrenophora tritici-repentis Pt-1C-BFP] gi|187977420|gb|EDU44046.1| MFS transporter [Pyrenophora tritici-repentis Pt-1C-BFP]
  misc_feature (40)..(487): NCBI GI: 256724733 Blast Desc: NECHADRAFT_48085 [Nectria haematococca mpVI 77-13-4]
  misc_feature (7)..(472): NCBI GI: 119499481 Blast Desc: MFS transporter, [Neosartorya fischeri NRRL 181] gi|119414662|gb|EAW24601.1| MFS transporter, [Neosartorya fischeri NRRL 181]
  misc_feature (11)..(472): NCBI GI: 145248698 Blast Desc: An14g00590 [Aspergillus niger] gi|134081356|emb|CAK41858.1| protein product [Aspergillus niger]
  misc_feature (46)..(479): NCBI GI: 119486919 Blast Desc: MFS transporter, [Neosartorya fischeri NRRL 181] gi|119410536|gb|EAW20482.1| MFS transporter, [Neosartorya fischeri NRRL 181]
  misc_feature (15)..(487): NCBI GI: 189210253 Blast Desc: MFS transporter [Pyrenophora tritici-repentis Pt-1C-BFP] gi|187977551|gb|EDU44177.1| MFS transporter [Pyrenophora tritici-repentis Pt-1C-BFP]
  misc_feature (33)..(487): NCBI GI: 255936103 Blast Desc: Pc13g06440 [Penicillium chrysogenum Wisconsin 54-1255] gi|211583698|emb|CAP91713.1| Pc13g06440 [Penicillium chrysogenum Wisconsin 54-1255]
  misc_feature (39)..(484): NCBI GI: 121714367 Blast Desc: MFS transporter, [Aspergillus clavatus NRRL 1] gi|119402948|gb|EAW13368.1| MFS transporter, [Aspergillus clavatus NRRL 1]
  misc_feature (6)..(471): NCBI GI: 145606468 Blast Desc: MGG_02315 [Magnaporthe grisea 70-15] gi|145014114|gb|EDJ98755.1| MGG_02315 [Magnaporthe grisea 70-15]
  misc_feature (40)..(472): NCBI GI: 256735503 Blast Desc: [Nectria haematococca mpVI 77-13-4]
  misc_feature: Useful for introducing or modulating the production of volatile compounds
MASVITEKPGEVSHIEKGQLDMSNGKLAHSYTEILDERRNRQFNRRLDIRIIPLCCWLYLLNFLDRGNIGNAKVLNQETGNDLLQQTGMSAYGYSLTVTLFSLAYAIFEVPSNWIMKHRVPPNIWLATLLGAWGAVTLGFAGVQNYPTVLVLRLLIGIFEAGFFPGIVYLITIWYRYNERALRIALVVAFCNLAGAFGGSIAYGIGQVNGASGLQGFRWLFIVEGVITILTVIPTVLILPNYPSKAKFLSEADRNFAQERLRERGGGHNREHASRRELLETFFNPRMLAHYIAYIANVITQGSFTFFAPTIVTGLGFKSIEAQLLTVPPWVVGFIVAIILSYSADHFNARGWHISAISVVGGSGWLTAGLLPPDAYIKRYGCLVLAAAGAFPAAPAMTNWVTCNSPSLFTIPFAIALHNSSAGIGQIIAQWIWRPSEAKQGYPTGNFVCAASNFFVAFVTLGLRLWYGRMNKIGALDARGEKRTWSY

SEQ ID NO: 2186 - DNA, 2067 bp, Muscodor strobelii
  misc_feature: SGI EST ID NO. CUFF.5544.1
  misc_feature: Variant of the nucleotide sequence at SEQ ID NO 2184
cgaccagcagagctcacttttccgattactcttcataagtgccggcaacgcatgaggtagacgttctaatcctgacggcaataggttctttggctaccccgcatactacctgacggccaactgacatacactatggacctctggacttctctccgaaatgtgaaatgctggttattaagatacggaaataatttgggcctgtgagaggggtagttactgatctatgaactcttatattcgacgaggtgcttgctcggaggtctgagtagaacttgcattcacgcatctctgtcgtccattttatgatttgtatttgaatcgcacaactgctgccgagggagcgcgaaacggtagcctttcgcaatggcgagcgtaataacagaaaaacctggggaggtttcgcatatagagaaggggcaacttgatatgagcaatggcaaactagcacattcttacaccgagattctcgacgagagacgtaataggcaatttaaccgtcgccttgatatccgcatcatacctctgtgttgctggctgtatctgttgaattttctcgacagaggtaatattgggaacgccaaagtcctcaaccaggaaacgggtaacgatttgttgcagcagactggaatgtcggcttatggctattcgctcaccgtgaccctattctcattggcgtatgccatatttgaagtaccatcaaattggattatgaagcaccgcgtgccgccaaacatctggcttgctacattgcttggtgcatggggagctgtcacccttggattcgctggcgtccagaattacccgaccgtattggttcttcgacttctcatcggaatcttcgaagcaggtttctttcctggcattgtatatctgatcacgatttggtatcgttacaatgaacgcgctctacgcatagcacttgtcgtggctttttgcaatcttgccggtgcgttcggtgggagcatagcctatggtattgggcaggtcaatggagcgagcggtctccaggggtttcgatggctgttcatcgtggaaggggtcatcaccatcttgactgtgataccgacggtgctcattctccccaattatccgtcgaaagcgaaatttcttagtgaagccgaccgaaactttgcacaagaaagactcagagaacgaggcggtggccataacagagaacacgcctctcgccgagaattgctcgagactttcttcaatcctcggatgctggcacattacattgcctatattgctaatgtgatcactcagggttcttttacttttttcgcaccgacgatcgtcactggtcttgggttcaaatccatcgaagctcagcttctcacagttcctccctgggtagtgggcttcattgtggctataattctctcgtactctgccgatcatttcaacgccagaggctggcatatcagcgctatatctgtggtaggaggttcaggatggttaactgcaggattactcccacccgatgcttatatcaagcgatatggatgtctagtcctagctgctgcaggagcatttccagcagctccagcgatgacaaattgggtgacctgcaacagccccagcctattcacaattccattcgcaattgctctacataattcttcggctggaattggccagatcatcgcgcaatggatctggcggccaagcgaagcaaagcaaggatatcctaccggaaatttcgtgtgcgcagcgagtaactttttcgtcgctttcgtgacactcggtctcaggctctggtacggaaggatgaacaagatcggtgcattagacgcgagaggcgagaagcggacctggtcatattaaacctcccccctcttctccctcttgtgaagatgagataattaggatggcaactcttgtattcatgtaccaagctcttaatgcagaaagcagggtttttttttatcatttgtaggtatagggcattattaacatgtcagtttggctcctatccttcacctggaaacaattcaagctgtgaaatgggcgggctcatggtataatgtcacaaagtggcccacctattcgggatagtcacctgag

SEQ ID NO: 2187 - DNA, 978 bp, Muscodor strobelii
  misc_feature: SGI cDNA ID NO. 560351
  misc_feature: Encodes the peptide sequence at SEQ ID NO 2188
atgtctgaatttactatcttcagtgatcttcccccagagctacgactcatcatctgggatatggcactccttgaagaagtatctaatcgtgtcgtgctcctatttgattaccgcgttatccctatggagtatttgattagtccttttctctcagtcaattatgagagccgagtacgcgcgcttcgactctatgatactcaactcagtgtccacgaagtacccgcactcgattctgacgctgaaatgtacatcaaattttacgaaccagacagagacaattcggagcccgacagcttcgacatattattcaacgccttcagagattgtatgctcggagccaacactgcaaaaactatccgtggcaccgacgagagcgacgagaatagccttggagtgctatatattagcccaaagttagataagttcgtcatagctgtccagaaaagacacgagggcggtgaagtggtctcggtcgaggattgctatccaattttcgaaccattttacgccggaacaagggctgaattgtgcggcgatccacccgaagctggatgcccgtccttttaccacatcacatcgaagatgaattcatcagcccttcgagccatcgagacggtagtgcttgccgaagacgagtccaccgacgaatatctcgacgacaacctttattcaggccttgatacaggcatggacttcgacgacgaagccaacatactttggaataccaaagtctttcagggtctagtgttctgggagcacgtatcctatactaatgggacggttgctttcttgcaagacattgcgcacaagccggctgcacagcttggcattcgacgctggactaaatgcacgccacgaaactcgcccggtgacgaatgggtattgcgtgacgttgaggcatggaagaaggtgtggcttgcttttcacgacggaccggagatggacttggagtccctggatctggaaacaattatctga

SEQ ID NO: 2188 - protein, 325 aa, Muscodor strobelii
  misc_feature: SGI Peptide ID NO. 560351
MSEFTIFSDLPPELRLIIWDMALLEEVSNRVVLLFDYRVIPMEYLISPFLSVNYESRVRALRLYDTQLSVHEVPALDSDAEMYIKFYEPDRDNSEPDSFDILFNAFRDCMLGANTAKTIRGTDESDENSLGVLYISPKLDKFVIAVQKRHEGGEVVSVEDCYPIFEPFYAGTRAELCGDPPEAGCPSFYHITSKMNSSALRAIETVVLAEDESTDEYLDDNLYSGLDTGMDFDDEANILWNTKVFQGLVFWEHVSYTNGTVAFLQDIAHKPAAQLGIRRWTKCTPRNSPGDEWVLRDVEAWKKVWLAFHDGPEMDLESLDLETII

SEQ ID NO: 2189 - DNA, 1275 bp, Muscodor strobelii
  misc_feature: SGI cDNA ID NO. 560352
  misc_feature: Encodes the peptide sequence at SEQ ID NO 2190
atgattgatcgcagctcgcagcccatcaccgtggcatcgtcctctgtatcggatggccacggcacacacgcgcaacagattgaggattggttatcagcggcctctcgtacgaatagcaatagttcagtaccagaagaaatgccgcttccacatatggccagtcatacctttgaatcacccctaccccggactaccatgtcaaacgcatgggatgttggccctcgccaccgtcgcatcctccacatcgatggatggccacgccaaacaccatgcgacccaataggcttacacccaaaggtccactggcttgacccggcgaagcttcatgaggcatgcagcatcctcgaacagcagcagctgagcttgtcagatatacaaaaggtcaaagacgccttcgaatccgtggaaccgctcgcagcacataccaacgaggcatttctaggcagcgtatactgggagtacgcacagtccttcagtctgtacgcccatctgctcaaaatccttcactcttccgatgagacccagctgccgagtgccggatccttgacgcccaagatgcttgaacagggcatcaaaatcgcggtccgcgggttcgagcatttttgtctcttcctgggcgatatctatatatctgctgcaccagagccaaccttagcctttccgccaatgttatctgatcgctttgaaagaacgcggttttctatttggccttggaacactgccgcgccgtttagtcgaggtcgtcactggggtctgattgtttacgataaagagaatgcgacagcgtactactttgactcgctagccagtgatgggcatggccacacaagacagaaggccttggagtcaaactttcgcctattccttcaaaatgcggggctcctccccgacatctttgggtttataatggtcgagacgccacaacagattcgcaattacacgagcggcttacatgtcatcgagtccgtacgagccttctttcatgaacatagacttgagaattggcattattcgcttctgtacgctgcacgccagcagcaacactggctggccaaagaagccgacctggagcttcaaatggtacgatattggtcttactggtctggtgccgcgtttaggagatacggcagtgacccaggtgaatcacactatcagcagcatattcgacagctagagccgtctagcaccttgatttctggccgggagagtcggtaccagattcaacgtggctcactttcccctcgtgctaagtgtaaccacatggaccacacttaa

SEQ ID NO: 2190 - protein, 424 aa, Muscodor strobelii
  misc_feature: SGI Peptide ID NO. 560352
  misc_feature (209)..(328): NCBI GI: 19112400 Blast Desc: nedd8 protease Nep2 [Schizosaccharomyces pombe] gi|31340498|sp|O13612.1|NEP2_SCHPO RecName: Full=NEDD8-specific protease 2; AltName: Full=Meiotically up-regulated gene 120 pi021
MIDRSSQPITVASSSVSDGHGTHAQQIEDWLSAASRTNSNSSVPEEMPLPHMASHTFESPLPRTTMSNAWDVGPRHRRILHIDGWPRQTPCDPIGLHPKVHWLDPAKLHEACSILEQQQLSLSDIQKVKDAFESVEPLAAHTNEAFLGSVYWEYAQSFSLYAHLLKILHSSDETQLPSAGSLTPKMLEQGIKIAVRGFEHFCLFLGDIYISAAPEPTLAFPPMLSDRFERTRFSIWPWNTAAPFSRGRHWGLIVYDKENATAYYFDSLASDGHGHTRQKALESNFRLFLQNAGLLPDIFGFIMVETPQQIRNYTSGLHVIESVRAFFHEHRLENWHYSLLYAARQQQHWLAKEADLELQMVRYWSYWSGAAFRRYGSDPGESHYQQHIRQLEPSSTLISGRESRYQIQRGSLSPRAKCNHMDHT

SEQ ID NO: 2191 - DNA, 3128 bp, Muscodor strobelii
  misc_feature: SGI EST ID NO. CUFF.5645.1
  misc_feature: Variant of the nucleotide sequence at SEQ ID NO 2189
cggtgccagtgacagcagggcgaagcaataggcgggccgtgggtggcagatggtttgggggatatggcctgcctgatggggttccacgctaccacggcccattacagcggcgggagtagagccccatctctctgttccgccatctagcctgccttttcctcagcgcctaggctccaatgccactcactgccgtcggcctcacgacactgccttatcgatctccagcaggcgctgtctaaatacatcatcgtcgctgttcattcgttcattggaccgtgggccccgccagagtgaggttccgagatagatcatccagccaactcggccgttgtcgccttactcctcaccgactgactcgttcggcactggactgatgatggaaactacttctctgccaaggctgccgccggcttccgggacgcgtcgtaatcggaatgcaagtcaactaatcggtcccttgtcgaagggcattgtgtacggcgttggaggctcatcaatagcgccaagtgaccatatgcacaccaatgtcgataactctctagctgcggtagcatcaaaagacggcccggcaagccttggaattcgaaggtgccgccacccttgctcaaacggcgccgccacacgatcgggacgcccctgcaagcataaatgctgccaccaaggccttcttcctaaggcgtcggatccggacttactctctgccaatgtgtcaagccacgattccgaatacgagcacatagcggaggaggatattctcccgctgttcgacatgattgatcgcagctcgcagcccatcaccgtggcatcgtcctctgtatcggatggccacggcacacacgcgcaacagattgaggattggttatcagcggcctctcgtacgaatagcaatagttcagtaccagaagaaatgccgcttccacatatggccagtcatacctttgaatcacccctaccccggactaccatgtcaaacgcatgggatgttggccctcgccaccgtcgcatcctccacatcgatggatggccacgccaaacaccatgcgacccaataggcttacacccaaaggtccactggcttgacccggcgaagcttcatgaggcatgcagcatcctcgaacagcagcagctgagcttgtcagatatacaaaaggtcaaagacgccttcgaatccgtggaaccgctcgcagcacataccaacgaggcatttctaggcagcgtatactgggagtacgcacagtccttcagtctgtacgcccatctgctcaaaatccttcactcttccgatgagacccagctgccgagtgccggatccttgacgcccaagatgcttgaacagggcatcaaaatcgcggtccgcgggttcgagcatttttgtctcttcctgggcgatatctatatatctgctgcaccagagccaaccttagcctttccgccaatgttatctgatcgctttgaaagaacgcggttttctatttggccttggaacactgccgcgccgtttagtcgaggtcgtcactggggtctgattgtttacgataaagagaatgcgacagcgtactactttgactcgctagccagtgatgggcatggccacacaagacagaaggccttggagtcaaactttcgcctattccttcaaaatgcggggctcctccccgacatctttgggtttataatggtcgagacgccacaacagattcgcaattacacgagcggcttacatgtcatcgagtccgtacgagccttctttcatgaacatagacttgagaattggcattattcgcttctgtacgctgcacgccagcagcaacactggctggccaaagaagccgacctggagcttcaaatggtacgatattggtcttactggtctggtgccgcgtttaggagatacggcagtgacccaggtgaatcacactatcagcagcatattcgacagctagagccgtctagcaccttgatttctggccgggagagtcggtaccagattcaacgtggctcactttcccctcgtgctaagtgtaaccacatggaccacacttaatggaaacaaccccacaggatgtaattatcctcgggatgcttccaacacgcagttcacatcaccagaatgcaaaatcatcggggggctcgatctgtctatatgaatagtcctgatcacaagcgaaaacgtgtaagaaagaagtcgttgagtgactgcgagaaagagcatcaaggaggaaactgcaaaatgctcacctggtaattcagccgatgtgcctattagaccatagcgaatgctaaattcagcgagtaatagatacgaagcaatcggctctatagcatgggcagacacgcacctaatggaattaatctcgcaaggcatctacaaatccacacggctgggaatggccaagataatacaagcattaatattaatttggtctatctcgataacgatgtattccaaaggcgcagaccctctcaagccgtgagcttgaccgtcgactgaaaaaaaaaagcatcaaatagttctatcgctgtgagccaccattgcttcttttcaggatctccaaggacggaggcgaccttggctctgcagcacacaaaccgtgtgaccattgcaagagattcgatcaggagcttggcttccaagcattggtaccccacgatattatcaccttgatgttttccaaactcagctctgcgggcgcgtaagtcggacaaggtcctacaaatcgcatagggtgaatgtgcttggcttgggcagtggcgtagggctgccaaagaaagaacgcaataattggcggctcttttcggccttattacgcatgacgaaacagtatgctatttcgtaagaaagctctgccgtgacggagtggatgcccaagcaatgctcgtcgtggtgggagtttggattttccttcaagtaggtggccagtgcctgttgagtcgcgagatcgagtaggataggttctggcgagccaacgagccgagtgagtagctgtaggctcgaaccatgtcaacagggcacaaagcgagacgagggcgtcggatcgagatttgttacgttgggaataacttacatctattgttctatctggcgtgtttccggacagctacgagttctgataggctttttaaaaaaa

SEQ ID NO: 2192 - DNA, 1266 bp, Muscodor strobelii
  misc_feature: SGI cDNA ID NO. 560353
  misc_feature: Elevated expression when VOC is produced
  misc_feature: Encodes the peptide sequence at SEQ ID NO 2193
atgtctcagcagatgatgaagaaagacgcacagcacaagacgaaggttgccctcaccgctcccaccgctcccaccactgtcacctctggcgagactagcatcgagcccgtcggcactcctacctctcccgttatcatggtcagcggcaagttctactctaccgagaagatcgctgctatgggcgttgccctcgagactgcccgctgttctggccagttccctcagactcgtaccaccacctacaacgtccaggctgtcattgatgactatgaggatctccagtgcctcaatgctgctcttcacgagaccggccaggttctcaacatccgtgagcatgctactcaccccgccattggacccctttacgtctcgatccagcgtcgcatccaggatcgtgacactactagtggcgagtacgccgctgaaaccggcgtctacaatcttgttcgccacgccgtccacaatgttctgcgcaacaatggttttactggccagaacaacaacagtgccgtcgagtcggctgctactcgcatcaccaatgagattcgtgccactgtccatggtcagggtgttaccggtgccaatggtgttactcaggacaacatgaaaaatgtcatcaatgaaatcttcaccgccattcagggtgctctcggggagtacaacaacatccatggcgatcaggtccgtatcatgtatgacatgacccatgatcagcgcactgctagtgaaggtcttcgtgtcattactaatgatcagcgtcgcctcagcgaggcccaacgcatcctcgccgagtttcagggctctcagattaatgctattggtggccatttcaatgccatcgaaggtcacgttcattcctttggtaccaagatcaatgccatgggtactcttgtcacttcggccaacagcaatgttcaagttctttccgccaacgtcaacgctatgtacgccatgctccacgtgatccctcagatgattgccgacgcagtccgtcacatgcttcctgatatcatctcacctaccgtcaacaaagctcttcgcgatgtcaataccaacagccttgtctcccgcatgcaaggtctcgtcaatatcatggcccagtctgaagtccttgagagtgctggcaaggggtctttcggcaaggatgagaagaacggtaccgccaaggacggtaaggagaagtgcggcttcttcaagcgtatgtttggcttcagtggtcgtaaggacagtcgttcgggtgggtttgttgccatgggtactatttag

SEQ ID NO: 2193 - protein, 421 aa, Muscodor strobelii
  misc_feature: SGI Peptide ID NO. 560353
  misc_feature (52)..(403): NCBI GI: 256732504 Blast Desc: NECHADRAFT_78768 [Nectria haematococca mpVI 77-13-4]
  misc_feature: Useful for introducing or modulating the production of volatile compounds
MSQQMMKKDAQHKTKVALTAPTAPTTVTSGETSIEPVGTPTSPVIMVSGKFYSTEKIAAMGVALETARCSGQFPQTRTTTYNVQAVIDDYEDLQCLNAALHETGQVLNIREHATHPAIGPLYVSIQRRIQDRDTTSGEYAAETGVYNLVRHAVHNVLRNNGFTGQNNNSAVESAATRITNEIRATVHGQGVTGANGVTQDNMKNVINEIFTAIQGALGEYNNIHGDQVRIMYDMTHDQRTASEGLRVITNDQRRLSEAQRILAEFQGSQINAIGGHFNAIEGHVHSFGTKINAMGTLVTSANSNVQVLSANVNAMYAMLHVIPQMIADAVRHMLPDIISPTVNKALRDVNTNSLVSRMQGLVNIMAQSEVLESAGKGSFGKDEKNGTAKDGKEKCGFFKRMFGFSGRKDSRSGGFVAMGTI

SEQ ID NO: 2194 - DNA, 2659 bp, Muscodor strobelii
  misc_feature: SGI EST ID NO. CUFF.6169.1
  misc_feature: Variant of the nucleotide sequence at SEQ ID NO 2192
gggcactcttcattgtatctagcctttatggctttgacagctcagcaagtgacataaatctgcgcagtcacaaggcgctgtacccccagcccctcagcagacctaggaacttttcgtcttctctccgcctccctaccagtctttctcataccaccacaacaacaaaaaccacgatcacagaaaggttgttacatctcaagcggtaagtcagcccatttctaagtgaaggtctgttattcgcaaagcgtgtgtctgcttatccgattctgtcatccactcccgccttgccactttactacaaaacctgccgcactcctatcttccgcctctcctttccacacagacactatacaccaaacttcgaaagtaggtacccccaaccacccatcctcattctgccattcaacaccacccagttgattctgctacttgaatcgagtcttcccttacacattcacgtctctccctcccggacgcatgtttctctacctcgttgcatttcagtagtaagccctcccagttgtacacactattttcatacatcatccacgtcgccttttccaggttggttacccatcatctaccaccaacctttgatgccaaccatatttctgatttcgctccatttgccttgcctttcttattcaaaacgcaagcagcccagccatctcatactcaacccgaaaaatctggcagttgcgtgtgcctaaggcgcatctcgccgactggtattttcccttcttcataacacacacctacacttcatcccaactcgagacttccatgttttttgtccttcaagtcacccaaagctaacatatatcgtttcattcaatctactcggagcacgctatcagctttcagacgtcacgtcaaccaacacaaccacaaagttagcaccagtcacctcacttccatacgcccacactatacaacccaaactcagccagcttccgggttcatgatcctcatctcaccatcgtacactcttactcaacaaagtcacaataactgacctctatgccgccaaccttgaactaagtcacaactagttccaccatcatcatgtctcagcagatgatgaagaaagacgcacagcacaagacgaaggttgccctcaccgctcccaccgctcccaccactgtcacctctggcgagactagcatcgagcccgtcggcactcctacctctcccgttatcatggtcagcggcaagttctactctaccgagaagatcgctgctatgggcgttgccctcgagactgcccgctgttctggccagttccctcagactcgtaccaccacctacaacgtccaggctgtcattgatgactatgaggatctccagtgcctcaatgctgctcttcacgagaccggccaggttctcaacatccgtgagcatgctactcaccccgccattggacccctttacgtctcgatccagcgtcgcatccaggatcgtgacactactagtggcgagtacgccgctgaaaccggcgtctacaatcttgttcgccacgccgtccacaatgttctgcgcaacaatggttttactggccagaacaacaacagtgccgtcgagtcggctgctactcgcatcaccaatgagattcgtgccactgtccatggtcagggtgttaccggtgccaatggtgttactcaggacaacatgaaaaatgtcatcaatgaaatcttcaccgccattcagggtgctctcggggagtacaacaacatccatggcgatcaggtccgtatcatgtatgacatgacccatgatcagcgcactgctagtgaaggtcttcgtgtcattactaatgatcagcgtcgcctcagcgaggcccaacgcatcctcgccgagtttcagggctctcagattaatgctattggtggccatttcaatgccatcgaaggtcacgttcattcctttggtaccaagatcaatgccatgggtactcttgtcacttcggccaacagcaatgttcaagttctttccgccaacgtcaacgctatgtacgccatgctccacgtgatccctcagatgattgccgacgcagtccgtcacatgcttcctgatatcatctcacctaccgtcaacaaagctcttcgcgatgtcaataccaacagccttgtctcccgcatgcaaggtctcgtcaatatcatggcccagtctgaagtccttgagagtgctggcaaggggtctttcggcaaggatgagaagaacggtaccgccaaggacggtaaggagaagtgcggcttcttcaagcgtatgtttggcttcagtggtcgtaaggacagtcgttcgggtgggtttgttgccatgggtactatttagatgatggaagtttggtgaagtttttttttgaccttcgtggtcgtagtggccaccaagtagggtagacagggcacgacttgcattcggcctggctccatggtaacaacactgttcccggtgccataaggcgttaaaacaaaaggaaaattaggaaagaaaaaagaggctgtttggtcctataatattgtgacatgacacgtaaagaacggggagtttagagactcgagatggttccccggcgttgtgggttgactatgggtcctatgctgttgataataccatcttgttgtcgaagtgctgtgccagttctcttgttttaatgcttacg

SEQ ID NO: 2195 - DNA, 852 bp, Muscodor strobelii
  misc_feature: SGI cDNA ID NO. 560354
  misc_feature: Encodes the peptide sequence at SEQ ID NO 2196
atgaaagaagtcggtttccccgccatcaagctggaagatatcgagcgatgggccaatgcggatggcactttcggtcctgctacccaagcccacgacgcctccgatctgtcggccaccgagaccttataccaactcgagcggtgcgccaacaaagccatgaccctatccaaccccgaccgctttgctcaagttctgctcgctaccgaggcccagcagaaggccttcgccagcttctggcctgaattccgcaggatcaatcaggagcagggccgctggatctctccggtccgtctcgatgctggagactcgggtcgtacgcaatggtggactagagcgtgtggcaaggatactaaaggtgccgatcaggagccgtcggctgcccgcaaaatcagaattgccaggatcctcgtgcctttcatcatggcttggcgtgctggcagtcgtgcccatgccatgggcagtgccatctgcgagggttggacgccaggagaagaaatgcaggagatagtggttgcggggtcggatatcaacccgctctcgccagtgctacccagacaatacgcactaagttgcgccttctcccccacggcgatccaagagtgctttaagacaaagccaatcgtcaactgggacaagcttgctgcccgagccggtttcaaagacggtaccacggccaaggcccactacgaaccacttctcctccctcgcaaccacgccggcgaaacgcccgagacgcccgagacgcgacagacctctcgcggcaatgacgctacttcgatacgagtcaaaaccgagaccgacgaccgttacatgccacgttaccactctgaccttgggggtagagagatttga

SEQ ID NO: 2196 - protein, 283 aa, Muscodor strobelii
  misc_feature: SGI Peptide ID NO. 560354
MKEVGFPAIKLEDIERWANADGTFGPATQAHDASDLSATETLYQLERCANKAMTLSNPDRFAQVLLATEAQQKAFASFWPEFRRINQEQGRWISPVRLDAGDSGRTQWWTRACGKDTKGADQEPSAARKIRIARILVPFIMAWRAGSRAHAMGSAICEGWTPGEEMQEIVVAGSDINPLSPVLPRQYALSCAFSPTAIQECFKTKPIVNWDKLAARAGFKDGTTAKAHYEPLLLPRNHAGETPETPETRQTSRGNDATSIRVKTETDDRYMPRYHSDLGGREI

SEQ ID NO: 2197 - DNA, 3067 bp, Muscodor strobelii
  misc_feature: SGI EST ID NO. CUFF.5976.3
  misc_feature: Variant of the nucleotide sequence at SEQ ID NO 2195
gaaaagacctcgaggtctgcaaccactaggcgaacggtgcgagacactatgctgctgtgacgtagctgcaggcatatttgaggcacactgctcgattggccggaggcaaagtaacgaagcggcaccctaggaagtagaagcaaggctgtgcggggtgaggcgtggtagacatcacaagtagtcgttagtcggtccagagttatacaaatatacagattgaatgtaggatgggactacgacttggtttatgtttggaagctaccgtatatatcgtcaaaataaactgactgtcctagttaacttgaaagtagcgaggctggctagagacatgtccaagatacatgtactcacatccaggtctcgaacgtctgtgcggacaatagagagtgtgaacaagagcgagactatctcggattcatccctatctttacacagtattataaagacgcgatctcctatcggtggctaatggcaatgctgtcgcgacacgttttcccctggcctgtgtcgtccatgcctgttggtaaggcggaacgcgtgtgtgggctgacaaggaatactataatgagactatcgcgaccgccgcgaacgcagtagccgcgcaccatacaagtgctagaccattatttcattctacaatttctaagtatgctaggaaggagctggttttgttctcgttaatgttaggtaggagcgcattgtaaagttgcgatttctacgtagagagatgatttgcggcagccaccccgcaccagcaattcgtcactgccttcccttccaccccgccagccctctttccttttcctacatccacatccacgcttgtcaccctcgtcaccctcgtcgcctacctcacgtcctgcaacccatccaatcctgcacagccaaacaggaaaaagtctcggacgccataccatgaacgacaccaagaaccaggttcctttctggagccctgccacctaccaagttagcatcgtcgcccactgtccaacatgcggcaatgaccacattccgactagcaagcaggcgaccatccaagtggtttgccccagtccgaaggagctctaggagagcatcctcgacgaggcaacctggtacgttcgacctcgacgtcttgacctgtctggtttgtactgatcacctgtctttctacttgcagggtccaagcatgggatatacgtgacgtctttgttgccttgggatgcgagcagcccttgcacatctcgaccacgatgaaagaagtcggtttccccgccatcaagctggaagatatcgagcgatgggccaatgcggatggcactttcggtcctgctacccaagcccacgacgcctccgatctgtcggccaccgagaccttataccaactcgagcggtgcgccaacaaagccatgaccctatccaaccccgaccgctttgctcaagttctgctcgctaccgaggcccagcagaaggccttcgccagcttctggcctgaattccgcaggatcaatcaggagcagggccgctggatctctccggtccgtctcgatgctggagactcgggtcgtacgcaatggtggactagagcgtgtggcaaggatactaaaggtgccgatcaggagccgtcggctgcccgcaaaatcagaattgccaggatcctcgtgcctttcatcatggcttggcgtgctggcagtcgtgcccatgccatgggcagtgccatctgcgagggttgtacgtgagcaggatcgaagagatgacttcatgatactgttgagagagcttgttggcgatacgcaagaagcgttctaaaataatggaaacaaaaaaagaaagggagatacacttccggccaagcagctagctggctaagtagaagcttgactgcttcggattgcgaactcggctggcccgcttataattgacgccttgcgggactaataacgcggggggctctattgtctagggacgccaggagaagaaatgcaggagatagtggttgcggggtcggatatcaacccgctctcgccagtgctacccagacaatacgcactaagttgcgccttctcccccacggcgatccaagttagcggagctgccgacgcggggttcctttagctaatgggctggggatgtttcttcaggccctttctctttctcttggttgctcttgatccacgaatgaagccatcgtctaggtctatcgcgtaacccacccattctcatccgaatcactcttcgcattccaatcatccaccccttcgtcgcggcacaaccacgatggcgtccaaccacgcgacctctggacagatcaccgccagcgacatggtggctgttgccaaagtctaggagtgctttaagacaaagccaatcgtcaactgggacaagcttgctgcccgagccggtttcaaagacggtaccacggccaaggcccactacgaaccacttctcctccctcgcaaccacgccggcgaaacgcccgagacgcccgagacgcgacagacctctcgcggcaatgacgctacttcgatacgagtcaaaaccgagaccgacgaccgttacatgccacgttaccactctgaccttgggggtagagagatttgagctggcgggtcagacatggaaggactttgagcagtgaggcctcgtgtacatacggaggatcaagtcatcgagaccgggcatgtcatcatgtctcaacgtagtagccttagacaaaggacatacatcgcataaacaaagctgtcttctaactgtttcaagttactatcgagtaccgctaccgaattcggtttccttataattagagcataattcccccatcagctccaaaataaaatcaccgccctcgtacacaaagtcccgaaatgccttcttcttccagagctcggaccggtggtctctcgcaatgtccactacgacattcctgagctcacatctagttcccggagtcgttgcgtatatctctcggatacagtcgaccacaagctcgctaatccagagctgttgtagttttgatttgaatctccccagagaatgctccttcagatcctccatgaggaaatagtccgctgctacatatacgcggaca

SEQ ID NO: 2198 - DNA, 639 bp, Muscodor strobelii
  misc_feature: SGI cDNA ID NO. 560355
  misc_feature: Encodes the peptide sequence at SEQ ID NO 2199
atggcacgcaaggaaaagaagaacaagtacggtggcctttatggcatcagaagtgaagacgtcggatctcccgtcatttacatcggcgaataccagtttcctgcccacgctgtcgtcctagcgagccaaagtctgtatttcgagaaggctctaggcgaacattttcgcgaggggcagacgaaagtgtttcgtttcgaagaaaagggtattatacatgctcactggagagtgttttcccacatgtatactggcgactactcggaaaacgccgcgcaagagctcgcaagtcaagatgacgacgagctggtcaaagatgtccgcgtatatgtagcagcggactatttcctcatggaggatctgaaggagcattctctggggagattcaaatcaaaactacaacagctctggattagcgagcttgtggtcgactgtatccgagagatatacgcaacgactccgggaactagatgtgagctcaggaatgtcgtagtggacattgcgagagaccaccggtccgagctctggaagaagaaggcatttcgggactttgtgtacgagggcggtgattttattttggagctgatgggggaattatgctctaattataaggaaaccgaattcggtagcggtactcgatag

SEQ ID NO: 2199 - protein, 212 aa, Muscodor strobelii
  misc_feature: SGI Peptide ID NO. 560355
  misc_feature (18)..(195): NCBI GI: 261194366 Blast Desc: BDBG_06436 [Ajellomyces dermatitidis SLH14081] gi|239588602|gb|EEQ71245.1| BDBG_06436 [Ajellomyces dermatitidis SLH14081]
  misc_feature (25)..(202): NCBI GI: 225557917 Blast Desc: BTB/POZ domain-containing protein [Ajellomyces capsulatus G186AR]
  misc_feature (25)..(202): NCBI GI: 240273973 Blast Desc: BTB/POZ domain-containing protein [Ajellomyces capsulatus H143]
  misc_feature (12)..(184): NCBI GI: 226290105 Blast Desc: [Paracoccidioides brasiliensis Pb18]
  misc_feature (12)..(184): NCBI GI: 225682675 Blast Desc: [Paracoccidioides brasiliensis Pb03]
  misc_feature (25)..(195): NCBI GI: 46115274 Blast Desc: FG03479.1 [Gibberella zeae PH-1]
  misc_feature (12)..(184): NCBI GI: 226285169 Blast Desc: [Paracoccidioides brasiliensis Pb01]
  misc_feature (9)..(211): NCBI GI: 119176043 Blast Desc: CIMG_09774 [Coccidioides immitis RS]
  misc_feature (25)..(195): NCBI GI: 242774191 Blast Desc: conserved [Talaromyces stipitatus ATCC 10500] gi|218722010|gb|EED21428.1| conserved [Talaromyces stipitatus ATCC 10500]
  misc_feature (25)..(200): NCBI GI: 240108794 Blast Desc: BTB/POZ domain containing protein [Coccidioides posadasii C735 delta SOWgp]
MARKEKKNKYGGLYGIRSEDVGSPVIYIGEYQFPAHAVVLASQSLYFEKALGEHFREGQTKVFRFEEKGIIHAHWRVFSHMYTGDYSENAAQELASQDDDELVKDVRVYVAADYFLMEDLKEHSLGRFKSKLQQLWISELVVDCIREIYATTPGTRCELRNVVVDIARDHRSELWKKKAFRDFVYEGGDFILELMGELCSNYKETEFGSGTR

SEQ ID NO: 2200 - DNA, 5449 bp, Muscodor strobelii
  misc_feature: SGI EST ID NO. CUFF.5977.2
  misc_feature: Variant of the nucleotide sequence at SEQ ID NO 2198
aacgagcggcggcgttctctgtctccttcacgctttagtcttcaggaattagtgcgattccaacaagcagatgcaaatgcctaaagagggccaggctatatctagcgttgtaccatttgtcgaaggggaagcgagggacgataggtgtgtttgcgggaatatcccactaatgaatctggagcctctggcggatggttagtccagacggaactcttgccgtagctgaacgacagatttgtcacaatagtgcactgggagcaaggggtatctgtagtctccagagctatggggatgcgaagcccaacccagacaattgtacatacacaatgacatgcacctatcacggggctcaactcaaaatggacactttgtctaggggaccctatgagagtatatagtcgatagtgacacaaattgagtcttggagcttgactggaaatgctagtctgttccggtaaggggcggctgcgtatcggacaagatcgaggtgatgtgcattagagcccagggatgtggctcatttgcttggagcttgccaggtgccacggccctgctccctgctccctgcgccctattggattggattctcgtggccatggcacgcaaggaaaagaagaacaagtacggtggcctttagtgagagatgggtgacagaatggcctcaggatctcgcatcacgcaaagaccgtatattagcgcagcaacccgccatagaacgtcatagtggcatcagaagtgaagacgtcggatctcccgtcgtacgtggcccgccagccagcaacggcgacgcagagattgcccaattgcaaaagtccctccttgagggaatcgcatagtgatttaacaatcacaaacatgccgacgtgaagatttacatcggcgaataccagtttcctgcccacgctgtcgtcctagcgagccaaagtctgtatttcgagaaggctctaggcgaacattttcgcgaggggcagacgaaagtgtttcgtttcgaagaaaagggtattatacatgctcactggagagtgttttcccacatgtatactggcgactactcggaaaacgccgcgcaagagctcgcaagtcaagatgacgacgagctggtcaaagatgtccgcgtatatgtagcagcggactatttcctcatggaggatctgaaggagcattctctggggagattcaaatcaaaactacaacagctctggattagcgagcttgtggtcgactgtatccgagagatatacgcaacgactccgggaactagatgtgagctcaggaatgtcgtagtggacattgcgagagaccaccggtccgagctctggaagaagaaggcatttcgggactttgtgtacgagggcggtgattttattttggagctgatgggggaattatgctctaattataaggaaaccgaattcggtagcggtactcgatagtaacttgaaacagttagaagacagctttgtttatgcgatgtatgtcctttgtctaaggctactacgttgagacatgatgacatgcccggtctcgatgacttgatcctccgtatgtacacgaggcctcactgctcaaagtccttccatgtctgacccgccagctcaaatctctctacccccaaggtcagagtggtaacgtggcatgtaacggtcgtcggtctcggttttgactcgtatcgaagtagcgtcattgccgcgagaggtctgtcgcgtctcgggcgtctcgggcgtttcgccggcgtggttgcgagggaggagaagtggttcgtagtgggccttggccgtggtaccgtctttgaaaccggctcgggcagcaagcttgtcccagttgacctaaacgtggcatcagtatatgctaagatgatcgggagagaaatacgagggagggagaaacgcacgattggctttgtcttaaagcactcctagactttggcaacagccaccatgtcgctggcggtgatctgtccagaggtcgcgtggttggacgccatcgtggttgtgccgcgacgaaggggtggatgattggaatgcgaagagtgattcggatgagaatgggtgggttacgcgatagacctagacgatggcttcattcgtggatcaagagcaaccaagagaaagagaaagggcctgaagaaacatccccagcccattagctaaaggaaccccgcgtcggcagctccgctaacttggatcgccgtgggggagaaggcgcaacttagtgcgtattgtctgggtagcactggcgagagcgggttgatatccgaccccgcaaccactatctcctgcatttcttctcctggcgtccctagacaatagagccccccgcgttattagtcccgcaaggcgtcaattataagcgggccagccgagttcgcaatccgaagcagtcaagcttctacttagccagctagctgcttggccggaagtgtatctccctttctttttttgtttccattattttagaacgcttcttgcgtatcgccaacaagctctctcaacagtatcatgaagtcatctcttcgatcctgctcacgtacaaccctcgcagatggcactgcccatggcatgggcacgactgccagcacgccaagccatgatgaaaggcacgaggatcctggcaattctgattttgcgggcagccgacggctcctgatcggcacctttagtatccttgccacacgctctagtccaccattgcgtacgacccgagtctccagcatcgagacggaccggagagatccagcggccctgctcctgattgatcctgcggaattcaggccagaagctggcgaaggccttctgctgggcctcggtagcgagcagaacttgagcaaagcggtcggggttggatagggtcatggctttgttggcgcaccgctcgagttggtataaggtctcggtggccgacagatcggaggcgtcgtgggcttgggtagcaggaccgaaagtgccatccgcattggcccatcgctcgatatcttccagcttgatggcggggaaaccgacttctttcatcgtggtcgagatgtgcaagggctgctcgcatcccaaggcaacaaagacgtcacgtatatcccatgcttggaccctgcaagtagaaagacaggtgatcagtacaaaccagacaggtcaagacgtcgaggtcgaacgtaccaggttgcctcgtcgaggatgctctcctagagctccttcggactggggcaaaccacttggatggtcgcctgcttgctagtcggaatgtggtcattgccgcatgttggacagtgggcgacgatgctaacttggtaggtggcagggctccagaaaggaacctggttcttggtgtcgttcatggtatggcgtccgagactttttcctgtttggctgtgcaggattggatgggttgcaggacgtgaggtaggcgacgagggtgacgagggtgacaagcgtggatgtggatgtaggaaaaggaaagagggctggcggggtggaagggaaggcagtgacgaattgctggtgcggggtggctgccgcaaatcatctctctacgtagaaatcgcaactttacaatgcgctcctacctaacattaacgagaacaaaaccagctccttcctagcatacttagaaattgtagaatgaaataatggtctagcacttgtatggtgcgcggctactgcgttcgcggcggtcgcgatagtctcattatagtattccttgtcagcccacacacgcgttccgccttaccaacaggcatggacgacacaggccaggggaaaacgtgtcgcgacagcattgccattagccaccgataggagatcgcgtctttataatactgtgtaaagatagggatgaatccgagatagtctcgctcttgttcacactctctattgtccgcacagacgttcgagacctggatgtgagtacatgtatcttggacatgtctctagccagcctcgctactttcaagttaactaggacagtcagtttattttgacgatatatacggtagcttccaaacataaaccaagtcgtagtcccatcctacattcaatctgtatatttgtataactctggaccgactaacgactacttgtgatgtctaccacgcctcaccccgcacagccttgcttctacttcctagggtgccgcttcgttactttgcctccggccaatcgagcagtgtgcctcaaatatgcctgcagctacgtcacagcagcatagtgtctcgcaccgttcgcctagtggttgcagacctcgaggtcttttcctgcatgatagagcaagagcctcttagccaatcgactccagaaacagccgttccctgcagatgtgccggctgccatgccttagcttttgcgtagttcagcctacaaggcggagcggagaagatccgcttttcttgtttacatccaaataaacagaccaaacttattgtgagccgattaaaagtgccttcctatcgaatctcccacaactcacaatagcgagctccagatggccacccagcctcgaacccatagtgattacacggtgggatagatctgcgcgctatcgaaggaacaggtagcggctatcgccatgctagaccagagacatcctaagctgcttaaaccaccgaatgacgacaatacctacattttaagatctatcagtcattataacatcgttataacctgctttcctgtaggtaagattggcctcgtttcggctgcaacagtggccacccatatgattcacgcttttccgtctatcaaattcgctttaatggttggtatcggcggcatcccactaaaagttaggcttggcgatgtcgttgtcggcatcccaatgggttaacaccccggagtgatgcaatgggatttaggcaaaaaaaaaggggggcgaatttattcgaacgggctcgctgaataacccccctcgcttgcttttaggtgccgtatcagaactttgggcggaacatgacttgcaagatttaaagataccgtcttatttgagcgacatggcgatgaaatgtcccaagttggcatcgaaatatctacgatttaacttgctttaagatgtgctttttaatgccgcctacgaccataacaaagccacaccacacccaaccgatgcacaagtcttaaaggaggaagaggatagttgttgatattgcaataagacctatattatttaaaggaagccccgaaatatgcgtacacactacggtttaatcgcatctggcaacaaagttatctagaacgccatttttcgagactcattatgccgagaccttgggggagatgtgctttgtatcgaaatggatcccatgtcttgttatatgagggatctgtgactatgcaaactcgcataagaacaaggcctagcgggagcatgcagctgcagtggccgcagcatatgctaaggaactgctgggatatgtccagccaagtgacgttgataaagaaaggacagtcaaggatatactcaatagcag

SEQ ID NO: 2201 - DNA, 534 bp, Muscodor strobelii
  misc_feature: SGI cDNA ID NO. 560356
  misc_feature: Encodes the peptide sequence at SEQ ID NO 2202
atgtcgaaggccgattcgctaaacgaagagaatcttgacgatatcgactggacaagcactcgccagcgtcgtgaggaccgccgaaaatccgtaaggatgattttgagccgaaaaatcatcaaggaattgatggatggctcgcttgacgaccttgttaatgggaaaattgtcgagagggagcaactgatggaactgaacgagaaaacaagcaaggacatcgatttactcaattcagaacctcagaagtcatatctgagagtttccgctcagagggaagtcgatacaatattccaatactgtaaggaccgtgctagacctcaagactttgcgcccaagggttgggagatgaagaagaaaaacttgattaaagagtggacccccgaaggaggtcctcgctataatgttgaagtcacatatcagaaggaatgggaactgcagatacatgacggcaagaatgatccgcgtcgacgacgtccaatgagcacactttcggtacctaatagacatggtgctaggatggccctatatggttga

SEQ ID NO: 2202 - protein, 177 aa, Muscodor strobelii
  misc_feature: SGI Peptide ID NO. 560356
MSKADSLNEENLDDIDWTSTRQRREDRRKSVRMILSRKIIKELMDGSLDDLVNGKIVEREQLMELNEKTSKDIDLLNSEPQKSYLRVSAQREVDTIFQYCKDRARPQDFAPKGWEMKKKNLIKEWTPEGGPRYNVEVTYQKEWELQIHDGKNDPRRRRPMSTLSVPNRHGARMALYG

SEQ ID NO: 2203 - DNA, 2019 bp, Muscodor strobelii
  misc_feature: SGI cDNA ID NO. 560357
  misc_feature: Encodes the peptide sequence at SEQ ID NO 2204
atggcgggtcgtcttatcaccaagttcttcttacctctagccctcggtgtcctaccttcaactctcgctacccctgcttatgtgaatgagagcacagcagaatatgactacgtcgttgtcggctctggtgctggtggcggaacggtagcctcgagtcttgcacgtaagggctattcggtatttttgattgaagctggaggcgatctcggtgacacgacaacgcaagaatgtcccggaggtgcaccgtctgagaatccagaaatgtcctggcggttctttatcagacattatcgggacgagacccaagctgagcggaatacaaaatttgtataccgccttcccgatggggagctttactggggattagaccctccagcagatgcggaaccactcgggacaatctatcctcggggcgcaacagttggaggtagcacccaagtcaatgcgatggttttcgcccgcgctcgagatttggatgtaagagaaccaaacacgctacgcaaactttgctcaggaagatctcatgaactgacctatgaaatacttatcaagtgggatgatattgcaaatctgaccggagatgactcgtggtctgcaactgcaatggcgccctatgctattgagatggaaaaggctgtatatgtaccgccgggcacccctaatcatggcttcaatggtttttacagcgtaaactatgtcacaactcgcccggggctgactgacgtactatatgccatcgccaatgagacagagggcgctcacatctcaactccagccgaattaggcgaattgatgcaacgcgatatacacagcaaggagtatttctggaaaactggcgtttaccagctcgttgagtctactacgaagaaacgtcgtcgttctggtatccgaaactatgtggttgacaccatcgaaacccaaagtacagatggatcacccaagtatcctcttacgcttagtccctactcactagtcacgcgagtgctgtttgaggaatatgggaacgcgactccgaaagcgtatggcgtcgagtatctagtcggtgaggcattgtactctgctgacagacggtataatgcctctcagactggggagcgaaagactgtgacggcgagaaaggaagtcattatctccggtggcactatcaacacgccgcagatactaaaactcagtggtatcggatcacgagaggagctagaggctttcgatattcctgtcgttgttgatttgccggctgtgggcaccaatgtccaagatcataccgaaggcatcgtgaggctcgacgcatccgccccctggcctaatgacccctacgcacgatgcgattttacattggtcgcaggagatccttgctacgacgagtggcttgcttcaggcaccggaccgtatggcgaaggcggagcgcctttgtctttccggtttcgatccagcgtagccgacgatccagcgggcgaagcagatgtctgggctttcggacttccgaacaatgattttcacggtttttacccgggctactcgaccgccgcacccgttccagaagctttcgcattctccatggtcaaattgaagaggccgggtgaccgtaccgacggaacagtcactctgcgctctagtgacccgcgggatacgcctcatgtggtcgtcaattggctgcagggggaaagcggggaccacgacttacaggcgctaacagaaagtgcggagatgatacatcgttcttttaatacagcgccggcatttttgcagcctatcaagcatgtgcagccggctgaaggagagaatatcacgcagagtctacgagaccagtcttttgggcatcatatgacctcttcctgcaggattggtgcagtggatgatgagggtgctgttgtggatcatgagctacgcgtccgtggcgttagtggtctgcgagtggtagatgcctccatttttccacacacgcctagtgctttcccaactgtcccgaccatcatgatggccctgaaggcggcagacattattgctgctagcgcgcaatag

SEQ ID NO: 2204 - protein, 672 aa, Muscodor strobelii
  misc_feature: SGI Peptide ID NO. 560357
  misc_feature (520)..(663): Pfam Id: PF05199 Pfam Desc: GMC oxidoreductase
  misc_feature (35)..(435): Pfam Id: PF00732 Pfam Desc: GMC oxidoreductase
  misc_feature (36)..(74): Pfam Id: PF01266 Pfam Desc: FAD dependent oxidoreductase
  misc_feature (607)..(663): Pfam Id: PF05199 Pfam Desc: GMC oxidoreductase
  misc_feature (325)..(435): Pfam Id: PF00732 Pfam Desc: GMC oxidoreductase
  misc_feature (133)..(162): Pfam Id: PF00732 Pfam Desc: GMC oxidoreductase
  misc_feature (31)..(671): NCBI GI: 256727900 Blast Desc: NECHADRAFT_83489 [Nectria haematococca mpVI 77-13-4]
  misc_feature (8)..(672): NCBI GI: 256726464 Blast Desc: NECHADRAFT_39574 [Nectria haematococca mpVI 77-13-4]
  misc_feature (8)..(667): NCBI GI: 46127809 Blast Desc: FG08282.1 [Gibberella zeae PH-1]
  misc_feature (29)..(672): NCBI GI: 256732331 Blast Desc: [Nectria haematococca mpVI 77-13-4]
  misc_feature (29)..(672): NCBI GI: 242791737 Blast Desc: choline dehydrogenase, [Talaromyces stipitatus ATCC 10500] gi|218718402|gb|EED17822.1| choline dehydrogenase, [Talaromyces stipitatus ATCC 10500]
  misc_feature (29)..(672): NCBI GI: 240275508 Blast Desc: GMC oxidoreductase [Ajellomyces capsulatus H143]
  misc_feature (29)..(672): NCBI GI: 225561900 Blast Desc: glucose-methanol-choline oxidoreductase [Ajellomyces capsulatus G186AR]
  misc_feature (35)..(672): NCBI GI: 46138987 Blast Desc: FG11008.1 [Gibberella zeae PH-1]
  misc_feature (31)..(672): NCBI GI: 46114384 Blast Desc: FG03034.1 [Gibberella zeae PH-1]
  misc_feature (29)..(667): NCBI GI: 154293881 Blast Desc: BC1G_14012 [Botryotinia fuckeliana B05.10] gi|150845167|gb|EDN20360.1| BC1G_14012 [Botryotinia fuckeliana B05.10]
  misc_feature (137)..(656): SWISSPROT Homolog: EC 1.1.99.1 Choline dehydrogenase
MAGRLITKFFLPLALGVLPSTLATPAYVNESTAEYDYVVVGSGAGGGTVASSLARKGYSVFLIEAGGDLGDTTTQECPGGAPSENPEMSWRFFIRHYRDETQAERNTKFVYRLPDGELYWGLDPPADAEPLGTIYPRGATVGGSTQVNAMVFARARDLDVREPNTLRKLCSGRSHELTYEILIKWDDIANLTGDDSWSATAMAPYAIEMEKAVYVPPGTPNHGFNGFYSVNYVTTRPGLTDVLYAIANETEGAHISTPAELGELMQRDIHSKEYFWKTGVYQLVESTTKKRRRSGIRNYVVDTIETQSTDGSPKYPLTLSPYSLVTRVLFEEYGNATPKAYGVEYLVGEALYSADRRYNASQTGERKTVTARKEVIISGGTINTPQILKLSGIGSREELEAFDIPVVVDLPAVGTNVQDHTEGIVRLDASAPWPNDPYARCDFTLVAGDPCYDEWLASGTGPYGEGGAPLSFRFRSSVADDPAGEADVWAFGLPNNDFHGFYPGYSTAAPVPEAFAFSMVKLKRPGDRTDGTVTLRSSDPRDTPHVVVNWLQGESGDHDLQALTESAEMIHRSFNTAPAFLQPIKHVQPAEGENITQSLRDQSFGHHMTSSCRIGAVDDEGAVVDHELRVRGVSGLRVVDASIFPHTPSAFPTVPTIMMALKAADIIAASAQ

SEQ ID NO: 2205 - DNA, 1615 bp, Muscodor strobelii
  misc_feature: SGI EST ID NO. CUFF.5562.0
  misc_feature: Variant of the nucleotide sequence at SEQ ID NO 2203
cgccgggcacccctaatcatggcttcaatggtttttacagcgtaaagttccctcaaagatttctaaagctcaagctctctaatattttgtgaagtccaatcataacaatattagctatgtcacaactcgcccggggctgactgacgtactatatgccatcgccaatgagacagagggcgctcacatctcaactccagccgaattaggcgaattgatgcaacgcgatatacacagcaaggagtatttctggaaaactggcgtttaccagctcgttgagtctactacgaagaaacgtcgtcgttctggtatccgaaactatgtggttgacaccatcgaaacccaaagtacagatggatcacccaagtatcctcttacgcttagtccctactcactagtcacgcgagtgctgtttgaggaatatgggaacgcgactccgaaagcgtatggcgtcgagtatctagtcggtgaggcattgtactctgctgacagacggtataatgcctctcagactggggagcgaaagactgtgacggcgagaaaggaagtcattatctccggtggcactatcaacacgccgcagatactaaaactcagtggtatcggatcacgagaggagctagaggctttcgatattcctgtcgttgttgatttgccggctgtgggcaccaatgtccaagatcataccgaaggcatcgtgaggctcgacgcatccgccccctggcctaatgacccctacgcacgatgcgattttacattggtcgcaggagatccttgctacgacgagtggcttgcttcaggcaccggaccgtatggcgaaggcggagcgcctttgtctttccggtttcgatccagcgtagccgacgatccagcgggcgaagcagatgtctgggctttcggacttccgaacaatgattttcacggtttttacccgggctactcgaccgccgcacccgttccagaagctttcgcattctccatggtcaaattgaagaggccgggtgaccgtaccgacggaacagtcactctgcgctctagtgacccgcgggatacgcctcatgtggtcgtcaattggctgcagggggaaagcggggaccacgacttacaggcgctaacagaaagtgcggagatgatacatcgttcttttaatacagcgccggcatttttgcagcctatcaagcatgtgcagccggctgaaggagagaatatcacgcagagtctacgagaccagtcttttgggcatcatatgacctcttcctgcaggattggtgcagtggatgatgagggtgctgttgtggatcatgagctacgcgtccgtggcgttagtggtctgcgagtggtagatgcctccatttttccacacacgcctagtgctttcccaactgtcccgaccatcatgatggccctgaaggcggcagacattattgctgctagcgcgcaataggacttgccctatcgcgtcagcacacatatccatgctctatttggtttcaggacacagatccccatatactgacttgtttttatgggcctcgatgtgaaatattttctcgaatggcatgagtgtcttccactctcgtggcgagatatttgttgtacttttaaatatcacttctcg

SEQ ID NO: 2206 - DNA, 294 bp, Muscodor strobelii
  misc_feature: SGI cDNA ID NO. 560358
  misc_feature: Encodes the peptide sequence at SEQ ID NO 2207
atgtcggacgacaaaaccaacaacgacgccaacggcgctgagaataccgtgggatatgatggccagtactcttatgagctcttcgacaccatgatgggtcttgatgacggcaagaacgacaagaatgagattgccaccactggagccagtggcaccaacaatggcaatggaactgccgacgagaaggctgatgagccggtcgacctcagcatgctgaagcatggcatccatcactcctactgggcaccgcctgagatgagatgcaactgctgccgtcactaccaggagaagtga

SEQ ID NO: 2207 - protein, 97 aa, Muscodor strobelii
  misc_feature: SGI Peptide ID NO. 560358
MSDDKTNNDANGAENTVGYDGQYSYELFDTMMGLDDGKNDKNEIATTGASGTNNGNGTADEKADEPVDLSMLKHGIHHSYWAPPEMRCNCCRHYQEK

SEQ ID NO: 2208 - DNA, 858 bp, Muscodor strobelii
  misc_feature: SGI cDNA ID NO. 560359
  misc_feature: Encodes the peptide sequence at SEQ ID NO 2209
atgcctgatctttggtccttgatattcatcttcataatcatgcgctacacaatctgctaccgcgcttctctatcttgggcactgaacaccctcagtatccccctttcgattcaaattcaagtcatgctcgacctcctcgcatgtatcattgcattcgctccacgctgctgggcccacgataccgccgacgatcttcggcttctaccaagctcctcgagtcccactgatacgacacctgatacaaatattaatacaacacacgacgcaagttcaagcacgaacactgatacagaccaagatacttcatctgacactcccaccacggaaccaacgcagtgtcccaactgtatcgaacacaccaaccaaatatccactctccaagccgagctcgcaacgaaatccaacatcgaaacctacaaccaggacctaataaacacacacaacaatctcctctcatctcttgagacggagctcgccgagacaaaactctcactatctaaatctgaatacttcctcaacatggcagagcgaaaaatcaacaccctaacgcaagaaaacaaaaccctgcaattcacgctcgacatgcatatcgaccccacaaccacaccacctcaaaagcacttactactatgcaacgagatctcccgcatacacagtcaatactcatcccttcgcgaaaatctctacaagtcatgggaggagaattcctcactcaagcacaaagtagcgcgcttagaacagaagaatcacacattagaaagaatactacaaaagagagccaaagggaggaaactagagacgaaaagagagaaaggaaaggcaagccgggtaattgatggtgatgtacgaagtgagtag

SEQ ID NO: 2209 - protein, 285 aa, Muscodor strobelii
  misc_feature: SGI Peptide ID NO. 560359
MPDLWSLIFIFIIMRYTICYRASLSWALNTLSIPLSIQIQVMLDLLACIIAFAPRCWAHDTADDLRLLPSSSSPTDTTPDTNINTTHDASSSTNTDTDQDTSSDTPTTEPTQCPNCIEHTNQISTLQAELATKSNIETYNQDLINTHNNLLSSLETELAETKLSLSKSEYFLNMAERKINTLTQENKTLQFTLDMHIDPTTTPPQKHLLLCNEISRIHSQYSSLRENLYKSWEENSSLKHKVARLEQKNHTLERILQKRAKGRKLETKREKGKASRVIDGDVRSE

SEQ ID NO: 2210 - DNA, 2562 bp, Muscodor strobelii
  misc_feature: SGI cDNA ID NO. 560362
  misc_feature: Encodes the peptide sequence at SEQ ID NO 2211
atggaatatacactagatgcacctaagcccaaaggctctgcctccttggcggctgttgttgcagcctttgttccgacatggctgactggaatgcttttcgtcgccattttcgttctcatccgtcagaaatatcggcacatctacgcgcctcgcacgtttcttgggactgtgccagagaaagaccgaactccttcggcgagccaagcttatctagacttcgtacatactatgcgaacactgccggacaaattcctgctatttcatcagtcactggatgcttatctatacctccggttcttgcgcactgtcatcttcatctgtgtcgtcgggtgctttttgacgtggccgacgttaatgcctgtcaacgcgacaggcggtggatcatcgaccgagtttgacaagatcagtatcagtaacgtcaggaagaagaatcacctgtgtgcccatgccgtattggcctgggtgtttatgggatttgttctgttcacgataactcgggagagactctggctgatcggactacgacaagcttggtacctttcgccacacaacgcgaaacgtatctctgcgagagtagtgcttttcttgtccacgcctaaggatgcgctcgatgaagccaacaagcaacgctactttggagatggcgctgtccgcgtatggcctgtgacgaagccggataccttgcagacacttgtctcagagcgaaacaagttggtggaaaagctcgagtctgccgaggcgcgtcttactcggaatgccaattcgaagaaggctagaaagagcattggtgcaggaaacgagaacggtgctcggtacagagacctcccagatccagtcaagcaaaagatacgtccgcgatcgcagtccatgacatcgcctacaagcaagaagcacgacacgattgagcacgtgcgagaacaactcaaagagaaagcagagcttctcgaggagatgcgatcatcacactccattggcgaaccacacggtgcagcagccgtctttgtcgagtttaagactcaagcagaggctcagcgtgcttaccaacaagtcgcttcatcgaacctgcttgccttgatgccacgatatgtcgacgtgcgcccgaatgaggtgatctgggataatctgacgatcccgccggcaaagcgagtctcacaagaaggcgtagctctggccattgtggttgcgacgatcgtgttctggtcaattccgagtggtttcatcggtctcatctccaacgtgagctatcttgcggagaacttcgagtggcttcgtttcctcaagaacctgcccgatccggtcattgggcttctctcgggtcttgtcccgccgctggtgacgagtctgctgagtaaatatgtaccgaatatcttccgatacattttcaagtcgtttggctcagcgacgacaccggcgactgaactgaaagtgcagacgtggttctacgtctttcaagtaactcaagtgttcttggtcaccgctgttttctctggggcggcaacagtagcgtcgcagctgatggagcacatcgaagacccgacgtcgatacctcagctgcttgcgcgacagctccccaaatcatcgaactactatctcacttactttattgtccaaggaacgacatcagctgccgacaatctccttaactataccgatttgcttcagtacctgttctacaattacttcctcgataagacgccgcggcagaagttcaaccggtacacgagcatgaggggcatcgcgtggggcaaggtgtttccgaaatttgccaatttcgccatcatcgccatcgcatactcgtgcatagcgccgctcgttctcggattcgctgctgctggattggggctctactactactcgtaccggtataatctgttctacgtgatacaagccaagacggatacgagaggtcaagcatacacactcgctcttcaacacctacttaccggagtgtacatcgcggagctagctttgatcgggttctgcggactgcgggaagccaatggcccgaccatcatggttgctattctgttcctcgccaccgtgctgtacaatgtgctgatgaacaagtacctgtcgccgctggagaagttcttgccaacggagttagtcacatcgcaagacggcggagacgagacgactcctctgctatcgtgcgtagaagagggacgagctgaggcatcctcgggcgattcgtcagctgtgcgtaaacatgtggtcgatccgacgaagcgcttcttcaatccgcacgtatcggcgtcgtacagcgcgatgaaggcttggatacgggaaggcgatagctacgacatcgaagaggaggaggtaccagagtactcagaagaggagatagagaaggcgtatctgcacccggcgctcacatcgaagacaccggtggtctggctggcaaaagatgagatgggtgctagtgagaatgaagtgaaggagaatgaagagtttgggctaagggccagccatgagggtgcatggttggagggcaacaatgtcaagtgggatgtgttgaagtttgagaatgtgcctgtttggaagaagggggtcaagttttga

SEQ ID NO: 2211 - protein, 853 aa, Muscodor strobelii
  misc_feature: SGI Peptide ID NO. 560362
  misc_feature (315)..(756): Pfam Id: PF02714 Pfam Desc: Domain of function DUF221
  misc_feature (315)..(713): Pfam Id: PF02714 Pfam Desc: Domain of function DUF221
  misc_feature (11)..(853): NCBI GI: 169596450 Blast Desc: SNOG_00988 [Phaeosphaeria nodorum SN15] gi|160701313|gb|EAT92483.2| SNOG_00988 [Phaeosphaeria nodorum SN15]
  misc_feature (12)..(853): NCBI GI: 189202196 Blast Desc: PTRG_07102 [Pyrenophora tritici-repentis Pt-1C-BFP] gi|187984533|gb|EDU50021.1| PTRG_07102 [Pyrenophora tritici-repentis Pt-1C-BFP]
  misc_feature (20)..(851): NCBI GI: 154317505 Blast Desc: BC1G_03104 [Botryotinia fuckeliana B05.10] gi|150844278|gb|EDN19471.1| BC1G_03104 [Botryotinia fuckeliana B05.10]
  misc_feature (15)..(837): NCBI GI: 212529784 Blast Desc: DUF221 domain protein, [Penicillium marneffei ATCC 18224] gi|210074447|gb|EEA28534.1| DUF221 domain protein, [Penicillium marneffei ATCC 18224]
  misc_feature (13)..(851): NCBI GI: 225558132 Blast Desc: DUF221 domain-containing protein [Ajellomyces capsulatus G186AR]
  misc_feature (15)..(837): NCBI GI: 242762266 Blast Desc: DUF221 domain protein, [Talaromyces stipitatus ATCC 10500] gi|218723537|gb|EED22954.1| DUF221 domain protein, [Talaromyces stipitatus ATCC 10500]
  misc_feature (6)..(853): NCBI GI: 145249304 Blast Desc: An14g03660 [Aspergillus niger] gi|134081669|emb|CAK46603.1| protein product [Aspergillus niger]
  misc_feature (20)..(848): NCBI GI: 156049423 Blast Desc: SS1G_08418 [Sclerotinia sclerotiorum 1980] gi|154692817|gb|EDN92555.1| SS1G_08418 [Sclerotinia sclerotiorum 1980]
  misc_feature (5)..(837): NCBI GI: 154286180 Blast Desc: conserved [Ajellomyces capsulatus NAm1] gi|150407526|gb|EDN03067.1| conserved [Ajellomyces capsulatus NAm1]
  misc_feature (5)..(837): NCBI GI: 225558408 Blast Desc: DUF221 domain-containing protein [Ajellomyces capsulatus G186AR]
MEYTLDAPKPKGSASLAAVVAAFVPTWLTGMLFVAIFVLIRQKYRHIYAPRTFLGTVPEKDRTPSASQAYLDFVHTMRTLPDKFLLFHQSLDAYLYLRFLRTVIFICVVGCFLTWPTLMPVNATGGGSSTEFDKISISNVRKKNHLCAHAVLAWVFMGFVLFTITRERLWLIGLRQAWYLSPHNAKRISARVVLFLSTPKDALDEANKQRYFGDGAVRVWPVTKPDTLQTLVSERNKLVEKLESAEARLTRNANSKKARKSIGAGNENGARYRDLPDPVKQKIRPRSQSMTSPTSKKHDTIEHVREQLKEKAELLEEMRSSHSIGEPHGAAAVFVEFKTQAEAQRAYQQVASSNLLALMPRYVDVRPNEVIWDNLTIPPAKRVSQEGVALAIVVATIVFWSIPSGFIGLISNVSYLAENFEWLRFLKNLPDPVIGLLSGLVPPLVTSLLSKYVPNIFRYIFKSFGSATTPATELKVQTWFYVFQVTQVFLVTAVFSGAATVASQLMEHIEDPTSIPQLLARQLPKSSNYYLTYFIVQGTTSAADNLLNYTDLLQYLFYNYFLDKTPRQKFNRYTSMRGIAWGKVFPKFANFAIIAIAYSCIAPLVLGFAAAGLGLYYYSYRYNLFYVIQAKTDTRGQAYTLALQHLLTGVYIAELALIGFCGLREANGPTIMVAILFLATVLYNVLMNKYLSPLEKFLPTELVTSQDGGDETTPLLSCVEEGRAEASSGDSSAVRKHVVDPTKRFFNPHVSASYSAMKAWIREGDSYDIEEEEVPEYSEEEIEKAYLHPALTSKTPVVWLAKDEMGASENEVKENEEFGLRASHEGAWLEGNNVKWDVLKFENVPVWKKGVKF

SEQ ID NO: 2212 - DNA, 2916 bp, Muscodor strobelii
  misc_feature: SGI EST ID NO. CUFF.5589.0
  misc_feature: Variant of the nucleotide sequence at SEQ ID NO 2210
ggtatccatccatcggaatgcccatccagtcacgcctgatcatgatacagcacgcgcattgatcttcagcgaagcatatttttaactcttgaatgatattattttcttctctagaacactgctggcagattgttgcttgattgaaacgggacccgtgcgggtccttataggacctatcattgcactacgtgtgtcagctacggatcagccaccttcgacaaaagctggataggactgatgaaatctcaaggcaacatggaatatacactagatgcacctaagcccaaaggctctgcctccttggcggctgttgttgcagcctttgttccgacatggctgactggaatgcttttcgtcgccattttcgttctcatccgtcagaaatatcggcacatctacgcgcctcgcacgtttcttgggactgtgccagagaaagaccgaactccttcggcgagccaagcttatctagacttcgtacatactatgcgaacactgccggacaaattcctgctatttcatcagtcactggatgcttatctatacctccggttcttgcgcactgtcatcttcatctgtgtcgtcgggtgctttttgacgtggccgacgttaatgcctgtcaacgcgacaggcggtggatcatcgaccgagtttgacaagatcagtatcagtaacgtcaggaagaagaatcacctgtgtgcccatgccgtattggcctgggtgtttatgggatttgttctgttcacgataactcgggagagactctggctgatcggactacgacaagcttggtacctttcgccacacaacgcgaaacgtatctctgcgagagtagtgcttttcttgtccacgcctaaggatgcgctcgatgaagccaacaagcaacgctactttggagatggcgctgtccgcgtatggcctgtgacgaagccggataccttgcagacacttgtctcagagcgaaacaagttggtggaaaagctcgagtctgccgaggcgcgtcttactcggaatgccaattcgaagaaggctagaaagagcattggtgcaggaaacgagaacggtgctcggtacagagacctcccagatccagtcaagcaaaagatacgtccgcgatcgcagtccatgacatcgcctacaagcaagaagcacgacacgattgagcacgtgcgagaacaactcaaagagaaagcagagcttctcgaggagatgcgatcatcacactccattggcgaaccacacggtgcagcagccgtctttgtcgagtttaagactcaagcagaggctcagcgtgcttaccaacaagtcgcttcatcgaacctgcttgccttgatgccacgatatgtcgacgtgcgcccgaatgaggtgatctgggataatctgacgatcccgccggcaaagcgagtctcacaagaaggcgtagctctggccattgtggttgcgacgatcgtgttctggtcaattccgagtggtttcatcggtctcatctccaacgtgagctatcttgcggagaacttcgagtggcttcgtttcctcaagaacctgcccgatccggtcattgggcttctctcgggtcttgtcccgccgctggtgacgagtctgctgagtaaatatgtaccgaatatcttccgatacattttcaagtcgtttggctcagcgacgacaccggcgactgaactgaaagtgcagacgtggttctacgtctttcaagtaactcaagtgttcttggtcaccgctgttttctctggggcggcaacagtagcgtcgcagctgatggagcacatcgaagacccgacgtcgatacctcagctgcttgcgcgacagctccccaaatcatcgaactactatctcacttactttattgtccaaggaacgacatcagctgccgacaatctccttaactataccgatttgcttcagtacctgttctacaattacttcctcgataagacgccgcggcagaagttcaaccggtacacgagcatgaggggcatcgcgtggggcaaggtgtttccgaaatttgccaatttcgccatcatcgccatcgcatactcgtgcatagcgccgctcgttctcggattcgctgctgctggattggggctctactactactcgtaccggtataatctgttctacgtgatacaagccaagacggatacgagaggtcaagcatacacactcgctcttcaacacctacttaccggagtgtacatcgcggagctagctttgatcgggttctgcggactgcgggaagccaatggcccgaccatcatggttgctattctgttcctcgccaccgtgctgtacaatgtgctgatgaacaagtacctgtcgccgctggagaagttcttgccaacggagttagtcacatcgcaagacggcggagacgagacgactcctctgctatcgtgcgtagaagagggacgagctgaggcatcctcgggcgattcgtcagctgtgcgtaaacatgtggtcgatccgacgaagcgcttcttcaatccgcacgtatcggcgtcgtacagcgcgatgaaggcttggatacgggaaggcgatagctacgacatcgaagaggaggaggtaccagagtactcagaagaggagatagagaaggcgtatctgcacccggcgctcacatcgaagacaccggtggtctggctggcaaaagatgagatgggtgctagtgagaatgaagtgaaggagaatgaagagtttgggctaagggccagccatgagggtgcatggttggagggcaacaatgtcaagtgggatgtgttgaagtttgagaatgtgcctgtttggaagaagggggtcaagttttgaatagcgcgagtacataatttgatagcagtactctacaggagaaccagttgtatatacatattaggaagactgagaattgaatctgacactcttaaacac

SEQ ID NO: 2213 - DNA, 426 bp, Muscodor strobelii
  misc_feature: SGI cDNA ID NO. 560363
  misc_feature: Encodes the peptide sequence at SEQ ID NO 2214
atggcgtctcaccacgatggcgaagtcactctcaacgattcggcctctgataccgcttcgacagctgacgaccacgatatccattctgatgacatcgtacactatgcctataacagcatcgatgcgcatgatgatagcgttgtctcgcaggcaatgactatgattgctattgaagatgttaccggtctaatcagcggcatggaggaacgattcaaccagggcttcgagaacatgagcgaccgattcgaggaagtcgacaccaatacgcgtcgtattcgcactacagccatggacatgcggaaggagattcgggacgagctgagaggcttacgcgagaacatcctgaaggtggttcttatcagtatgctggtcctcgtcttcgcctttgtaggactgcccattcttggtcgcttctttggagcttag

SEQ ID NO: 2214 - protein, 141 aa, Muscodor strobelii
  misc_feature: SGI Peptide ID NO. 560363
MASHHDGEVTLNDSASDTASTADDHDIHSDDIVHYAYNSIDAHDDSVVSQAMTMIAIEDVTGLISGMEERFNQGFENMSDRFEEVDTNTRRIRTTAMDMRKEIRDELRGLRENILKVVLISMLVLVFAFVGLPILGRFFGA

SEQ ID NO: 2215 - DNA, 760 bp, Muscodor strobelii
  misc_feature: SGI EST ID NO. CUFF.5592.0
  misc_feature: Variant of the nucleotide sequence at SEQ ID NO 2213
cagaactaccccttgcatagtcgcacgagtaacactccatcagcgttcttcaagcgcaaaacatggcgtctcaccacgatggcgaagtcactctcaacgattcggcctctgataccgcttcgacagctgacgaccacgatatccattctgatgacatcgtacactatgcctataacagcatcgatgcgcatgatgatagcgttgtctcgcaggcaatgactatgattgctattgaagatgttaccggtctaatcagcggcatggaggaacgattcaaccagggcttcgagaacatgagcgaccgattcgaggaagtcgacaccaatacgcgtcgtattcgcactacagccatggacatgcggaaggagattcgggacgagctgagaggcttacgcgagaacatcctgaaggtggttcttatcagtatgctggtcctcgtcttcgcctttgtaggactgcccattcttggtcgcttctttggagcttagagctcaggataagtgtctggataagggactgcgtggagacgtgtgtttcacgggaacattagtcagtattgatgatcgcggcataaatagcagcgttgagttgtctaagcagtagctctacgtagtggtcctggagcgaatatagtattctaaacaccctgatactcggcctcgctctgtatactataatagagagagcacatgaccgttgatgtgacgtcgaggtgacttgccaactgctaagagcggcgttgatttcatgcgagctttta

SEQ ID NO: 2216 - DNA, 1677 bp, Muscodor strobelii
  misc_feature: SGI cDNA ID NO. 560364
  misc_feature: Encodes the peptide sequence at SEQ ID NO 2217
atgcttctcaagtttacttggcacgccgcactactgtcaccgttgacatgggttgatttggcggacgctcgtagcaatcagattcgtgctactgagccgacttatcgagatggcagtttgagcggcaatttgattgtccacaatggtcgaattcagacgatggacgtgaatagcacagtggcctcggtggtagccgtcagagacggcagcatcgtctatgttggagatagccaagacgacgcccttggcaatttcaacgacatcccccagactgtcgatctacagggccgagttgccatcccaggcttgattgactgtcacaatcacattgtgctcctgggcaatcgacctggttatcatacgccattagagaatgcatattccatcgctgatgttcagacaacataccgggaacgggcaagtcaagtacctgcaggtagctttattacgacaatcggcggctttcatcctaatcagtttagcgagacacgacttcctacactcgaagagctcgacgaggcggttccggactatccggtgttcatttcttatggcttcgctggaccggccacgacaaatagcttgggtaaggcctttttcgaatcttccgatatgccggtcgccgttggcgagaatgggtctatcgctatcggagaggaaaatggcaaggcgctattgactctccgacgccagttgacattcgacgaccgcaaacgtggcgtcgttgatgcaatggcgtacgccgcttcattgggcgtcaccacacatctagatcaaggagcgtttccagctagcaatacccctgcggatggagcgggaaacgaggacctttacgcaatgcatcttccatggttatccgtctacgatgacgaggcagggaccatccgcctccgcatcaactttctacacatggacgacaccattgatgtgcccacggttcagcaacggctcttaaacacattcaaattcttcggaaacgatatgatccgtaccggaagtattggcgagtttatcacgacgaactacactggcggtcccgtcttcgaggaggctgctcgtcgcatagcttcagccggctggcggcttgaggtccattcgctaacgaacactgattaccgaagccaaatagcagccttcgaaacagtgaatatgcaacagactatcgaagatctgcgttgggtcatcgcacacgtcccgatgatcacagacgagtaccttcagaggctcaaggctcttggagggggtgttaacttgtcgggttggaattacttagcgggcacaggtcctcaagctggacctcctttcaaaaatatcttggagagtgggatcccagcgggctttggagccgatggcatgcaaatcgcaccactgaacccatgggttcatgcatactatgccacgacaggcaagaatgcgctgggcgatgtgatcaatgccgatcagcagatcagtcgtcaagaggtgcttgagttgtacactcgtgcaaatcaatggttcctaggaggccacgatgagaagttgctcgggtctcttgaggttggtcgtcttggagatctcgttgtgcttagtgatgactacttcacaatcccggacgaggatctaaggaaagtgagatccgtactcacagtcgtaggtggcgttgttattcacaacagcggcgaattgagcacgtcttaa

SEQ ID NO: 2217 - protein, 558 aa, Muscodor strobelii
  misc_feature: SGI Peptide ID NO. 560364
  misc_feature (98)..(521): Pfam Id: PF07969 Pfam Desc: Amidohydrolase family
  misc_feature (338)..(521): Pfam Id: PF07969 Pfam Desc: Amidohydrolase family
  misc_feature (98)..(183): Pfam Id: PF07969 Pfam Desc: Amidohydrolase family
  misc_feature (328)..(555): NCBI GI: 171676503 Blast Desc: protein product [Podospora anserina] gi|170936318|emb|CAP60976.1| protein product [Podospora anserina]
  misc_feature (34)..(257): NCBI GI: 171676501 Blast Desc: protein product [Podospora anserina] gi|170936317|emb|CAP60975.1| protein product [Podospora anserina]
  misc_feature (44)..(556): NCBI GI: 28558872 Blast Desc: rc145 [Ruegeria sp. PR1b] gi|22726423|gb|AAN05218.1| RC145 [Ruegeria sp. PR1b]
  misc_feature (43)..(556): NCBI GI: 260555322 Blast Desc: metal-dependent hydrolase with the TIM-barrel fold protein [Acinetobacter baumannii ATCC 19606] gi|260411864|gb|EEX05161.1| metal-dependent hydrolase with the
  misc_feature (43)..(556): NCBI GI: 260550622 Blast Desc: metal-dependent hydrolase with the TIM-barrel fold [Acinetobacter sp. RUH2624] gi|260406333|gb|EEW99816.1| metal-dependent hydrolase with the TIM-barrel fold [Acinetobacter
  misc_feature (43)..(555): NCBI GI: 223934620 Blast Desc: Amidohydrolase 3 [bacterium Ellin514] gi|223896575|gb|EEF63016.1| Amidohydrolase 3 [bacterium Ellin514]
  misc_feature (43)..(556): NCBI GI: 193077108 Blast Desc: A1S_1451 [Acinetobacter baumannii ATCC 17978]
  misc_feature (43)..(556): NCBI GI: 169796260 Blast Desc: metal-dependent hydrolase [Acinetobacter baumannii AYE] gi|169149187|emb|CAM87067.1| conserved ; metal-dependent hydrolase [Acinetobacter baumannii]
  misc_feature (43)..(556): NCBI GI: 213157005 Blast Desc: amidohydrolase [Acinetobacter baumannii AB0057] gi|215483715|ref|YP_002325938.1| Amidohydrolase family protein [Acinetobacter baumannii AB307-0294] gi|213056165|gb|ACJ41067.1|
  misc_feature (39)..(556): NCBI GI: 171909844 Blast Desc: VspiD_01690 [Verrucomicrobium spinosum DSM 4136]
MLLKFTWHAALLSPLTWVDLADARSNQIRATEPTYRDGSLSGNLIVHNGRIQTMDVNSTVASVVAVRDGSIVYVGDSQDDALGNFNDIPQTVDLQGRVAIPGLIDCHNHIVLLGNRPGYHTPLENAYSIADVQTTYRERASQVPAGSFITTIGGFHPNQFSETRLPTLEELDEAVPDYPVFISYGFAGPATTNSLGKAFFESSDMPVAVGENGSIAIGEENGKALLTLRRQLTFDDRKRGVVDAMAYAASLGVTTHLDQGAFPASNTPADGAGNEDLYAMHLPWLSVYDDEAGTIRLRINFLHMDDTIDVPTVQQRLLNTFKFFGNDMIRTGSIGEFITTNYTGGPVFEEAARRIASAGWRLEVHSLTNTDYRSQIAAFETVNMQQTIEDLRWVIAHVPMITDEYLQRLKALGGGVNLSGWNYLAGTGPQAGPPFKNILESGIPAGFGADGMQIAPLNPWVHAYYATTGKNALGDVINADQQISRQEVLELYTRANQWFLGGHDEKLLGSLEVGRLGDLVVLSDDYFTIPDEDLRKVRSVLTVVGGVVIHNSGELSTS

SEQ ID NO: 2218 - DNA, 592 bp, Muscodor strobelii
  misc_feature: SGI EST ID NO. CUFF.5606.0
  misc_feature: Variant of the nucleotide sequence at SEQ ID NO 2216
cgggcaagtcaagtacctgcaggtagctttattacgacaatcggcggctttcatcctaatcagtttagcgagacacgacttcctacactcgaagagctcgacgaggcggttccggactatccggtgttcatttcttatggcttcgctggaccggccacgacaaatagcttgggtaaggcctttttcgaatcttccgatatgccggtcgccgttggcgagaatgggtctatcgctatcggagaggaaaatggcaaggcgctattgactctccgacgccagttgacattcgacgaccgcaaacgtggcgtcgttgatgcaatggcgtacgccgcttcattgggcgtcaccacacatctagatcaaggagcgtttccagctagcaatacccctgcggatggagcgggaaacgaggacctttacgcaatgcatcttccatggttatccgtctacgatgacgaggcagggaccatccgcctccgcatcaactttctacacatggacgacaccattgatgtgcccacggttcagcaacggctcttaaacacattcaaattcttcggaaacgatatgatccgtaccggaagtattggcg

SEQ ID NO: 2219 - DNA, 579 bp, Muscodor strobelii
  misc_feature: SGI cDNA ID NO. 560365
  misc_feature: Encodes the peptide sequence at SEQ ID NO 2220
atgtcccagactgctactaccaccaccaacctgaagctcaagcagcttccaggaagcaagcaatgggtccgctcaagcctccaggacaaaatgttcccaaagctgaacacatttcgcgaccgtgtcaacaccaatagcattcgatatgactttgatgttcaccatcacggcagcaaagctgctactcataaagcttctatacgagtggacctatgcgtcggcaccaaccaatctactggccataaccaaatcctgtttccacatgcgcagatctctacagtcatgagagcgaatggccagaacgtatccgtaacggggttgaaagcctatcagctcagagacggcgagggaacgagcgaagtcagagacatgatcgagcatgtcccatgcccgaacggtgttctactctgggtctattcggagcttcagactctgggtgagtttgatggatccaagattgtgttgaagccggtcaggggtagatatgtagcgaccagggacaatcctcccaagacagagaacgtaccagccgacattatgacggctgcctgggctgggaggcgaatcgtgatagcatga

SEQ ID NO: 2220 - protein, 192 aa, Muscodor strobelii
  misc_feature: SGI Peptide ID NO. 560365
MSQTATTTTNLKLKQLPGSKQWVRSSLQDKMFPKLNTFRDRVNTNSIRYDFDVHHHGSKAATHKASIRVDLCVGTNQSTGHNQILFPHAQISTVMRANGQNVSVTGLKAYQLRDGEGTSEVRDMIEHVPCPNGVLLWVYSELQTLGEFDGSKIVLKPVRGRYVATRDNPPKTENVPADIMTAAWAGRRIVIA

SEQ ID NO: 2221 - DNA, 1476 bp, Muscodor strobelii
  misc_feature: SGI EST ID NO. CUFF.5615.0
  misc_feature: Variant of the nucleotide sequence at SEQ ID NO 2219
gcggcaggtcctacgagtatttaagtcgctagagacctcctactgggatcgtcacttgaaatcaaattgtcattcgcacaacaatttgcttgcacaaattccttaataacttgcatcgccaatctctctcctttcagaaaatgtcccagactgctactaccaccaccaacctgaagctcaagcagcttccaggaagcaagcaatgggtccgctcaagcctccaggacaaaatgttcccaaagctgaacacatttcgcgaccgtgtcaacaccaatagcattcgatatgactttgatgttcaccatcacggcagcaaagctgctactcataaagcttctatacgagtggacctatgcgtcggcaccaaccaatctactggccataaccaaatcctgtttccacatgcgcagatctctacagtcatgagagcgaatggccagaacgtatccgtaacggggttgaaagcctatcagctcagagacggcgagggaacgagcgaagtcagagacatgatcgagcatgtcccatgcccgaacggtgttctactctgggtctattcggagcttcagactctgggtgagtttgatggatccaagattgtgttgaagccggtcaggggtagatatgtagcgaccagggacaatcctcccaagacagagaacgtaccagccgacattatgacggctgcctgggctgggaggcgaatcgtgatagcatgaggtggatatcaaagattcgtgggccacgagcagggtggccctacaaattgatgtacataagcaagcgcgatatttcatggcaaggctcgatctctacgagccgagaatgatagccttgatcaagcgcgtcgtcgtcaattttgacgcggaaaacgcatattcggtgatgacgtagctgctctaatagcgaaattggtttagagaacgctcgattgtagcatcccagcatgctgacgtatggtgttcgagagctttgtgagtcaatgaacgtgctgagcatcaagcgcgccgtggagagttcaagcttgaatgagctcgcagccgctcgtacaaatggacctacgccaagtcctaacttgcacagtcagctacccacagaaagctgaaactgaagatgatggcgaccagagtttcctgatttttggcctttcgaaccccagaccctattgctggtatgtccgaagtcctcgcagaagatcatgtcgaaattcaggtggaggtagtacgaatccatcaacagtacgaactagtgtttagagaggaccactatgaggaagattccggcattgaatgctctggcatcagtgcgcaagtcgagaggcacgtggctcgctttggtgtgggaggtcggctcgtagtgtatggtaccaaccgtccgagtttccatggcgtcgagttcaaaagattcctggcacgactgaccttgcctcggctatggctctgcccactaacgccgtcgcggattcatacacctcga

SEQ ID NO: 2222 - DNA, 1500 bp, Muscodor strobelii
  misc_feature: SGI cDNA ID NO. 560366
  misc_feature: Encodes the peptide sequence at SEQ ID NO 2223
atgggaaatctcctgtcgaagcccaagccgcaggcaaggcccacggtgcctacagatactgtcatccccttgcataatatggatgataatgtcatcaatcggtctatggtggttatgttcatgatgcgatttgacgatgtactagatcccgagctacttaaaggctctcttgataagttgctctctcgcgacgactggcgaaaacttggcgctagaatcaacctcaacgaaaacggcaaactggattatcacgttccggagactttcgatgagaaacgtccgggatttgcattctctcgtgttgtctacaacgcggagatcgggaaccaccccttagcttcccgcttacctaaagcatccgcaaaaccagctgtcgttgctaacccggaggagtttaaatccctgatgcgccgtgaggacggtcctacatgcatcgaggactatatttatcgcgatgagccgcagttgagtgtgcacgtcgtgtcttttgaagatgctaccctcgtcactctgggctggccccacacgttcctcgatgccatgggtcgacgcgagctgtttcaagcctggatagctgtcctcgagggccgcgacgacgatgtaaaacccttgcatggcgtgtatgaggatccgctcaagaactttggtctcgcaccaaaggagcggtacattctcagtgatcacgctgtgaccggctggagcaaggcagtcttcattgcacgcttcgcctttgaattaatgtggtatcctcaggaagaggcccgaattatctgcttacccgcaacgcatgcagagaagctccgggctacagccatagcagatctggagactttgagcgagggcaaggacacaaaaccattcctcagcgagggcgatgtggtatcgggctggatcacgcgcttaatcgtccagcagatggagccacctggttcggagcgaacaatcgagatcatgaacgcttttggattgcgatcgatcttcgcgaaagatctgctacctagtgattctgcatatgtctcaaatgcagtgacggctgtctgggcgctcgtgtcggccaaggacattctgaccaagccgcttggtttcgtggcggctgccatccggcgcagcataacagagcaaggcacgcgagagcagcttgaagcgaggagggcaattgataggactaatatggagaagaatggctccttctcactctttggagatcgttcgatgaaaatgatcatggtttccaactggaccaagggccgattcttcgagaataacttctcggccgctgtgctcaagcggacgactacaaaggaagcacttgagcgctccccttctaagattggccgtccttcctatatccagactgctggatatactacgagtgcctttcccctacggaatgcatttccggttattggcaaggataacgatgggaattactggatatctggcaccttgaggaagggattttggtctcaaattgaggaagccctaaaacgatctgagtga

SEQ ID NO: 2223 - protein, 499 aa, Muscodor strobelii
  misc_feature: SGI Peptide ID NO. 560366
  misc_feature (9)..(496): NCBI GI: 121714889 Blast Desc: LysR family regulatory protein, [Aspergillus clavatus NRRL 1] gi|119403210|gb|EAW13628.1| LysR family regulatory protein, [Aspergillus clavatus NRRL 1]
  misc_feature (14)..(495): NCBI GI: 119490150 Blast Desc: LysR family regulatory protein, [Neosartorya fischeri NRRL 181] gi|119411148|gb|EAW21091.1| LysR family regulatory protein, [Neosartorya fischeri NRRL 181]
  misc_feature (14)..(495): NCBI GI: 159127170 Blast Desc: LysR family regulatory protein, [Aspergillus fumigatus A1163]
  misc_feature (14)..(495): NCBI GI: 70998861 Blast Desc: LysR family regulatory protein [Aspergillus fumigatus Af293] gi|66851789|gb|EAL92114.1| LysR family regulatory protein, [Aspergillus fumigatus Af293]
  misc_feature (1)..(496): NCBI GI: 238506511 Blast Desc: conserved [Aspergillus flavus NRRL3357] gi|220689170|gb|EED45521.1| conserved [Aspergillus flavus NRRL3357]
  misc_feature (4)..(497): NCBI GI: 255950836 Blast Desc: Pc22g22910 [Penicillium chrysogenum Wisconsin 54-1255] gi|211593202|emb|CAP99579.1| Pc22g22910 [Penicillium chrysogenum Wisconsin 54-1255]
  misc_feature (6)..(493): NCBI GI: 242779915 Blast Desc: LysR family regulatory protein, [Talaromyces stipitatus ATCC 10500] gi|218719633|gb|EED19052.1| LysR family regulatory protein, [Talaromyces stipitatus ATCC 10500]
  misc_feature (14)..(496): NCBI GI: 119487991 Blast Desc: NFIA_112210 [Neosartorya fischeri NRRL 181] gi|119410752|gb|EAW20697.1| conserved [Neosartorya fischeri NRRL 181]
  misc_feature (14)..(496): NCBI GI: 159122848 Blast Desc: conserved [Aspergillus fumigatus A1163]
  misc_feature (16)..(426): NCBI GI: 256726591 Blast Desc: NECHADRAFT_93122 [Nectria haematococca mpVI 77-13-4]
MGNLLSKPKPQARPTVPTDTVIPLHNMDDNVINRSMVVMFMMRFDDVLDPELLKGSLDKLLSRDDWRKLGARINLNENGKLDYHVPETFDEKRPGFAFSRVVYNAEIGNHPLASRLPKASAKPAVVANPEEFKSLMRREDGPTCIEDYIYRDEPQLSVHVVSFEDATLVTLGWPHTFLDAMGRRELFQAWIAVLEGRDDDVKPLHGVYEDPLKNFGLAPKERYILSDHAVTGWSKAVFIARFAFELMWYPQEEARIICLPATHAEKLRATAIADLETLSEGKDTKPFLSEGDVVSGWITRLIVQQMEPPGSERTIEIMNAFGLRSIFAKDLLPSDSAYVSNAVTAVWALVSAKDILTKPLGFVAAAIRRSITEQGTREQLEARRAIDRTNMEKNGSFSLFGDRSMKMIMVSNWTKGRFFENNFSAAVLKRTTTKEALERSPSKIGRPSYIQTAGYTTSAFPLRNAFPVIGKDNDGNYWISGTLRKGFWSQIEEALKRSE

SEQ ID NO: 2224 - DNA, 1527 bp, Muscodor strobelii
  misc_feature: SGI EST ID NO. CUFF.5624.0
  misc_feature: Variant of the nucleotide sequence at SEQ ID NO 2222
ttgaaatagtatagcataccgaataggcggcttggcagaaatcccgttggatctccctgacttggctaaaaagttagcacgtccccagcctgagttcagatgtgtcgagggacaactctcttgtcattgctttactttgaccgaataacttgctaactcgttgtgacttaagatgggaaatctcctgtcgaagcccaagccgcaggcaaggcccacggtgcctacagatactgtcatccccttgcataatatggatgataatgtcatcaatcggtctatggtggttatgttcatgatgcgatttgacgatgtactagatcccgagctacttaaaggctctcttgataagttgctctctcgcgacgactggcgaaaacttggcgctagaatcaacctcaacgaaaacggcaaactggattatcacgttccggagactttcgatgagaaacgtccgggatttgcattctctcgtgttgtctacaacgcggagatcgggaaccaccccttagcttcccgcttacctaaagcatccgcaaaaccagctgtcgttgctaacccggaggagtttaaatccctgatgcgccgtgaggacggtcctacatgcatcgaggactatatttatcgcgatgagccgcagttgagtgtgcacgtcgtgtcttttgaagatgctaccctcgtcactctgggctggccccacacgttcctcgatgccatgggtcgacgcgagctgtttcaagcctggatagctgtcctcgagggccgcgacgacgatgtaaaacccttgcatggcgtgtatgaggatccgctcaagaactttggtctcgcaccaaaggagcggtacattctcagtgatcacgctgtgaccggctggagcaaggcagtcttcattgcacgcttcgcctttgaattaatgtggtatcctcaggaagaggcccgaattatctgcttacccgcaacgcatgcagagaagctccgggctacagccatagcagatctggagactttgagcgagggcaaggacacaaaaccattcctcagcgagggcgatgtggtatcgggctggatcacgcgcttaatcgtccagcagatggagccacctggttcggagcgaacaatcgagatcatgaacgcttttggattgcgatcgatcttcgcgaaagatctgctacctagtgattctgcatatgtctcaaatgcagtgacggctgtctgggcgctcgtgtcggccaaggacattctgaccaagccgcttggtttcgtggcggctgccatccggcgcagcataacagagcaaggcacgcgagagcagcttgaagcgaggagggcaattgataggactaatatggagaagaatggctccttctcactctttggagatcgttcgatgaaaatgatcatggtttccaactggaccaagggccgattcttcgagaataacttctcggccgctgtgctcaagcggacgactacaaaggaagcacttgagcgctccccttctaagattggccgtccttcctatatccagac

SEQ ID NO: 2225 - DNA, 1617 bp, Muscodor strobelii
  misc_feature: SGI cDNA ID NO. 560367
  misc_feature: Elevated expression when VOC is produced
  misc_feature: Encodes the peptide sequence at SEQ ID NO 2226
atgctcagacatatttcgctgctggttttagccagtctgattccttcaattgtcggcgacacagaggttgtttatgttaccgatctctcaattttcacagttttggcgccatgtgcgcaatcggctctatcttatgctgttcaggctctaacatacgacgagtgccctgaggccgtaacggcattacaagaatgtgtgtgtaaacaggacaacaatttcgcatcgatatcaagcgaggtcgcgagctcggttggctactcctgtggggaaactgcaacagatgctgccgatagtgcacaaacggtactaaatgcatactgcacgcaaagttcaacctattctttcgcaacaccgactatcaccgtcagccagtttgttaccgatctgccgtacttcgaggacctcgcaccatgcgcagctagtgctgtctccggagtggtgatgggaatgggagggtatctttcatcagctcaagcgctgtttgctggatactgtggactcgtcgatggctctagttcatttccaactacttccgacccgcctggtgatatgacctattacattactgcaatggaagagttcagttcattagctccgtgtgcacaatcggctgtatcatatgatatccagagtcaaacatatgatctttgtccttcggggccagaagcactggcgtcgtgcgtatgcttgaatactgacatgactaggcgcatcagcgctgagatcacgtcggatgtgaagtattactgtgactcgaccgcaagcgatgctatctcgtctgctctcgccgtatataatctttactgtagcgcagcaaatgctgagaccacgcttggaggtatcactgagtcgatctctgagacacctcacactggaaagagcaatactgcttcgccattggaaactggtacaggctcagggggctcgtcagacgggtccagctccagctctgatggagatagcaccagctccagtggagcagggtcgaacaagacgaagaagtctagttccaccactgccgttgttgccggcgctgtggtaggagctgtcttgggtacagcgctaattgcagtcaccgctttcctatggtatcgaaagtcgaagaagagcactgcaactgagtcggtgtcgcagtctccaccgcaaacttcgggaggcccaagcaacggcaaacccgagcttgatagcaccgcgatggctataccgccatctgtaagcccagctatcaccagccacagccgaaaggaaaacatatcaccagtttcagggtactcctcccctcacggatcagaattgcaagctcacagtcctttcggccctccacctccaatgccaccgaacatgtccgagttgcagaaccagacagcatacgggagaccgatagagttacacaatcaaacagcctatccacgaccttctgagcttcaggcaccaaatacctacccccacgagacatatggtcaacaggtgtacgaagccccggggcaaaatcaagcacaatacggccacggtcgttccgagccccaaggcatgggctggcaatcaggtcctgtcgcccagtcgtatgagatggacggaggttcacatagtcatcgacagcctccccatgcaaggtga

SEQ ID NO: 2226 - protein, 538 aa, Muscodor strobelii
  misc_feature: SGI Peptide ID NO. 560367
  misc_feature (22)..(534): NCBI GI: 85086310 Blast Desc: NCU04060 [Neurospora crassa OR74A] gi|28918769|gb|EAA28439.1| [Neurospora crassa OR74A] gi|39979243|emb|CAE85612.1| conserved [Neurospora crassa]
  misc_feature (16)..(526): NCBI GI: 171682330 Blast Desc: protein product [Podospora anserina] gi|170941124|emb|CAP66774.1| protein product [Podospora anserina]
  misc_feature (2)..(531): NCBI GI: 39974557 Blast Desc: MGG_00575 [Magnaporthe grisea 70-15] gi|145018524|gb|EDK02803.1| MGG_00575 [Magnaporthe grisea 70-15]
  misc_feature (22)..(466): NCBI GI: 116202297 Blast Desc: CHGG_09033 [Chaetomium globosum CBS 148.51] gi|88177551|gb|EAQ85019.1| CHGG_09033 [Chaetomium globosum CBS 148.51]
  misc_feature (2)..(525): NCBI GI: 256724848 Blast Desc: NECHADRAFT_34779 [Nectria haematococca mpVI 77-13-4]
  misc_feature (36)..(312): NCBI GI: 256724551 Blast Desc: NECHADRAFT_54603 [Nectria haematococca mpVI 77-13-4]
  misc_feature (1)..(443): NCBI GI: 46121921 Blast Desc: FG05338.1 [Gibberella zeae PH-1]
  misc_feature (5)..(185): NCBI GI: 261359326 Blast Desc: conserved [Verticillium albo-atrum VaMs.102]
  misc_feature (157)..(433): NCBI GI: 261353871 Blast Desc: conserved [Verticillium albo-atrum VaMs.102]
  misc_feature (124)..(278): NCBI GI: 261359326 Blast Desc: conserved [Verticillium albo-atrum VaMs.102]
  misc_feature: Useful for introducing or modulating the production of volatile compounds
MLRHISLLVLASLIPSIVGDTEVVYVTDLSIFTVLAPCAQSALSYAVQALTYDECPEAVTALQECVCKQDNNFASISSEVASSVGYSCGETATDAADSAQTVLNAYCTQSSTYSFATPTITVSQFVTDLPYFEDLAPCAASAVSGVVMGMGGYLSSAQALFAGYCGLVDGSSSFPTTSDPPGDMTYYITAMEEFSSLAPCAQSAVSYDIQSQTYDLCPSGPEALASCVCLNTDMTRRISAEITSDVKYYCDSTASDAISSALAVYNLYCSAANAETTLGGITESISETPHTGKSNTASPLETGTGSGGSSDGSSSSSDGDSTSSSGAGSNKTKKSSSTTAVVAGAVVGAVLGTALIAVTAFLWYRKSKKSTATESVSQSPPQTSGGPSNGKPELDSTAMAIPPSVSPAITSHSRKENISPVSGYSSPHGSELQAHSPFGPPPPMPPNMSELQNQTAYGRPIELHNQTAYPRPSELQAPNTYPHETYGQQVYEAPGQNQAQYGHGRSEPQGMGWQSGPVAQSYEMDGGSHSHRQPPHAR

SEQ ID NO: 2227 - DNA, 1522 bp, Muscodor strobelii
  misc_feature: SGI EST ID NO. CUFF.5634.0
  misc_feature: Variant of the nucleotide sequence at SEQ ID NO 2225
ttgactttcaagtgaatgggcacagaaattgacatatagtcaagacgtatgatcgctgtgtcgacgacccaacgctatttgcgacatgcgcatgcgagaaagatcaaaattcactctgggcgagcgccgagatcaatacctctatcaaatactcgtgttcttcacagggagggtatctttcatcagctcaagcgctgtttgctggatactgtggactcgtcgatggctctagttcatttccaactacttccgacccgcctggtgatatgacctattacattactgcaatggaagagttcagttcattagctccgtgtgcacaatcggctgtatcatatgatatccagagtcaaacatatgatctttgtccttcggggccagaagcactggcgtcgtgcgtatgcttgaatactgacatgactaggcgcatcagcgctgagatcacgtcggatgtgaagtattactgtgactcgaccgcaagcgatgctatctcgtctgctctcgccgtatataatctttactgtagcgcagcaaatgctgagaccacgcttggaggtatcactgagtcgatctctgagacacctcacactggaaagagcaatactgcttcgccattggaaactggtacaggctcagggggctcgtcagacgggtccagctccagctctgatggagatagcaccagctccagtggagcagggtcgaacaagacgaagaagtctagttccaccactgccgttgttgccggcgctgtggtaggagctgtcttgggtacagcgctaattgcagtcaccgctttcctatggtatcgaaagtcgaagaagagcactgcaactgagtcggtgtcgcagtctccaccgcaaacttcgggaggcccaagcaacggcaaacccgagcttgatagcaccgcgatggctataccgccatctgtaagcccagctatcaccagccacagccgaaaggaaaacatatcaccagtttcagggtactcctcccctcacggatcagaattgcaagctcacagtcctttcggccctccacctccaatgccaccgaacatgtccgagttgcagaaccagacagcatacgggagaccgatagagttacacaatcaaacagcctatccacgaccttctgagcttcaggcaccaaatacctacccccacgagacatatggtcaacaggtgtacgaagccccggggcaaaatcaagcacaatacggccacggtcgttccgagccccaaggcatgggctggcaatcaggtcctgtcgcccagtcgtatgagatggacggaggttcacatagtcatcgacagcctccccatgcaaggtgacaatagggagcgaattactaatttcattattggcttgtaattagaatcgtgggcgtatcacctagatggtaagcggagagataacaggcgaacagctttacgcttcaatttgcatacatgggtttggctaataaatatgataatgatctgtaaaatgcatcgaaaattgattgtttgttttcttgaac

SEQ ID NO: 2228 - DNA, 468 bp, Muscodor strobelii
  misc_feature: SGI cDNA ID NO. 560368
  misc_feature: Encodes the peptide sequence at SEQ ID NO 2229
atggctgctcagcacgacaatgggcatctcacgcccagcgactccgattctgacgagtcttccgacatcgagcatgacgaccctatcgatgacgatatcagccgggtaattgtagctctagagaactgcactgccagacaggagatgaccatggttgcaatcgacgcgttgaatcaagagctgagcgacatgagcgaagacacgaagcagattcctgatatcctgctgaacacacgttgcatatgctacggccaaagcggcttgcgcaaggagcaagtggttagagacgaacgagatacagcccgatacgagaacctgaagcaactcatcctatctggctcgaatcagccaagcaacgacctcatgacttcgtccttgcctttgatgatcaagattatcggactggcggctttgatcagcatcgttgccgcggtcgcgcatgttcttgtcctgcgcttcattctttga

SEQ ID NO: 2229 - protein, 155 aa, Muscodor strobelii
  misc_feature: SGI Peptide ID NO. 560368
MAAQHDNGHLTPSDSDSDESSDIEHDDPIDDDISRVIVALENCTARQEMTMVAIDALNQELSDMSEDTKQIPDILLNTRCICYGQSGLRKEQVVRDERDTARYENLKQLILSGSNQPSNDLMTSSLPLMIKIIGLAALISIVAAVAHVLVLRFIL

SEQ ID NO: 2230 - DNA, 4569 bp, Muscodor strobelii
  misc_feature: SGI cDNA ID NO. 560369
  misc_feature: Elevated expression when VOC is produced
  misc_feature: Encodes the peptide sequence at SEQ ID NO 2231
atgcttccttacgagattctgggcgacctcgagtggagttacgccaagccagcatccccgtatcaacgaactccgaatgtttactctttccatcacgactgtgccagccgagctctcatcaacagcccaattggtgtcagagatcagtccatcatgtcatttttggcctgtgcaggtaccaacgatcaatctttcggtcctggcattcaaggctgccgagatgacttcgatttcactgttcagtttgaggagatatttttttcattgactccatcatccattttcatcgtactgtcaatatggcgcttgactctcttagcccaacggcctaccgttgttcatgcagcagtactccagcttggcaagttggcaggtgtcgtgtcttatgcatctcttgagctggcattgctcattcttatagcgacacgatcatttagcattacgagtttgtcaatatcagcatccgcactgcgtctggccgccgcgatctgtatcattccactttctctattcgagcatagcaggtcgccaaggccgtctctattgctttccgcatatctatctttgacactcttgctcgacgtggctcaagttcgtacactatggctagcttcgtccacccacccggagaaagcgtatgcctctgtcttcaccgtagtagttgcaatcaaagcaagcattgttgtgcttgaggcccagcaaaagactcggtgggtgagctgggacaagaaggaccacagccccgaggagacgagcggaatctatagccttagtgcatatgcttggctcaaccgtctgtttgtatcgggctaccgtaacgtgctcgaagtcagcgatctttaccctctggatactgcgattgtctccaggcaactgcattcacgtttcgccgaacattacaatgcgcccaagatgaaaggacacaagcataaactcattattgccctcgcacggactctgaagactcaactgttgttaccaattcctagtcggctcgtccttgttgggttcaaattcagtcaaccgtttttcatcagcagcctcatcgactacctcgcaaagccggatgatacaacatcagccaatccaggttatggcttcattggcgcaagtgctctcatctatagtggaatcgctatttcgaccgcgttgtattggtatttccatcgccggatgctgttcatggcacgcgcttcgcttgtcagtgcgatttatgccaaggcaacgaatgctagagtatctataggagatgagaacgagtcagtaacactcatgagtattgatatcgagcgcatcaacggggggttcgcttatttacatgatatatgggcaactgtgatcgaagttggcattgggtcatatctgctttatcaacagattggcccggcctttttagtgccgatcgtcttcgtcgcaatttgctcagttggcctaatatttccagtcaaggcttcagcgagtgggcagaaagcgtggatggatggagtacaaaagcgtgttggcctcacatctagcgtgatagcaagcatgaagaacctaaagatatcaggcttgaaaggccctgtcgctgccgtgatacagcaacttcgcattgacgagttatcagctggagccaagtttcgaagaattatcctcctcgctgacacatgtgccttctcacctctacttctcgcgccgcctttgacattcgctattgctcaacagactctgggcgcgtcacagctttttacatcactatcgtatataatacttatgctcaatcccctcacacaactatatcagagtttcccgcatttagctggtgctctgacttgcctgaatcgcattcagacattcttggagtcaccagatcgggatgacgctcgacttcttaacgaaggcccccgagctgtttccaaagagaaggatgccaccacctccgaaacaactgctgctgaacatgataagccaattctttgggcagagaatgcaagctttgggtggcagccagatcaatggatcctcagcaaaatcaatctcgatatacgacctgcgacattgaccatggtcgtgggtcccgttgcttccggaaagtcgtctttctgccgagctttgttgggagagatgccttattgtggcggaagaatgcatgttgaactcaaggcttcgcgaattgggtattgtgatcagagtccattcttatctaatggtagtattcgcgaaaatattgtcggattttccccctgggatgcgcaaaggtaccacgaggtcgtcgacgccaccatgcttggggctgactgcgaatctcttcccaagaaacacaacaccaatgtcggcagtaatggtatcgttttgtcaggcggccaaaaagcgagagtttctcttgctcgggcgctctatctgcaaacggatttgctcgtgctcgatgatgtgttcagcggacttgatgcagacaccgaagatcaagttttccagcgtgtatttggactatcggggctcttgaggaagcgaggctgtactgctgtgctctgtactcattcaattcgccatctgccagccgcagatcacgttgtggcccttagttccgatggtcgcgtagttgaacaaggggcttttgaggatttgttggctaacaaaagttatgtgcacagtcttgggataaagtcttcttcaagcagtgaaaacgaccattcacaagaagataaattcgacaatgcagcacctatccatgagactcacatgctcacacatattgctacatctacttcgatccccgagcccgacgctatcatgcgacccatgagcgattccaaggtttacaaaatctactttaagagcatgggcttaatattggccgcgtcactcttcttctgcggtctaggcttcggatttttcatgagcttccccaacgtatggctttcgttctggactgtcgatgccgccaaacacaacccctctcacacaaacgggtattacatcgggatatacgccttgtatcaggctttagcatttctgtcgctgttttcgcttgcatatctactattccttgcggtcatatcgaagtccggttcaatattacaccagagcgccctgagcactttagtccgcgcaccactgcgcttcttcactagtacagatcaaggtgccatcaccaatctcttttctcaggacctgaaccttgttgataccgaacttccggtggcgcttctcaacacgatctatgtcgtatctctttcagttggccaggcaggtgtgctcgcgtcgtcttcgccttatctcgtaatatcgtatccgttcgtagcggctgtgctatacgtcttgcagaagttctatcttcgtacatcgaaacaactccgtttgttagacttggaggccaagagcccgctatacacccacttcctagacactaccaaaggtgtcatcaccatgagagcttccggatatgtagatgagaaccgttcaaagaatcttcatctacttgatacgtctcagcgtccagcatacctcttagctatgattcaacaatggcttagttgtgtgctcaatctcatcgttgccgccattgcaatacttgttacggctcttgcaacggaactgcgctcgagcgccggtatcacgggcgcgtccctggtaacactgctaagcataggtgaaaatttgtctgggatcatcatattctacacacaattggaaacatccataggtgcagttagccgtctgacaacattcaataagaccgtcgaacccgaggaacgcgacagtgaaaatttagagcctcctgaacactggccacagagaggcgaaatctcgctgtgccatgtctcggcatcttaccgggaggaaactgaagtgatagaccagtctcttgcccttaaggacatctccctcaccatcttatcaggtgaaaagattgctgtctgcgggcgtactggtagcggtaaatcatccttcatcgcggttctgctcaagctgctagacccgctgtcaaatactgcggataatgttcaggtcgatgggctatcactagcacgcatagatagatcaacgctgcgccagcgactcatcgcaataccgcaagatgccgtattccttcccgacggatcgacatttctcgaaaatgtagacccggtttcggtctccacggaggaggaagcggagtctgtcctcaaaaccatcgatctttgggatttcatcacggagcgcggagggctcaaggcgggtatgattgctagtactcttagccaaggccagcgacaactattctcactcgcgcgcgcagttttgcgtcgccgcattcgggcgagaagtctagggctaggaggctgtggctctgagggtgggatcttacttctggatgaagttagctcgagtgttgatcataaaactgagaggaagatgcaagaggttatccgtgaggaattcagaaattacacagttgttgctgttagtcatcggttggacatgatcatggacttcgaccgtgtagttgtgatggataagggcgaaattgtcgaggtaggaaatcctgcggtacttgcgaaggagcctggcacacgtttcggagatctttacgctgttggtggtcattag

SEQ ID NO: 2231 - protein, 1522 aa, Muscodor strobelii
  misc_feature: SGI Peptide ID NO. 560369
  misc_feature (941)..(1217): Pfam Id: PF00664 Pfam Desc: ABC transporter transmembrane region
  misc_feature (1294)..(1494): Pfam Id: PF00005 Pfam Desc: ABC transporter
  misc_feature (678)..(857): Pfam Id: PF00005 Pfam Desc: ABC transporter
  misc_feature (689)..(857): Pfam Id: PF00005 Pfam Desc: ABC transporter
  misc_feature (62)..(1518): NCBI GI: 258572800 Blast Desc: UREG_04679 [Uncinocarpus reesii 1704] gi|237905432|gb|EEP79833.1| UREG_04679 [Uncinocarpus reesii 1704]
  misc_feature (62)..(1517): NCBI GI: 169623207 Blast Desc: SNOG_14836 [Phaeosphaeria nodorum SN15] gi|111056568|gb|EAT77688.1| SNOG_14836 [Phaeosphaeria nodorum SN15]
  misc_feature (57)..(1517): NCBI GI: 255954729 Blast Desc: Pc21g10850 [Penicillium chrysogenum Wisconsin 54-1255] gi|211589828|emb|CAP95982.1| Pc21g10850 [Penicillium chrysogenum Wisconsin 54-1255]
  misc_feature (57)..(1517): NCBI GI: 32264580 Blast Desc: ABC transporter [Alternaria brassicae]
  misc_feature (62)..(1516): NCBI GI: 242796092 Blast Desc: multidrug resistance protein, [Talaromyces stipitatus ATCC 10500] gi|218719315|gb|EED18735.1| multidrug resistance protein, [Talaromyces stipitatus ATCC 10500]
  misc_feature (62)..(1518): NCBI GI: 259489801 Blast Desc: TPA: ABC multidrug transporter (Eurofung) [Aspergillus nidulans FGSC A4]
  misc_feature (110)..(1505): NCBI GI: 242796555 Blast Desc: multidrug resistance protein, [Talaromyces stipitatus ATCC 10500] gi|218719411|gb|EED18831.1| multidrug resistance protein, [Talaromyces stipitatus ATCC 10500]
  misc_feature (62)..(1521): NCBI GI: 115391203 Blast Desc: ATEG_03928 [Aspergillus terreus NIH2624] gi|114194030|gb|EAU35730.1| ATEG_03928 [Aspergillus terreus NIH2624]
  misc_feature (62)..(1508): NCBI GI: 256722196 Blast Desc: NECHADRAFT_52409 [Nectria haematococca mpVI 77-13-4]
  misc_feature (65)..(1521): NCBI GI: 242784226 Blast Desc: ABC multidrug transporter, [Talaromyces stipitatus ATCC 10500] gi|218720491|gb|EED19910.1| ABC multidrug transporter, [Talaromyces stipitatus ATCC 10500]
  misc_feature (252)..(1516): SWISSPROT Homolog: EC 3.6.3.44 Xenobiotic-transporting ATPase
  misc_feature: Useful for introducing or modulating the production of volatile compounds
MLPYEILGDLEWSYAKPASPYQRTPNVYSFHHDCASRALINSPIGVRDQSIMSFLACAGTNDQSFGPGIQGCRDDFDFTVQFEEIFFSLTPSSIFIVLSIWRLTLLAQRPTVVHAAVLQLGKLAGVVSYASLELALLILIATRSFSITSLSISASALRLAAAICIIPLSLFEHSRSPRPSLLLSAYLSLTLLLDVAQVRTLWLASSTHPEKAYASVFTVVVAIKASIVVLEAQQKTRWVSWDKKDHSPEETSGIYSLSAYAWLNRLFVSGYRNVLEVSDLYPLDTAIVSRQLHSRFAEHYNAPKMKGHKHKLIIALARTLKTQLLLPIPSRLVLVGFKFSQPFFISSLIDYLAKPDDTTSANPGYGFIGASALIYSGIAISTALYWYFHRRMLFMARASLVSAIYAKATNARVSIGDENESVTLMSIDIERINGGFAYLHDIWATVIEVGIGSYLLYQQIGPAFLVPIVFVAICSVGLIFPVKASASGQKAWMDGVQKRVGLTSSVIASMKNLKISGLKGPVAAVIQQLRIDELSAGAKFRRIILLADTCAFSPLLLAPPLTFAIAQQTLGASQLFTSLSYIILMLNPLTQLYQSFPHLAGALTCLNRIQTFLESPDRDDARLLNEGPRAVSKEKDATTSETTAAEHDKPILWAENASFGWQPDQWILSKINLDIRPATLTMVVGPVASGKSSFCRALLGEMPYCGGRMHVELKASRIGYCDQSPFLSNGSIRENIVGFSPWDAQRYHEVVDATMLGADCESLPKKHNTNVGSNGIVLSGGQKARVSLARALYLQTDLLVLDDVFSGLDADTEDQVFQRVFGLSGLLRKRGCTAVLCTHSIRHLPAADHVVALSSDGRVVEQGAFEDLLANKSYVHSLGIKSSSSSENDHSQEDKFDNAAPIHETHMLTHIATSTSIPEPDAIMRPMSDSKVYKIYFKSMGLILAASLFFCGLGFGFFMSFPNVWLSFWTVDAAKHNPSHTNGYYIGIYALYQALAFLSLFSLAYLLFLAVISKSGSILHQSALSTLVRAPLRFFTSTDQGAITNLFSQDLNLVDTELPVALLNTIYVVSLSVGQAGVLASSSPYLVISYPFVAAVLYVLQKFYLRTSKQLRLLDLEAKSPLYTHFLDTTKGVITMRASGYVDENRSKNLHLLDTSQRPAYLLAMIQQWLSCVLNLIVAAIAILVTALATELRSSAGITGASLVTLLSIGENLSGIIIFYTQLETSIGAVSRLTTFNKTVEPEERDSENLEPPEHWPQRGEISLCHVSASYREETEVIDQSLALKDISLTILSGEKIAVCGRTGSGKSSFIAVLLKLLDPLSNTADNVQVDGLSLARIDRSTLRQRLIAIPQDAVFLPDGSTFLENVDPVSVSTEEEAESVLKTIDLWDFITERGGLKAGMIASTLSQGQRQLFSLARAVLRRRIRARSLGLGGCGSEGGILLLDEVSSSVDHKTERKMQEVIREEFRNYTVVAVSHRLDMIMDFDRVVVMDKGEIVEVGNPAVLAKEPGTRFGDLYAVGGH

SEQ ID NO: 2232 - DNA, 4919 bp, Muscodor strobelii
  misc_feature: SGI EST ID NO. CUFF.5649.0
  misc_feature: Variant of the nucleotide sequence at SEQ ID NO 2230
ctcgagtggagttacgccaagccagcatccccgtatcaacgaactccgaatgtttgtgactcacgacgtgatacatctccatggatgcaatgcgatgctcatgaattgactatacagggtaataataccttgggcacagagtaaactgattgatacttatttagactctttccatcacgactgtgccagccgagctctcatcaacagcccaattggtgtcagagatcagtccatcatgtcatttttggcctgtgcaggtaccaacgatcaatctttcggtcctggcattcaaggctgccgagatgacttcgatttcactgttcagtttgaggagatatttttttcattgactccatcatccattttcatcgtactgtcaatatggcgcttgactctcttagcccaacggcctaccgttgttcatgcagcagtactccagcttggcaagttggcaggtgtcgtgtcttatgcatctcttgagctggcattgctcattcttatagcgacacgatcatttagcattacgagtttgtcaatatcagcatccgcactgcgtctggccgccgcgatctgtatcattccactttctctattcgagcatagcaggtcgccaaggccgtctctattgctttccgcatatctatctttgacactcttgctcgacgtggctcaagttcgtacactatggctagcttcgtccacccacccggagaaagcgtatgcctctgtcttcaccgtagtagttgcaatcaaagcaagcattgttgtgcttgaggcccagcaaaagactcggtgggtgagctgggacaagaaggaccacagccccgaggagacgagcggaatctatagccttagtgcatatgcttggctcaaccgtctgtttgtatcgggctaccgtaacgtgctcgaagtcagcgatctttaccctctggatactgcgattgtctccaggcaactgcattcacgtttcgccgaacattacaatgcgcccaagatgaaaggacacaagcataaactcattattgccctcgcacggactctgaagactcaactgttgttaccaattcctagtcggctcgtccttgttgggttcaaattcagtcaaccgtttttcatcagcagcctcatcgactacctcgcaaagccggatgatacaacatcagccaatccaggttatggcttcattggcgcaagtgctctcatctatagtggaatcgctatttcgaccgcgttgtattggtatttccatcgccggatgctgttcatggcacgcgcttcgcttgtcagtgcgatttatgccaaggcaacgaatgctagagtatctataggagatgagaacgagtcagtaacactcatgagtattgatatcgagcgcatcaacggggggttcgcttatttacatgatatatgggcaactgtgatcgaagttggcattgggtcatatctgctttatcaacagattggcccggcctttttagtgccgatcgtcttcgtcgcaatttgctcagttggcctaatatttccagtcaaggcttcagcgagtgggcagaaagcgtggatggatggagtacaaaagcgtgttggcctcacatctagcgtgatagcaagcatgaagaacctaaagatatcaggcttgaaaggccctgtcgctgccgtgatacagcaacttcgcattgacgagttatcagctggagccaagtttcgaagaattatcctcctcgctgacacatgtgccttctcacctctacttctcgcgccgcctttgacattcgctattgctcaacagactctgggcgcgtcacagctttttacatcactatcgtatataatacttatgctcaatcccctcacacaactatatcagagtttcccgcatttagctggtgctctgacttgcctgaatcgcattcagacattcttggagtcaccagatcgggatgacgctcgacttcttaacgaaggcccccgagctgtttccaaagagaaggatgccaccacctccgaaacaactgctgctgaacatgataagccaattctttgggcagagaatgcaagctttgggtggcagccagatcaatggatcctcagcaaaatcaatctcgatatacgacctgcgacattgaccatggtcgtgggtcccgttgcttccggaaagtcgtctttctgccgagctttgttgggagagatgccttattgtggcggaagaatgcatgttgaactcaaggcttcgcgaattgggtattgtgatcagagtccattcttatctaatggtagtattcgcgaaaatattgtcggattttccccctgggatgcgcaaaggtaccacgaggtcgtcgacgccaccatgcttggggctgactgcgaatctcttcccaagaaacacaacaccaatgtcggcagtaatggtatcgttttgtcaggcggccaaaaagcgagagtttctcttgctcgggcgctctatctgcaaacggatttgctcgtgctcgatgatgtgttcagcggacttgatgcagacaccgaagatcaagttttccagcgtgtatttggactatcggggctcttgaggaagcgaggctgtactgctgtgctctgtactcattcaattcgccatctgccagccgcagatcacgttgtggcccttagttccgatggtcgcgtagttgaacaaggggcttttgaggatttgttggctaacaaaagttatgtgcacagtcttgggataaagtcttcttcaagcagtgaaaacgaccattcacaagaagataaattcgacaatgcagcacctatccatgagactcacatgctcacacatattgctacatctacttcgatccccgagcccgacgctatcatgcgacccatgagcgattccaaggtttacaaaatctactttaagagcatgggcttaatattggccgcgtcactcttcttctgcggtctaggcttcggatttttcatgagcttccccaacgtatggctttcgttctggactgtcgatgccgccaaacacaacccctctcacacaaacgggtattacatcgggatatacgccttgtatcaggctttagcatttctgtcgctgttttcgcttgcatatctactattccttgcggtcatatcgaagtccggttcaatattacaccagagcgccctgagcactttagtccgcgcaccactgcgcttcttcactagtacagatcaaggtgccatcaccaatctcttttctcaggacctgaaccttgttgataccgaacttccggtggcgcttctcaacacgatctatgtcgtatctctttcagttggccaggcaggtgtgctcgcgtcgtcttcgccttatctcgtaatatcgtatccgttcgtagcggctgtgctatacgtcttgcagaagttctatcttcgtacatcgaaacaactccgtttgttagacttggaggccaagagcccgctatacacccacttcctagacactaccaaaggtgtcatcaccatgagagcttccggatatgtagatgagaaccgttcaaagaatcttcatctacttgatacgtctcagcgtccagcatacctcttagctatgattcaacaatggcttagttgtgtgctcaatctcatcgttgccgccattgcaatacttgttacggctcttgcaacggaactgcgctcgagcgccggtatcacgggcgcgtccctggtaacactgctaagcataggtgaaaatttgtctgggatcatcatattctacacacaattggaaacatccataggtgcagttagccgtctgacaacattcaataagaccgtcgaacccgaggaacgcgacagtgaaaatttagagcctcctgaacactggccacagagaggcgaaatctcgctgtgccatgtctcggcatcttaccgggaggaaactgaagtgatagaccagtctcttgcccttaaggacatctccctcaccatcttatcaggtgaaaagattgctgtctgcgggcgtactggtagcggtaaatcatccttcatcgcggttctgctcaagctgctagacccgctgtcaaatactgcggataatgttcaggtcgatgggctatcactagcacgcatagatagatcaacgctgcgccagcgactcatcgcaataccgcaagatgccgtattccttcccgacggatcgacatttctcgaaaatgtagacccggtttcggtctccacggaggaggaagcggagtctgtcctcaaaaccatcgatctttgggatttcatcacggagcgcggagggctcaaggcgggtatgattgctagtactcttagccaaggccagcgacaactattctcactcgcgcgcgcagttttgcgtcgccgcattcgggcgagaagtctagggctaggaggctgtggctctgagggtgggatcttacttctggatgaagttagctcgagtgttgatcataaaactgagaggaagatgcaagaggttatccgtgaggaattcagaaattacacagttgttgctgttagtcatcggttggacatgatcatggacttcgaccgtgtagttgtgatggataagggcgaaattgtcgaggtaggaaatcctgcggtacttgcgaaggagcctggcacacgtttcggagatctttacgctgttggtggtcattagatatgatttaatgctattcaggagcctgtcttgatcattcaagtaggtgagcttcaaccgcctgcaacatgcttgtgcactatggcaacatgtacccttatcaacattgaatgctctgttacctaggtacctatcagtaatgttttgccaccgtaatgccctctcccttcgctgccttcaattcaattctacctgctctgtccgcctctatacacccagatcactaatgagtgcgttgcctatcttcggaacctgtttgcgcacgtca

SEQ ID NO: 2233 - DNA, 4689 bp, Muscodor strobelii
  misc_feature: SGI cDNA ID NO. 560370
  misc_feature: Encodes the peptide sequence at SEQ ID NO 2234
atgcttccttacgagattctgggcgacctcgagtggagttacgccaagccagcatccccgtatcaacgaactccgaatgtttactctttccatcacgactgtgccagccgagctctcatcaacagcccaattggtgtcagagatcagtccatcatgtcatttttggcctgtgcaggtaccaacgatcaatctttcggtcctggcattcaaggctgccgagatgacttcgatttcactgttcagtttgaggagatatttttttcattgactccatcatccattttcatcgtactgtcaatatggcgcttgactctcttagcccaacggcctaccgttgttcatgcagcagtactccagcttggcaagttggcaggtgtcgtgtcttatgcatctcttgagctggcattgctcattcttatagcgacacgatcatttagcattacgagtttgtcaatatcagcatccgcactgcgtctggccgccgcgatctgtatcattccactttctctattcgagcatagcaggtcgccaaggccgtctctattgctttccgcatatctatctttgacactcttgctcgacgtggctcaagttcgtacactatggctagcttcgtccacccacccggagaaagcgtatgcctctgtcttcaccgtagtagttgcaatcaaagcaagcattgttgtgcttgaggcccagcaaaagactcggtgggtgagctgggacaagaaggaccacagccccgaggagacgagcggaatctatagccttagtgcatatgcttggctcaaccgtctgtttgtatcgggctaccgtaacgtgctcgaagtcagcgatctttaccctctggatactgcgattgtctccaggcaactgcattcacgtttcgccgaacattacaatgcgcccaagatgaaaggacacaagcataaactcattattgccctcgcacggactctgaagactcaactgttgttaccaattcctagtcggctcgtccttgttgggttcaaattcagtcaaccgtttttcatcagcagcctcatcgactacctcgcaaagccggatgatacaacatcagccaatccaggttatggcttcattggcgcaagtgctctcatctatagtggaatcgctatttcgaccgcgttgtattggtatttccatcgccggatgctgttcatggcacgcgcttcgcttgtcagtgcgatttatgccaaggcaacgaatgctagagtatctataggagatgagaacgagtcagtaacactcatgagtattgatatcgagcgcatcaacggggggttcgcttatttacatgatatatgggcaactgtgatcgaagttggcattgggtcatatctgctttatcaacagattggcccggcctttttagtgccgatcgtcttcgtcgcaatttgctcagttggcctaatatttccagtcaaggcttcagcgagtgggcagaaagcgtggatggatggagtacaaaagcgtgttggcctcacatctagcgtgatagcaagcatgaagaacctaaagatatcaggcttgaaaggccctgtcgctgccgtgatacagcaacttcgcattgacgagttatcagctggagccaagtttcgaagaattatcctcctcgctgacacatgtgccttctcacctctacttctcgcgccgcctttgacattcgctattgctcaacagactctgggcgcgtcacagctttttacatcactatcgtatataatacttatgctcaatcccctcacacaactatatcagagtttcccgcatttagctggtgctctgacttgcctgaatcgcattcagacattcttggagtcaccagatcgggatgacgctcgacttcttaacgaaggcccccgagctgtttccaaagagaaggatgccaccacctccgaaacaactgctgctgaacatgataagccaattctttgggcagagaatgcaagctttgggtggcagccagatcaatggatcctcagcaaaatcaatctcgatatacgacctgcgacattgaccatggtcgtgggtcccgttgcttccggaaagtcgtctttctgccgagctttgttgggagagatgccttattgtggcggaagaatgcatgttgaactcaaggcttcgcgaattgggtattgtgatcagagtccattcttatctaatggtagtattcgcgaaaatattgtcggattttccccctgggatgcgcaaaggtaccacgaggtcgtcgacgccaccatgcttggggctgactgcgaatctcttcccaagaaacacaacaccaatgtcggcagtaatggtatcgttttgtcaggcggccaaaaagcgagagtttctcttgctcgggcgctctatctgcaaacggatttgctcgtgctcgatgatgtgttcagcggacttgatgcagacaccgaagatcaagttttccagcgtgtatttggactatcggggctcttgaggaagcgaggctgtactgctgtgctctgtactcattcaattcgccatctgccagccgcagatcacgttgtggcccttagttccgatggtcgcgtagttgaacaaggggcttttgaggatttgttggctaacaaaagttatgtgcacagtcttgggataaagtcttcttcaagcagtgaaaacgaccattcacaagaagataaattcgacaatgcagcacctatccatgagactcacatgctcacacatattgctacatctacttcgatccccgagcccgacgctatcatgcgacccatgagcgattccaaggtttacaaaatctactttaagagcatgggcttaatatgtaagtcaaggcttatcctacgtgctggcctaaaacacgctgctagcgaaattttcgccggaaaaatcgtcacgtcaatcatattctcatcccttaacatattgctgactgaagtcttagtggccgcgtcactcttcttctgcggtctaggcttcggatttttcatgagcttccccaacgtatggctttcgttctggactgtcgatgccgccaaacacaacccctctcacacaaacgggtattacatcgggatatacgccttgtatcaggctttagcatttctgtcgctgttttcgcttgcatatctactattccttgcggtcatatcgaagtccggttcaatattacaccagagcgccctgagcactttagtccgcgcaccactgcgcttcttcactagtacagatcaaggtgccatcaccaatctcttttctcaggacctgaaccttgttgataccgaacttccggtggcgcttctcaacacgatctatgtcgtatctctttcagttggccaggcaggtgtgctcgcgtcgtcttcgccttatctcgtaatatcgtatccgttcgtagcggctgtgctatacgtcttgcagaagttctatcttcgtacatcgaaacaactccgtttgttagacttggaggccaagagcccgctatacacccacttcctagacactaccaaaggtgtcatcaccatgagagcttccggatatgtagatgagaaccgttcaaagaatcttcatctacttgatacgtctcagcgtccagcatacctcttagctatgattcaacaatggcttagttgtgtgctcaatctcatcgttgccgccattgcaatacttgttacggctcttgcaacggaactgcgctcgagcgccggtatcacgggcgcgtccctggtaacactgctaagcataggtgaaaatttgtctgggatcatcatattctacacacaattggaaacatccataggtgcagttagccgtctgacaacattcaataagaccgtcgaacccgaggaacgcgacagtgaaaatttagagcctcctgaacactggccacagagaggcgaaatctcgctgtgccatgtctcggcatcttaccgggaggaaactgaagtgatagaccagtctcttgcccttaaggacatctccctcaccatcttatcaggtgaaaagattgctgtctgcgggcgtactggtagcggtaaatcatccttcatcgcggttctgctcaagctgctagacccgctgtcaaatactgcggataatgttcaggtcgatgggctatcactagcacgcatagatagatcaacgctgcgccagcgactcatcgcaataccgcaagatgccgtattccttcccgacggatcgacatttctcgaaaatgtagacccggtttcggtctccacggaggaggaagcggagtctgtcctcaaaaccatcgatctttgggatttcatcacggagcgcggagggctcaaggcgggtatgattgctagtactcttagccaaggccagcgacaactattctcactcgcgcgcgcagttttgcgtcgccgcattcgggcgagaagtctagggctaggaggctgtggctctgagggtgggatcttacttctggatgaagttagctcgagtgttgatcataaaactgagaggaagatgcaagaggttatccgtgaggaattcagaaattacacagttgttgctgttagtcatcggttggacatgatcatggacttcgaccgtgtagttgtgatggataagggcgaaattgtcgaggtaggaaatcctgcggtacttgcgaaggagcctggcacacgtttcggagatctttacgctgttggtggtcattag

SEQ ID NO: 2234 - protein, 1562 aa, Muscodor strobelii
  misc_feature: SGI Peptide ID NO. 560370
  misc_feature (981)..(1257): Pfam Id: PF00664 Pfam Desc: ABC transporter transmembrane region
  misc_feature (1334)..(1534): Pfam Id: PF00005 Pfam Desc: ABC transporter
  misc_feature (678)..(857): Pfam Id: PF00005 Pfam Desc: ABC transporter
  misc_feature (689)..(857): Pfam Id: PF00005 Pfam Desc: ABC transporter
  misc_feature (65)..(1561): NCBI GI: 242784226 Blast Desc: ABC multidrug transporter, [Talaromyces stipitatus ATCC 10500] gi|218720491|gb|EED19910.1| ABC multidrug transporter, [Talaromyces stipitatus ATCC 10500]
  misc_feature (69)..(1560): NCBI GI: 212527610 Blast Desc: ABC multidrug transporter, [Penicillium marneffei ATCC 18224] gi|210073360|gb|EEA27447.1| ABC multidrug transporter, [Penicillium marneffei ATCC 18224]
  misc_feature (126)..(1560): NCBI GI: 238841995 Blast Desc: Fum19p [Microsporum canis CBS 113480]
  misc_feature (69)..(1556): NCBI GI: 145244955 Blast Desc: An11g07780 [Aspergillus niger] gi|134079440|emb|CAK45972.1| protein product [Aspergillus niger]
  misc_feature (73)..(1561): NCBI GI: 119494834 Blast Desc: ABC transporter, [Neosartorya fischeri NRRL 181] gi|119412382|gb|EAW22323.1| ABC transporter, [Neosartorya fischeri NRRL 181]
  misc_feature (89)..(1561): NCBI GI: 154297560 Blast Desc: BC1G_12625 [Botryotinia fuckeliana B05.10] gi|150858448|gb|EDN33640.1| BC1G_12625 [Botryotinia fuckeliana B05.10]
  misc_feature (73)..(1561): NCBI GI: 119490092 Blast Desc: ABC transporter, [Neosartorya fischeri NRRL 181] gi|119411122|gb|EAW21065.1| ABC transporter, [Neosartorya fischeri NRRL 181]
  misc_feature (165)..(1561): NCBI GI: 238498088 Blast Desc: ABC multidrug transporter, [Aspergillus flavus NRRL3357] gi|220693553|gb|EED49898.1| ABC multidrug transporter, [Aspergillus flavus NRRL3357]
  misc_feature (52)..(1556): NCBI GI: 145229613 Blast Desc: An01g06920 [Aspergillus niger] gi|134055223|emb|CAK43810.1| protein product [Aspergillus niger]
  misc_feature (61)..(1558): NCBI GI: 261354780 Blast Desc: canalicular multispecific organic anion transporter 1 [Verticillium albo-atrum VaMs.102]
  misc_feature (215)..(1561): SWISSPROT Homolog: EC 3.6.3.44 Xenobiotic-transporting ATPase
MLPYEILGDLEWSYAKPASPYQRTPNVYSFHHDCASRALINSPIGVRDQSIMSFLACAGTNDQSFGPGIQGCRDDFDFTVQFEEIFFSLTPSSIFIVLSIWRLTLLAQRPTVVHAAVLQLGKLAGVVSYASLELALLILIATRSFSITSLSISASALRLAAAICIIPLSLFEHSRSPRPSLLLSAYLSLTLLLDVAQVRTLWLASSTHPEKAYASVFTVVVAIKASIVVLEAQQKTRWVSWDKKDHSPEETSGIYSLSAYAWLNRLFVSGYRNVLEVSDLYPLDTAIVSRQLHSRFAEHYNAPKMKGHKHKLIIALARTLKTQLLLPIPSRLVLVGFKFSQPFFISSLIDYLAKPDDTTSANPGYGFIGASALIYSGIAISTALYWYFHRRMLFMARASLVSAIYAKATNARVSIGDENESVTLMSIDIERINGGFAYLHDIWATVIEVGIGSYLLYQQIGPAFLVPIVFVAICSVGLIFPVKASASGQKAWMDGVQKRVGLTSSVIASMKNLKISGLKGPVAAVIQQLRIDELSAGAKFRRIILLADTCAFSPLLLAPPLTFAIAQQTLGASQLFTSLSYIILMLNPLTQLYQSFPHLAGALTCLNRIQTFLESPDRDDARLLNEGPRAVSKEKDATTSETTAAEHDKPILWAENASFGWQPDQWILSKINLDIRPATLTMVVGPVASGKSSFCRALLGEMPYCGGRMHVELKASRIGYCDQSPFLSNGSIRENIVGFSPWDAQRYHEVVDATMLGADCESLPKKHNTNVGSNGIVLSGGQKARVSLARALYLQTDLLVLDDVFSGLDADTEDQVFQRVFGLSGLLRKRGCTAVLCTHSIRHLPAADHVVALSSDGRVVEQGAFEDLLANKSYVHSLGIKSSSSSENDHSQEDKFDNAAPIHETHMLTHIATSTSIPEPDAIMRPMSDSKVYKIYFKSMGLICKSRLILRAGLKHAASEIFAGKIVTSIIFSSLNILLTEVLVAASLFFCGLGFGFFMSFPNVWLSFWTVDAAKHNPSHTNGYYIGIYALYQALAFLSLFSLAYLLFLAVISKSGSILHQSALSTLVRAPLRFFTSTDQGAITNLFSQDLNLVDTELPVALLNTIYVVSLSVGQAGVLASSSPYLVISYPFVAAVLYVLQKFYLRTSKQLRLLDLEAKSPLYTHFLDTTKGVITMRASGYVDENRSKNLHLLDTSQRPAYLLAMIQQWLSCVLNLIVAAIAILVTALATELRSSAGITGASLVTLLSIGENLSGIIIFYTQLETSIGAVSRLTTFNKTVEPEERDSENLEPPEHWPQRGEISLCHVSASYREETEVIDQSLALKDISLTILSGEKIAVCGRTGSGKSSFIAVLLKLLDPLSNTADNVQVDGLSLARIDRSTLRQRLIAIPQDAVFLPDGSTFLENVDPVSVSTEEEAESVLKTIDLWDFITERGGLKAGMIASTLSQGQRQLFSLARAVLRRRIRARSLGLGGCGSEGGILLLDEVSSSVDHKTERKMQEVIREEFRNYTVVAVSHRLDMIMDFDRVVVMDKGEIVEVGNPAVLAKEPGTRFGDLYAVGGH

SEQ ID NO: 2235 - DNA, 4919 bp, Muscodor strobelii; identical to SEQ ID NO: 2232
  misc_feature: SGI EST ID NO. CUFF.5649.0
  misc_feature: Variant of the nucleotide sequence at SEQ ID NO 2233

SEQ ID NO: 2236 - DNA, 4575 bp, Muscodor strobelii
  misc_feature: SGI cDNA ID NO. 560371
  misc_feature: Encodes the peptide sequence at SEQ ID NO 2237
atgcttccttacgagattctgggcgacctcgagtggagttacgccaagccagcatccccgtatcaacgaactccgaatgtttactctttccatcacgactgtgccagccgagctctcatcaacagcccaattggtgtcagagatcagtccatcatgtcatttttggcctgtgcaggtaccaacgatcaatctttcggtcctggcattcaaggctgccgagatgacttcgatttcactgttcagtttgaggagatatttttttcattgactccatcatccattttcatcgtactgtcaatatggcgcttgactctcttagcccaacggcctaccgttgttcatgcagcagtactccagcttggcaagttggcaggtgtcgtgtcttatgcatctcttgagctggcattgctcattcttatagcgacacgatcatttagcattacgagtttgtcaatatcagcatccgcactgcgtctggccgccgcgatctgtatcattccactttctctattcgagcatagcaggtcgccaaggccgtctctattgctttccgcatatctatctttgacactcttgctcgacgtggctcaagttcgtacactatggctagcttcgtccacccacccggagaaagcgtatgcctctgtcttcaccgtagtagttgcaatcaaagcaagcattgttgtgcttgaggcccagcaaaagactcggtgggtgagctgggacaagaaggaccacagccccgaggagacgagcggaatctatagccttagtgcatatgcttggctcaaccgtctgtttgtatcgggctaccgtaacgtgctcgaagtcagcgatctttaccctctggatactgcgattgtctccaggcaactgcattcacgtttcgccgaacattacaatgcgcccaagatgaaaggacacaagcataaactcattattgccctcgcacggactctgaagactcaactgttgttaccaattcctagtcggctcgtccttgttgggttcaaattcagtcaaccgtttttcatcagcagcctcatcgactacctcgcaaagccggatgatacaacatcagccaatccaggttatggcttcattggcgcaagtgctctcatctatagtggaatcgctatttcgaccgcgttgtattggtatttccatcgccggatgctgttcatggcacgcgcttcgcttgtcagtgcgatttatgccaaggcaacgaatgctagagtatctataggagatgagaacgagtcagtaacactcatgagtattgatatcgagcgcatcaacggggggttcgcttatttacatgatatatgggcaactgtgatcgaagttggcattgggtcatatctgctttatcaacagattggcccggcctttttagtgccgatcgtcttcgtcgcaatttgctcagttggcctaatatttccagtcaaggcttcagcgagtgggcagaaagcgtggatggatggagtacaaaagcgtgttggcctcacatctagcgtgatagcaagcatgaagaacctaaagatatcaggcttgaaaggccctgtcgctgccgtgatacagcaacttcgcattgacgagttatcagctggagccaagtttcgaagaattatcctcctcgctgacacatgtgccttctcacctctacttctcgcgccgcctttgacattcgctattgctcaacagactctgggcgcgtcacagctttttacatcactatcgtatataatacttatgctcaatcccctcacacaactatatcagagtttcccgcatttagctggtgctctgacttgcctgaatcgcattcagacattcttggagtcaccagatcgggatgacgctcgacttcttaacgaaggcccccgagctgtttccaaagagaaggatgccaccacctccgaaacaactgctgctgaacatgataagccaattctttgggcagagaatgcaagctttgggtggcagccagatcaatggatcctcagcaaaatcaatctcgatatacgacctgcgacattgaccatggtcgtgggtcccgttgcttccggaaagtcgtctttctgccgagctttgttgggagagatgccttattgtggcggaagaatgcatgttgaactcaaggcttcgcgaattgggtattgtgatcagagtccattcttatctaatggtagtattcgcgaaaatattgtcggattttccccctgggatgcgcaaaggtaccacgaggtcgtcgacgccaccatgcttggggctgactgcgaatctcttcccaagaaacacaacaccaatgtcggcagtaatggtatcgttttgtcaggcggccaaaaagcgagagtttctcttgctcgggcgctctatctgcaaacggatttgctcgtgctcgatgatgtgttcagcggacttgatgcagacaccgaagatcaagttttccagcgtgtatttggactatcggggctcttgaggaagcgaggctgtactgctgtgctctgtactcattcaattcgccatctgccagccgcagatcacgttgtggcccttagttccgatggtcgcgtagttgaacaaggggcttttgaggatttgttggctaacaaaagttatgtgcacagtcttgggataaagtcttcttcaagcagtgaaaacgaccattcacaagaagataaattcgacaatgcagcacctatccatgagactcacatgctcacacatattgctacatctacttcgatccccgagcccgacgctatcatgcgacccatgagcgattccaaggtttacaaaatctactttaagagcatgggcttaatattcttagtggccgcgtcactcttcttctgcggtctaggcttcggatttttcatgagcttccccaacgtatggctttcgttctggactgtcgatgccgccaaacacaacccctctcacacaaacgggtattacatcgggatatacgccttgtatcaggctttagcatttctgtcgctgttttcgcttgcatatctactattccttgcggtcatatcgaagtccggttcaatattacaccagagcgccctgagcactttagtccgcgcaccactgcgcttcttcactagtacagatcaaggtgccatcaccaatctcttttctcaggacctgaaccttgttgataccgaacttccggtggcgcttctcaacacgatctatgtcgtatctctttcagttggccaggcaggtgtgctcgcgtcgtcttcgccttatctcgtaatatcgtatccgttcgtagcggctgtgctatacgtcttgcagaagttctatcttcgtacatcgaaacaactccgtttgttagacttggaggccaagagcccgctatacacccacttcctagacactaccaaaggtgtcatcaccatgagagcttccggatatgtagatgagaaccgttcaaagaatcttcatctacttgatacgtctcagcgtccagcatacctcttagctatgattcaacaatggcttagttgtgtgctcaatctcatcgttgccgccattgcaatacttgttacggctcttgcaacggaactgcgctcgagcgccggtatcacgggcgcgtccctggtaacactgctaagcataggtgaaaatttgtctgggatcatcatattctacacacaattggaaacatccataggtgcagttagccgtctgacaacattcaataagaccgtcgaacccgaggaacgcgacagtgaaaatttagagcctcctgaacactggccacagagaggcgaaatctcgctgtgccatgtctcggcatcttaccgggaggaaactgaagtgatagaccagtctcttgcccttaaggacatctccctcaccatcttatcaggtgaaaagattgctgtctgcgggcgtactggtagcggtaaatcatccttcatcgcggttctgctcaagctgctagacccgctgtcaaatactgcggataatgttcaggtcgatgggctatcactagcacgcatagatagatcaacgctgcgccagcgactcatcgcaataccgcaagatgccgtattccttcccgacggatcgacatttctcgaaaatgtagacccggtttcggtctccacggaggaggaagcggagtctgtcctcaaaaccatcgatctttgggatttcatcacggagcgcggagggctcaaggcgggtatgattgctagtactcttagccaaggccagcgacaactattctcactcgcgcgcgcagttttgcgtcgccgcattcgggcgagaagtctagggctaggaggctgtggctctgagggtgggatcttacttctggatgaagttagctcgagtgttgatcataaaactgagaggaagatgcaagaggttatccgtgaggaattcagaaattacacagttgttgctgttagtcatcggttggacatgatcatggacttcgaccgtgtagttgtgatggataagggcgaaattgtcgaggtaggaaatcctgcggtacttgcgaaggagcctggcacacgtttcggagatctttacgctgttggtggtcattag

SEQ ID NO: 2237 - protein, 1524 aa, Muscodor strobelii
  misc_feature: SGI Peptide ID NO. 560371
  misc_feature (943)..(1219): Pfam Id: PF00664 Pfam Desc: ABC transporter transmembrane region
  misc_feature (1296)..(1496): Pfam Id: PF00005 Pfam Desc: ABC transporter
  misc_feature (678)..(857): Pfam Id: PF00005 Pfam Desc: ABC transporter
  misc_feature (689)..(857): Pfam Id: PF00005 Pfam Desc: ABC transporter
  misc_feature (65)..(1523): NCBI GI: 242784226 Blast Desc: ABC multidrug transporter, [Talaromyces stipitatus ATCC 10500] gi|218720491|gb|EED19910.1| ABC multidrug transporter, [Talaromyces stipitatus ATCC 10500]
  misc_feature (69)..(1522): NCBI GI: 212527610 Blast Desc: ABC multidrug transporter, [Penicillium marneffei ATCC 18224] gi|210073360|gb|EEA27447.1| ABC multidrug transporter, [Penicillium marneffei ATCC 18224]
  misc_feature (126)..(1522): NCBI GI: 238841995 Blast Desc: Fum19p [Microsporum canis CBS 113480]
  misc_feature (69)..(1518): NCBI GI: 145244955 Blast Desc: An11g07780 [Aspergillus niger] gi|134079440|emb|CAK45972.1| protein product [Aspergillus niger]
  misc_feature (73)..(1523): NCBI GI: 119494834 Blast Desc: ABC transporter, [Neosartorya fischeri NRRL 181] gi|119412382|gb|EAW22323.1| ABC transporter, [Neosartorya fischeri NRRL 181]
  misc_feature (89)..(1523): NCBI GI: 154297560 Blast Desc: BC1G_12625 [Botryotinia fuckeliana B05.10] gi|150858448|gb|EDN33640.1| BC1G_12625 [Botryotinia fuckeliana B05.10]
  misc_feature (73)..(1523): NCBI GI: 119490092 Blast Desc: ABC transporter, [Neosartorya fischeri NRRL 181] gi|119411122|gb|EAW21065.1| ABC transporter, [Neosartorya fischeri NRRL 181]
  misc_feature (165)..(1523): NCBI GI: 238498088 Blast Desc: ABC multidrug transporter, [Aspergillus flavus NRRL3357] gi|220693553|gb|EED49898.1| ABC multidrug transporter, [Aspergillus flavus NRRL3357]
  misc_feature (52)..(1518): NCBI GI: 145229613 Blast Desc: An01g06920 [Aspergillus niger] gi|134055223|emb|CAK43810.1| protein product [Aspergillus niger]
  misc_feature (61)..(1520): NCBI GI: 261354780 Blast Desc: canalicular multispecific organic anion transporter 1 [Verticillium albo-atrum VaMs.102]
  misc_feature (252)..(1518): SWISSPROT Homolog: EC 3.6.3.44 Xenobiotic-transporting ATPase
MLPYEILGDLEWSYAKPASPYQRTPNVYSFHHDCASRALINSPIGVRDQSIMSFLACAGTNDQSFGPGIQGCRDDFDFTVQFEEIFFSLTPSSIFIVLSIWRLTLLAQRPTVVHAAVLQLGKLAGVVSYASLELALLILIATRSFSITSLSISASALRLAAAICIIPLSLFEHSRSPRPSLLLSAYLSLTLLLDVAQVRTLWLASSTHPEKAYASVFTVVVAIKASIVVLEAQQKTRWVSWDKKDHSPEETSGIYSLSAYAWLNRLFVSGYRNVLEVSDLYPLDTAIVSRQLHSRFAEHYNAPKMKGHKHKLIIALARTLKTQLLLPIPSRLVLVGFKFSQPFFISSLIDYLAKPDDTTSANPGYGFIGASALIYSGIAISTALYWYFHRRMLFMARASLVSAIYAKATNARVSIGDENESVTLMSIDIERINGGFAYLHDIWATVIEVGIGSYLLYQQIGPAFLVPIVFVAICSVGLIFPVKASASGQKAWMDGVQKRVGLTSSVIASMKNLKISGLKGPVAAVIQQLRIDELSAGAKFRRIILLADTCAFSPLLLAPPLTFAIAQQTLGASQLFTSLSYIILMLNPLTQLYQSFPHLAGALTCLNRIQTFLESPDRDDARLLNEGPRAVSKEKDATTSETTAAEHDKPILWAENASFGWQPDQWILSKINLDIRPATLTMVVGPVASGKSSFCRALLGEMPYCGGRMHVELKASRIGYCDQSPFLSNGSIRENIVGFSPWDAQRYHEVVDATMLGADCESLPKKHNTNVGSNGIVLSGGQKARVSLARALYLQTDLLVLDDVFSGLDADTEDQVFQRVFGLSGLLRKRGCTAVLCTHSIRHLPAADHVVALSSDGRVVEQGAFEDLLANKSYVHSLGIKSSSSSENDHSQEDKFDNAAPIHETHMLTHIATSTSIPEPDAIMRPMSDSKVYKIYFKSMGLIFLVAASLFFCGLGFGFFMSFPNVWLSFWTVDAAKHNPSHTNGYYIGIYALYQALAFLSLFSLAYLLFLAVISKSGSILHQSALSTLVRAPLRFFTSTDQGAITNLFSQDLNLVDTELPVALLNTIYVVSLSVGQAGVLASSSPYLVISYPFVAAVLYVLQKFYLRTSKQLRLLDLEAKSPLYTHFLDTTKGVITMRASGYVDENRSKNLHLLDTSQRPAYLLAMIQQWLSCVLNLIVAAIAILVTALATELRSSAGITGASLVTLLSIGENLSGIIIFYTQLETSIGAVSRLTTFNKTVEPEERDSENLEPPEHWPQRGEISLCHVSASYREETEVIDQSLALKDISLTILSGEKIAVCGRTGSGKSSFIAVLLKLLDPLSNTADNVQVDGLSLARIDRSTLRQRLIAIPQDAVFLPDGSTFLENVDPVSVSTEEEAESVLKTIDLWDFITERGGLKAGMIASTLSQGQRQLFSLARAVLRRRIRARSLGLGGCGSEGGILLLDEVSSSVDHKTERKMQEVIREEFRNYTVVAVSHRLDMIMDFDRVVVMDKGEIVEVGNPAVLAKEPGTRFGDLYAVGGH

SEQ ID NO: 2238 - DNA, 4919 bp, Muscodor strobelii; identical to SEQ ID NO: 2232
  misc_feature: SGI EST ID NO. CUFF.5649.0
  misc_feature: Variant of the nucleotide sequence at SEQ ID NO 2236

SEQ ID NO: 2239 - DNA, 1128 bp, Muscodor strobelii
  misc_feature: SGI cDNA ID NO. 560372
  misc_feature: Reduced expression when VOC is produced
  misc_feature: Encodes the peptide sequence at SEQ ID NO 2240
atgtccgagactgcacctaccgttcaggatcgcctaccgttattgtcgcgtatcggcaatggcgcatccgtctatgcccttcaaacactcattggaggcgtgacgtgggcgcaaggctggtatcaatggttctatccgcccgatgtacagcccaatttcatcaagacctacgaatgccggcctgacctacacataaggatattcttcccgaaatcttacgatcagacatcgccgcagaatctcccgaccgtttttgctgttcatggtggagcatttgttatgggcaatccatgggacgacgacaagttgaacgagcagtttgcgagcatgcacaatgttctcgtcgtcgaactgaactaccacaaagccccagcgcacccgtttccgaccgcggtctacgatgttgaagctcttatgctggccgtcttcgacgacgagagtctccccatagacaagaatcgcattgcgtttgaaggcttctcggccggcggaaatctcatatttagtgcttgccaacttccttccattcgcgaaaaaatcaagccggctgctgctattggcatatacccagtcttagatcagatgaaccatgcgccagagaaatgcaaaatgcgccgttacaagactgagctcggtgctggattgcgaggcagtcctgacgactacctcctgccttggagcccaatggctcgatggagctatgtgcccgtaggtcaagatctgagagaccctttactgtcgccgatattcgcgccccgcgagcatcttccagatcatatttttatcctagcagccgagcttgatcaattatcacatgagtcctggagaatggctagcagattagctggaagacctgtccctacttttacagaaaaggctggacaagacaaagctgccaataacggcgataaactcatccttgatgatgagagatttgcatttgaacatcgggataaagcagggaagacggttcgatggcttctagtgcctgatgaagttcatgggtttgaccacattccgctcagatggcacggttcggaggaggctgaggcgtctgcgaaatctaaaaccattgcataccaacagatagttggcgagtggctacacaacactgtctggaaatcctag

SEQ ID NO: 2240 - protein, 375 aa, Muscodor strobelii
  misc_feature: SGI Peptide ID NO. 560372
  misc_feature (84)..(300): Pfam Id: PF07859 Pfam Desc: alpha/beta hydrolase fold
  misc_feature (84)..(282): Pfam Id: PF07859 Pfam Desc: alpha/beta hydrolase fold
  misc_feature (51)..(368): NCBI GI: 46115886 Blast Desc: FG03785.1 [Gibberella zeae PH-1]
  misc_feature (47)..(374): NCBI GI: 256723309 Blast Desc: NECHADRAFT_51742 [Nectria haematococca mpVI 77-13-4]
  misc_feature (11)..(372): NCBI GI: 171688218 Blast Desc: protein product [Podospora anserina] gi|170944071|emb|CAP70181.1| protein product [Podospora anserina]
  misc_feature (2)..(368): NCBI GI: 145603701 Blast Desc: MGG_13284 [Magnaporthe grisea 70-15] gi|145011877|gb|EDJ96533.1| MGG_13284 [Magnaporthe grisea 70-15]
  misc_feature (12)..(375): NCBI GI: 116197014 Blast Desc: CHGG_05105 [Chaetomium globosum CBS 148.51] gi|88181018|gb|EAQ88486.1| CHGG_05105 [Chaetomium globosum CBS 148.51]
  misc_feature (67)..(374): NCBI GI: 261360419 Blast Desc: alpha/beta hydrolase fold protein [Verticillium albo-atrum VaMs.102]
  misc_feature (14)..(363): NCBI GI: 145608068 Blast Desc: MGG_12707 [Magnaporthe grisea 70-15] gi|145015581|gb|EDK00071.1| MGG_12707 [Magnaporthe grisea 70-15]
  misc_feature (8)..(372): NCBI GI: 85089433 Blast Desc: NCU04884 [Neurospora crassa OR74A] gi|28919238|gb|EAA28713.1| [Neurospora crassa OR74A]
  misc_feature (13)..(282): NCBI GI: 116206230 Blast Desc: CHGG_02408 [Chaetomium globosum CBS 148.51] gi|88183005|gb|EAQ90473.1| CHGG_02408 [Chaetomium globosum CBS 148.51]
  misc_feature (13)..(373): NCBI GI: 171679936 Blast Desc: protein product [Podospora anserina] gi|170939594|emb|CAP64821.1| protein product [Podospora anserina]
  misc_feature: Useful for introducing or modulating the production of volatile compounds
MSETAPTVQDRLPLLSRIGNGASVYALQTLIGGVTWAQGWYQWFYPPDVQPNFIKTYECRPDLHIRIFFPKSYDQTSPQNLPTVFAVHGGAFVMGNPWDDDKLNEQFASMHNVLVVELNYHKAPAHPFPTAVYDVEALMLAVFDDESLPIDKNRIAFEGFSAGGNLIFSACQLPSIREKIKPAAAIGIYPVLDQMNHAPEKCKMRRYKTELGAGLRGSPDDYLLPWSPMARWSYVPVGQDLRDPLLSPIFAPREHLPDHIFILAAELDQLSHESWRMASRLAGRPVPTFTEKAGQDKAANNGDKLILDDERFAFEHRDKAGKTVRWLLVPDEVHGFDHIPLRWHGSEEAEASAKSKTIAYQQIVGEWLHNTVWKS

SEQ ID NO: 2241 - DNA, 1744 bp, Muscodor strobelii
  misc_feature: SGI EST ID NO. CUFF.5651.0
  misc_feature: Variant of the nucleotide sequence at SEQ ID NO 2239
cgccattcatccaacaggcgatcaaacgcatgcacaatgtctatattaacccaactcacagccagaagctacctcgcatagtatctgctaagatgccctcatacgcaatcaagatcaaaagggttaggcgtccttcctgccccttgtagggcatacggctacaggttcacttccccgccatcgtaatctcctgcctacctaggtatttgtcgcgatagtttacaagtctgtatcgcgaacccatttactttactacctacaattagatgccagcgcccacctgtctagccttgagatcactccccgacgcgttggcgtcctattaagcctgcctagtatcataaatcaacctcctcgacaaacagattgacttcaaactgctcctatctcttgagctatactcatgtccgagactgcacctaccgttcaggatcgcctaccgttattgtcgcgtatcggcaatggcgcatccgtctatgcccttcaaacactcattggaggcgtgacgtgggcgcaaggctggtatcaatggttctatccgcccgatgtacagcccaatttcatcaagacctacgaatgccggcctgacctacacataaggatattcttcccgaaatcttacgatcagacatcgccgcagaatctcccgaccgtttttgctgttcatggtggagcatttgttatgggcaatccatgggacgacgacaagttgaacgagcagtttgcgagcatgcacaatgttctcgtcgtcgaactgaactaccacaaagccccagcgcacccgtttccgaccgcggtctacgatgttgaagctcttatgctggccgtcttcgacgacgagagtctccccatagacaagaatcgcattgcgtttgaaggcttctcggccggcggaaatctcatatttagtgcttgccaacttccttccattcgcgaaaaaatcaagccggctgctgctattggcatatacccagtcttagatcagatgaaccatgcgccagagaaatgcaaaatgcgccgttacaagactgagctcggtgctggattgcgaggcagtcctgacgactacctcctgccttggagcccaatggctcgatggagctatgtgcccgtaggtcaagatctgagagaccctttactgtcgccgatattcgcgccccgcgagcatcttccagatcatatttttatcctagcagccgagcttgatcaattatcacatgagtcctggagaatggctagcagattagctggaagacctgtccctacttttacagaaaaggctggacaagacaaagctgccaataacggcgataaactcatccttgatgatgagagatttgcatttgaacatcgggataaagcagggaagacggttcgatggcttctagtgcctgatgaagttcatgggtttgaccacattccgctcagatggcacggttcggaggaggctgaggcgtctgcgaaatctaaaaccattgcataccaacagatagttggcgagtggctacacaacactgtctggaaatcctagtctaatgtcgtttgattgaacgtttcatgatcatcagaacctgaggtaggtctgcgtggtgacgggcttatcgcggaatcggagttttggcaatcgcgtgtctcgggcgtttattatgaaaatgacactcaaatgttttcgctgctcgtggcatgatgaaatcagtctcttcgcatcactcaccgcatcgctcgaagtagatcgtaccgtaca

SEQ ID NO: 2242 - DNA, 1482 bp, Muscodor strobelii
  misc_feature: SGI cDNA ID NO. 560373
  misc_feature: Reduced expression when VOC is produced
  misc_feature: Encodes the peptide sequence at SEQ ID NO 2243
atggcaggccgggctctcctctctgctaccctggcggcgggcgtttccgcagctacattcgagaagcgggcgacgggcgtgaacagcacaacttgcaatggcgcaaactatgtttatgaggagctcgctgggtacggctggctggccggaaactccacagacaagttcggcgacacgctcggtggcattggatccgcgatacaccttgaccaaactgcgtggaagaagaattgcaatggcagctattccggtctcttgtgggcaattcctgatcgtggttggaacacagagggtactctgaactttgaatcgagagtgcataaatttcagattctattcactccccaaccaaacgcaacagtctcaaacccatctggcccaaatttagagctcacatatctagactcgttgaagcttcacgctcccgatggcgtcactcctactacgggcatagatggagacgcgacaggacatctctcgtacgagggatttcctatcttaccgaaagccacgtacacaggtgatgggttcggcggtgacggtcccggaggagtccgtatcccggtcgactccgaaggtcttgtcgtcaacgccgacggcacattttgggtctcagacgagtacggaccatatgtttatctcttcagtgccggtggcactatgcttgctgctatagagcctcccgcttccattctgccgatgcggaatgatgaagtatcgttctcagctgatagtccccctatctatgacagcgacgaggatgacgatgttgatcccgctgacccggacacgggtcgtgagaacaatgcaggcttcgagggtctgactgtgtcgcccgatggacagttcttgtatgttttgttgcaagccgcaactgtgcaggaaggtggtctcgagaaacagacaaagcgctacacccgtcttctgaaatacgacatcagcgaccccctctccccagtctacaacaatgaatactccgagatccacgccctcccgaatggccagttcttcatcctgtcacgagacagcagtgcgggccgtgctacagatagcacactctccgtttatcgccaaatcgatgttttcgatataaaggacgcaaccgacgtcaaagctgattacgattgtacggatgccgggtgcgcgttcgccgatgctgacactggcattctaaaggatggtatcactcccgtggagtactgtccctttttggacttcaatgtcaacgcgcagctgaaccggtttggtgttcacaatggtggcgatgacaatatcagcctgcttaatgagaaatgggagtccatcgctatggcacccgtcaaccccaatagcccagatggagaatattttgtcatcagtttgagtgataatgacttcatcacacaacaaggttttatgaatggcggtgcctatgcgtactccgactccactggattcaacctcgacaatcaagcactgatcttcaagatcactatctcttaa

SEQ ID NO: 2243 - protein, 493 aa, Muscodor strobelii
  misc_feature: SGI Peptide ID NO. 560373
  misc_feature (1)..(468): NCBI GI: 154299307 Blast Desc: BC1G_11139 [Botryotinia fuckeliana B05.10] gi|150857404|gb|EDN32596.1| BC1G_11139 [Botryotinia fuckeliana B05.10]
  misc_feature (24)..(492): NCBI GI: 115384796 Blast Desc: conserved [Aspergillus terreus NIH2624] gi|114196637|gb|EAU38337.1| conserved [Aspergillus terreus NIH2624]
  misc_feature (27)..(490): NCBI GI: 71000024 Blast Desc: conserved [Aspergillus fumigatus Af293] gi|66852366|gb|EAL92691.1| conserved [Aspergillus fumigatus Af293] gi|159127737|gb|EDP52852.1| conserved [Aspergillus A1163]
  misc_feature (27)..(490): NCBI GI: 119492228 Blast Desc: NFIA_068250 [Neosartorya fischeri NRRL 181] gi|119411713|gb|EAW21656.1| conserved [Neosartorya fischeri NRRL 181]
  misc_feature (6)..(490): NCBI GI: 169767612 Blast Desc: [Aspergillus oryzae RIB40] gi|83766132|dbj|BAE56275.1| protein product [Aspergillus oryzae]
  misc_feature (1)..(492): NCBI GI: 242788460 Blast Desc: conserved [Talaromyces stipitatus ATCC 10500] gi|218721370|gb|EED20789.1| conserved [Talaromyces stipitatus ATCC 10500]
  misc_feature (27)..(492): NCBI GI: 238843615 Blast Desc: conserved [Microsporum canis CBS 113480]
  misc_feature (27)..(492): NCBI GI: 261205162 Blast Desc: conserved [Ajellomyces dermatitidis SLH14081] gi|239592377|gb|EEQ74958.1| conserved [Ajellomyces dermatitidis SLH14081]
  misc_feature (27)..(492): NCBI GI: 258564140 Blast Desc: conserved [Uncinocarpus reesii 1704] gi|237908322|gb|EEP82723.1| conserved [Uncinocarpus reesii 1704]
  misc_feature (27)..(492): NCBI GI: 240107635 Blast Desc: CPC735_042580 [Coccidioides posadasii C735 delta SOWgp]
  misc_feature: Useful for introducing or modulating the production of volatile compounds
MAGRALLSATLAAGVSAATFEKRATGVNSTTCNGANYVYEELAGYGWLAGNSTDKFGDTLGGIGSAIHLDQTAWKKNCNGSYSGLLWAIPDRGWNTEGTLNFESRVHKFQILFTPQPNATVSNPSGPNLELTYLDSLKLHAPDGVTPTTGIDGDATGHLSYEGFPILPKATYTGDGFGGDGPGGVRIPVDSEGLVVNADGTFWVSDEYGPYVYLFSAGGTMLAAIEPPASILPMRNDEVSFSADSPPIYDSDEDDDVDPADPDTGRENNAGFEGLTVSPDGQFLYVLLQAATVQEGGLEKQTKRYTRLLKYDISDPLSPVYNNEYSEIHALPNGQFFILSRDSSAGRATDSTLSVYRQIDVFDIKDATDVKADYDCTDAGCAFADADTGILKDGITPVEYCPFLDFNVNAQLNRFGVHNGGDDNISLLNEKWESIAMAPVNPNSPDGEYFVISLSDNDFITQQGFMNGGAYAYSDSTGFNLDNQALIFKITIS

SEQ ID NO: 2244 - DNA, 3177 bp, Muscodor strobelii
  misc_feature: SGI EST ID NO. CUFF.5699.0
  misc_feature: Variant of the nucleotide sequence at SEQ ID NO 2242
tgactgtccattcgacgcctgatcacgttgcatggacgaggatgcgcaatatgtattggctccagtagcgatctgtttttgcccggttgccgtgccagagtacctcgccatgcacagtccgtcatgctcttcataccccatgcttctcatacgtagtgcatcaaaggtctcatatgccatacctgaaaaccagaatcaataaaccagcaacgtcgcactggctgctcaagaaagcaaatccacacgtgctcatgtcgacatgaacgaaagcgaatccgcgaatcagagccggggaccatgcaacgtgctcaacagggcaagttctcggcggactctgggcggtcatcccgtccactaaatatcgattgctagtgctccccggcccctgaatgccaaggaaccctgccgatgctgtgggacgaacaccgagcccaccgagagatcccaagatcttttccggctgcgcgtcgcaatgcgacctaccttgttcggcagcatgcgccattggttgttagtcgttgaagctgaaatgagcatcgcttgcacacgtgcatcgactgctcgcttgaatggcagcttgtcgtcgcctggcctgggtagagtcttataagatgtcgctcgcccacgatggaaggactctgtgaaactcgaattgtagtatatactggaatcagcacgtaaatcgacgactcattgacttgagtagctgtgttcgtcaactctttcccttgcagattgcgaacatggcaggccgggctctcctctctgctaccctggcggcgggcgtttccgcagctacattcgagaagcgggcgacgggcgtgaacagcacaacttgcaatggcgcaaactatgtttatgaggagctcgctgggtacggctggctggccggaaactccacagacaagttcggcgacacgctcggtggcattggatccgcgatacaccttgaccaaactgcgtggaagaagaattgcaatggcagctattccggtctcttgtgggcaattcctgatcgtggttggaacacagagggtactctgaactttgaatcgagagtgcataaatttcagattctattcactccccaaccaaacgcaacagtctcaaacccatctggcccaaatttagagctcacatatctagactcgttgaagcttcacgctcccgatggcgtcactcctactacgggcatagatggagacgcgacaggacatctctcgtacgagggatttcctatcttaccgaaagccacgtacacaggtgatgggttcggcggtgacggtcccggaggagtccgtatcccggtcgactccgaaggtcttgtcgtcaacgccgacggcacattttgggtctcagacgagtacggaccatatgtttatctcttcagtgccggtggcactatgcttgctgctatagagcctcccgcttccattctgccgatgcggaatgatgaagtatcgttctcagctgatagtccccctatctatgacagcgacgaggatgacgatgttgatcccgctgacccggacacgggtcgtgagaacaatgcaggcttcgagggtctgactgtgtcgcccgatggacagttcttgtatgttttgttgcaagccgcaactgtgcaggaaggtggtctcgagaaacagacaaagcgctacacccgtcttctgaaatacgacatcagcgaccccctctccccagtctacaacaatgaatacgtactcgctcttccgctatacaacgatcccaccgccaagccctcgaaaaaatcctaaagtagctgcgcagtccgagatccacgccctcccgaatggccagttcttcatcctgtcacgagacagcagtgcgggccgtgctacagatagcacactctccgtttatcgccaaatcgatgttttcgatataaaggacgcaaccgacgtcaaagctgattacgattgtacggatgccgggtgcgcgttcgccgatgctgacactggcattctaaaggatggtatcactcccgtggagtactgtccctttttggacttcaatgtcaacgcgcagctgaaccggtttggtgttcacaatggtggcgatgacaatatcagcctgcttaatgagaaatgggagtccatcgctatggcacccgtcaaccccaatagcccagatggagaatattttgtcatcagtttgagtgataatgacttcatcacacaacaaggttttatgaatggcggtgcctatgcgtactccgactccactggattcaacctcgacaatcaagcactgatcttcaagatcactatctcttaatcgaggtctcggtcgtatctgagaatatgcagaatatctggtttcacaagaatgaacggagcccagaatagcgatctcgctatgcttgaacgcataggtggtgtagcagggcatagtttgtgtaaatactagctacgttcaacatctgtggtttcttcaaatgtatatactgataattttatcaaaagtttatcatcatgtacagaacgaaagcttgcattgcaagcagactccatatcctggggccatggatagagccagcagaccccggatcatcattgttctcgtcacttcctcccactgccttatttgcaaagcccacacgtgcattatcccaatcaaacacgacgaagaactcctgaataagagcttggccccaaagaccttcaccgctattgacattgacatttaacttactggtacacgtcgtcccatcatcgatagacccagcatcaagatgcgaagccggaacagtaccccgaaacgaatcgatcgcgaatgtgaaatcaaccagcgaagatgagcaaggatattggtatcgcttatgtgttgcattgagctttgcgcccttgatttgcgagaagtagagtgctgcaacgttgggaggaatgcctgcggtcgctgtgcccgtgtcgatgatcgtcgtccagtcgtctgtggcgacaagagttccattcgctagctctaggccagtgatgttgatgttccacaacgagctgttggccagcacagatgcatagccaatcgagccggagtacttcgatgagtcgatgtagccgaagtcgaacgtaccgttcaatgtgtcgttattatagtcaaccgtgaaaacgccggctaagaatgcgcgatcagtggattgcctaatgatatgcgcagtttctg

SEQ ID NO: 2245 - DNA, 1263 bp, Muscodor strobelii
  misc_feature: SGI cDNA ID NO. 560374
  misc_feature: Encodes the peptide sequence at SEQ ID NO 2246
atgaagtatctgacgacgcttctctggtacgggtgggcatggcatgctcatgcaacatcgcttggcagtgggagattttcagttccagcggtacggtccgatgatacaggagggaataaaagctcaatcaatctcgacaccaactggtatctcaatgtaactatcggcacaccacctcaatcattcctcgtgctaggcgacagtggttccgtgaatctagccttcggctctaccctgctgcctaaagaacagcaatcagactcgccgaaatacaaccccaacgcatcgtcaacagcgcatgaaattgagggttacacatatcgatcatgttttgtctcagggtattgctctaccggcgtggtctttcaggatatctttacgattggagatctcgtgatcgagaaccaggaattcggcgtgcagacaaacaataacatggttggatctggtgagagaacggggactctgggtctgaattttgatcagaagggccagacgacgaagcccgaaagatcgaagtcttggttgcagaatgtcatgccgaggcttgaatgtaagtttccagaaactgcgcatatcattaggcaatccactgatcgcgcattcttagccggcgttttcacggttgactataataacgacacattgaacggtacgttcgacttcggctacatcgactcatcgaagtactccggctcgattggctatgcatctgtgctggccaacagctcgttgtggaacatcaacatcactggcctagagctagcgaatggaactcttgtcgccacagacgactggacgacgatcatcgacacgggcacagcgaccgcaggcattcctcccaacgttgcagcactctacttctcgcaaatcaagggcgcaaagctcaatgcaacacataagcgataccaatatccttgctcatcttcgctggttgatttcacattcgcgatcgattcgtttcggggtactgttccggcttcgcatcttgatgctgggtctatcgatgatgggacgacgtgtaccagtaagttaaatgtcaatgtcaatagcggtgaaggtctttggggccaagctcttattcaggagttcttcgtcgtgtttgattgggataatgcacgtgtgggctttgcaaataaggcagtgggaggaagtgacgagaacaatgatgatccggggtctgctggctctatccatggccccaggatatggagtctgcttgcaatgcaagctttcgttctgtacatgatgataaacttttga

SEQ ID NO: 2246 - protein, 420 aa, Muscodor strobelii
  misc_feature: SGI Peptide ID NO. 560374
  misc_feature (48)..(380): Pfam Id: PF00026 Pfam Desc: Eukaryotic aspartyl protease
  misc_feature (206)..(380): Pfam Id: PF00026 Pfam Desc: Eukaryotic aspartyl protease
  misc_feature (44)..(383): NCBI GI: 41016785 Blast Desc: CARP_PODAN RecName: Full=Podosporapepsin; Flags: Precursor gi|2384734|gb|AAC49997.1| podosporapepsin [Podospora anserina]
  misc_feature (44)..(382): NCBI GI: 171683756 Blast Desc: protein product [Podospora anserina] gi|170941838|emb|CAP67491.1| protein product [Podospora anserina]
  misc_feature (32)..(382): NCBI GI: 85110723 Blast Desc: endothiapepsin precursor [Neurospora crassa OR74A] gi|28925285|gb|EAA34364.1| endothiapepsin precursor [Neurospora crassa OR74A] gi|38524232|emb|CAE75698.1| endothiapepsin crassa]
  misc_feature (46)..(380): NCBI GI: 256726437 Blast Desc: NECHADRAFT_39337 [Nectria haematococca mpVI 77-13-4]
  misc_feature (46)..(382): NCBI GI: 256724618 Blast Desc: NECHADRAFT_47960 [Nectria haematococca mpVI 77-13-4]
  misc_feature (44)..(382): NCBI GI: 1469396 Blast Desc: secreted aspartic proteinase precursor [Glomerella cingulata]
  misc_feature (46)..(380): NCBI GI: 156071418 Blast Desc: aspartic proteinase [Fusarium oxysporum f. sp. conglutinans]
  misc_feature (46)..(380): NCBI GI: 46124247 Blast Desc: FG06501.1 [Gibberella zeae PH-1]
  misc_feature (46)..(382): NCBI GI: 46126795 Blast Desc: FG07775.1 [Gibberella zeae PH-1]
  misc_feature (46)..(382): NCBI GI: 29788116 Blast Desc: aspartyl protease [Sordaria macrospora]
  misc_feature (67)..(381): SWISSPROT Homolog: EC 3.4.23.20 Penicillopepsin
MKYLTTLLWYGWAWHAHATSLGSGRFSVPAVRSDDTGGNKSSINLDTNWYLNVTIGTPPQSFLVLGDSGSVNLAFGSTLLPKEQQSDSPKYNPNASSTAHEIEGYTYRSCFVSGYCSTGVVFQDIFTIGDLVIENQEFGVQTNNNMVGSGERTGTLGLNFDQKGQTTKPERSKSWLQNVMPRLECKFPETAHIIRQSTDRAFLAGVFTVDYNNDTLNGTFDFGYIDSSKYSGSIGYASVLANSSLWNINITGLELANGTLVATDDWTTIIDTGTATAGIPPNVAALYFSQIKGAKLNATHKRYQYPCSSSLVDFTFAIDSFRGTVPASHLDAGSIDDGTTCTSKLNVNVNSGEGLWGQALIQEFFVVFDWDNARVGFANKAVGGSDENNDDPGSAGSIHGPRIWSLLAMQAFVLYMMINF

SEQ ID NO: 2247 - DNA, 1191 bp, Muscodor strobelii
  misc_feature: SGI cDNA ID NO. 560375
  misc_feature: Encodes the peptide sequence at SEQ ID NO 2248
atggcaaacctcagggacacaggtatcaagctgctagagagcggagagcacagcgactgcgcactcatttgcgaaggggttcctatcaaattgcatcaagcgattgtttgcacgcaatcgcccgtactgaatgctgcattcagcagcaacatgcaggagggcaagacgaaagagatgaaatctgcttttagtgccgagtcggtacttgcgatgcgtgatttcatgtatacaggcttctacaatccaccggccaacttcgctctcatcgtagacaaagggccccaagccgccagtgactcaggtagtgcaagtctgcctacgaacaacgacaacgatagtgatgcagccggccgttcatctaccgaggacaatagcagtaatcagacgcgcgacgatttctcgagggctctgatgttctatgcaaacgtgaacatagttgcagactactacgatgttggcaacttagcgaattcgacaatcaacagaatcaaaggtctgctcgatcatccacagtgcccgattgaggctttctgtgacttccttgataattcagtggcttgtagaggcgacaaggagctccgacagctgatcattgaccatactgcaaagcacagttcgaaactctttgacaaaggcgtattcgaggacaacgggattgcggtagatattgttcctgacgtgctacgcctccttgtcccgatgcttcaagaaagcgagaagaaagctaccgaaatcgagaacaaacatcgagaagagcgtgcaaagctcgataagacacatcaggcagagtgccagaaactcaagacttcgtgcgccgcagatgtgcagggccacaaaagcaaggcccaagcacttgaagggaatcttaaggagctagcgtccgtactccaatccacgaggcaatgctgcaagcgagattgcggtacggctttcaattgcaatatccagacacctacccataacgacgagaagcgatacttggttcgctgcttgaagtgtcagtgtcgccagatttacgatgaaacgaggaatgttgccgttctcgcccccctcctaagtttcacttgtgacaaagtcatcttgaatcggtatcgcgtattgttgcgcaacgaactcagctccgcagagcgccagtgtggtggcgtttggtcacgtggcgccgcaattcaggatgaggagcatctgcaatga

SEQ ID NO: 2248 - protein, 396 aa, Muscodor strobelii
  misc_feature: SGI Peptide ID NO. 560375
  misc_feature (8)..(109): Pfam Id: PF00651 Pfam Desc: BTB/POZ domain
  misc_feature (8)..(78): Pfam Id: PF00651 Pfam Desc: BTB/POZ domain
  misc_feature (10)..(337): NCBI GI: 240274426 Blast Desc: conserved [Ajellomyces capsulatus H143]
  misc_feature (10)..(337): NCBI GI: 225561324 Blast Desc: [Ajellomyces capsulatus G186AR]
  misc_feature (10)..(337): NCBI GI: 154282377 Blast Desc: [Ajellomyces capsulatus NAm1] gi|150410164|gb|EDN05552.1| [Ajellomyces capsulatus NAm1]
  misc_feature (14)..(197): NCBI GI: 46138041 Blast Desc: FG10535.1 [Gibberella zeae PH-1]
  misc_feature (10)..(337): NCBI GI: 258573109 Blast Desc: [Uncinocarpus reesii 1704] gi|237901002|gb|EEP75403.1| [Uncinocarpus reesii 1704]
  misc_feature (10)..(261): NCBI GI: 256721877 Blast Desc: NECHADRAFT_88094 [Nectria haematococca mpVI 77-13-4]
  misc_feature (11)..(333): NCBI GI: 242790325 Blast Desc: conserved [Talaromyces stipitatus ATCC 10500] gi|218718124|gb|EED17544.1| conserved [Talaromyces stipitatus ATCC 10500]
  misc_feature (21)..(163): NCBI GI: 212538299 Blast Desc: conserved [Penicillium marneffei ATCC 18224] gi|210069047|gb|EEA23138.1| conserved [Penicillium marneffei ATCC 18224]
  misc_feature (11)..(177): NCBI GI: 212534502 Blast Desc: PMAA_079220 [Penicillium marneffei ATCC 18224] gi|210069806|gb|EEA23896.1| PMAA_079220 [Penicillium marneffei ATCC 18224]
  misc_feature (10)..(333): NCBI GI: 212531867 Blast Desc: BTB/POZ domain protein [Penicillium marneffei ATCC 18224] gi|210071454|gb|EEA25543.1| BTB/POZ domain protein [Penicillium marneffei ATCC 18224]
MANLRDTGIKLLESGEHSDCALICEGVPIKLHQAIVCTQSPVLNAAFSSNMQEGKTKEMKSAFSAESVLAMRDFMYTGFYNPPANFALIVDKGPQAASDSGSASLPTNNDNDSDAAGRSSTEDNSSNQTRDDFSRALMFYANVNIVADYYDVGNLANSTINRIKGLLDHPQCPIEAFCDFLDNSVACRGDKELRQLIIDHTAKHSSKLFDKGVFEDNGIAVDIVPDVLRLLVPMLQESEKKATEIENKHREERAKLDKTHQAECQKLKTSCAADVQGHKSKAQALEGNLKELASVLQSTRQCCKRDCGTAFNCNIQTPTHNDEKRYLVRCLKCQCRQIYDETRNVAVLAPLLSFTCDKVILNRYRVLLRNELSSAERQCGGVWSRGAAIQDEEHLQ

SEQ ID NO: 2249 - DNA, 1827 bp, Muscodor strobelii
  misc_feature: SGI cDNA ID NO. 560376
  misc_feature: Encodes the peptide sequence at SEQ ID NO 2250
atggcgtcaaatttccgacaggtaactcagggcgcatcgcatgacctcgttgtcaccgtgggaagcttctgtccgccgctggatgtagaaagaccctgtattcgtgtccttgaactgcaagccgggtctgtagaggaagacgaaatcagctgccgatatcgtattagagatctcaacgatgctgaaggtgtcaagtacgagactttgtcgtactgttggggtcccataacggagcaccgaaccatctgtgtcgagggtcatcgcgtcgaggtgactgataatctgtactcggctttgcaccacctacgattatcggaccgtgctcgtttgatatgggtcgacgcagtctgcatcaaccaagatgatatggctgagaaagaaattcaggtcaacatgatgcgcgatgtatactcaggtggcaccaactgtgtgtgctggttgggagattttcgcaaggggtccaattcagtcgcggtggagcaagctcagggtgtgggagacttcatccgatttttgaacaacgactgccgtggaccatgtccgtccaccctcacaacgcaaagccaaaggttgggtatcggctctacgcttcgtatcatgatggacgcagcatggtggcatcgtatatggactgttcaggaggtcgtgctacccagccacagtgatcttgtttggggcagtgtgtccataccgtggccatcgatggtatatgctcaaaatttcctcacctcatcgccgggaataactaaagcgcaatcgcctatcgacctctgggacttcttccatcctgacaccaccacgttcttcttcagtgtgcctattcatagtctcaagatgatagcgggcgagtcggcaacgccaatcgatcttttctatcgcttccgtccccgaggcgcaacggatcctcgcgataaggtgtatggattgatggggcttatgaagaagatcggctttgaaagaatcaaatatgctgattatagcttgagtattgtcgacttgctgaaaaccgtaggcattgagttaattcagatcaacaacttaaaacactgggtagggcaaagtggtgcaccacatgctttacctggtttacctagctgggcagtggacttcactagagaagacatcaatcagtctcttgatggactctattggtgggaacatcgattagtatacgacaggtttgacgccgacggtcgacaaggcaggacgtggttatacaacaaggaggactccaaaacgtacctaatcctgaaaggggtcaaagcggactgggtcatcaaagttatcgaacctctcatcacggagccacctgagccgggggcgatggcggataagcagctggccaccatagagaaccagatccagcactggcggcgtgaactccaaaaattcatcgacgaacttgctaccaaggtcaatgtcagcgacgctgatcgcgataagatgtggtcttcattcaacagtgtctgtaatggtgacttttcatcaagcacaccgaatgacccagaaacggtcgagaaatggaagctcgaaattctccgctcaaaagcggtagctgtcacaaatgaggcggtcgtcgggctagttccgcgtatgacgcaatttggtgacgcgatccatgtcgtgataggtggccgagtgccatttgtgacacgtgagataagaagcttgcccgagtatcccaatattgtgcccacgttcaaggtcggcgagcagagtgtatcaatgcatacacttgtaggtgattgttatgtggatggatacatgtatggtgaagcgttccgaggtaagactgatgatgagcttgattgggttgtcttacgttga

SEQ ID NO: 2250 - protein, 608 aa, Muscodor strobelii
  misc_feature: SGI Peptide ID NO. 560376
  misc_feature (66)..(214): Pfam Id: PF06985 Pfam Desc: Heterokaryon incompatibility protein (HET)
  misc_feature (66)..(153): Pfam Id: PF06985 Pfam Desc: Heterokaryon incompatibility protein (HET)
  misc_feature (27)..(598): NCBI GI: 256733819 Blast Desc: NECHADRAFT_77355 [Nectria haematococca mpVI 77-13-4]
  misc_feature (27)..(552): NCBI GI: 256724019 Blast Desc: NECHADRAFT_86353 [Nectria haematococca mpVI 77-13-4]
  misc_feature (25)..(343): NCBI GI: 256731981 Blast Desc: NECHADRAFT_80908 [Nectria haematococca mpVI 77-13-4]
  misc_feature (27)..(607): NCBI GI: 256733343 Blast Desc: NECHADRAFT_77319 [Nectria haematococca mpVI 77-13-4]
  misc_feature (61)..(370): NCBI GI: 261352782 Blast Desc: heterokaryon incompatibility protein [Verticillium albo-atrum VaMs.102]
  misc_feature (27)..(556): NCBI GI: 256724252 Blast Desc: NECHADRAFT_87550 [Nectria haematococca mpVI 77-13-4]
  misc_feature (25)..(599): NCBI GI: 164423694 Blast Desc: NCU07897 [Neurospora crassa OR74A] gi|157070201|gb|EAA32550.2| [Neurospora crassa OR74A]
  misc_feature (24)..(594): NCBI GI: 169619541 Blast Desc: SNOG_12969 [Phaeosphaeria nodorum SN15] gi|111058649|gb|EAT79769.1| SNOG_12969 [Phaeosphaeria nodorum SN15]
  misc_feature (31)..(329): NCBI GI: 154293145 Blast Desc: BC1G_14558 [Botryotinia fuckeliana B05.10] gi|150845598|gb|EDN20791.1| BC1G_14558 [Botryotinia fuckeliana B05.10]
  misc_feature (26)..(587): NCBI GI: 256722665 Blast Desc: NECHADRAFT_87188 [Nectria haematococca mpVI 77-13-4]
MASNFRQVTQGASHDLVVTVGSFCPPLDVERPCIRVLELQAGSVEEDEISCRYRIRDLNDAEGVKYETLSYCWGPITEHRTICVEGHRVEVTDNLYSALHHLRLSDRARLIWVDAVCINQDDMAEKEIQVNMMRDVYSGGTNCVCWLGDFRKGSNSVAVEQAQGVGDFIRFLNNDCRGPCPSTLTTQSQRLGIGSTLRIMMDAAWWHRIWTVQEVVLPSHSDLVWGSVSIPWPSMVYAQNFLTSSPGITKAQSPIDLWDFFHPDTTTFFFSVPIHSLKMIAGESATPIDLFYRFRPRGATDPRDKVYGLMGLMKKIGFERIKYADYSLSIVDLLKTVGIELIQINNLKHWVGQSGAPHALPGLPSWAVDFTREDINQSLDGLYWWEHRLVYDRFDADGRQGRTWLYNKEDSKTYLILKGVKADWVIKVIEPLITEPPEPGAMADKQLATIENQIQHWRRELQKFIDELATKVNVSDADRDKMWSSFNSVCNGDFSSSTPNDPETVEKWKLEILRSKAVAVTNEAVVGLVPRMTQFGDAIHVVIGGRVPFVTREIRSLPEYPNIVPTFKVGEQSVSMHTLVGDCYVDGYMYGEAFRGKTDDELDWVVLR

SEQ ID NO: 2251 - DNA, 855 bp, Muscodor strobelii
  misc_feature: SGI cDNA ID NO. 560377
  misc_feature: Encodes the peptide sequence at SEQ ID NO 2252
atgtgggcgtctggtgactggcccttggccggtcttctcactctgttactgtgcaccgctgctgcaatcgcagccaacgtcacctaccctaccactatagagctggatccagtctttccccgcaatgacacctacgaggcgggtgctgtaatgcccatcatcttctcccttcagaacactgcggctgctcgcgatttgaacctcagtgtgttctggacaatacttcaagcgcaatctctcgctcccggcagcaggggtagcatctcattcgcagctgccaataccagcgacccatacctggcggtggattttacaacactgctgaataacgtggaaggggaattcactctgacttggagtgtaggcgctgataattgcactacgcatcgcgagagcggactgagtaactacgatcctttcgtgattcatgggaatacccatttcacgctcaagaggggtgcacagcaaatggatctagtctctgccacgagccccgaaatctgcatgtctaagccgggctggccgtcaggcattctattcaacatcacgggaactacgaccatggaagttggtggtgattatctgagtcccatcggcgatcattgcccagtgctgaaagatccaacctcgactctcaaaccctgcgccgtacgtgtggaaccggaacaagcagcagatatttcggcaatggtgacagcactggcatgtaacgaaacttttcaaggcaaggaagcgatttgccgggagacagatgaggagacggatgaggcacaatctttgctcggcagtgccgcagctgcaatggctattgcaatcaccacgtctgtcgcattcatgctactttatggaacttag

SEQ ID NO: 2252 - protein, 284 aa, Muscodor strobelii
  misc_feature: SGI Peptide ID NO. 560377
  misc_feature (11)..(218): NCBI GI: 238842164 Blast Desc: conserved [Microsporum canis CBS 113480]
  misc_feature (27)..(262): NCBI GI: 212530858 Blast Desc: conserved [Penicillium marneffei ATCC 18224] gi|210074984|gb|EEA29071.1| conserved [Penicillium marneffei ATCC 18224]
  misc_feature (9)..(260): NCBI GI: 255942114 Blast Desc: Pc16g15330 [Penicillium chrysogenum Wisconsin 54-1255] gi|211586449|emb|CAP94203.1| Pc16g15330 [Penicillium chrysogenum Wisconsin 54-1255]
  misc_feature (9)..(236): NCBI GI: 85116329 Blast Desc: NCU07485 [Neurospora crassa OR74A] gi|28926833|gb|EAA35796.1| [Neurospora crassa OR74A]
  misc_feature (13)..(236): NCBI GI: 70981857 Blast Desc: conserved [Aspergillus fumigatus Af293] gi|66844080|gb|EAL84419.1| conserved [Aspergillus fumigatus Af293]
  misc_feature (15)..(280): NCBI GI: 255941346 Blast Desc: Pc16g11390 [Penicillium chrysogenum Wisconsin 54-1255] gi|211586065|emb|CAP93809.1| Pc16g11390 [Penicillium chrysogenum Wisconsin 54-1255]
  misc_feature (13)..(236): NCBI GI: 159122320 Blast Desc: conserved [Aspergillus fumigatus A1163]
  misc_feature (15)..(219): NCBI GI: 256735667 Blast Desc: NECHADRAFT_75749 [Nectria haematococca mpVI 77-13-4]
  misc_feature (34)..(284): NCBI GI: 255945399 Blast Desc: Pc20g09730 [Penicillium chrysogenum Wisconsin 54-1255] gi|211588202|emb|CAP86302.1| Pc20g09730 [Penicillium chrysogenum Wisconsin 54-1255]
  misc_feature (33)..(281): NCBI GI: 145246854 Blast Desc: An12g06130 [Aspergillus niger] gi|134080398|emb|CAK46319.1| protein product [Aspergillus niger]
MWASGDWPLAGLLTLLLCTAAAIAANVTYPTTIELDPVFPRNDTYEAGAVMPIIFSLQNTAAARDLNLSVFWTILQAQSLAPGSRGSISFAAANTSDPYLAVDFTTLLNNVEGEFTLTWSVGADNCTTHRESGLSNYDPFVIHGNTHFTLKRGAQQMDLVSATSPEICMSKPGWPSGILFNITGTTTMEVGGDYLSPIGDHCPVLKDPTSTLKPCAVRVEPEQAADISAMVTALACNETFQGKEAICRETDEETDEAQSLLGSAAAAMAIAITTSVAFMLLYGT

SEQ ID NO: 2253 - DNA, 515 bp, Muscodor strobelii
  misc_feature: SGI EST ID NO. CUFF.5672.0
  misc_feature: Variant of the nucleotide sequence at SEQ ID NO 2251
aagcactcggcaagcgtcatgtgggcgtctggtgactggcccttggccggtcttctcactctgttactgtgcaccgctgctgcaatcgcagccaacgtcacctaccctaccactatagagctggatccagtctttccccgcaatgacacctacgaggcgggtgctgtaatgcccatcatcttctcccttcagaacactgcggctgctcgcgatttgaacctcagtgtgttctggacaatacttcaagcgcaatctctcgctcccggcagcaggggtagcatctcattcgcagctgccaataccagcgacccatacctggcggtggattttacaacactgctgaataacgtggaaggggaattcactctgacttggagtgtaggcgctgataattgcactacgcatcgcgagagcggactgagtaactacgatcctttcgtgattcatgggaatacccatttcacgctcaagaggggtgcacagcaaatggatctagtctctgccacgagccccga

SEQ ID NO: 2254 - DNA, 1317 bp, Muscodor strobelii
  misc_feature: SGI cDNA ID NO. 560378
  misc_feature: Elevated expression when VOC is produced
  misc_feature: Encodes the peptide sequence at SEQ ID NO 2255
atgactgatgccgcaacgttggataatccttatggtctcactaaaagccttgtaaagtcatctcctgtcgtcaaagtcggggctgggaaccgatggggagacgtgtaccgcgcactggagacaagcaacagcaacttgaccgtgatcgggggccgggatgcagatgtcggcgtgtcaggcctcctgctgggcggaggactgtccttcttttcgaaccaacacgggtttgcctgcgacaatgtgattgcgttcgaggttatcctcgcctctggccacatagtcattgcacgtccgggccctgaccaagagtatgccgacctttactgggcactgcgcgggggcgggaataactttggtatcgtcacagctttctatgttgcagccttccctctaccacaaggcttaatctggggcggcgcattaacagtgcaagatgaagcgactttcacgccactcctcggcgctttccacaatatggcgcttggtacaggcccgaaggtcggcaactacaaagaacaaggtgaaaacggattcttcaacgcgaagggtactggtcacaccgacgaactagcttcacagagtctggcgttcgcttacatcaatgggtcgctcgccgccagcgttatgcttcagtacgcacggccatttgagagcctaccgcctgttttcgctgagtacatctcaatactggaaacagcgcggtggcttcctacaattgctccttcggagtccgatcgccctatcggctcgtctacaagggccttcatgaatcgttccctcgttgatttgacacagcttctatctcagggtcaaccacctggacatcgcaatatgtaccgtaccattacattcaagctatgtcgcttcatggccgattatgcaaaagagacatttgatttcatgctgcggacaaacccagatacaggcacagttgcaggctttttcccggcattactactacagcctatctcaactgttgtgttacagaatacgcgtaagaacggtgggaatccgctaggccttgagggagacgaaccgcgacttatggccacgatagttctgtcgtggagcgacgatgctgacgatgggaaagtcgagcagatggcgaagctattcgttgaccgctcaagagagatcccaaaggataggctcggtgactgcaacgacgattatgtctatatgaactatgctggtcgggatcagcaagttctgtctagctatggaggcgagaatgtggaccgcttgaaactgatctctgacaaatatgatccccatcaggtgtttcagcgactattgcctgggtatcacaaattgtaa

SEQ ID NO: 2255 - protein, 438 aa, Muscodor strobelii
  misc_feature: SGI Peptide ID NO. 560378
  misc_feature (23)..(97): Pfam Id: PF01565 Pfam Desc: FAD binding domain
  misc_feature (15)..(438): NCBI GI: 189210734 Blast Desc: FAD binding domain containing protein [Pyrenophora tritici-repentis Pt-1C-BFP] gi|187977791|gb|EDU44417.1| FAD binding domain containing protein [Pyrenophora tritici-repentis
  misc_feature (1)..(438): NCBI GI: 240278798 Blast Desc: FAD binding domain-containing protein [Ajellomyces capsulatus H143]
  misc_feature (26)..(438): NCBI GI: 189209696 Blast Desc: FAD binding domain containing protein [Pyrenophora tritici-repentis Pt-1C-BFP] gi|187977273|gb|EDU43899.1| FAD binding domain containing protein [Pyrenophora tritici-repentis
  misc_feature (16)..(438): NCBI GI: 256724290 Blast Desc: NECHADRAFT_97646 [Nectria haematococca mpVI 77-13-4]
  misc_feature (1)..(438): NCBI GI: 225560049 Blast Desc: FAD binding domain-containing protein [Ajellomyces capsulatus G186AR]
  misc_feature (3)..(438): NCBI GI: 242822124 Blast Desc: FAD binding domain protein [Talaromyces stipitatus ATCC 10500] gi|218712740|gb|EED12165.1| FAD binding domain protein [Talaromyces stipitatus ATCC 10500]
  misc_feature (26)..(438): NCBI GI: 169616017 Blast Desc: SNOG_11178 [Phaeosphaeria nodorum SN15] gi|111060557|gb|EAT81677.1| SNOG_11178 [Phaeosphaeria nodorum SN15]
  misc_feature (1)..(438): NCBI GI: 226285869 Blast Desc: FAD binding domain-containing protein [Paracoccidioides brasiliensis Pb01]
  misc_feature (16)..(438): NCBI GI: 212546907 Blast Desc: FAD binding domain protein [Penicillium marneffei ATCC 18224] gi|210065127|gb|EEA19222.1| FAD binding domain protein [Penicillium marneffei ATCC 18224]
  misc_feature (1)..(438): NCBI GI: 225679609 Blast Desc: FAD binding domain-containing protein [Paracoccidioides brasiliensis Pb03]
  misc_feature: Useful for introducing or modulating the production of volatile compounds
MTDAATLDNPYGLTKSLVKSSPVVKVGAGNRWGDVYRALETSNSNLTVIGGRDADVGVSGLLLGGGLSFFSNQHGFACDNVIAFEVILASGHIVIARPGPDQEYADLYWALRGGGNNFGIVTAFYVAAFPLPQGLIWGGALTVQDEATFTPLLGAFHNMALGTGPKVGNYKEQGENGFFNAKGTGHTDELASQSLAFAYINGSLAASVMLQYARPFESLPPVFAEYISILETARWLPTIAPSESDRPIGSSTRAFMNRSLVDLTQLLSQGQPPGHRNMYRTITFKLCRFMADYAKETFDFMLRTNPDTGTVAGFFPALLLQPISTVVLQNTRKNGGNPLGLEGDEPRLMATIVLSWSDDADDGKVEQMAKLFVDRSREIPKDRLGDCNDDYVYMNYAGRDQQVLSSYGGENVDRLKLISDKYDPHQVFQRLLPGYHKL

SEQ ID NO: 2256 - DNA, 2191 bp, Muscodor strobelii
  misc_feature: SGI EST ID NO. CUFF.5768.1
  misc_feature: Variant of the nucleotide sequence at SEQ ID NO 2254
ccggcagtctaaacgttatcggggctatcatattatcgagttaaatattgttgtgacgatgatgacgatgagatggaaacagtagtgtatcgaaggaaaagacaggatagagatgacaagcgacaatcatgattgatcttgccgaacatgtttttattacgccaaggacaaattctaatagccctaatcttcctcggtcatttatttgtcaattcacaaacaaatgcagaagaacagagaattctgcaccggcctcattatgaggggtcatcagtccacgagattgagtctgcgcttcatcagtacaacatccacatagacagcatcccttctctgtcgcgccccgggcctttgattgattgtcagaccacctgtgatactattcgtgtcttctttcctagtcgattaattgcccgaaacgcagaaaatgaagatgaacaagcagcatatactaagttcacccgaagttactggtccaaccaacaggctgagctctcgcctttatgcgtctttactccgcgcaatcgtgctgaggtcgctgtctacgttcttatatctcgtttgactcaatgtccattctcgatccgtggcggaggccacgcctcattcgctggcgcctcgagtattgaatacggcactgtcctagctcttcgtcattttaatgaaatagagataatgactgatgccgcaacgttggataatccttatggtctcactaaaagccttgtaaagtcatctcctgtcgtcaaagtcggggctgggaaccgatggggagacgtgtaccgcgcactggagacaagcaacagcaacttgaccgtgatcgggggccgggatgcagatgtcggcgtgtcaggcctcctgctgggcggaggactgtccttcttttcgaaccaacacgggtttgcctgcgacaatgtgattgcgttcgaggttatcctcgcctctggccacatagtcattgcacgtccgggccctgaccaagagtatgccgacctttactgggcactgcgcgggggcgggaataactttgcgactttcacgccactcctcggcgctttccacaatatggcgcttggtacaggcccgaaggtcggcaactacaaagaacaaggtgaaaacggattcttcaacgcgaagggtactggtcacaccgacgaactagcttcacagagtctggcgttcgcttacatcaatgggtcgctcgccgccagcgttatgcttcagtacgcacggccatttgagagcctaccgcctgttttcgctgagtacatctcaatactggaaacagcgcggtggcttcctacaattgctccttcggagtccgatcgccctatcggctcgtctacaagggccttcatgaatcgttccctcgttgatttgacacagcttctatctcagggtcaaccacctggacatcgcaatatgtaccgtaccattacattcaagctatgtcgcttcatggccgattatgcaaaagagacatttgatttcatgctgcggacaaacccagatacaggcacagttgcaggctttttcccggcattactactacagcctatctcaactgttgtgttacagaatacgcgtaagaacggtgggaatccgctaggccttgagggagacgaaccgcgacttatggccacgatagttctgtcgtggagcgacgatgctgacgatgggaaagtcgagcagatggcgaagctattcgttgaccgctcaagagagatcccaaaggataggctcggtgactgcaacgacgattatgtctatatgaactatgctggtcgggatcagcaagttctgtctagctatggaggcgagaatgtggaccgcttgaaactgatctctgacaaatatgatccccatcaggtgtttcagcgactattgcctgggtatcacaaattgtaaacgaatggtggtttcatgagtcgaatatgccgaggtacttggataggggtttctcgagggcctgggtcgtcgtttacgaagttatgatcatactttcattccgtgaatgaaggtatcaacattcacgatgacatgggccactaccgtattgaaacgcgattgcatattgctcacatctaatgtgtagttgggttacgaattttcggagaagtaacggccacagaacatacctaatgggatattctagctatgttccttttccatcttagcgacttctagaaag

SEQ ID NO: 2257 - DNA, 2502 bp, Muscodor strobelii
  misc_feature: SGI cDNA ID NO. 560379
  misc_feature: Encodes the peptide sequence at SEQ ID NO 2258
atgaaactcctcaaggccacggagttcctcctcgcggctgcggctcctgttcaagctgcattctcttggaagaatgtgcacattggtggtggcggcgggttcgttcccggcttcgttttccatccgaagacaaagggcgtcgcgtatgctcggacagatattgggggtctctatcggttgaatagtgatgactcttggactgccgtcacagactctctggccaccgatgccaattggcacagttggggcatagatgccgttgctttggaccctcaagatgccaacatggtctatgctgcagtcggagagtacactaacagctgggatcctgccaacggagcgatcattcggagtagcgacaagggcgcaacatggtcgtcaaccactttgtcgttcaaagttggtggcaacatgccgggccgcggtctgggagagcggctcgctgtggacccagccaactcgaaaatcatctattttggagctcggagcggcaatggcctatggaagagtactgacgccggtgtgacatttaccaaggtatctagctttactgctaagggtgcttatgttgtggacccaagcgacagcaacggctacaacagcgaccagacaggacttgcatgggttacgttcgactcgacgagcggcacaacaggaggagctacgtcacgaatttttgtcggcacagcggacaacgccacttccagtgtatatgtttccaatgatgccggctcaaccgtagtcgccggccagcccagcacatacttcccacacaagggtgtactgcaacctagccagaaagttctgtacatcacatacagcgatggagttggtccatacgatggtactatgggagcagtatacaagtacaatattacgtccggagtctggaccaatatcactcctgtgtctgggagcgatttatacttcgggttcggcggtatcggtgtcgatatgctgaagccgggaaccctggttgtcgcagcattgaactcttggtggccggatgggcaatatttccgcactacagatagcggtgcgacatggagtcctatctggtcatggtctagctacccaaatcgcaatctttactacagcgagacaactgcaaaagcaccttggatccagaacagcttattctccactgagctcggtgcattcgagcagctaggctggatgatagagtctctcgttatcgatcccttcgacagtgaccattggctttacggcacgggtctgagtgtttttggcggtcatgatctaaccaaatgggatactactcacaacattactatccagtctctagctgatggcattgaagagtttgccgttctaggcctggcatccgcaccaggaggtagcgaacttctcgctgcagtgggcgatgacagcggtttcacattcgcatcgactagtgctctgggtacgtcgccgaaactgctgtggaacactcccgttttctctagttctactgctgttgattatgctggtgcaagcgtaaagaacgttgtccgtgtaggcaactcgcagggtactcaacagatggctctgtccggcgatggcggtgcgacttggtatgtctactcaggcgcggacacttccatgtacggtggtacagttgcatactcggcgagtgcagataccattctgtggtccacggcaacgaatggagtgcagcgttctcaaaactctgcctctttctcgagtgtctcttctctcccggccaccgctgtgatcgcatccgacaagcagaacaacactgtcttctatggaggttccgggtcaaagttctatgtaagcacaaacactgggtcgtccttcgtggctggcggtgcattgagcggtgctgcaactgtcaatgctatcgccgcgcaccccaagacagcaggcgaggtctgggtatcaaccgacgccggaattttccgttctaccaactacggcgcctctttcaccaaagtgtcaacgacactcacgggtacatacgcaattgctcttggtctcggttcaggtagtacctggaacgtgtacgcattcggcaacggagccaacggcaaccgattgtacggaagcgcagacaatggcgcaacgtggacagacatccaaggctcgtctcaaggcttcggcgcaatttctggctgtaagctcgcgggtagtggcaacacggccggccaggtgtttgtaggcaccaatggtcgcggcgtgttttacgcatctggaactctctcgagcagtggttctagtacaacgaccacctcgaagacaagtgcaacgagctcgacaacatcgaagatctctacaactagctcgacaacaaaagctaccacgacaacgaccttgactactactacgaagacttcgactacaagtgcaccaacatcaacgggaactggtactgtagcgcactttggacaatgtggcggcattggttataccggcgcgactgcatgcatatccccctacacatgcacatatcagaatgactactactctcaatgtctgtaa

SEQ ID NO: 2258 - protein, 833 aa, Muscodor strobelii
  misc_feature: SGI Peptide ID NO. 560379
  misc_feature (801)..(829): Pfam Id: PF00734 Pfam Desc: Fungal cellulose binding domain
  misc_feature (1)..(833): NCBI GI: 31747160 Blast Desc: Cel74a [Hypocrea jecorina]
  misc_feature (22)..(833): NCBI GI: 85090755 Blast Desc: NCU05955 [Neurospora crassa OR74A] gi|28919942|gb|EAA29333.1| NCU05955 [Neurospora crassa OR74A]
  misc_feature (1)..(833): NCBI GI: 116202353 Blast Desc: CHGG_09061 [Chaetomium globosum CBS 148.51] gi|88177579|gb|EAQ85047.1| CHGG_09061 [Chaetomium globosum CBS 148.51]
  misc_feature (4)..(742): NCBI GI: 256724347 Blast Desc: NECHADRAFT_53608 [Nectria haematococca mpVI 77-13-4]
  misc_feature (4)..(833): NCBI GI: 261359027 Blast Desc: Cel74a [Verticillium albo-atrum VaMs.102]
  misc_feature (1)..(741): NCBI GI: 46139387 Blast Desc: FG11208.1 [Gibberella zeae PH-1]
  misc_feature (1)..(738): NCBI GI: 145611214 Blast Desc: MGG_11553 [Magnaporthe grisea 70-15] gi|145018516|gb|EDK02795.1| MGG_11553 [Magnaporthe grisea 70-15]
  misc_feature (1)..(833): NCBI GI: 171682216 Blast Desc: protein product [Podospora anserina] gi|170941067|emb|CAP66717.1| protein product [Podospora anserina]
  misc_feature (3)..(833): NCBI GI: 115396494 Blast Desc: ATEG_04708 [Aspergillus terreus NIH2624] gi|114193455|gb|EAU35155.1| ATEG_04708 [Aspergillus terreus NIH2624]
  misc_feature (4)..(831): NCBI GI: 145228635 Blast Desc: An01g01870 [Aspergillus niger] gi|134054717|emb|CAK43558.1| protein product [Aspergillus niger]
MKLLKATEFLLAAAAPVQAAFSWKNVHIGGGGGFVPGFVFHPKTKGVAYARTDIGGLYRLNSDDSWTAVTDSLATDANWHSWGIDAVALDPQDANMVYAAVGEYTNSWDPANGAIIRSSDKGATWSSTTLSFKVGGNMPGRGLGERLAVDPANSKIIYFGARSGNGLWKSTDAGVTFTKVSSFTAKGAYVVDPSDSNGYNSDQTGLAWVTFDSTSGTTGGATSRIFVGTADNATSSVYVSNDAGSTVVAGQPSTYFPHKGVLQPSQKVLYITYSDGVGPYDGTMGAVYKYNITSGVWTNITPVSGSDLYFGFGGIGVDMLKPGTLVVAALNSWWPDGQYFRTTDSGATWSPIWSWSSYPNRNLYYSETTAKAPWIQNSLFSTELGAFEQLGWMIESLVIDPFDSDHWLYGTGLSVFGGHDLTKWDTTHNITIQSLADGIEEFAVLGLASAPGGSELLAAVGDDSGFTFASTSALGTSPKLLWNTPVFSSSTAVDYAGASVKNVVRVGNSQGTQQMALSGDGGATWYVYSGADTSMYGGTVAYSASADTILWSTATNGVQRSQNSASFSSVSSLPATAVIASDKQNNTVFYGGSGSKFYVSTNTGSSFVAGGALSGAATVNAIAAHPKTAGEVWVSTDAGIFRSTNYGASFTKVSTTLTGTYAIALGLGSGSTWNVYAFGNGANGNRLYGSADNGATWTDIQGSSQGFGAISGCKLAGSGNTAGQVFVGTNGRGVFYASGTLSSSGSSTTTTSKTSATSSTTSKISTTSSTTKATTTTTLTTTTKTSTTSAPTSTGTGTVAHFGQCGGIGYTGATACISPYTCTYQNDYYSQCL

SEQ ID NO: 2259 - DNA, 796 bp, Muscodor strobelii
  misc_feature: SGI EST ID NO. CUFF.5696.0
  misc_feature: Variant of the nucleotide sequence at SEQ ID NO 2257
atcggtgtcgatatgctgaagccgggaaccctggttgtcgcagcattgaactcttggtggccggatgggcaatatttccgcactacagatagcggtgcgacatggagtcctatctggtcatggtctagctacccaaatcgcaatctttactacagcgagacaactgcaaaagcaccttggatccagaacagcttattctccactgagctcggtgcattcgagcagctaggctggatgatagagtctctcgttatcgatcccttcgacagtgaccattggctttacggcacgggtctgagtgtttttggcggtcatgatctaaccaaatgggatactactcacaacattactatccagtctctagctgatggcattgaagagtttgccgttctaggcctggcatccgcaccaggaggtagcgaacttctcgctgcagtgggcgatgacagcggtttcacattcgcatcgactagtgctctgggtacgtcgccgaaactgctgtggaacactcccgttttctctagttctactgctgttgattatgctggtgcaagcgtaaagaacgttgtccgtgtaggcaactcgcagggtactcaacagatggctctgtccggcgatggcggtgcgacttggtatgtctactcaggcgcggacacttccatgtacggtggtacagttgcatactcggcgagtgcagataccattctgtggtccacggcaacgaatggagtgcagcgttctcaaaactctgcctctttctcgagtgtctcttctctcccggccaccgctgtgatcg

SEQ ID NO: 2260 - DNA, 1065 bp, Muscodor strobelii
  misc_feature: SGI cDNA ID NO. 560380
  misc_feature: Encodes the peptide sequence at SEQ ID NO 2261
atgccaggtcttattgaggaacccgtgttcaagaccattagtgtgaaggagcttcatccgacattcgctgcagagatagcaggagtcaacttcgacgatgtgtcgcaagagcagttctcagagatcctagcagcaatggcaaagtacggagtctgtgtattccgagacacaggcctgacagacgctgctcacgtctccttttctcaacgcttcggggacctcgacaatatgaagcgatacttagccggggagcgcaagatgcgatacgacttctacgaattatttgacgccgggaacgtgacagaggctggtactccgcaagaccccaatagtccacgagcgcattcgaatcgtggaaatggtctttttcacgtcgactcttcgtttaacccgcgacgagcgtcatattcgctgcttcgcgctatctcattacctcctcctggaaatggtggtgacactatgtttgcggattcgcgaagcgctgctgaagaactcacggaggagttaatggctcaactcacaggctcaaatggagacagccgagggacgagatctcttgtcggtgtacactctatggcgcattcacgcagacttgcatctcccgagttcttcaagaatatggatgcaacacagtggcctatggcgcgacatcgaatcttacagcatcacgagcctagcggacgggctaatctatatgttggagcacatatgcatcatattgaagatcttggccaggaggcagaaagctgcgtggcgggcgataaagagagaataggaagtgcgatacctgatggctcgaacctcattcaaaaactcaacgcccatgtcacccaggataaatatgtcatctcgataccgtggcatagtcctggcgatatgatcatttgggacaacagatgtgtgttgcatcgtgctggtccgggaacgttcgagggtaaatatttgcgtgacttgcgcaggactacagtacacgacgccagtccgacagcatggggttttaacacagtaggctcggagtataaggctttcacgcctcctgtgaagtcaggggaagcccagcagtaa

SEQ ID NO: 2261 - protein, 354 aa, Muscodor strobelii
  misc_feature: SGI Peptide ID NO. 560380
  misc_feature (14)..(330): Pfam Id: PF02668 Pfam Desc: Taurine catabolism dioxygenase TauD, TfdA family
  misc_feature (1)..(350): NCBI GI: 169612405 Blast Desc: SNOG_09325 [Phaeosphaeria nodorum SN15] gi|160702501|gb|EAT83517.2| SNOG_09325 [Phaeosphaeria nodorum SN15]
  misc_feature (10)..(305): NCBI GI: 115401062 Blast Desc: conserved [Aspergillus terreus NIH2624] gi|114190060|gb|EAU31760.1| conserved [Aspergillus terreus NIH2624]
  misc_feature (12)..(345): NCBI GI: 58271054 Blast Desc: 2,4-dichlorophenoxyacetate alpha-ketoglutarate dioxygenase [Cryptococcus neoformans var. neoformans JEC21] gi|134114736|ref|XP_773666.1| CNBH1210 [Cryptococcus neoformans
  misc_feature (13)..(345): NCBI GI: 169616031 Blast Desc: SNOG_11187 [Phaeosphaeria nodorum SN15] gi|111060566|gb|EAT81686.1| SNOG_11187 [Phaeosphaeria nodorum SN15]
  misc_feature (13)..(336): NCBI GI: 212539350 Blast Desc: alpha-ketoglutarate-dependent 2,4-dichlorophenoxyacetate dioxygenase, [Penicillium marneffei ATCC 18224] gi|210067129|gb|EEA21221.1| dioxygenase, [Penicillium
  misc_feature (11)..(338): NCBI GI: 85078636 Blast Desc: NCU01562 [Neurospora crassa OR74A] gi|16944556|emb|CAC18150.2| related to 2, 4-dichlorophenoxyacetate dioxygenase [Neurospora crassa] crassa
  misc_feature (14)..(334): NCBI GI: 145243684 Blast Desc: An11g03620 [Aspergillus niger] gi|134079042|emb|CAK48351.1| protein product [Aspergillus niger]
  misc_feature (12)..(327): NCBI GI: 145251513 Blast Desc: An15g07490 [Aspergillus niger] gi|134082804|emb|CAK48578.1| protein product [Aspergillus niger]
  misc_feature (21)..(334): NCBI GI: 242770592 Blast Desc: alpha-ketoglutarate-dependent 2,4-dichlorophenoxyacetate dioxygenase, [Talaromyces stipitatus ATCC 10500] gi|218725208|gb|EED24625.1| dioxygenase, [Talaromyces
  misc_feature (22)..(332): NCBI GI: 212541773 Blast Desc: alpha-ketoglutarate-dependent 2,4-dichlorophenoxyacetate dioxygenase, [Penicillium marneffei ATCC 18224] gi|210065948|gb|EEA20041.1| dioxygenase, [Penicillium
  misc_feature (13)..(323): SWISSPROT Homolog: EC 1.14.11.17 Taurine dioxygenase
MPGLIEEPVFKTISVKELHPTFAAEIAGVNFDDVSQEQFSEILAAMAKYGVCVFRDTGLTDAAHVSFSQRFGDLDNMKRYLAGERKMRYDFYELFDAGNVTEAGTPQDPNSPRAHSNRGNGLFHVDSSFNPRRASYSLLRAISLPPPGNGGDTMFADSRSAAEELTEELMAQLTGSNGDSRGTRSLVGVHSMAHSRRLASPEFFKNMDATQWPMARHRILQHHEPSGRANLYVGAHMHHIEDLGQEAESCVAGDKERIGSAIPDGSNLIQKLNAHVTQDKYVISIPWHSPGDMIIWDNRCVLHRAGPGTFEGKYLRDLRRTTVHDASPTAWGFNTVGSEYKAFTPPVKSGEAQQ

SEQ ID NO: 2262 - DNA, 1295 bp, Muscodor strobelii
  misc_feature: SGI EST ID NO. CUFF.5775.1
  misc_feature: Variant of the nucleotide sequence at SEQ ID NO 2260
gacaaaaccaagcaagatgccaggtcttattgaggaacccgtgttcaagaccattagtgtgaaggagcttcatccgacattcgctgcagagatagcaggagtcaacttcgacgatgtgtcgcaagagcagttctcagagatcctagcagcaatggcaaagtacggagtctgtgtattccgagacacaggcctgacagacgctgctcacgtctccttttctcaacgcttcggggacctcgacaatatgaagcgatacttagccggggagcgcaagatgcgatacgacttctacgaattatttgacgccgggaacgtgacagaggctggtactccgcaagaccccaatagtccacgagcgcattcgaatcgtggaaatggtctttttcacgtcgactcttcgtttaacccgcgacgagcgtcatattcgctgcttcgcgctatctcattacctcctcctggaaatggtggtgacactatgtttgcggattcgcgaagcgctgctgaagaactcacggaggagttaatggctcaactcacaggctcaaatggagacagccgagggacgagatctcttgtcggtgtacactctatggcgcattcacgcagacttgcatctcccgagttcttcaagaatatggatgcaacacagtggcctatggcgcgacatcgaatcttacagcatcacgagcctagcggacgggctaatctatatgttggagcacatatgcatcatattgaagatcttggccaggaggcagaaagctgcgtggcgggcgataaagagagaataggaagtgcgatacctgatggctcgaacctcattcaaaaactcaacgcccatgtcacccaggataaatatgtcatctcgataccgtggcatagtcctggcgatatgatcatttgggacaacagatgtgtgttgcatcgtgctggtccgggaacgttcgagggtaaatatttgcgtgacttgcgcaggactacagtacacgacgccagtccgacagcatggggttttaacacagtaggctcggagtataaggctttcacgcctcctgtgaagtcaggggaagcccagcagtaatttgggcgcctctacgagtagggaagggattagggatgtgccgaacgtcgtatatgtacagttttcttaatgaactacctatgtcggaatctatttacagacattgagagtagtagtcattctgatatgtgcatgtgtagggggatatgcatgcagtcgcgccggtataaccaatgccgccacattgtccaaagtgcgctacagtaccagttcc

SEQ ID NO: 2263 - DNA, 681 bp, Muscodor strobelii
  misc_feature: SGI cDNA ID NO. 560381
  misc_feature: Encodes the peptide sequence at SEQ ID NO 2264
atgcgtttctcaaagcctgcaactgcagcactccttttgttatgctctagccctttgagttttgcagatgaagctgtcccgaagccagacactgtccccgaatcacctccgacaaagacagcctcagtcaagccgcgccagagttctccgaatctgctcagtgccctctacacgctcgcgaacagctttggacttgtgaaatgcgtccccgcagccattcctctaatcacatctctgcctaagatcccgggggaattgattagcggcggtgcaattcaacaggctctatcgcaaacgtcgcgtgagctgtcggatgtctgcgacttttcgatcacgggatcagttggcgacatatacacgagcttccttccgacatggtattcgtggtacaatgcaaattcggaccgtatcgcaaccatcatcagtaaatgtccgaacgcgacctctcttaccaataccgtcgaggcatacgagacatgcactcaagtccaggcgcagttgtctttagcctcagcaaccagcgacacccagactacatccgtcgatgccagctctgtcacaaacaataccgctacttccacgacagactcggcgagcgctgcgaccggaacgggagacggttttatggccaaggctgctgctgtcggagcaggtatcctcggcgtagctgctgtgttataa

SEQ ID NO: 2264 - protein, 226 aa, Muscodor strobelii
  misc_feature: SGI Peptide ID NO. 560381
MRFSKPATAALLLLCSSPLSFADEAVPKPDTVPESPPTKTASVKPRQSSPNLLSALYTLANSFGLVKCVPAAIPLITSLPKIPGELISGGAIQQALSQTSRELSDVCDFSITGSVGDIYTSFLPTWYSWYNANSDRIATIISKCPNATSLTNTVEAYETCTQVQAQLSLASATSDTQTTSVDASSVTNNTATSTTDSASAATGTGDGFMAKAAAVGAGILGVAAVL

SEQ ID NO: 2265 - DNA, 1371 bp, Muscodor strobelii
  misc_feature: SGI EST ID NO. CUFF.5702.0
  misc_feature: Variant of the nucleotide sequence at SEQ ID NO 2263
gattatactgatattcgatttgtgtgcaaagatttctgagaagaattgattgatttccatgaatggtgattgcatgtccaagctacgactgcaatagcaacacacttttttggacactttcctcgcattcgcgacacaaacattcagttccatcactcgtaattcggcacacaacatgcgtttctcaaagcctgcaactgcagcactccttttgttatgctctagccctttgagttttgcagatgaagctgtcccgaagccagacactgtccccgaatcacctccgacaaagacagcctcagtcaagccgcgccagagttctccgaatctgctcagtgccctctacacgctcgcgaacagctttggacttgtgaaatgcgtccccgcagccattcctctaatcacatctctgcctaagatcccgggggaattgattagcggcggtgcaattcaacaggctctatcgcaaacgtcgcgtgagctgtcggatgtctgcgacttttcgatcacgggatcagttggcgacatatacacgagcttccttccgacatggtattcgtggtacaatgcaaattcggaccgtatcgcaaccatcatcagtaaatgtccgaacgcgacctctcttaccaataccgtcgaggcatacgagacatgcactcaagtccaggcgcagttgtctttagcctcagcaaccagcgacacccagactacatccgtcgatgccagctctgtcacaaacaataccgctacttccacgacagactcggcgagcgctgcgaccggaacgggagacggttttatggccaaggctgctgctgtcggagcaggtatcctcggcgtagctgctgtgttataagaacaattgatttagacgaaactgagtgtgatggggtgacggatcgcatgactacagtggcgagtctcgaaatgatatcgaagcaacaaacctgagcaaatgatttgactagcactaatggctcagaaccggtctaccagacgggaataactcgttgagcatatgcattatacccagacgcagatgatcgcgcaggaaagataatgttgaacaacacctctaccaccaagactaaatctaggttaaaagattttacaagtcatgcctgtgatgaaagcaaatcatatatagtaatgccgtatcgtcgtgtaaagcatccgctgcttcctagtgatcaggcgctgcttagcccttagatgcttctccaaaacctgaagcccgatgttgtatacgaaacccaatcaggatactgatactgatattacatatggtacgcccggtctgaatgactttacccaggtctcgcaacacgctatgtaccccgcacacgagttctccaagcatatccagataag

SEQ ID NO: 2266 - DNA, 966 bp, Muscodor strobelii
  misc_feature: SGI cDNA ID NO. 560382
  misc_feature: Encodes the peptide sequence at SEQ ID NO 2267
atgttatgggggatcctcttcctcggacctgcttggatcgaggtggcagaggcggcgtgtgccctgccttctacgtatgagtggacatcatcaggaccacttgcgacgccctcgtcaagctgggtgtcattgaaggacttcacgcatgtaccctacaaagggcaacatctcgtttacggctcaaccgtcgattcttcaggccagatctacaactcgatggccttcggactcttcacctcatggtccgatatggattccgttagtcagaccggcatgcccaatgacccagctatcgcgcctgtcctcatatacttcgagccaaaagatatctgggtcatcgcatatcaatggggcggatcgacttttgcttacagaaccgcgagtgatcctacagttgctactgggtggtcggccgagtcacccctcttcacggggactataccagacggcgggccactagatgctacaatcattggcgacgacacgaatatgtacttgttctacgcaggcgacaacggtatgatataccgtgcaagcatgccgattgggaacttccctggtagttttgggtcgacgtcgactgttgtgctgagcggcgagaggaacgatctgttcgaggccgtccaagtgtatacggtcgcgggacagaaccaatacctaatgatagtagaggcaatcggcgccaatggccgctatttccgctcgttcactgctaccagtttaggaggttcgtggacagcgcaggctgtatccgagagcgcgccgtttgctggcaaggcaaacagcggcgcgacttggactaacgacattagctcgggtgatttgattcggagcatcaacgatcagacacagactatcgatgcttgtaacttgcaactcctttatcagggtcgcgaccctagttccgacggcgaggattataattcgttaccttgggtgcctggtctgttgacgctcaagacatag

SEQ ID NO: 2267 - protein, 321 aa, Muscodor strobelii
  misc_feature: SGI Peptide ID NO. 560382
  misc_feature (20)..(290): Pfam Id: PF03664 Pfam Desc: Glycosyl hydrolase family 62
  misc_feature (15)..(320): NCBI GI: 154299653 Blast Desc: BC1G_10789 [Botryotinia fuckeliana B05.10] gi|150857281|gb|EDN32473.1| BC1G_10789 [Botryotinia fuckeliana B05.10]
  misc_feature (13)..(320): NCBI GI: 31747156 Blast Desc: Abf2 [Hypocrea jecorina]
  misc_feature (20)..(320): NCBI GI: 270500940 Blast Desc: glycoside hydrolase family 62 [Micromonospora aurantiaca ATCC 27029] gi|270322157|gb|EFA33084.1| glycoside hydrolase family 62 [Micromonospora aurantiaca ATCC 27029]
  misc_feature (16)..(320): NCBI GI: 169778401 Blast Desc: [Aspergillus oryzae RIB40] gi|83772403|dbj|BAE62533.1| protein product [Aspergillus oryzae]
  misc_feature (12)..(320): NCBI GI: 67524349 Blast Desc: AN2632.2 [Aspergillus nidulans FGSC A4] gi|40743793|gb|EAA62979.1| AN2632.2 [Aspergillus nidulans FGSC A4] gi|259486462|tpe|CBF84318.1| TPA: arabinoxylan (Eurofung) A4]
  misc_feature (16)..(320): NCBI GI: 6045042 Blast Desc: alpha-L-arabinofuranosidase [Aspergillus sojae]
  misc_feature (8)..(320): NCBI GI: 256726678 Blast Desc: NECHADRAFT_34339 [Nectria haematococca mpVI 77-13-4]
  misc_feature (15)..(320): NCBI GI: 116195332 Blast Desc: CHGG_04264 [Chaetomium globosum CBS 148.51] gi|88180177|gb|EAQ87645.1| CHGG_04264 [Chaetomium globosum CBS 148.51]
  misc_feature (17)..(320): NCBI GI: 38524460 Blast Desc: alpha-L-arabinofuranosidase [Streptomyces thermoviolaceus]
  misc_feature (17)..(320): NCBI GI: 25535801 Blast Desc: alpha-L-arabinofuranosidase [Streptomyces thermoviolaceus]
  misc_feature (17)..(320): SWISSPROT Homolog: EC 3.2.1.55 Alpha-N-arabinofuranosidase
MLWGILFLGPAWIEVAEAACALPSTYEWTSSGPLATPSSSWVSLKDFTHVPYKGQHLVYGSTVDSSGQIYNSMAFGLFTSWSDMDSVSQTGMPNDPAIAPVLIYFEPKDIWVIAYQWGGSTFAYRTASDPTVATGWSAESPLFTGTIPDGGPLDATIIGDDTNMYLFYAGDNGMIYRASMPIGNFPGSFGSTSTVVLSGERNDLFEAVQVYTVAGQNQYLMIVEAIGANGRYFRSFTATSLGGSWTAQAVSESAPFAGKANSGATWTNDISSGDLIRSINDQTQTIDACNLQLLYQGRDPSSDGEDYNSLPWVPGLLTLKT

SEQ ID NO: 2268 - DNA, 1337 bp, Muscodor strobelii
  misc_feature: SGI EST ID NO. CUFF.5708.0
  misc_feature: Variant of the nucleotide sequence at SEQ ID NO 2266
ccaataatggcatgccgtttggaaatcagtactgatcacttgttgtccaaagggtatgctaatgccatgctataaggattcgcatccgtgatctctaactgagccatcaaaaaacgatcttcgctgtttgttgttctctattttcattttcaaaagtgatatgagatcgttagacatgaaacttaatatgttatgggggatcctcttcctcggacctgcttggatcgaggtggcagaggcggcgtgtgccctgccttctacgtatgagtggacatcatcaggaccacttgcgacgccctcgtcaagctgggtgtcattgaaggacttcacgcatgtaccctacaaagggcaacatctcgtttacggctcaaccgtcgattcttcaggccagatctacaactcgatggccttcggactcttcacctcatggtccgatatggattccgttagtcagaccggcatgcccaatgacccagctatcgcgcctgtcctcatatacttcgagccaaaagatatctgggtcatcgcatatcaatggggcggatcgacttttgcttacagaaccgcgagtgatcctacagttgctactgggtggtcggccgagtcacccctcttcacggggactataccagacggcgggccactagatgctacaatcattggcgacgacacgaatatgtacttgttctacgcaggcgacaacggtatgatataccgtgcaagcatgccgattgggaacttccctggtagttttgggtcgacgtcgactgttgtgctgagcggcgagaggaacgatctgttcgaggccgtccaagtgtatacggtcgcgggacagaaccaatacctaatgatagtagaggcaatcggcgccaatggccgctatttccgctcgttcactgctaccagtttaggaggttcgtggacagcgcaggctgtatccgagagcgcgccgtttgctggcaaggcaaacagcggcgcgacttggactaacgacattagctcgggtgatttgattcggagcatcaacgatcagacacagactatcgatgcttgtaacttgcaactcctttatcagggtcgcgaccctagttccgacggcgaggattataattcgttaccttgggtgcctggtctgttgacgctcaagacatagataaaattgacgtcgaatagggctggttttcgtttagtcgcgattttggacttcaccgtaaacttatgcgcgatatgagactggaattgtactgatgaagttcaatgtcatccagaaaccctcattgtattatacagtagcttatatcgttagagaggcatcggcattcgaaatcatatctaag

SEQ ID NO: 2269 - DNA, 966 bp, Muscodor strobelii
  misc_feature: SGI cDNA ID NO. 560383
  misc_feature: Encodes the peptide sequence at SEQ ID NO 2270
atgcctttagagccccgaaaagtgaagtctcacttgtctcttcagcacgaagacaacaaaacatcgccgtgggaggaggacagcactagcaataaaaatcatgggagcccatgcaaaccaaactcgtcagacgagcctatctgcaagcttgagaatggcattacgttacggtgcctgcgtcgttcggacgctaagcaggtccacaagttccttagcgacccacggataacgaaaggctatcccgatacatcgtatccgcaaccgtacagtctatggcgtgcgtataatctcattgatggggtattaaaccgaaagaaatggcgccggttgaacccttggacagcaacaggccatagcacatacgatgcggcagtccaagccctcagagatatgaatgtggacgtgcgcttatgcaagttggacgataatgattgcggtacatcttatgtcaacaagcatgctgcggggcaattaggagagaaaaccgataccagcaatcctctggtgcccaaggcctatgcaattgccaaggacgacgttctcattggctggattgaaatacatatgtccgacaatgttgaccctgatggggacgaccccgaagaagcgacagagccggcgtttcttcacagtacagagctgtgctattggttgagtcctgagtactggggcaagggtatcatgacgacgttggtgagagagttctgtcagtggatctggaagagctttgctcatgttgagatcatcggcgcttgtgtatacatgccaggtaatccgggcagtatcagagtactagagaaggttggttttgtgtcagaatggtcctcgcgcggcggtgttaggaagaatgggcagtaccaagatcttgatgagatggccctatatcgacctggggggctcgtcgagaagtcgctcgcagcacgaccacaacctccccggccagtgtttcgctcacataatcgatga

SEQ ID NO: 2270 - protein, 321 aa, Muscodor strobelii
  misc_feature: SGI Peptide ID NO. 560383
  misc_feature (173)..(271): Pfam Id: PF00583 Pfam Desc: Acetyltransferase (GNAT) family
  misc_feature (162)..(296): NCBI GI: 171696238 Blast Desc: protein product [Podospora anserina] gi|170948361|emb|CAP60525.1| protein product [Podospora anserina]
  misc_feature (211)..(296): NCBI GI: 67522328 Blast Desc: AN1621.2 [Aspergillus nidulans FGSC A4] gi|40745585|gb|EAA64741.1| AN1621.2 [Aspergillus nidulans FGSC A4] gi|259486956|tpe|CBF85237.1| TPA: conserved [Aspergillus FGSC
  misc_feature (174)..(296): NCBI GI: 225017499 Blast Desc: CLOSTMETH_01426 [Clostridium methylpentosum DSM 5476] gi|224949738|gb|EEG30947.1| CLOSTMETH_01426 [Clostridium methylpentosum DSM 5476]
  misc_feature (177)..(298): NCBI GI: 238507439 Blast Desc: conserved [Aspergillus flavus NRRL3357] gi|220689634|gb|EED45985.1| conserved [Aspergillus flavus NRRL3357]
  misc_feature (170)..(296): NCBI GI: 284038466 Blast Desc: GCN5-related N-acetyltransferase [Spirosoma linguale DSM 74] gi|283817759|gb|ADB39597.1| GCN5-related N-acetyltransferase [Spirosoma linguale DSM 74]
  misc_feature (177)..(300): NCBI GI: 169786429 Blast Desc: [Aspergillus oryzae RIB40] gi|83776423|dbj|BAE66542.1| protein product [Aspergillus oryzae]
  misc_feature (172)..(297): NCBI GI: 167746948 Blast Desc: ANACAC_01660 [Anaerostipes caccae DSM 14662] gi|167653908|gb|EDR98037.1| ANACAC_01660 [Anaerostipes caccae DSM 14662]
  misc_feature (172)..(297): NCBI GI: 257875710 Blast Desc: acetyltransferase [Enterococcus casseliflavus EC20] gi|257809876|gb|EEV38696.1| acetyltransferase [Enterococcus casseliflavus EC20]
  misc_feature (172)..(297): NCBI GI: 257866077 Blast Desc: acetyltransferase [Enterococcus casseliflavus EC30] gi|257872408|ref|ZP_05652061.1| acetyltransferase [Enterococcus casseliflavus EC10] gi|257800011|gb|EEV29063.1| acetyltransferase
  misc_feature (149)..(289): NCBI GI: 261191632 Blast Desc: acetyltransferase [Ajellomyces dermatitidis SLH14081] gi|239589990|gb|EEQ72633.1| acetyltransferase [Ajellomyces dermatitidis SLH14081] gi|239612601|gb|EEQ89588.1| [Ajellomyces
MPLEPRKVKSHLSLQHEDNKTSPWEEDSTSNKNHGSPCKPNSSDEPICKLENGITLRCLRRSDAKQVHKFLSDPRITKGYPDTSYPQPYSLWRAYNLIDGVLNRKKWRRLNPWTATGHSTYDAAVQALRDMNVDVRLCKLDDNDCGTSYVNKHAAGQLGEKTDTSNPLVPKAYAIAKDDVLIGWIEIHMSDNVDPDGDDPEEATEPAFLHSTELCYWLSPEYWGKGIMTTLVREFCQWIWKSFAHVEIIGACVYMPGNPGSIRVLEKVGFVSEWSSRGGVRKNGQYQDLDEMALYRPGGLVEKSLAARPQPPRPVFRSHNR

SEQ ID NO: 2271 - DNA, 1380 bp, Muscodor strobelii
  misc_feature: SGI EST ID NO. CUFF.5717.0
  misc_feature: Variant of the nucleotide sequence at SEQ ID NO 2269
cgatctcagtccttcgatactgcccaaggaatcgcggtttgagtaagtatttatttgttgcacaagcgacaaatcccgacagcaatatatacatgtctttacgattgataacacaacttcacaaagcaacagggactgaggatagtcttcaaacttacacaagccatgcctttagagccccgaaaagtgaagtctcacttgtctcttcagcacgaagacaacaaaacatcgccgtgggaggaggacagcactagcaataaaaatcatgggagcccatgcaaaccaaactcgtcagacgagcctatctgcaagcttgagaatggcattacgttacggtgcctgcgtcgttcggacgctaagcaggtccacaagttccttagcgacccacggataacgaaaggctatcccgatacatcgtatccgcaaccgtacagtctatggcgtgcgtataatctcattgatggggtattaaaccgaaagaaatggcgccggttgaacccttggacagcaacaggccatagcacatacgatgcggcagtccaagccctcagagatatgaatgtggacgtgcgcttatgcaagttggacgataatgattgcggtacatcttatgtcaacaagcatgctgcggggcaattaggagagaaaaccgataccagcaatcctctggtgcccaaggcctatgcaattgccaaggacgacgttctcattggctggattgaaatacatatgtccgacaatgttgaccctgatggggacgaccccgaagaagcgacagagccggcgtttcttcacagtacagagctgtgctattggttgagtcctgagtactggggcaagggtatcatgacgacgttggtgagagagttctgtcagtggatctggaagagctttgctcatgttgagatcatcggcgcttgtgtatacatgccaggtaatccgggcagtatcagagtactagagaaggttggttttgtgtcagaatggtcctcgcgcggcggtgttaggaagaatgggcagtaccaagatcttgatgagatggccctatatcgacctggggggctcgtcgagaagtcgctcgcagcacgaccacaacctccccggccagtgtttcgctcacataatcgatgagagaaagatcaaacaaacccttcatagtgtcatgtagctcaggacatatttcatctcgtattcctcgaaatagagcgcgcgaagtgattcctagaattctctctcgctaacccgctttcgttggactccgcctataaagccttgcttgataacctcagggcttagcgacaagtctaggattgcgtcgtgctctatctgataagaaagatagagattaaactagtaatgatcggttcgtttatcctttcc

SEQ ID NO: 2272 - DNA, 1557 bp, Muscodor strobelii
  misc_feature: SGI cDNA ID NO. 560384
  misc_feature: Encodes the peptide sequence at SEQ ID NO 2273
atggagtccaggccgtctcctgcagttatagacgtgcttacggccgatatgcaagccctccagcaccttcttcgcgacgggagcatcacgagtcatgagctcgttgatgtatatctcaaccaagtgcggaagcataatgatttcctgcatgccgtcattgaaacgacccctagaggcctcttgatgagccgcgctcgtgaccttgatcacgaacgtcgttccgggacagtcagaggtccattacacggcattcccgtcttcatcaagctcattgacagtggcgctatcatcctaggcaagactaatttgagcgaattcgcaaattggcgtggcacaatgctggtcagtggctggtcaggtgtcggtggtcaagtacaatctgcctacgttcggggtggagttcgctataatgatggcaaagatggacacagcaacccctccggctcctcatcaggatcagctgtggcagtgtctgctggcttttgtcccgtggctattgggactgaaacggacggctcacttatctgccctgcagggagggcttctctgtatacgatcaaaccgaccattggtcttgtttcccaagaaggcatcgtgcccgcatcgacgctttttgattccgcaggtcctatgacgaagtccgtgtacgacctagccgttctcttggacgccatctctaagcctgaaagccctttcgtttcccatctaaaaggttcctggggggagttatccgtcgcaacgcttgaccctcacgtatggaaattcccagacactttcattaagccgatatctgaagcagatgaacagatttacacggagatagccgcggcgtacaagactatcaaaataaaggccaaaagatttgtcgagaacgtacccctcacgacaatcgaaaattttgagtacaatggaagcaacgccaaattgaccatcgtcatccatgacaatcaggatttttttatcgcgactcaggagcagcgcctagactcggaagaatacgacaaaacgctggaatacttgcgaaggataacacaggatgagggtatcgaccgaatcctaaacgagtacgacgccgacgtcatcattggcccagcggatagcttcattacgtcggtagcaacaggaagcggatatccggtcgctggaatgcccctcacttatttgaactttaatggcagacccttgggaatggcagctcttgccggcaaaaaccaagattggaaattggtgagaatgatgagtgcgtgggaagctacattttctaaaagaagacccccgtcgcaacttggcgaagggaggggatcggcgagctggatacgaacgaaggatccctccaacgtggctttggaatacaaggcctcgtacgttatgcgcttctggggcgcaacggccatggaaaagtacgacgagtatctcgaagacgagaatctcgacagtctacctagtcttcatcctgccgggtttatctcaagtgccaggccaacgcttgatagacttacgactgatccccttgatggcattgccttccggcacttaaagactctggtgatattttga

SEQ ID NO: 2273 - protein, 518 aa, Muscodor strobelii
  misc_feature: SGI Peptide ID NO. 560384
  misc_feature (33)..(410): Pfam Id: PF01425 Pfam Desc: Amidase
  misc_feature (148)..(228): Pfam Id: PF01425 Pfam Desc: Amidase
  misc_feature (10)..(429): NCBI GI: 116200662 Blast Desc: CHGG_10876 [Chaetomium globosum CBS 148.51] gi|88175590|gb|EAQ83058.1| CHGG_10876 [Chaetomium globosum CBS 148.51]
  misc_feature (8)..(432): NCBI GI: 242775196 Blast Desc: glutamyl-tRNA(gln) amidotransferase subunit A, [Talaromyces stipitatus ATCC 10500] gi|218722214|gb|EED21632.1| glutamyl-tRNA(gln) amidotransferase subunit A, [Talaromyces ATCC
  misc_feature (9)..(429): NCBI GI: 116205451 Blast Desc: CHGG_10609 [Chaetomium globosum CBS 148.51] gi|88176737|gb|EAQ84205.1| CHGG_10609 [Chaetomium globosum CBS 148.51]
  misc_feature (1)..(426): NCBI GI: 256723754 Blast Desc: NECHADRAFT_52302 [Nectria haematococca mpVI 77-13-4]
  misc_feature (5)..(449): NCBI GI: 212546065 Blast Desc: amidase family protein [Penicillium marneffei ATCC 18224] gi|210064706|gb|EEA18801.1| amidase family protein [Penicillium marneffei ATCC 18224]
  misc_feature (10)..(432): NCBI GI: 256722562 Blast Desc: NECHADRAFT_85341 [Nectria haematococca mpVI 77-13-4]
  misc_feature (20)..(429): NCBI GI: 169621007 Blast Desc: SNOG_13707 [Phaeosphaeria nodorum SN15] gi|160704155|gb|EAT78731.2| SNOG_13707 [Phaeosphaeria nodorum SN15]
  misc_feature (1)..(429): NCBI GI: 242770741 Blast Desc: amidase, [Talaromyces stipitatus ATCC 10500] gi|218725237|gb|EED24654.1| amidase, [Talaromyces stipitatus ATCC 10500]
  misc_feature (1)..(426): NCBI GI: 256727338 Blast Desc: NECHADRAFT_76112 [Nectria haematococca mpVI 77-13-4]
  misc_feature (11)..(389): NCBI GI: 145234599 Blast Desc: An03g00410 [Aspergillus niger] gi|134057619|emb|CAK38019.1| protein product [Aspergillus niger]
MESRPSPAVIDVLTADMQALQHLLRDGSITSHELVDVYLNQVRKHNDFLHAVIETTPRGLLMSRARDLDHERRSGTVRGPLHGIPVFIKLIDSGAIILGKTNLSEFANWRGTMLVSGWSGVGGQVQSAYVRGGVRYNDGKDGHSNPSGSSSGSAVAVSAGFCPVAIGTETDGSLICPAGRASLYTIKPTIGLVSQEGIVPASTLFDSAGPMTKSVYDLAVLLDAISKPESPFVSHLKGSWGELSVATLDPHVWKFPDTFIKPISEADEQIYTEIAAAYKTIKIKAKRFVENVPLTTIENFEYNGSNAKLTIVIHDNQDFFIATQEQRLDSEEYDKTLEYLRRITQDEGIDRILNEYDADVIIGPADSFITSVATGSGYPVAGMPLTYLNFNGRPLGMAALAGKNQDWKLVRMMSAWEATFSKRRPPSQLGEGRGSASWIRTKDPSNVALEYKASYVMRFWGATAMEKYDEYLEDENLDSLPSLHPAGFISSARPTLDRLTTDPLDGIAFRHLKTLVIF

SEQ ID NO: 2274 - DNA, 574 bp, Muscodor strobelii
  misc_feature: SGI EST ID NO. CUFF.5724.0
  misc_feature: Variant of the nucleotide sequence at SEQ ID NO 2272
cagtccatgacaatcaggatttttttatcgcgactcaggagcagcgcctagactcggaagaatacgacaaaacgctggaatacttgcgaaggataacacaggatgagggtatcgaccgaatcctaaacgagtacgacgccgacgtcatcattggcccagcggatagcttcattacgtcggtagcaacaggaagcggatatccggtcgctggaatgcccctcacttatttgaactttaatggcagacccttgggaatggcagctcttgccggcaaaaaccaagattggaaattggtgagaatgatgagtgcgtgggaagctacattttctaaaagaagacccccgtcgcaacttggcgaaggggtgagtgagccgctagtcgaatgcgcatgtattttgaataagggccaggatactttgggcgagtgagcctttgcgctacgtgtaagataagctcatcggaacttcgaacatttgacatagtcttacttatcctgcccgtcgttcgacgttgtgtatagccccgttgctatcagaccattgtggatgctatccaattgcatctcggctttcct

SEQ ID NO: 2275 - DNA, 1581 bp, Muscodor strobelii
  misc_feature: SGI cDNA ID NO. 560385
  misc_feature: Encodes the peptide sequence at SEQ ID NO 2276
atggagggatcaaacgaaaagaccatggtacttctcaacccgaaacagccggctatcagggagcactactatccggacctagtcggtctcgatataccggtacaagtgcttgaccgacagacagaacatgccaagcagtatactgaggatgaatgggatgaaatcaagccgcttatctatcagttatacatgaaagaggagcggtcactcaagtctgtgatgcgcatactagcggagcaaaatgattttcaccctactgttagaatgttcaagatccgttttcggcgatggaactggcgaaaaaatcgagttcaagatagaacccgcgaagttgccccatctcgaaaggggacaaaaggagacacgaaaggggtcaaagctctccagctcgaagtccagcacataatgtcgccagaaatccttgtcgaccaagaagtaccgatcgcaatatcaaggaactacacaatagatcggtcgggtagcgagcgatggaactgtatcgttttaaacatgtccgagaccaaactgactgacgagcagcaaaagaccgctgctcggttttgtgacgcagagaccgcatacgtgacgactattcatcaattacgaggtggccggattaaggatgccttccaaagcctgaataggctgttcgacacgatgacgggtcaaaggctctatctgcatccgaaatacctgacaggattttggcttctgtgccatggtatatataacgcatgcgcctggatcaatgatagagatttcaaccttctacgcgaattagtatgctttcatggcgcgaacgctgcggcttgtttccaaaaggacaaatccaccggtgctcacccgatcgtaagcttgatgaaggcggtggcacgaatgagccgcgatagtcctcagacgatgaaacagacattccgaacggcgtatcgggctgccgctgacagtctgcaagataaactaggcccaaatcacccggtcgtgctgctgacttggaccgagtacttctggtactttaatcatcccgtcgatcacagaatgaatctcgttgctcgccaagaattggcgttgcttgagaacgaggaggcatctggcagagaagctgacgttacaatttgcgtgctgcacaactttgttttctacctgtactactgtgagggcaacgatggtctggctcgggagtatttacaggatttactcggcaggacacgtcgacgaataaagagtcaggcgtctcccacagtagccagtttccatgttcaaagggcgcatgcatttgggtcgctattacagggcatcttctatctccaagatgacaaggatattgatcattgtcgagaagtgatatcagctacgattgaatggctgcagacctgtgagggaagcgatgccatcatgcattcgcgaatgctcatgatggatctgtacactttgacgatggcttggcaaggtggtaaaaatcttcgggatttgacattggcgtttgcgaagccaagatcagcagattatgatgatgcgcgtccacgaaatgaacggcagttgtcggaggaaacagcgtcgtcgggtgatagcccacagaagtag

SEQ ID NO: 2276 - protein, 526 aa, Muscodor strobelii
  misc_feature: SGI Peptide ID NO. 560385
  misc_feature (25)..(434): NCBI GI: 242826405 Blast Desc: TSTA_110580 [Talaromyces stipitatus ATCC 10500] gi|218712453|gb|EED11879.1| TSTA_110580 [Talaromyces stipitatus ATCC 10500]
  misc_feature (122)..(383): NCBI GI: 67902340 Blast Desc: AN8157.2 [Aspergillus nidulans FGSC A4] gi|40739989|gb|EAA59179.1| [Aspergillus nidulans FGSC A4] gi|259480925|tpe|CBF73999.1| TPA: conserved [Aspergillus nidulans
  misc_feature (25)..(101): NCBI GI: 46108404 Blast Desc: FG01084.1 [Gibberella zeae PH-1]
  misc_feature (25)..(114): NCBI GI: 256735141 Blast Desc: NECHADRAFT_74679 [Nectria haematococca mpVI 77-13-4]
  misc_feature (44)..(122): NCBI GI: 46110607 Blast Desc: FG02185.1 [Gibberella zeae PH-1]
  misc_feature (48)..(102): NCBI GI: 240110385 Blast Desc: CPC735_064170 [Coccidioides posadasii C735 delta SOWgp]
  misc_feature (45)..(111): NCBI GI: 46109922 Blast Desc: FG01843.1 [Gibberella zeae PH-1]
  misc_feature (49)..(123): NCBI GI: 145605984 Blast Desc: MGG_06762 [Magnaporthe grisea 70-15] gi|145013719|gb|EDJ98360.1| MGG_06762 [Magnaporthe grisea 70-15]
  misc_feature (45)..(111): NCBI GI: 256728687 Blast Desc: NECHADRAFT_85885 [Nectria haematococca mpVI 77-13-4]
  misc_feature (29)..(138): NCBI GI: 156033239 Blast Desc: [Sclerotinia sclerotiorum 1980] gi|154699098|gb|EDN98836.1| [Sclerotinia sclerotiorum 1980]
MEGSNEKTMVLLNPKQPAIREHYYPDLVGLDIPVQVLDRQTEHAKQYTEDEWDEIKPLIYQLYMKEERSLKSVMRILAEQNDFHPTVRMFKIRFRRWNWRKNRVQDRTREVAPSRKGTKGDTKGVKALQLEVQHIMSPEILVDQEVPIAISRNYTIDRSGSERWNCIVLNMSETKLTDEQQKTAARFCDAETAYVTTIHQLRGGRIKDAFQSLNRLFDTMTGQRLYLHPKYLTGFWLLCHGIYNACAWINDRDFNLLRELVCFHGANAAACFQKDKSTGAHPIVSLMKAVARMSRDSPQTMKQTFRTAYRAAADSLQDKLGPNHPVVLLTWTEYFWYFNHPVDHRMNLVARQELALLENEEASGREADVTICVLHNFVFYLYYCEGNDGLAREYLQDLLGRTRRRIKSQASPTVASFHVQRAHAFGSLLQGIFYLQDDKDIDHCREVISATIEWLQTCEGSDAIMHSRMLMMDLYTLTMAWQGGKNLRDLTLAFAKPRSADYDDARPRNERQLSEETASSGDSPQK

SEQ ID NO: 2277 - DNA, 3194 bp, Muscodor strobelii
  misc_feature: SGI EST ID NO. CUFF.5753.0
  misc_feature: Variant of the nucleotide sequence at SEQ ID NO 2275
atttgcaaacttgttgttccctgccttataattgtgatcatttgggggcgagaaccagtcaatcagggattgttcatcctttaagaccaccggtgcgaattggcgccgccttttgctcattcattatatgatccatatggctcttcaaaagggctagtcgcgctaccagttccgcctgtgtgccatatctcgcggccgagaagctgatccatcgtttgccgtccacatcactttatccactccttctagaagacgtcaaaatggagggatcaaacgaaaagaccatggtacttctcaacccgaaacagccggctatcagggagcactactatccggacctagtcggtctcgatataccggtacaagtgcttgaccgacagacagaacatgccaagcagtatactgaggatgaatgggatgaaatcaagccgcttatctatcagttatacatgaaagaggagcggtcactcaagtctgtgatgcgcatactagcggagcaaaatgattttcaccctacgtaagcattgccgtggggacggaccatccttacactcgagcacagatgtgtttgacgtgtaacatgttcgttcgaagacatattctaaccaagtctatagtgttagaatgttcaagatccgttttcggcgatggaactggcgaaaaaatcgagttcaagatagaacccgcgaagttgccccatctcgaaaggggacaaaaggagacacgaaaggggtcaaagctctccagctcgaagtccagcacataatgtcgccagaaatccttgtcgaccaagaagtaccgatcgcaatatcaaggaactacacaatagatcggtcgggtagcgagcgatggaactgtatcgttttaaacatgtccgagaccaaactgactgacgagcagcaaaagaccgctgctcggttttgtgacgcagagaccgcatacgtgacgactattcatcaattacgaggtggccggattaaggatgccttccaaagcctgaataggctgttcgacacgatgacgggtcaaaggctctatctgcatccgaaatacctgacaggattttggcttctgtgccatggtatatataacgcatgcgcctggatcaatgatagagatttcaaccttctacgcgaattagtatgctttcatggcgcgaacgctgcggcttgtttccaaaaggacaaatccaccggtgctcacccgatcgtaagcttgatgaaggcggtggcacgaatgagccgcgatagtcctcagacgatgaaacagacattccgaacggcgtatcgggctgccgctgacagtctgcaagataaactaggcccaaatcacccggtcgtgctgctgacttggaccgagtacttctggtactttaatcatcccgtcgatcacagaatgaatctcgttgctcgccaagaattggcgttgcttgagaacgaggaggcatctggcagagaagctgacgttacaatttgcgtgctgcacaactttgttttctacctgtactactgtgagggcaacgatggtctggctcgggagtatttacaggatttactcggcaggacacgtcgacgaataaagagtcaggcgtctcccacagtagccagtttccatgttcaaagggcgcatgcatttgggtcgctattacagggcatcttctatctccaagatgacaaggatattgatcattgtcgagaagtgatatcagctacgattgaatggctgcagacctgtgagggaagcgatgccatcatgcattcgcgaatgctcatgatggatctgtacactttgacgatggcttggcaaggtggtaaaaatcttcgggatttgacattggcgtttgcgaagccaagatcagcagattatgatgatgcgcgtccacgaaatgaacggcagttgtcggaggaaacagcgtcgtcgggtgatagcccacagaagtaggtagtaatgcagcattaaaaaagtagatggaacagagcttccaattcgacttcagttcttcacccattgcgattccaatgctctatctgcctttccaatgaagtctctcactatctcttgcagccaagttggccagccccggatgaaagacacgattgttcgggacttaggtatgatgagatgacctcctcgtcttgagaatatctgctgtagaacaggttgcacgacctggtccactgtgagtagaagacctccggctgcttcgacttcagcccagtaggctttggtcatttgtgtcttgacaaaatccggctgcacaagggtagtcataacgccacgggtcttgtacaggtgcttgatctcgcaggcaagaccctcgtgaaatgccaacgcgcctgctttggttgctgaatagtcaaccgaggtcgggagtgcgatgtacgaggcaaggctcgacatagtgatgatatggcctttgttctgggccaacatgtgcggtaaaaagaccttcgtagtaaaccaatgtgccatgagattaaccccaacgatgtttcgtagatgatcttctgtttcatctagaattgtagttgtccgaatgacaccggcattgttgatgaggatagaggggtggccaaatgtctgccgaattttctctcctgctcttactatttcatctgggacagacacattacatctgatgaacagaactttctcattgtcctttaaagcatggggaagtacctgcacgtcgagcacggcgacccgcactcctctcgcaatcagtccactcacgagggctctaccgatgtcgccagaccctcctgtcaccaccgcgacttcgttctcccagtcccaaccttcgtgggcagtaagtcgccagttattcattgcccacacactgagtgctctgttcacgctcctcataatactgaatccaagcaagatgcggaggatcggtttcacaggaataagccatcgcgcttgcgcttgtttcaaagtcgagtgttcgtccagggagtctgacggagcatagagcagcgcgacaatcagaaggggtaggcagatgtgtgagaggtttgtgcctccgatcgagtcagcgacttgattcacaactggagaccggcgcggcatactcgccaggtcccaagcttggcatgggtcttatgtgctgttagagaaattgtgagacgactgagaaatatgaaatattttgagagatttctagcatcgtgcttaggacgcttgaggatttc

SEQ ID NO: 2278 - DNA, 1080 bp, Muscodor strobelii
  misc_feature: SGI cDNA ID NO. 560386
  misc_feature: Encodes the peptide sequence at SEQ ID NO 2279
atgccgcgccggtctccagttgtgaatcaagtcgctgactcgatcggaggcacaaacctctcacacatctgcctaccccttctgattgtcgcgctgctctatgctccgtcagactccctggacgaacactcgactttgaaacaagcgcaagcgcgatggcttattcctgtgaaaccgatcctccgcatcttgcttggattcagtattatgaggagcgtgaacagagcactcagtgtgtgggcaatgaataactggcgacttactgcccacgaaggttgggactgggagaacgaagtcgcggtggtgacaggagggtctggcgacatcggtagagccctcgtgagtggactgattgcgagaggagtgcgggtcgccgtgctcgacgtgcaggtacttccccatgctttaaaggacaatgagaaagttctgttcatcagatgtaatgtgtctgtcccagatgaaatagtaagagcaggagagaaaattcggcagacatttggccacccctctatcctcatcaacaatgccggtgtcattcggacaactacaattctagatgaaacagaagatcatctacgaaacatcgttggggttaatctcatggcacattggtttactacgaaggtctttttaccgcacatgttggcccagaacaaaggccatatcatcactatgtcgagccttgcctcgtacatcgcactcccgacctcggttgactattcagcaaccaaagcaggcgcgttggcatttcacgagggtcttgcctgcgagatcaagcacctgtacaagacccgtggcgttatgactacccttgtgcagccggattttgtcaagacacaaatgaccaaagcctactgggctgaagtcgaagcagccggaggtcttctactcacagtggaccaggtcgtgcaacctgttctacagcagatattctcaagacgaggaggtcatctcatcatacctaagtcccgaacaatcgtgtctttcatccggggctggccaacttggctgcaagagatagtgagagacttcattggaaaggcagatagagcattggaatcgcaatgggtgaagaactga

SEQ ID NO: 2279 - protein, 359 aa, Muscodor strobelii
  misc_feature: SGI Peptide ID NO. 560386
  misc_feature (98)..(259): Pfam Id: PF00106 Pfam Desc: short chain dehydrogenase
  misc_feature (101)..(142): Pfam Id: PF01073 Pfam Desc: 3-beta hydroxysteroid dehydrogenase/isomerase family
  misc_feature (100)..(158): Pfam Id: PF01370 Pfam Desc: NAD dependent epimerase/dehydratase family
  misc_feature (57)..(348): NCBI GI: 256721226 Blast Desc: NECHADRAFT_34821 [Nectria haematococca mpVI 77-13-4]
  misc_feature (5)..(347): NCBI GI: 46139571 Blast Desc: FG11300.1 [Gibberella zeae PH-1]
  misc_feature (81)..(347): NCBI GI: 116200947 Blast Desc: CHGG_08358 [Chaetomium globosum CBS 148.51] gi|88176876|gb|EAQ84344.1| CHGG_08358 [Chaetomium globosum CBS 148.51]
  misc_feature (51)..(346): NCBI GI: 256722304 Blast Desc: NECHADRAFT_54364 [Nectria haematococca mpVI 77-13-4]
  misc_feature (84)..(348): NCBI GI: 256722349 Blast Desc: NECHADRAFT_94746 [Nectria haematococca mpVI 77-13-4]
  misc_feature (61)..(358): NCBI GI: 169596913 Blast Desc: SNOG_01230 [Phaeosphaeria nodorum SN15] gi|160707398|gb|EAT90879.2| SNOG_01230 [Phaeosphaeria nodorum SN15]
  misc_feature (61)..(343): NCBI GI: 189195172 Blast Desc: dehydrogenase/reductase SDR family member 8 precursor [Pyrenophora tritici-repentis Pt-1C-BFP] gi|187979803|gb|EDU46429.1| dehydrogenase/reductase SDR family 8
  misc_feature (4)..(343): NCBI GI: 169622144 Blast Desc: SNOG_14287 [Phaeosphaeria nodorum SN15] gi|111057038|gb|EAT78158.1| SNOG_14287 [Phaeosphaeria nodorum SN15]
  misc_feature (48)..(352): NCBI GI: 238507499 Blast Desc: short-chain dehydrogenase/reductase 2, [Aspergillus flavus NRRL3357] gi|220689664|gb|EED46015.1| short-chain dehydrogenase/reductase 2, [Aspergillus flavus NRRL3357]
  misc_feature (48)..(352): NCBI GI: 169786479 Blast Desc: [Aspergillus oryzae RIB40] gi|83776448|dbj|BAE66567.1| protein product [Aspergillus oryzae]
  misc_feature (93)..(284): SWISSPROT Homolog: EC 1.1.1.100 3-oxoacyl-[acyl-carrier-protein] reductase
MPRRSPVVNQVADSIGGTNLSHICLPLLIVALLYAPSDSLDEHSTLKQAQARWLIPVKPILRILLGFSIMRSVNRALSVWAMNNWRLTAHEGWDWENEVAVVTGGSGDIGRALVSGLIARGVRVAVLDVQVLPHALKDNEKVLFIRCNVSVPDEIVRAGEKIRQTFGHPSILINNAGVIRTTTILDETEDHLRNIVGVNLMAHWFTTKVFLPHMLAQNKGHIITMSSLASYIALPTSVDYSATKAGALAFHEGLACEIKHLYKTRGVMTTLVQPDFVKTQMTKAYWAEVEAAGGLLLTVDQVVQPVLQQIFSRRGGHLIIPKSRTIVSFIRGWPTWLQEIVRDFIGKADRALESQWVKN

SEQ ID NO: 2280 - DNA, 879 bp, Muscodor strobelii
  misc_feature: SGI cDNA ID NO. 560387
  misc_feature: Encodes the peptide sequence at SEQ ID NO 2281
atggatgaatcatcaatccttcaagagttcgatcgtcttgtcagcattggtacggtgcagtatgacgaggcacagcaggtgatcaggcacgaagtaggagaacttgagtttcaatttgttctcacctccgctctaacaaggaaaccagtattcgggggaccgagcacggagtcgggaccggcaagagaaacatcagtgtaccgggacggtagtgatatcagcaccaatggattcgagatcaagaacattggcagtacacatctgctcgcagcaaacaagttctgctatgcgaggccactacttctactcttgactttgaatgggcaccaaagacagtacacagctctggacgaagacgatctaacagcagcttggaccgcactcactgctctcagcgacaaatatgccctcttctacaactgcgggcaagatagcggttgcagccggctacataagcatatgcaactgatgccaatgccacgaggtactttcgcaaattttctggagttcgaaggaagtcaagagccaaatgtaccattctggtggttctacaaacgcctcaattctagatctgtcgcgccaggagggctgagacatatctatgccgacctcctagcacaagcaacgaaggcttcagaaagacattgcaaacctaccgcgagtgtgttttctgatgctgtttgcccgcacaacatgatactcacagaaagatggatactcgtcattcccaggcgacgagcaggcgtgaatggggtcgagccgaatgccatgggtatgctaggatacatcgctgtggcagcacaagacgagatcactaaatggagacagcaaggcttgatagaaactctcaaagaggttggagtgcctcgaaatccatga

SEQ ID NO: 2281 - protein, 292 aa, Muscodor strobelii
  misc_feature: SGI Peptide ID NO. 560387
  misc_feature (1)..(290): NCBI GI: 238494672 Blast Desc: conserved [Aspergillus flavus NRRL3357] gi|220695222|gb|EED51565.1| conserved [Aspergillus flavus NRRL3357]
  misc_feature (1)..(286): NCBI GI: 119173240 Blast Desc: CIMG_10131 [Coccidioides immitis RS]
  misc_feature (1)..(290): NCBI GI: 146324892 Blast Desc: conserved [Aspergillus fumigatus Af293] gi|129556607|gb|EBA27288.1| conserved [Aspergillus fumigatus Af293]
  misc_feature (1)..(290): NCBI GI: 46110755 Blast Desc: FG02259.1 [Gibberella zeae PH-1]
  misc_feature (1)..(249): NCBI GI: 159123415 Blast Desc: conserved [Aspergillus fumigatus A1163]
  misc_feature (1)..(291): NCBI GI: 39952937 Blast Desc: MGG_01873 [Magnaporthe grisea 70-15] gi|145020258|gb|EDK04387.1| MGG_01873 [Magnaporthe grisea 70-15]
  misc_feature (1)..(292): NCBI GI: 212526014 Blast Desc: phosphorylase, [Penicillium marneffei ATCC 18224] gi|210072562|gb|EEA26649.1| phosphorylase, [Penicillium marneffei ATCC 18224]
  misc_feature (4)..(289): NCBI GI: 67539370 Blast Desc: AN5855.2 [Aspergillus nidulans FGSC A4] gi|40739174|gb|EAA58364.1| AN5855.2 [Aspergillus nidulans FGSC A4] gi|259479984|tpe|CBF70701.1| TPA: phosphorylase, [Aspergillus
  misc_feature (1)..(289): NCBI GI: 169624614 Blast Desc: SNOG_15566 [Phaeosphaeria nodorum SN15] gi|111055821|gb|EAT76941.1| SNOG_15566 [Phaeosphaeria nodorum SN15]
  misc_feature (1)..(290): NCBI GI: 119476816 Blast Desc: phosphorylase, [Neosartorya fischeri NRRL 181] gi|119407365|gb|EAW17314.1| phosphorylase, [Neosartorya fischeri NRRL 181]
  misc_feature (134)..(290): SWISSPROT Homolog: EC 2.7.7.53 ATP adenylyltransferase
MDESSILQEFDRLVSIGTVQYDEAQQVIRHEVGELEFQFVLTSALTRKPVFGGPSTESGPARETSVYRDGSDISTNGFEIKNIGSTHLLAANKFCYARPLLLLLTLNGHQRQYTALDEDDLTAAWTALTALSDKYALFYNCGQDSGCSRLHKHMQLMPMPRGTFANFLEFEGSQEPNVPFWWFYKRLNSRSVAPGGLRHIYADLLAQATKASERHCKPTASVFSDAVCPHNMILTERWILVIPRRRAGVNGVEPNAMGMLGYIAVAAQDEITKWRQQGLIETLKEVGVPRNP

SEQ ID NO: 2282 - DNA, 1477 bp, Muscodor strobelii
  misc_feature: SGI EST ID NO. CUFF.5759.0
  misc_feature: Variant of the nucleotide sequence at SEQ ID NO 2280
taccattcgcgggtcactgccttcagtggacatggatgaatcatcaatccttcaagagttcgatcgtcttgtcagcattggtacggtgcagtatgacgaggcacagcaggtgatcaggcacgaagtaggagaacttgagtttcaatttgttctcacctccgctctaacaaggaaaccagtattcgggggaccgagcacggagtcgggaccggcaagagaaacatcagtgtaccgggacggtagtgatatcagcaccaatggattcgagatcaagaacattggcagtacacatctgctcgcagcaaacaagttctgctatgcgaggccactacttctactcttgactttgaatgggcaccaaagacagtacacagctctggacgaagacgatctaacagcagcttggaccgcactcactgctctcagcgacaaatatgccctcttctacaactgcgggcaagatagcggttgcagccggctacataagcatatgcaactgatgccaatgccacgaggtactttcgcaaattttctggagttcgaaggaagtcaagagccaaatgtaccattctggtggttctacaaacgcctcaattctagatctgtcgcgccaggagggctgagacatatctatgccgacctcctagcacaagcaacgaaggcttcagaaagacattgcaaacctaccgcgagtgtgttttctgatgctgtttgcccgcacaacatgatactcacagaaagatggatactcgtcattcccaggcgacgagcaggcgtgaatggggtcgagccgaatgccatgggtatgctaggatacatcgctgtggcagcacaagacgagatcactaaatggagacagcaaggcttgatagaaactctcaaagaggttggagtgcctcgaaatccatgaagcatcacattcgtcaaacgatactccttagtcagcgtctgtccaagattgtgtccttaagaccctactataaatgtatgatttcctccatcaaccgcgaatgagtaacctttcaggttcccaacactcattgattccgcgaccacagctttcccatctattgtcaactttactggagtgctgttgcttagcagaggcaaaagcaccgaacctttcgtgccttcaggggtgtcaacagtgacattgtacccttcaccattcttcgtccatcgtgcttgaaacttccctaaactcgttgaaaatccgccctccgcaaattccagatctgcaaactgtggtgtcaggctccaggtctcgcccgctgcgcccgtaatttccagacctagaacatagttcgtcaatgcgctcgtaggcccactgctccagccatgcgcatggcttgtgtagctctcgtcaacatatccacgattatatctatatgcgaaggaaccgtttgccaaatagccttcaatgacagtagactctgtgccattcgggttgttcagataccagccccatgaacgccgg

SEQ ID NO: 2283 - DNA, 2082 bp, Muscodor strobelii
  misc_feature: SGI cDNA ID NO. 560388
  misc_feature: Encodes the peptide sequence at SEQ ID NO 2284
atgtcagacaagcgggaatcttatattcatatggaacgcttcaccaatatgatgggactgtactctttatcactgcttgctttcgcctgcaaatgttgcgcggcatcttgttggcaagacaccacttgtacaggcccgctaacgcaagcattccccggccagtgggactcgaacatttacgcgccaagttctcgaaccgttgagcctgtagatgttctttcgggagcagcattgtctcgaacatcgtacaacggatcaatccaattatctgtagataaacaaagagcgacattggactatgggattgaagttggcggtattacgtccttcagttacacaagcagtgggactggtcaactcggtctggcatggacggaagccaaagactacatcggctctgattccgactattctaacggcggtagcacaccggatggccacctcactttgagcatctccaagaccaattcaggtacttacacaattcctagagaaaagctacgtggcggatttcgatacatgacaatcactttatcaacgacacaagacattgatgtccaaatatcgaatgtcgccctcgatgtcagctttcaaccgacgtggtcgaatctgcgggcctaccaaggatatttccattgcagcgacgacacgttgaataagatctggtacgcaggggcttatacaattcaaaccaatgcagtgcctgtaaatactggtaggacagtccctttcgtttcgcacacatggtcgaatatcggcgctctcgggaacgggagcacaatcatagtggatggcgccaagcgagatagggcagtttggccgggagatatgggtatagcggtgcccgcttcgttctacagtattggcgatcttgaaagtgtcgccaatgcactccaaactacatatcatgctcaacttcgggaacagaattccgatggatcattccctgaagcaggtcctccattattgcagcaaggaagcgacacttatcatatgtggaccatgatcgggacatataactatttactttatcagaacgataccgattttctgaagaaaaattggaaccgataccaagcggcaatgaattatatatacggtaaagtccatgcgcccggtctattgaacgtgactggtacgcgtgattgggcacgcttccaacaaggattcaacaacagtgaggcaaacatgattttgtatcgcacgttgactacaggctcctatctcgcgaccgtgctaggcgaggacaacttgagtacaacttggagtggtcgtgccgctgacctcgccatcgcaataaacactaacctatgggactcatcctacggactattcaaagacaatgccactaatacaaacctccacccccaagacgcaaactccatggcaatcctgttcaacgttacaagtccagaacggaccgagagcatctcttcattgttaacggagaattggaatgaaatcggtgcagtatcaccagaactcactaatacaatatctccctttatttcttcatttgagatacaagctcattttctcgctggtcagcctgcgcgagcactcgatttgatccggcgttcatggggctggtatctgaacaacccgaatggcacagagtctactgtcattgaaggctatttggcaaacggttccttcgcatatagatataatcgtggatatgttgacgagagctacacaagccatgcgcatggctggagcagtgggcctacgagcgcattgacgaactatgttctaggtctggaaattacgggcgcagcgggcgagacctggagcctgacaccacagtttgcagatctggaatttgcggagggcggattttcaacgagtttagggaagtttcaagcacgatggacgaagaatggtgaagggtacaatgtcactgttgacacccctgaaggcacgaaaggttcggtgcttttgcctctgctaagcaacagcactccagtaaagttgacaatagatgggaaagctgtggtcgcggaatcaatgagtgttgggaacctgaaaggttactcattcgcggttgatggaggaaatcatacatttatagtagggtcttaa

SEQ ID NO: 2284 - protein, 693 aa, Muscodor strobelii
  misc_feature: SGI Peptide ID NO. 560388
  misc_feature (88)..(647): Pfam Id: PF05592 Pfam Desc: Bacterial alpha-L-rhamnosidase
  misc_feature (34)..(691): NCBI GI: 156034396 Blast Desc: SS1G_13501 [Sclerotinia sclerotiorum 1980] gi|154698904|gb|EDN98642.1| SS1G_13501 [Sclerotinia sclerotiorum 1980]
  misc_feature (17)..(682): NCBI GI: 212527780 Blast Desc: alpha-L-rhamnosidase B, [Penicillium marneffei ATCC 18224] gi|210073445|gb|EEA27532.1| alpha-L-rhamnosidase B, [Penicillium marneffei ATCC 18224]
  misc_feature (23)..(665): NCBI GI: 70991026 Blast Desc: alpha-L-rhamnosidase B [Aspergillus fumigatus Af293] gi|66847994|gb|EAL88324.1| alpha-L-rhamnosidase B, [Aspergillus fumigatus Af293] gi|159130836|gb|EDP55949.1| alpha-L-rhamnosidase
  misc_feature (34)..(691): NCBI GI: 119496565 Blast Desc: bacterial alpha-L-rhamnosidase domain protein [Neosartorya fischeri NRRL 181] gi|119413218|gb|EAW23159.1| bacterial alpha-L-rhamnosidase domain protein [Neosartorya NRRL
  misc_feature (36)..(691): NCBI GI: 115389382 Blast Desc: conserved [Aspergillus terreus NIH2624] gi|114194592|gb|EAU36292.1| conserved [Aspergillus terreus NIH2624]
  misc_feature (17)..(682): NCBI GI: 242784641 Blast Desc: alpha-L-rhamnosidase B, [Talaromyces stipitatus ATCC 10500] gi|218720575|gb|EED19994.1| alpha-L-rhamnosidase B, [Talaromyces stipitatus ATCC 10500]
  misc_feature (32)..(691): NCBI GI: 238503818 Blast Desc: alpha-L-rhamnosidase B, [Aspergillus flavus NRRL3357] gi|220690612|gb|EED46961.1| alpha-L-rhamnosidase B, [Aspergillus flavus NRRL3357]
  misc_feature (23)..(691): NCBI GI: 255935171 Blast Desc: Pc13g01670 [Penicillium chrysogenum Wisconsin 54-1255] gi|211583232|emb|CAP91236.1| Pc13g01670 [Penicillium chrysogenum Wisconsin 54-1255]
  misc_feature (25)..(665): NCBI GI: 145255353 Blast Desc: An18g04800 [Aspergillus niger] gi|134084529|emb|CAK43282.1| protein product [Aspergillus niger]
  misc_feature (32)..(691): NCBI GI: 169764911 Blast Desc: [Aspergillus oryzae RIB40] gi|83764781|dbj|BAE54925.1| protein product [Aspergillus oryzae]
MSDKRESYIHMERFTNMMGLYSLSLLAFACKCCAASCWQDTTCTGPLTQAFPGQWDSNIYAPSSRTVEPVDVLSGAALSRTSYNGSIQLSVDKQRATLDYGIEVGGITSFSYTSSGTGQLGLAWTEAKDYIGSDSDYSNGGSTPDGHLTLSISKTNSGTYTIPREKLRGGFRYMTITLSTTQDIDVQISNVALDVSFQPTWSNLRAYQGYFHCSDDTLNKIWYAGAYTIQTNAVPVNTGRTVPFVSHTWSNIGALGNGSTIIVDGAKRDRAVWPGDMGIAVPASFYSIGDLESVANALQTTYHAQLREQNSDGSFPEAGPPLLQQGSDTYHMWTMIGTYNYLLYQNDTDFLKKNWNRYQAAMNYIYGKVHAPGLLNVTGTRDWARFQQGFNNSEANMILYRTLTTGSYLATVLGEDNLSTTWSGRAADLAIAINTNLWDSSYGLFKDNATNTNLHPQDANSMAILFNVTSPERTESISSLLTENWNEIGAVSPELTNTISPFISSFEIQAHFLAGQPARALDLIRRSWGWYLNNPNGTESTVIEGYLANGSFAYRYNRGYVDESYTSHAHGWSSGPTSALTNYVLGLEITGAAGETWSLTPQFADLEFAEGGFSTSLGKFQARWTKNGEGYNVTVDTPEGTKGSVLLPLLSNSTPVKLTIDGKAVVAESMSVGNLKGYSFAVDGGNHTFIVGS

SEQ ID NO: 2285 - DNA, 164 bp, Muscodor strobelii
  misc_feature: SGI EST ID NO. CUFF.5763.0
  misc_feature: Variant of the nucleotide sequence at SEQ ID NO 2283
aacgtgactggtacgcgtgattgggcacgcttccaacaaggattcaacaacagtgaggcaaacatgattttgtatcgcacgttgactacaggctcctatctcgcgaccgtgctaggcgaggacaacttgagtacaacttggagtggtcgtgccgctgacctcgc

SEQ ID NO: 2286 - DNA, 675 bp, Muscodor strobelii
  misc_feature: SGI cDNA ID NO. 560389
  misc_feature: Encodes the peptide sequence at SEQ ID NO 2287
atgttcacgtttcgaaacggtgcaaccctcgcacaagtccaggagtctgatctcgagatccgaactagtgatcccaactactctatccaatacacgaatcagcctagctggaatgccaacggggaaattccacaagcgacgcggaatgtcagtcttcctggtcaactgaattggactgattggcaagttcatcgcatggattggaatccgggttcaacagactggtttgtggaaggaaaacctcgctcctctatccagttccaagcgccaaaggatcccagccaagtcatgttcaacgtatggagcgacggaggaagttggagcggcaatatgacggtgaatgcttcagccgaaatgcagatacagtggatcgacatcgtatacaacaacacagacggtactacccccatcactccgccaccctggaatccatccgggagcagcggcagcggttcgactacaagatgtgccaacatctgctccatcgatcaaacgtccaagatcggaacccctgttctagttcaacagccaggaacttcgaatccgggtggcggttcaggtcctgggacgtgttcgacggcaaagtacgggcaatgcgccggcaagaactggagtggctgtggatcattggtcttcgccttttggattatgctagcggaaattgacggttattga

SEQ ID NO: 2287 - protein, 224 aa, Muscodor strobelii
  misc_feature: SGI Peptide ID NO. 560389
  misc_feature (1)..(209): NCBI GI: 116203333 Blast Desc: CHGG_09551 [Chaetomium globosum CBS 148.51] gi|88178069|gb|EAQ85537.1| CHGG_09551 [Chaetomium globosum CBS 148.51]
  misc_feature (1)..(177): NCBI GI: 85096736 Blast Desc: NCU07134 [Neurospora crassa OR74A] gi|28921804|gb|EAA31081.1| [Neurospora crassa OR74A]
  misc_feature (1)..(185): NCBI GI: 116192113 Blast Desc: CHGG_05774 [Chaetomium globosum CBS 148.51] gi|88181687|gb|EAQ89155.1| CHGG_05774 [Chaetomium globosum CBS 148.51]
  misc_feature (1)..(185): NCBI GI: 164428797 Blast Desc: NCU00061 [Neurospora crassa OR74A] gi|157072284|gb|EAA27135.2| conserved [Neurospora crassa OR74A]
  misc_feature (1)..(181): NCBI GI: 50844258 Blast Desc: xylanase 3 [Gibberella zeae]
  misc_feature (1)..(181): NCBI GI: 46124571 Blast Desc: FG06663.1 [Gibberella zeae PH-1]
  misc_feature (1)..(173): NCBI GI: 256733293 Blast Desc: NECHADRAFT_38694 [Nectria haematococca mpVI 77-13-4]
  misc_feature (1)..(190): NCBI GI: 171686736 Blast Desc: protein product [Podospora anserina] gi|170943329|emb|CAP68982.1| protein product [Podospora anserina]
  misc_feature (1)..(174): NCBI GI: 256732374 Blast Desc: NECHADRAFT_106160 [Nectria haematococca mpVI 77-13-4]
  misc_feature (1)..(169): NCBI GI: 39953354 Blast Desc: MGG_08823 [Magnaporthe grisea 70-15] gi|145021245|gb|EDK05374.1| MGG_08823 [Magnaporthe grisea 70-15]
MFTFRNGATLAQVQESDLEIRTSDPNYSIQYTNQPSWNANGEIPQATRNVSLPGQLNWTDWQVHRMDWNPGSTDWFVEGKPRSSIQFQAPKDPSQVMFNVWSDGGSWSGNMTVNASAEMQIQWIDIVYNNTDGTTPITPPPWNPSGSSGSGSTTRCANICSIDQTSKIGTPVLVQQPGTSNPGGGSGPGTCSTAKYGQCAGKNWSGCGSLVFAFWIMLAEIDGY

SEQ ID NO: 2288 - DNA, 3381 bp, Muscodor strobelii
  misc_feature: SGI cDNA ID NO. 560390
  misc_feature: Encodes the peptide sequence at SEQ ID NO 2289
atggaccccgcaaaagttgaccacgacccgtcgccgggacgggtcaaactggagccactggagccaatgcatgatgcaccatccatgtctcaccttgctataccgcatacctcagaacatagcaacgggctcgagaatgatcacgcctctaccatgaatccagtccctcggctcggaccgaggcaggaggcaacagaccagagactacaggaaactgactatcttgagcgtttgtgcaatgaggatacgcctgaagtcctcgagacaggcgtctctgtcgcccttactctgctgaaccaattgcaagatgtcatgcagacacacgactccgccgaatccaccgcctggctgaagtcgatcacagagctccgtgagagcactaataaacctgctcgcactgttgtcggcgttgttggtaacacgggtgccggcaagagctccgtgatcaacgcactcctagacgaagaaagacttctacctaccaactgtctgcgggcatgtactgcgtctccaactgagatctcattcaactattcagatagccctcaagagctctaccgtgccgagatcgagtttatctctgctggagattggatcagagaactcgacgttctcttcacggatcttttggactccaacggcgaagtttctcgcgatgtcactaacatggacagtgatgctggtgttgcatacgccaagatgaaagctgtataccctcagatgactcgagagatgattgcacgagctagtccgcgcgacctggctctgcagccttctgtaagggcaattctgggcactgtcaaaactatgaaagaacgaacctccaaagaactttaccgacgcatgcaacactacgttgactcaaaggagaagtcgactggtcctgtcgaacgcagaaagaaagtgggcgtcgagatggaattctggccgctgatcaaggttgttcgcatctatacaaaggcggacgcactctccactggggccgtaattgttgatctgcctggcgtccaagactcgaatgctgcaagagctgcagtagccgccaattacatgaggacctgcactggcctttggatctgcgccccaatcaccagagcagttgatgacaagacggccaagacccttctgggtgattctttcaaaagacagctgaaatacgacggcatttactccagtgtgagtttcatctgctctaagacggacgatatttctattacagaggctgcagatagtctcggtcttgatgaagacatttccgagtcttgggccgagtccgaagatctcggagaacggaaggagtcattacagtacaagattaaggatctgaaaggtgctaaggccctgttggctgaacagctggatgactgcgaaaccgcgaccgagcagtgggaagatcttcaatcacggtttagacagggcgatacggtcttcgcgccctcggcgggcggcaaaaagcgcaagagaggtggacggccttctggaagccgaaagaacctcgcatcctcagatttagacgatgagtgggaaccatctgactccgacttgagtgataaggaaaactcacagccagaggggactcgagaaccggttacggagggtgacatcgagtcgaagctgacgtctcttcgatctcggcgaaaggagatccgtgaagagagacgttccctagactcccagattggtgaagtgcgcgacgagatcgcccgcgtaaagaacaagcgagacactattcttgcgaaagttaaggctacttgcatcgctggtcgcaacaactattcacgtgaagctattaagcttgattttgcctcgggcatcaaagagctcgaccaagaaaatgccatagacgagggggatgaaagtttcgatcccgaccaagacattcgcgactacgatgctgttgcccgcagtcttcctgtattttgtgtcagcgctcgagcatatcagaaactttgtggacgactcgtgaaggacaactttcagagccaaggattctcagatgtggcagccacagagatcccacaattgcaacagcacgccaaaaaactgaccgaagctagtcgcgcgcacttctgtcgtgacttcctcaacaatctatcacagttgattaactcgatgaagctctggtccactactggagccacgaaatcctatctgactggggttgagaaagacggggaagaaaagcaactgaaaacagctcttgctaacctggagaaggaaattgactcgtcaatcgaccaggccgtggtcctcgtcgagaagacgttggaggagcaggtttacaagaaatggaacgcgtcaatgccaacggcaattcaagccgcaactgcaacttcgactgaatggtctggcccaagacagctaggcgggttacatttcatgacgtatagggcgactgttcggcgtgatggtgtgtatagtggtgcgtccgggcctcacgatttcaatcaggaactttttgatcccatttcgaaatctgcagccactgggtgggagcagtgttttcagcgcaagcttccagttattctgcaaaactttgcgaaagaaacggaagccaaattgcaagctttccaccaggctgccaagactcgagctgagcaacgtaatatgaatgttatcggcctcatcacgttatctagtcaattggtcgcgcacacaagaaggctccaggcgttgcccgcagccatccaagcccaagtcacagaacttcagcgcgaggctaaccgagaagctactccggtgatttgtcatatgatgggacctgcttatcaaatttgtgctgctgaatgtggctctggttgctatgcgcgaatgaaaatagccatgtatgaccatgtcgactacgcccgacactacatgttctttcaagcgaccgagacggtaaaagcccgcctcacaggcatttgcaagactgtgcgtagtggaatggttgagacagtcaagatcatactcaagagcatgtttgtcgactacatgcatgttattgttggcaccgaagtggatccttccactgggttgtcttatgatgttctcgaactacgaaagcggctcacagccactcttgccgccggagacaagttattcgcgccagtcttgggcgaggaagctcccgagcctacgaatgagatgacatcagatgatacaatgccctcagatagggtcaaacccgagccgttatcccacaagacttcggcacctgtcttgcctgacggctcgcgcggtgcggagacatccgtgctacgtcgcgctgacggtatgatgcaagcacatattcaggagcaaacctcaactgcaaacgctgctcccgactacgatccttttgcttctagtgaagacgaatttccccacattgaagatataatcaaacgagagaagatgtaa

SEQ ID NO: 2289 - protein, 1126 aa, Muscodor strobelii
  misc_feature: SGI Peptide ID NO. 560390
  misc_feature (72)..(1038): NCBI GI: 116194674 Blast Desc: CHGG_03935 [Chaetomium globosum CBS 148.51] gi|88179848|gb|EAQ87316.1| CHGG_03935 [Chaetomium globosum CBS 148.51]
  misc_feature (74)..(1032): NCBI GI: 85108678 Blast Desc: NCU06980 [Neurospora crassa OR74A] gi|28924230|gb|EAA33384.1| [Neurospora crassa OR74A]
  misc_feature (32)..(1039): NCBI GI: 119473545 Blast Desc: NFIA_000950 [Neosartorya fischeri NRRL 181] gi|119406801|gb|EAW16751.1| NFIA_000950 [Neosartorya fischeri NRRL 181]
  misc_feature (54)..(1125): NCBI GI: 169597729 Blast Desc: SNOG_01652 [Phaeosphaeria nodorum SN15] gi|160707579|gb|EAT91301.2| SNOG_01652 [Phaeosphaeria nodorum SN15]
  misc_feature (75)..(892): NCBI GI: 212535532 Blast Desc: conserved [Penicillium marneffei ATCC 18224] gi|210070321|gb|EEA24411.1| conserved [Penicillium marneffei ATCC 18224]
  misc_feature (30)..(1037): NCBI GI: 39951585 Blast Desc: MGG_01435 [Magnaporthe grisea 70-15] gi|145020731|gb|EDK04860.1| MGG_01435 [Magnaporthe grisea 70-15]
  misc_feature (75)..(711): NCBI GI: 242793394 Blast Desc: conserved [Talaromyces stipitatus ATCC 10500] gi|218718740|gb|EED18160.1| conserved [Talaromyces stipitatus ATCC 10500]
  misc_feature (73)..(996): NCBI GI: 164423142 Blast Desc: NCU09015 [Neurospora crassa OR74A] gi|157069965|gb|EAA28913.2| [Neurospora crassa OR74A]
  misc_feature (74)..(1018): NCBI GI: 225556681 Blast Desc: conserved [Ajellomyces capsulatus G186AR]
  misc_feature (75)..(569): NCBI GI: 189195114 Blast Desc: conserved [Pyrenophora tritici-repentis Pt-1C-BFP] gi|187979774|gb|EDU46400.1| conserved [Pyrenophora tritici-repentis Pt-1C-BFP]
MDPAKVDHDPSPGRVKLEPLEPMHDAPSMSHLAIPHTSEHSNGLENDHASTMNPVPRLGPRQEATDQRLQETDYLERLCNEDTPEVLETGVSVALTLLNQLQDVMQTHDSAESTAWLKSITELRESTNKPARTVVGVVGNTGAGKSSVINALLDEERLLPTNCLRACTASPTEISFNYSDSPQELYRAEIEFISAGDWIRELDVLFTDLLDSNGEVSRDVTNMDSDAGVAYAKMKAVYPQMTREMIARASPRDLALQPSVRAILGTVKTMKERTSKELYRRMQHYVDSKEKSTGPVERRKKVGVEMEFWPLIKVVRIYTKADALSTGAVIVDLPGVQDSNAARAAVAANYMRTCTGLWICAPITRAVDDKTAKTLLGDSFKRQLKYDGIYSSVSFICSKTDDISITEAADSLGLDEDISESWAESEDLGERKESLQYKIKDLKGAKALLAEQLDDCETATEQWEDLQSRFRQGDTVFAPSAGGKKRKRGGRPSGSRKNLASSDLDDEWEPSDSDLSDKENSQPEGTREPVTEGDIESKLTSLRSRRKEIREERRSLDSQIGEVRDEIARVKNKRDTILAKVKATCIAGRNNYSREAIKLDFASGIKELDQENAIDEGDESFDPDQDIRDYDAVARSLPVFCVSARAYQKLCGRLVKDNFQSQGFSDVAATEIPQLQQHAKKLTEASRAHFCRDFLNNLSQLINSMKLWSTTGATKSYLTGVEKDGEEKQLKTALANLEKEIDSSIDQAVVLVEKTLEEQVYKKWNASMPTAIQAATATSTEWSGPRQLGGLHFMTYRATVRRDGVYSGASGPHDFNQELFDPISKSAATGWEQCFQRKLPVILQNFAKETEAKLQAFHQAAKTRAEQRNMNVIGLITLSSQLVAHTRRLQALPAAIQAQVTELQREANREATPVICHMMGPAYQICAAECGSGCYARMKIAMYDHVDYARHYMFFQATETVKARLTGICKTVRSGMVETVKIILKSMFVDYMHVIVGTEVDPSTGLSYDVLELRKRLTATLAAGDKLFAPVLGEEAPEPTNEMTSDDTMPSDRVKPEPLSHKTSAPVLPDGSRGAETSVLRRADGMMQAHIQEQTSTANAAPDYDPFASSEDEFPHIEDIIKREKM

SEQ ID NO: 2290 - DNA, 1768 bp, Muscodor strobelii
  misc_feature: SGI EST ID NO. CUFF.5791.0
  misc_feature: Variant of the nucleotide sequence at SEQ ID NO 2288
tgtggacgactcgtgaaggacaactttcagagccaaggattctcagatgtggcagccacagagatcccacaattgcaacagcacgccaaaaaactgaccgaagctagtcgcgcgcacttctgtcgtgacttcctcaacaatctatcacagttgattaactcgatgaagctctggtccactactggagccacgaaatcctatctgactggggttgagaaagacggggaagaaaagcaactgaaaacagctcttgctaacctggagaaggaaattgactcgtcaatcgaccaggccgtggtcctcgtcgagaagacgttggaggagcaggtttacaagaaatggaacgcgtcaatgccaacggcaattcaagccgcaactgcaacttcgactgaatggtctggcccaagacagctaggcgggttacatttcatgacgtatagggcgactgttcggcgtgatggtgtgtatagtggtgcgtccgggcctcacgatttcaatcaggaactttttgatcccatttcgaaatctgcagccactgggtgggagcagtgttttcagcgcaagcttccagttattctgcaaaactttgcgaaagaaacggaagccaaattgcaagctttccaccaggctgccaagactcgagctgagcaacgtaatatgaatgttatcggcctcatcacgttatctagtcaattggtcgcgcacacaagaaggctccaggcgttgcccgcagccatccaagcccaagtcacagaacttcagcgcgaggctaaccgagaagctactccggtgatttgtcatatgatgggacctgcttatcaaatttgtgctgctgaatgtggctctggttgctatgcgcgaatgaaaatagccatgtatgaccatgtcgactacgcccgacactacatgttctttcaagcgaccgagacggtaaaagcccgcctcacaggcatttgcaagactgtgcgtagtggaatggttgagacagtcaagatcatactcaagagcatgtttgtcgactacatgcatgttattgttggcaccgaagtggatccttccactgggttgtcttatgatgttctcgaactacgaaagcggctcacagccactcttgccgccggagacaagttattcgcgccagtcttgggcgaggaagctcccgagcctacgaatgagatgacatcagatgatacaatgccctcagatagggtcaaacccgagccgttatcccacaagacttcggcacctgtcttgcctgacggctcgcgcggtgcggagacatccgtgctacgtcgcgctgacggtatgatgcaagcacatattcaggagcaaacctcaactgcaaacgctgctcccgactacgatccttttgcttctagtgaagacgaatttccccacattgaagatataatcaaacgagagaagatgtaattgtggacgccaatttgctttgctgattatgttggtctactcttgtcggactttgatgtgcatattgcgatgcgagataccctttcgctttattcttcgatgggtaatctggtgggattaaaaacggcgctactgcaaggctgtgtctggaactgatctagatttccaatccgggcttctgctattctgagggcagtatggatgtatgattgatgaatttctccctaggattgaccttgcttctggctatggcgctgtaaaatagtgatgagtagtgtcaagtgacttgtagaacacgtggcgttgtattatactagggggaaaggagaaatgaaag

SEQ ID NO: 2291 - DNA, 1191 bp, Muscodor strobelii
  misc_feature: SGI cDNA ID NO. 560391
  misc_feature: Encodes the peptide sequence at SEQ ID NO 2292
atgttaccgtcctacgaaatcgcaggtgttgagcgtgttgagttgatgggagacaacggggtctggatacgaaactttgcgccagctggtacaatccctccagccgagctacctgttgcttcgcaagctgctctccatcgtttccggatgctgaaagacctaaggctatacaaaagcaggacctgttccagtatgttaggccacattctgtccgaagccaaaagcctcgagacactacatttcacgtacagatacttgcatacaaacgaagaacctgttgatttgttttacgacgatgccaactacgtccttgagcgaatgacgttgtctgaggctttgtcgatggtatcaaactctctgaaggagttgcgactggaatatgcggcgagtttctatgaaggatatagtgaaataacgccgctcttcccacgtgttacttgcctccccgagtttcgtcacttgacgcatctctccatcaacatgcgtttccttggccaaccccccggcccgtgcgactggtgtgatacaatgagcaatacatatctcttccttcccgagagtctcgagaagcttgaatttgtcgaattttggcatgaaatggaactggccaggcaccaagaatcccccagttgggagagagcatgtatcctctggacccaaagcgtgctattcaaaatactaacaaaagtcgccgacactcgcggtagaaagccgaccagtgcgaacaaactccctaatttgaaggaactcacttttaaggcgactcaaccgttgcacagctttgagccaaaggttgtagcatgcgagctgagcgattcaaacgatccatttgacgagggttctgcctgttacgagctgaagctggctaataacaacaacaacgatactcattacctctttgctttcgacgagtcactaatccagtatctgtggtacaccgaaggcttaaccaacaacaagatgttcagacaccctgaattgagtcgctcaagcttatcaatggacgactggccgcctcccctcatattgaagacgagttatggaattccgatgttgactagaatctttaaagaggttgatgtcaacttttgcttcgtgtggcaggactggtcagaggaagagatagcgttgaaattacagaggtattcatctttcgacgcggacgctgcggggattgaatttccattgtag

SEQ ID NO: 2292 - protein, 396 aa, Muscodor strobelii
  misc_feature: SGI Peptide ID NO. 560391
MLPSYEIAGVERVELMGDNGVWIRNFAPAGTIPPAELPVASQAALHRFRMLKDLRLYKSRTCSSMLGHILSEAKSLETLHFTYRYLHTNEEPVDLFYDDANYVLERMTLSEALSMVSNSLKELRLEYAASFYEGYSEITPLFPRVTCLPEFRHLTHLSINMRFLGQPPGPCDWCDTMSNTYLFLPESLEKLEFVEFWHEMELARHQESPSWERACILWTQSVLFKILTKVADTRGRKPTSANKLPNLKELTFKATQPLHSFEPKVVACELSDSNDPFDEGSACYELKLANNNNNDTHYLFAFDESLIQYLWYTEGLTNNKMFRHPELSRSSLSMDDWPPPLILKTSYGIPMLTRIFKEVDVNFCFVWQDWSEEEIALKLQRYSSFDADAAGIEFPL

SEQ ID NO: 2293 - DNA, 962 bp, Muscodor strobelii
  misc_feature: SGI EST ID NO. CUFF.5802.0
  misc_feature: Variant of the nucleotide sequence at SEQ ID NO 2291
ctattagggaaaatgatagactgacatgtcttcaaacaccagatacttgaggataccttagaattgggaattgaaggagacgacccgctaggactcggagatcctcttcgtaggcttcagagcgtgcgcatccaggcagatccagacagggaagaacaagaccgtcgctatatgttccagcccggtgttgatccagtcatgttaccgtcctacgaaatcgcaggtgttgagcgtgttgagttgatgggagacaacggggtctggatacgaaactttgcgccagctggtacaatccctccagccgagctacctgttgcttcgcaagctgctctccatcgtttccggatgctgaaagacctaaggctatacaaaagcaggacctgttccagtatgttaggccacattctgtccgaagccaaaagcctcgagacactacatttcacgtacagatacttgcatacaaacgaagaacctgttgatttgttttacgacgatgccaactacgtccttgagcgaatgacgttgtctgaggctttgtcgatggtatcaaactctctgaaggagttgcgactggaatatgcggcgagtttctatgaaggatatagtgaaataacgccgctcttcccacgtgttacttgcctccccgagtttcgtcacttgacgcatctctccatcaacatgcgtttccttggccaaccccccggcccgtgcgactggtgtgatacaatgagcaatacatatctcttccttcccgagagtctcgagaagcttgaatttgtcgaattttggcatgaaatggaactggccaggcaccaagaatcccccagttgggagagagcatgtatcctctggacccaaagcgtgctattcaaaatactaacaaaagtcgccgacactcgcggtagaaagccgaccagtgcgaacaaactccctaatttgaaggaactcacttttaaggcgac

SEQ ID NO: 2294 - DNA, 879 bp, Muscodor strobelii
  misc_feature: SGI cDNA ID NO. 560392
  misc_feature: Encodes the peptide sequence at SEQ ID NO 2295
atgtctcaagcattgattgaatcccagatcgcggtcacaagatccccggaccagagtcttcatggattcatcaatagagaagctttcacgacacagccatccgggcgcgccatctttggcggactattactggcacaagctatcgtggctgccggcgaaacagttgcttctgatctatacccatactcgtcgcattcttcgtttctgctcccggttactgtaaaggcagacgagcgagtgctatacaaagtggaagacatctgcgtttatctcgcgacgatatcatttcagcgagcacaaaatgacaagtccggcgagaatcagtgtttgagatattgcgttccaatgcccgagttggacggtcttcgcccagatgatatcgggaaagagctaaacgaacaactgcttgctggttatgccaagcgcaacgaactgtggcaattcacgagcccggatgaagatccctttgattggcgccctttcggatttatccaagcagagcatccttgggaatgcttcatccgcgcattcgcacgttctccacccgtatccacgcgctcgcctgttgtgcatctggctgctcttgcatacatgtctgacgagattctcctcggggtgcctatctttgcgaatccagaccaagtgggagatcagggtgtgaacgtgactatgggcgctaccctcaatcacacgatgacatttcatgatccatcggtcaaggtcgatgattggattgtcgttgagagacagacttcttgtggatttgaaggcagaacattgatccatgagcggatttggagtctggagagtggtcgtcttgttatgtcttgtgtgcaggaagctgttgttcggcttaagtcatcggagagcaagttgtaa

SEQ ID NO: 2295 - protein, 292 aa, Muscodor strobelii
  misc_feature: SGI Peptide ID NO. 560392
  misc_feature (149)..(282): Pfam Id: PF02551 Pfam Desc: Acyl-CoA thioesterase
  misc_feature (175)..(282): Pfam Id: PF02551 Pfam Desc: Acyl-CoA thioesterase
  misc_feature (3)..(292): NCBI GI: 39976215 Blast Desc: MGG_05966 [Magnaporthe grisea 70-15] gi|145011762|gb|EDJ96418.1| MGG_05966 [Magnaporthe grisea 70-15]
  misc_feature (1)..(292): NCBI GI: 146324791 Blast Desc: acyl-CoA thioesterase [Aspergillus fumigatus Af293] gi|129556156|gb|EAL85430.2| acyl-CoA thioesterase, [Aspergillus fumigatus Af293] gi|159123553|gb|EDP48672.1| acyl-CoA fumigatus
  misc_feature (174)..(292): NCBI GI: 255947972 Blast Desc: Pc22g07280 [Penicillium chrysogenum Wisconsin 54-1255] gi|211591770|emb|CAP98016.1| Pc22g07280 [Penicillium chrysogenum Wisconsin 54-1255]
  misc_feature (38)..(284): NCBI GI: 114707017 Blast Desc: acyl-CoA thioesterase II protein [Fulvimarina pelagi HTCC2506] gi|114537567|gb|EAU40692.1| acyl-CoA thioesterase II protein [Fulvimarina pelagi HTCC2506]
  misc_feature (38)..(290): NCBI GI: 227358089 Blast Desc: acyl-CoA thioesterase [Proteus mirabilis ATCC 29906] gi|227161824|gb|EEI46856.1| acyl-CoA thioesterase [Proteus mirabilis ATCC 29906]
  misc_feature (38)..(290): NCBI GI: 197284040 Blast Desc: acyl-CoA thioesterase [Proteus mirabilis HI4320] gi|194681527|emb|CAR40429.1| acyl-CoA thioesterase [Proteus mirabilis HI4320]
  misc_feature (6)..(284): NCBI GI: 90421056 Blast Desc: acyl-coA thioesterase II [Aurantimonas manganoxydans SI85-9A1] gi|90334691|gb|EAS48468.1| acyl-coA thioesterase II [Aurantimonas manganoxydans SI85-9A1]
  misc_feature (44)..(280): NCBI GI: 115402217 Blast Desc: [Aspergillus terreus NIH2624] gi|114189031|gb|EAU30731.1| [Aspergillus terreus NIH2624]
  misc_feature (30)..(290): NCBI GI: 256765893 Blast Desc: acyl-CoA thioesterase [Streptomyces sp. C]
  misc_feature (30)..(284): NCBI GI: 254385723 Blast Desc: acyl-CoA thioesterase [Streptomyces sp. Mg1] gi|194344590|gb|EDX25556.1| acyl-CoA thioesterase [Streptomyces sp. Mg1]
  misc_feature (33)..(292): SWISSPROT Homolog: EC 3.1.2.27 Choloyl-CoA hydrolase
MSQALIESQIAVTRSPDQSLHGFINREAFTTQPSGRAIFGGLLLAQAIVAAGETVASDLYPYSSHSSFLLPVTVKADERVLYKVEDICVYLATISFQRAQNDKSGENQCLRYCVPMPELDGLRPDDIGKELNEQLLAGYAKRNELWQFTSPDEDPFDWRPFGFIQAEHPWECFIRAFARSPPVSTRSPVVHLAALAYMSDEILLGVPIFANPDQVGDQGVNVTMGATLNHTMTFHDPSVKVDDWIVVERQTSCGFEGRTLIHERIWSLESGRLVMSCVQEAVVRLKSSESKL

SEQ ID NO: 2296 - DNA, 1953 bp, Muscodor strobelii
  misc_feature: SGI cDNA ID NO. 560393
  misc_feature: Encodes the peptide sequence at SEQ ID NO 2297
atgcctgctgcttaccacagacacacaactagtaccgggagtgcctcgagtgctggcggcgcagagtcgaccttccaatctcatggcacccagactcaaccagtcccaggcactcatggtcatgtttctcagtggacccagactaccaatggcgcacctagctcaaacaaccgtcttactgccggcttcaaggctgttgacaatgacatgactagtccttactctcgtgatgccacttcgatgtttgaccgcattgatgtatttgatgataaaaaccaacagaaagtccctgctatggcattcttggcgcaggggcagaggaacaacggacccatcccaatccgcaaggtcctgatgttcctctgcctggccttcgtgatcttcggaagcgcctacatcatatataaagatcacgacaaggagatggcgcgcgaggccgagctgttcgacaggtatctgccgcccatcgcccacgcttccgaagatcacaccgagaatgtcaaccaacctgcccatgaccatcaacctggtgcagtgcagcagtcgattaggcccctcaagtcttctgcccccgagtcccccatccagtggctccgcgacaacaccttcctggacatcagtaggttctccacgcagcagcgacagcagctcgttgccacgcgtcccaaggcggccttcattgccctcgtgcgcaactccgaggccgaggagatggtccagagcatcatgcagctcgaggctcgcttcaatggtcgtgccacccaccgctacgactgggtcttcttcaacgacgagcagttcagcgaggagttcaaggcccttgtcgccaacgccaccaagtcgcactgctacttcgagaccatccccaaggagcactggtccatcccccattggattgacacctctcgcttcgatgtcggtcgccagttcatgggaggcatcggtgtcggcaaggcctggctgcagagctaccaccacatgtgtcgctggaatgccggtctgttcgcgctggagaaacgactgatggagtacgactacttttggcgtgtcgagcccggtgttgagttcagctgcgacatcaactatgacgtcttccggttcatgagcgacaacgacctggagtacgggttcaacatggccatcctcgacgacgcccgctcgttcccttcactgtgggaccagaccaagtccttcctcaaggccaaccccgaccagatccacgactcggctgacttcgagtggctgctgcagatggcgaggggcctcagtggagctctgagcgtcgagcttccctcgagagacaacctcgatgtgctggacgcctatgagtacaacaactgccagttctactccaacttcgaagtcggacacctaggcttcttccgtagcgctgagcaccaggccttcttcgaccatctcgacagagcaggagggttctactacgagcgatttggagatgcgcccgtccacaccctcagtgtcggcctgttcatgcccaagaaccacatctggtacttccgcgacattggctatgcccatggtctctgtgagcagtgtcctccgcacgagaacgacgctaccgaggtcgagcagaagctacgtggcgagatcatggagatcgtcagcctggacaaccatcaccgcgactggagagagatgtcgacggacatgatcaagcagaacggcatccccggtctgtcttgcggatgcacagtaagcgccatcgatcgtgacaattccaagctcgtaccgtacgaatccaagcagcagaagcctaaccacccgtgcatcagactattcctcggtgggaagtggcttgcaaagaagcctggctggaattttgaggatgagatcgccgcggggcgtgatggttctggtggctatctgctcgacggtctggagggcaatccgtatctgccagtgcccacgggtgctagtagccatcgccagtga

SEQ ID NO: 2297 - protein, 650 aa, Muscodor strobelii
  misc_feature: SGI Peptide ID NO. 560393
  misc_feature (148)..(516): Pfam Id: PF01793 Pfam Desc: Glycolipid 2-alpha-mannosyltransferase
  misc_feature (221)..(516): Pfam Id: PF01793 Pfam Desc: Glycolipid 2-alpha-mannosyltransferase
  misc_feature (219)..(520): NCBI GI: 121718994 Blast Desc: alpha-1,2-mannosyltransferase (Ktr4), [Aspergillus clavatus NRRL 1] gi|119404455|gb|EAW14831.1| alpha-1,2-mannosyltransferase (Ktr4), [Aspergillus clavatus NRRL
  misc_feature (203)..(520): NCBI GI: 242795460 Blast Desc: conserved [Talaromyces stipitatus ATCC 10500] gi|218719183|gb|EED18603.1| conserved [Talaromyces stipitatus ATCC 10500]
  misc_feature (219)..(520): NCBI GI: 145233499 Blast Desc: An02g09940 [Aspergillus niger] gi|134057053|emb|CAK37862.1| protein product [Aspergillus niger]
  misc_feature (219)..(520): NCBI GI: 238502923 Blast Desc: alpha-1,2-mannosyltransferase (Ktr4), [Aspergillus flavus NRRL3357] gi|220691505|gb|EED47853.1| alpha-1,2-mannosyltransferase (Ktr4), [Aspergillus flavus
  misc_feature (219)..(520): NCBI GI: 169776227 Blast Desc: [Aspergillus oryzae RIB40] gi|83771315|dbj|BAE61447.1| protein product [Aspergillus oryzae]
  misc_feature (208)..(520): NCBI GI: 212536360 Blast Desc: conserved [Penicillium marneffei ATCC 18224] gi|210070735|gb|EEA24825.1| conserved [Penicillium marneffei ATCC 18224]
  misc_feature (221)..(520): NCBI GI: 256730931 Blast Desc: glycosyltransferase family 15 [Nectria haematococca mpVI 77-13-4]
  misc_feature (219)..(520): NCBI GI: 70985124 Blast Desc: alpha-1,2-mannosyltransferase (Ktr4) [Aspergillus fumigatus Af293] gi|66845696|gb|EAL86030.1| alpha-1,2-mannosyltransferase (Ktr4), [Aspergillus fumigatus
  misc_feature (219)..(536): NCBI GI: 238839120 Blast Desc: alpha-1,2 mannosyltransferase KTR1 [Microsporum canis CBS 113480]
  misc_feature (219)..(520): NCBI GI: 156063250 Blast Desc: SS1G_01741 [Sclerotinia sclerotiorum 1980] gi|154697077|gb|EDN96815.1| SS1G_01741 [Sclerotinia sclerotiorum 1980]
MPAAYHRHTTSTGSASSAGGAESTFQSHGTQTQPVPGTHGHVSQWTQTTNGAPSSNNRLTAGFKAVDNDMTSPYSRDATSMFDRIDVFDDKNQQKVPAMAFLAQGQRNNGPIPIRKVLMFLCLAFVIFGSAYIIYKDHDKEMAREAELFDRYLPPIAHASEDHTENVNQPAHDHQPGAVQQSIRPLKSSAPESPIQWLRDNTFLDISRFSTQQRQQLVATRPKAAFIALVRNSEAEEMVQSIMQLEARFNGRATHRYDWVFFNDEQFSEEFKALVANATKSHCYFETIPKEHWSIPHWIDTSRFDVGRQFMGGIGVGKAWLQSYHHMCRWNAGLFALEKRLMEYDYFWRVEPGVEFSCDINYDVFRFMSDNDLEYGFNMAILDDARSFPSLWDQTKSFLKANPDQIHDSADFEWLLQMARGLSGALSVELPSRDNLDVLDAYEYNNCQFYSNFEVGHLGFFRSAEHQAFFDHLDRAGGFYYERFGDAPVHTLSVGLFMPKNHIWYFRDIGYAHGLCEQCPPHENDATEVEQKLRGEIMEIVSLDNHHRDWREMSTDMIKQNGIPGLSCGCTVSAIDRDNSKLVPYESKQQKPNHPCIRLFLGGKWLAKKPGWNFEDEIAAGRDGSGGYLLDGLEGNPYLPVPTGASSHRQ

SEQ ID NO: 2298 - DNA, 2307 bp, Muscodor strobelii
  misc_feature: SGI EST ID NO. CUFF.5857.0
  misc_feature: Variant of the nucleotide sequence at SEQ ID NO 2296
tcaatctgcattttctattttgtgtctacactatatcgcatcaccacgtcctccacccctttccacggcagtgatgcctcatgcgatgcctcatgcctccaagagaacccaacgttaatactactctacacgtattacagacccatcccaatccgcaaggtcctgatgttcctctgcctggccttcgtgatcttcggaagcgcctacatcatatataaagatcacgacaaggagatggcgcgcgaggccgagctgttcgacaggtatctgccgcccatcgcccacgcttccgaagatcacaccgagaatgtcaaccaacctgcccatgaccatcaacctggtgcagtgcagcagtcgattaggcccctcaagtcttctgcccccgagtcccccatccagtggctccgcgacaacaccttcctggacatcagtaggttctccacgcagcagcgacagcagctcgttgccacgcgtcccaaggcggccttcattgccctcgtgcgcaactccgaggccgaggagatggtccagagcatcatgcagctcgaggctcgcttcaatggtcgtgccacccaccgctacgactgggtcttcttcaacgacgagcagttcagcgaggagttcaaggcccttgtcgccaacgccaccaagtcgcactgctacttcgagaccatccccaaggagcactggtccatcccccattggattgacacctctcgcttcgatgtcggtcgccagttcatgggaggcatcggtgtcggcaaggcctggctgcagagctaccaccacatgtgtcgctggaatgccggtctgttcgcgctggagaaacgactgatggagtacgactacttttggcgtgtcgagcccggtgttgagttcagctgcgacatcaactatgacgtcttccggttcatgagcgacaacgacctggagtacgggttcaacatggccatcctcgacgacgcccgctcgttcccttcactgtgggaccagaccaagtccttcctcaaggccaaccccgaccagatccacgactcggctgacttcgagtggctgctgcagatggcgaggggcctcagtggagctctgagcgtcgagcttccctcgagagacaacctcgatgtgctggacgcctatgagtacaacaactgccagttctactccaacttcgaagtcggacacctaggcttcttccgtagcgctgagcaccaggccttcttcgaccatctcgacagagcaggagggttctactacgagcgatttggagatgcgcccgtccacaccctcagtgtcggcctgttcatgcccaagaaccacatctggtacttccgcgacattggctatgcccatggtctctgtgagcagtgtcctccgcacgagaacgacgctaccgaggtcgagcagaagctacgtggcgagatcatggagatcgtcagcctggacaaccatcaccgcgactggagagagatgtcgacggacatgatcaagcagaacggcatccccggtctgtcttgcggatgcacagtaagcgccatcgatcgtgacaattccaagctcgtaccgtacgaatccaagcagcagaagcctaaccacccgtgcatcagactattcctcggtgggaagtggcttgcaaagaagcctggctggaattttgaggatgagatcgccgcggggcgtgatggttctggtggctatctgctcgacggtctggagggcaatccgtatctgccagtgcccacgggtgctagtagccatcgccagtgaggatggggggaggatcgccgagacacagccgcccgcttgtcactgtcttgtgtacctctgtcgtgggaaatggctggacgctgaggataccgggaggacatgagtagacagtggggatacagcattgatcagggtggctggcagtcgaagaccgagtgtacatggccggagagcaagcaagatgtgccctgtacatgtggctcagcaggaggtgggagggagccagatggtgttttggttggctgatgaggggccgaaggtggtacaagccaaccgaatgaggagtgatagtttccccggggggttgtttgtgtggggaagatgttggaccgttgtatctgtttcgcgtctttgtttttcctttgcgatgatttggaggggggttgcgattgtatttacagggaagggagcaatcctatctatagtacagtacaaggacagcaggccctacggtcggaagatacccaggcctaggtagcgagcctaggtaacttcgtagatgctgaacatgaaatgatggtactgatacttgttgacttgact

SEQ ID NO: 2299 - DNA, 3195 bp, Muscodor strobelii
  misc_feature: SGI cDNA ID NO. 560394
  misc_feature: Reduced expression when VOC is produced
  misc_feature: Encodes the peptide sequence at SEQ ID NO 2300
atgcgcatcatcaagccctcgtggctgagccacaaaggcgaacagaaagacttcgaggtctacagctgccacgtctctcccgatggcaagcgcctggcgacggccggtggtgacggccacgtccgcgtctggtccaccgagtccatctacagcgccgacgacccctcgtacacgggcccccgccagctctgccacatgagccaccacctcggcaccatccactcggtccgcttctcccccaacggccgctacctcgcctcgggcgccgacgacaagatcatctgcatctaccagctcgagagcggcccgcccgccatcgtccccttcggcaccaacgagcccccgcccgtcgagaactggaagacgttccggcgcctcatcggccacgacaacgacgtccaggacctcgcctggtcctacgacggctccgtcctcgtcagcgtcggcctcgactccaaggtcgtcgtctggtccggccacacgttcgagaagctcaaggtgctgtccatccaccagagccacgtcaagggcatcaccttcgacccggccaacaagttcttcgccaccgccagcgacgaccgcaccatcaagatcttccgcttcacctccccggcgcccaccgcgactcagcatgacatggttaacaactttcagctcgagaccacgatcaacgcccccttcaagtcctcccccctgaccacctacttccgccgctgctcctggtcccccgacggcaaccacatcgccgccgccaacgccgtcaacgggcccgtcagctccgtcgccatcatcgagcgcagccgctgggactcggacatcaacctcatcggccacgaggggcccaccgaggtctgcatgttctccccgcgcctcttccacacctccaagcccgtcgagaacggcaacggcgccgcagccaacggccagccctcgggcggcgccctcgtcaccgtcatcgcatccgccggccaagacaagacgttgagcatatggaacaccaacacctcccggcccgtggtcatcctacaagatctggcatccaagtctatctctgacctggcctgggccccggacggccagaccctgtatgctgcaagcttggatgggagcattgtcacggctaagttcgacacgggcgagctcggctgggtcgcgaacctcgaagagaccgacaaggcgttgtctaaatatggcgcgtctcggaaagtcatgggcattgccgaggatgtcgatggtctacaactggagaatcacagcaaggaaggcgagaggaaaggagccgagtcgagaatgggcgcattgatgggcgatttccaaccactaccgaaggatgctgcggctgctacaacgccggctacgaatggagtcaaaacgggcaccgctaccggcactgctaccggcactgctacaccgactggtgcaccttctacgaatggacaggcgggatcacccgctgacaaggataaggaaccccctcggccaaccgaggctgaagatgctgctgagaaggccacagctcaacgtgtcaacgccttgaagtcacgtgtgaccatcactaaagatggcaagaaacgagtggcgcccatgctgatctcttcgtctgggacgggacagtcatctctccctcagacgcaactagttggatccagcacatccaaagctgcacagaatgacgcgccccagactgtcttagatctcaccaagccatatgatggcttgccagaaggaggtctggctgctatgctactgggcaataagcgcaaggccatcgcactggagggggaagaggatgatgaacatccaaacaagaggccggctactggatctaggaccatacagcgtaatggcgttgatggcttagagactgctgtgcttgagcctcccaggaacggtgtggtcccaacacccgagtatttgcggccagctgtgctcaatccttctattgccgtttctcaagtccgcctttcagtccccaagatacgatcacacatcttacgtccgcttgagcgtggagtgctcctggaagagacgacacaagaagaggcatcaaaacacgccgaaaacatcattttcgaagctcggaacccaccctcaattcgcgatccgtctcacatcacagctagcaagcgcggcacggtcttatggcaagattacctcccgagggccgtcatccttgtcacgggaagcaagaagttctgggccgccgcttgtgaagacgggtgtctctacacttggactcctgccgggcgtcggatgatcaatgccatggttctcgaggcccagcccgtcattctggagtgccgtgagtggtggctgttatgtattacggccgtcggcatgtgctacgtctggaacattaatacgctctcatcacctcaccctcccgtctccctcgggcccatcctcgaaattgccatcagttcgctccaaccccacggagccatgcccgcgcctggtgtcacctcagcgcacttgaactccaatggtcacatcgtcgttacactaactaacggcgatggctattattattcgccgacgctgtacacttggcagcgtctttcagagtcctggtgggctgtcggtagccaatactggaacagtaatgattcttccgttgggtccttgcagtccacggctgtcggatctacgacgccgaaggacggcagaaatgatgagatcatggtctcggccggcatcatcccgtttctcgagcggcatactacaaatgaattcttgctcaagggacgagcctacaccctacagcgattgatcaaggccctcctttccaaagatgggtttgaggcatttgaatccagtgtctccattgcccatctggagaaccgcatcgccggagccttgcagctaggtgccaaggaagagttccggctctatctactgatgtatgccaagcgcataggtgctgaaggccacaggggaaaagtagaagagctgttgaacagcctcctgggtggcgtattacaagatcagatagatgaaggcgaggacaagggccggggctggaacagcaaagacagtgacatttgtgggtgggacaggaaggaactgctcaaaggggtagtcatgatcctgggcaaataccgggagcttcagcgtctcacggtgcaatatgctcgggtcctggacctcactctcgaggatgacctcgctgacgatgctatggccatcgaaaactga

SEQ ID NO: 2300 - protein, 1064 aa, Muscodor strobelii
  misc_feature: SGI Peptide ID NO. 560394
  misc_feature (162)..(200): Pfam Id: PF00400 Pfam Desc: WD domain, G-beta repeat
  misc_feature (60)..(98): Pfam Id: PF00400 Pfam Desc: WD domain, G-beta repeat
  misc_feature (120)..(158): Pfam Id: PF00400 Pfam Desc: WD domain, G-beta repeat
  misc_feature (7)..(45): Pfam Id: PF00400 Pfam Desc: WD domain, G-beta repeat
  misc_feature (269)..(332): Pfam Id: PF00400 Pfam Desc: WD domain, G-beta repeat
  misc_feature (748)..(988): Pfam Id: PF07569 Pfam Desc: TUP1-like enhancer of split
  misc_feature (504)..(536): Pfam Id: PF09453 Pfam Desc: HIRA B motif
  misc_feature (20)..(45): Pfam Id: PF00400 Pfam Desc: WD domain, G-beta repeat
  misc_feature (1)..(1063): NCBI GI: 261359313 Blast Desc: HIR1 [Verticillium albo-atrum VaMs.102]
  misc_feature (1)..(1063): NCBI GI: 256724954 Blast Desc: NECHADRAFT_91419 [Nectria haematococca mpVI 77-13-4]
  misc_feature (1)..(1064): NCBI GI: 164426709 Blast Desc: NCU04035 [Neurospora crassa OR74A] gi|189031303|sp|Q7RZI0.2|HIR1_NEUCR RecName: Full=Protein hir-1 gi|157071443|gb|EAA28414.2| NCU04035 [Neurospora crassa OR74A]
  misc_feature (1)..(1050): NCBI GI: 116202341 Blast Desc: CHGG_09055 [Chaetomium globosum CBS 148.51] gi|121778698|sp|Q2GSJ9.1|HIR1_CHAGB RecName: Full=Protein HIR1 gi|88177573|gb|EAQ85041.1| CHGG_09055 [Chaetomium globosum CBS
  misc_feature (1)..(1064): NCBI GI: 39979226 Blast Desc: related to histone transcription regulator [Neurospora crassa]
  misc_feature (1)..(1063): NCBI GI: 46121933 Blast Desc: FG05344.1 [Gibberella zeae PH-1] gi|121814503|sp|Q4IBR4.1|HIR1_GIBZE RecName: Full=Protein HIR1
  misc_feature (1)..(1063): NCBI GI: 39974527 Blast Desc: MGG_00590 [Magnaporthe grisea 70-15] gi|145018507|gb|EDK02786.1| MGG_00590 [Magnaporthe grisea 70-15]
  misc_feature (1)..(1050): NCBI GI: 171682236 Blast Desc: protein product [Podospora anserina] gi|170941077|emb|CAP66727.1| protein product [Podospora anserina]
  misc_feature (36)..(1050): NCBI GI: 154323876 Blast Desc: BC1G_00337 [Botryotinia fuckeliana B05.10] gi|150842566|gb|EDN17759.1| BC1G_00337 [Botryotinia fuckeliana B05.10]
  misc_feature (1)..(1060): NCBI GI: 121702031 Blast Desc: histone transcription regulator Hir1, [Aspergillus clavatus NRRL 1] gi|119397423|gb|EAW07854.1| histone transcription regulator Hir1, [Aspergillus clavatus NRRL 1]
  misc_feature: Useful for introducing or modulating the production of volatile compounds
MRIIKPSWLSHKGEQKDFEVYSCHVSPDGKRLATAGGDGHVRVWSTESIYSADDPSYTGPRQLCHMSHHLGTIHSVRFSPNGRYLASGADDKIICIYQLESGPPAIVPFGTNEPPPVENWKTFRRLIGHDNDVQDLAWSYDGSVLVSVGLDSKVVVWSGHTFEKLKVLSIHQSHVKGITFDPANKFFATASDDRTIKIFRFTSPAPTATQHDMVNNFQLETTINAPFKSSPLTTYFRRCSWSPDGNHIAAANAVNGPVSSVAIIERSRWDSDINLIGHEGPTEVCMFSPRLFHTSKPVENGNGAAANGQPSGGALVTVIASAGQDKTLSIWNTNTSRPVVILQDLASKSISDLAWAPDGQTLYAASLDGSIVTAKFDTGELGWVANLEETDKALSKYGASRKVMGIAEDVDGLQLENHSKEGERKGAESRMGALMGDFQPLPKDAAAATTPATNGVKTGTATGTATGTATPTGAPSTNGQAGSPADKDKEPPRPTEAEDAAEKATAQRVNALKSRVTITKDGKKRVAPMLISSSGTGQSSLPQTQLVGSSTSKAAQNDAPQTVLDLTKPYDGLPEGGLAAMLLGNKRKAIALEGEEDDEHPNKRPATGSRTIQRNGVDGLETAVLEPPRNGVVPTPEYLRPAVLNPSIAVSQVRLSVPKIRSHILRPLERGVLLEETTQEEASKHAENIIFEARNPPSIRDPSHITASKRGTVLWQDYLPRAVILVTGSKKFWAAACEDGCLYTWTPAGRRMINAMVLEAQPVILECREWWLLCITAVGMCYVWNINTLSSPHPPVSLGPILEIAISSLQPHGAMPAPGVTSAHLNSNGHIVVTLTNGDGYYYSPTLYTWQRLSESWWAVGSQYWNSNDSSVGSLQSTAVGSTTPKDGRNDEIMVSAGIIPFLERHTTNEFLLKGRAYTLQRLIKALLSKDGFEAFESSVSIAHLENRIAGALQLGAKEEFRLYLLMYAKRIGAEGHRGKVEELLNSLLGGVLQDQIDEGEDKGRGWNSKDSDICGWDRKELLKGVVMILGKYRELQRLTVQYARVLDLTLEDDLADDAMAIEN

SEQ ID NO: 2301 - DNA, 4946 bp, Muscodor strobelii
  misc_feature: SGI EST ID NO. CUFF.5863.0
  misc_feature: Variant of the nucleotide sequence at SEQ ID NO 2299
cggccgcgtcgcgcgacgggctacgggcgcaattattgattaattgatgaacgaattgatcccatcggattgcatcgtgcgcattgatgattccctcgctgcccagggcgcgcatcaccacttcacattaataatagatgctagattcaacatcattgtcacactgttcactttcatagctcccacatcattttactgtcttcatcggctctccttccctccctttcccgtgtcgacatgcgaacggcgagcccagctttgacgtcgtcacgatgcgcatcatcaagccctcgtggctgagccacaaaggcgaacagaaagacttcgaggtctacagctgccacgtctctcccgatggcaagcgcctggcgacggccggtggtgacggccacgtccgcgtctggtccaccgagtccatctacagcgccgacgacccctcgtacacgggcccccgccagctctgccacatgagccaccacctcggcaccatccactcggtccgcttctcccccaacggccgctacctcgcctcgggcgccgacgacaagatcatctgcatctaccagctcgagagcggcccgcccgccatcgtccccttcggcaccaacgagcccccgcccgtcgagaactggaagacgttccggcgcctcatcggccacgacaacgacgtccaggacctcgcctggtcctacgacggctccgtcctcgtcagcgtcggcctcgactccaaggtcgtcgtctggtccggccacacgttcgagaagctcaaggtgctgtccatccaccagagccacgtcaagggcatcaccttcgacccggccaacaagttcttcgccaccgccagcgacgaccgcaccatcaagatcttccgcttcacctccccggcgcccaccgcgactcagcatgacatggttaacaactttcagctcgagaccacgatcaacgcccccttcaagtcctcccccctgaccacctacttccgccgctgctcctggtcccccgacggcaaccacatcgccgccgccaacgccgtcaacgggcccgtcagctccgtcgccatcatcgagcgcagccgctgggactcggacatcaacctcatcggccacgaggggcccaccgaggtctgcatgttctccccgcgcctcttccacacctccaagcccgtcgagaacggcaacggcgccgcagccaacggccagccctcgggcggcgccctcgtcaccgtcatcgcatccgccggccaagacaagacgttgagcatatggaacaccaacacctcccggcccgtggtcatcctacaagatctggcatccaagtctatctctgacctggcctgggccccggacggccagaccctgtatgctgcaagcttggatgggagcattgtcacggctaagttcgacacgggcgagctcggctgggtcgcgaacctcgaagagaccgacaaggcgttgtctaaatatggcgcgtctcggaaagtcatgggcattgccgaggatgtcgatggtctacaactggagaatcacagcaaggaaggcgagaggaaaggagccgagtcgagaatgggcgcattgatgggcgatttccaaccactaccgaaggatgctgcggctgctacaacgccggctacgaatggagtcaaaacgggcaccgctaccggcactgctaccggcactgctacaccgactggtgcaccttctacgaatggacaggcgggatcacccgctgacaaggataaggaaccccctcggccaaccgaggctgaagatgctgctgagaaggccacagctcaacgtgtcaacgccttgaagtcacgtgtgaccatcactaaagatggcaagaaacgagtggcgcccatgctgatctcttcgtctgggacgggacagtcatctctccctcagacgcaactagttggatccagcacatccaaagctgcacagaatgacgcgccccagactgtcttagatctcaccaagccatatgatggcttgccagaaggaggtctggctgctatgctactgggcaataagcgcaaggccatcgcactggagggggaagaggatgatgaacatccaaacaagaggccggctactggatctaggaccatacagcgtaatggcgttgatggcttagagactgctgtgcttgagcctcccaggaacggtgtggtcccaacacccgagtatttgcggccagctgtgctcaatccttctattgccgtttctcaagtccgcctttcagtccccaagatacgatcacacatcttacgtccgcttgagcgtggagtgctcctggaagagacgacacaagaagaggcatcaaaacacgccgaaaacatcattttcgaagctcggaacccaccctcaattcgcgatccgtctcacatcacagctagcaagcgcggcacggtcttatggcaagattacctcccgagggccgtcatccttgtcacgggaagcaagaagttctgggccgccgcttgtgaagacgggtgtctctacacttggactcctgccgggcgtcggatgatcaatgccatggttctcgaggcccagcccgtcattctggagtgccgtgagtggtggctgttatgtattacggccgtcggcatgtgctacgtctggaacattaatacgctctcatcacctcaccctcccgtctccctcgggcccatcctcgaaattgccatcagttcgctccaaccccacggagccatgcccgcgcctggtgtcacctcagcgcacttgaactccaatggtcacatcgtcgttacactaactaacggcgatggctattattattcgccgacgctgtacacttggcagcgtctttcagagtcctggtgggctgtcggtagccaatactggaacagtaatgattcttccgttgggtccttgcagtccacggctgtcggatctacgacgccgaaggacggcagaaatgatgagatcatggtctcggccggcatcatcccgtttctcgagcggcatactacaaatgaattcttgctcaagggacgagcctacaccctacagcgattgatcaaggccctcctttccaaagatgggtttgaggcatttgaatccagtgtctccattgcccatctggagaaccgcatcgccggagccttgcagctaggtgccaaggaagagttccggctctatctactgatgtatgccaagcgcataggtgctgaaggccacaggggaaaagtagaagagctgttgaacagcctcctgggtggcgtattacaagatcagatagatgaaggcgaggacaagggccggggctggaacagcaaagacagtgacatttgtgggtgggacaggaaggaactgctcaaaggggtagtcatgatcctgggcaaataccgggagcttcagcgtctcacggtgcaatatgctcgggtcctggacctcactctcgaggatgacctcgctgacgatgctatggccatcgaaaactgagaatgattgtgattcaggcgttcagggacttggggctttttcttgcattcacttactcggtgacatggctcatgggacggtgacaaagggggtcagatcttgtgtatttacggtccgtccactgacatgactgatctgtgacagcagcccagatgaacgatgatatcactgtactatagctggcgtttggtctctgcaggatgtgaggatatgcgggttgggctgccaactcagtgtttgatgattcagtggcaaatcaaaataaagcaagtttggattcccacgctcgtgagactgcgcgctatcggcggcaatggtgattgctaatttcctggagttcagacgatgtggttctaggcggtgagggccgtactgacctgtgatacctggccggccgattgcacgattgcctctacgatgggccactcatggctggactgaggcttcatccccagacggatggtagatcttgcatggcagtgtggcctaggtcctgcagagggcgatctgccgcagcgagaacactccttcatgctgtgtaggcacacgcagcactgacatggccccgtgacgattgtcgtcgttatcgtaccataccttacccttatcagccgagttgtttgttgtgccactgttgagtggaggctctatgccgccagggcatttgctcccggaattggatattgcttcataatcactctgcgtactacagggaactgctctccttgtccaagattggcctgagcttgagcatggctacactatcgactcttcgaggcagacaacaactgctcgtcggtatctctctgtgacttggctcgacgtctattatgtaccaagacccatacgaactgacttgagtcgagaacagtggaatcccgaagttgcgtgatgtaagtgattcagaattgcagctagggattggacggtcgaggtccacgtcaagttgaaagaaagatcacgccagttgatgtcaaagtctgttcatgtacattcaatgattcactggcactgacgcctgagcccccggcacaactcatacccagctgttatgcggctcttagtcggtacatgtcctggccttgtacctgccgtcgctgccgccgctggcagagggatgcaggcggggccacccgtcacccgccgcctcaagcagctttctttggtgttgaggcacgatcccagcagccccaggcaggtcccgacttcctgattgtccgcagttgctcaggtacgacgtgtgaatctgaaacccactaattctgcgaacccgaaccctcaaccttcttgcacgtgtgcgcaagtctacgcagcgctgcatcatctcgcatcaccgctcctcgattcatacacgattctgacttcgcatgcgccatctacaaaagacgttggcgaccgtcgagtctccctccctttttcttttcctccctatcgtgtaccccatactcgtccactcagcctagcatactctcgattttt

SEQ ID NO: 2302 - DNA, 465 bp, Muscodor strobelii
  misc_feature: SGI cDNA ID NO. 560395
  misc_feature: Encodes the peptide sequence at SEQ ID NO 2303
atgggcgtgtgtgcctcctgtctcggtcgccgtcggagcgattccatcgacgaggaggactcgcgtctgctctttgaagacggcaacagcatgccgtacggtacctttggcgaccaccctctcaactcgcaggccgatcctctcgagtcgcagcgcgaggccgaagctctgcagcgcgtcgttgcgcgaacatccaataacctcgtcgacgtattcgagatcacgccccaagactcgcaaagaccacatcctgccatcttctccggccaagatgcgcgcctcacccgataccagaatatactatccagactatccactggcgacgaggcgaccgggggaagtgttgagtggctcatgagcgaggaggacgagggcgaacaacaagatcaaacggtcattatcaaagagacttcgaaagacccacttgtcggtacattcgcggatgctgccgcagctatggcataa

SEQ ID NO: 2303 - protein, 154 aa, Muscodor strobelii
  misc_feature: SGI Peptide ID NO. 560395
  misc_feature (1)..(146): NCBI GI: 261361464 Blast Desc: conserved [Verticillium albo-atrum VaMs.102]
  misc_feature (1)..(153): NCBI GI: 46121955 Blast Desc: FG05355.1 [Gibberella zeae PH-1]
  misc_feature (1)..(153): NCBI GI: 116203045 Blast Desc: CHGG_09407 [Chaetomium globosum CBS 148.51] gi|88177925|gb|EAQ85393.1| CHGG_09407 [Chaetomium globosum CBS 148.51]
  misc_feature (1)..(153): NCBI GI: 156059991 Blast Desc: [Sclerotinia sclerotiorum 1980] gi|154699542|gb|EDN99280.1| [Sclerotinia sclerotiorum 1980]
  misc_feature (3)..(153): NCBI GI: 85091217 Blast Desc: NCU05950 [Neurospora crassa OR74A] gi|28920179|gb|EAA29558.1| [Neurospora crassa OR74A]
  misc_feature (1)..(153): NCBI GI: 171682794 Blast Desc: protein product [Podospora anserina] gi|170941356|emb|CAP67006.1| protein product [Podospora anserina]
  misc_feature (1)..(146): NCBI GI: 145612932 Blast Desc: MGG_08335 [Magnaporthe grisea 70-15] gi|145020017|gb|EDK04245.1| MGG_08335 [Magnaporthe grisea 70-15]
  misc_feature (1)..(82): NCBI GI: 67522611 Blast Desc: AN1762.2 [Aspergillus nidulans FGSC A4] gi|40744892|gb|EAA64048.1| AN1762.2 [Aspergillus nidulans FGSC A4] gi|259487106|tpe|CBF85514.1| TPA: conserved [Aspergillus FGSC
  misc_feature (1)..(108): NCBI GI: 121699549 Blast Desc: conserved [Aspergillus clavatus NRRL 1] gi|119396198|gb|EAW06630.1| conserved [Aspergillus clavatus NRRL 1]
  misc_feature (1)..(108): NCBI GI: 70991909 Blast Desc: conserved [Aspergillus fumigatus Af293] gi|66848436|gb|EAL88765.1| conserved [Aspergillus fumigatus Af293]
MGVCASCLGRRRSDSIDEEDSRLLFEDGNSMPYGTFGDHPLNSQADPLESQREAEALQRVVARTSNNLVDVFEITPQDSQRPHPAIFSGQDARLTRYQNILSRLSTGDEATGGSVEWLMSEEDEGEQQDQTVIIKETSKDPLVGTFADAAAAMA

SEQ ID NO: 2304 - DNA, 996 bp, Muscodor strobelii
  misc_feature: SGI cDNA ID NO. 560396
  misc_feature: Encodes the peptide sequence at SEQ ID NO 2305
atggcagagttcagttatcagtcggctccgccgtctgctcccgaaaatagccccgtcacagtacatgagcagaaccatgggccggccccattcacgaccaccaggaccacaattgatgcccaaccccgaatcggtattcctacagcaatcacgacacatttagaaacggacaaatatgagaataacattatcacttctagcctgctaccggggaatacggcgacagctgaccttgccctagctgatgtgacttccccaaatagtattgttgccttgctatcaagtagtgagtctccaagagccagacagcctaatacgagggatatgctgcaggatgtattgaagaatacatcatcatcatcatcatcatcatcgttgtactggggatgggacagagtcaatcttgactgtctgccgaacgaagtccttatgcatatacttggattcctcgacgtgtccgatcttctggctacatcgagactgatagaaatacagatcaatcatcactttcggacactctcagttgcgccaattctgcacacctatcggctccaacgcgctcgtttcctactcccaccactgctcacctcgccctctcgccccacactcgctgagctcatcgcgcggcacatcttcctgacgaagacgacacagatctcaagacgtctagctcgtagtcttgtctcaatccgtctctcacggtgtctaccacagcgaccgtctgccgaaacactagtgcaacgtggtgtgctgccgccggagtgtgtaccgggctgctgtggctgtgcgcctattgctcccgctctcgtcgcgaaacggagagcagttgagaaggagaagctgaaagatggactgagacgttgggttggcggtgtgtggaggggcgaggtgagggagaggagcgagggtgtgaggaagtgggaggaacgcgctggtgttggacgggtgtggaggcttagaaggttttgggaacgcgttgggagagagagtgggtga

SEQ ID NO: 2305 - protein, 331 aa, Muscodor strobelii
  misc_feature: SGI Peptide ID NO. 560396
  misc_feature (133)..(161): Pfam Id: PF00646 Pfam Desc: F-box domain
  misc_feature (135)..(312): NCBI GI: 256724945 Blast Desc: NECHADRAFT_91410 [Nectria haematococca mpVI 77-13-4]
  misc_feature (165)..(331): NCBI GI: 171682790 Blast Desc: protein product [Podospora anserina] gi|170941354|emb|CAP67004.1| protein product [Podospora anserina]
  misc_feature (182)..(331): NCBI GI: 145612924 Blast Desc: MGG_08339 [Magnaporthe grisea 70-15] gi|145020013|gb|EDK04241.1| MGG_08339 [Magnaporthe grisea 70-15]
  misc_feature (134)..(303): NCBI GI: 46121961 Blast Desc: FG05358.1 [Gibberella zeae PH-1]
  misc_feature (207)..(330): NCBI GI: 154311558 Blast Desc: BC1G_06238 [Botryotinia fuckeliana B05.10] gi|150850749|gb|EDN25942.1| BC1G_06238 [Botryotinia fuckeliana B05.10]
  misc_feature (236)..(330): NCBI GI: 156059999 Blast Desc: SS1G_02136 [Sclerotinia sclerotiorum 1980] gi|154699546|gb|EDN99284.1| SS1G_02136 [Sclerotinia sclerotiorum 1980]
MAEFSYQSAPPSAPENSPVTVHEQNHGPAPFTTTRTTIDAQPRIGIPTAITTHLETDKYENNIITSSLLPGNTATADLALADVTSPNSIVALLSSSESPRARQPNTRDMLQDVLKNTSSSSSSSSLYWGWDRVNLDCLPNEVLMHILGFLDVSDLLATSRLIEIQINHHFRTLSVAPILHTYRLQRARFLLPPLLTSPSRPTLAELIARHIFLTKTTQISRRLARSLVSIRLSRCLPQRPSAETLVQRGVLPPECVPGCCGCAPIAPALVAKRRAVEKEKLKDGLRRWVGGVWRGEVRERSEGVRKWEERAGVGRVWRLRRFWERVGRESG

SEQ ID NO: 2306 - DNA, 2596 bp, Muscodor strobelii
  misc_feature: SGI EST ID NO. CUFF.6022.0
  misc_feature: Variant of the nucleotide sequence at SEQ ID NO 2304
tgacaactgaccactgtccctaatattcctcagccatcattgtgaatctctgcccatttgcttgtagcattggcgccacgggttgaattagatttacaactttgagacatcttgcggagtcgtctctgcctgccttcccttggctgctgaagccaatttcgatgtcgatatcgcacccttcgcgagcgcatgctatatttattacctacctaggtacatcgctgctcacatcctgattgaccgacctctataagctctgcatatttttgtcttgctctgatcgccaatcgggaattagactgagacagagctgcagaatcaacatagttctcgaaaggctccatgacttcgtgatcagcttgtgtcgtattccacggaggtggtctcttagatgcttcgtctctgacacttcaacctggcccccctcgctgcgcttgcagacttgattgaaagcctattacaacaactaggattctatttgattgctgccattgatacgtaacaagtttacctgcacccgaacatatttgattcactgggattggtcttgggtcgtcaaatccagcgccttgcagtttcgcacgtcgaatcaagaggcccccgccgggacgcctggacgcctcgcaaatcctggtcagtccgggcattaacgaattgccctatctcttaagatacagccttattgctgaatggtttcatcctattgctggttaatccggtgttcaccaggcgcgagctcgactactacatttggaacattctacatgagagcatctacgccctacatcccttggcgttgattcacccccgttcgcaaatcgtcactcagcccccaagtgccattacaggcattcggctgcctcgtccgctagaagctctagaacatcgtgatactctagctctagagagcagggcccctgaaacggaggtctgccaatccagtcatacaccgtcatcatagtgctcttgaccactcggggagcacggatcaccatagtcttgcgtgaagcctgacaatcccttaccatatcctcttccacacctgcaaactggccactcgttttcgggctcgcatagacggcttgattcgcaacgcaagggttgataagcctgaacactctgcagcacaccaatacttcagtatcaatccagggtcccactccaccagatctcgacactccctacgaccctggagccaaatttggatctcaacgggcggaacacgcaatacctgtcgctgatctagccttgtcatctgtgatattggcggttaactcgcatgctgcttatttacgaacatggcagagttcagttatcagtcggctccgccgtctgctcccgaaaatagccccgtcacagtacatgagcagaaccatgggccggccccattcacgaccaccaggaccacaattgatgcccaaccccgaatcggtattcctacagcaatcacgacacatttagaaacggacaaatatgagaataacattatcacttctagcctgctaccggggaatacggcgacagctgaccttgccctagctgatgtgacttccccaaatagtattgttgccttgctatcaagtagtgagtctccaagagccagacagcctaatacgagggatatgctgcaggatgtattgaagaatacatcatcatcatcatcatcatcatcgttgtactggggatgggacagagtcaatcttgactgtctgccgaacgaagtccttatgcatatacttggattcctcgacgtgtccgatcttctggctacatcgagaatcaatcatcactttcggacactctcagttgcgccaattctgcacacctatcggctccaacgcgctcgtttcctactcccaccactgctcacctcgccctctcgccccacactcgctgagctcatcgcgcggcacatcttcctgacgaagacgacacagatctcaagacgtctagctcgtagtcttgtctcaatccgtctctcacggtgtctaccacagcgaccgtctgccgaaacactagtgcaacgtggtgtgctgccgccggagtgtgtaccgggctgctgtggctgtgcgcctattgctcccgctctcgtcgcgaaacggagagcagttgagaaggagaagctgaaagatggactgagacgttgggttggcggtgtgtggaggggcgaggtgagggagaggagcgagggtgtgaggaagtgggaggaacgcgctggtgttggacgggtgtggaggcttagaaggttttgggaacgcgttgggagagagagtgggtgagcgggatgaaatgcgatgattgcaactgtatctgaggtgagtggtgttgcttgcggatgtcgcgtgattgtatgattgctgcgcgagttattatttcctgctcttgttttccttctctcatgtcttacgatctgagtgtattagcttgtataagatgtatagcatatggcgagcgactgatgaaggaagtgttgaatttgtccatggtcggcgtttgaagggtccattcatattgacttatctgatgtactcatacacatacacggtcatctcacatacaatctgaatatggattcgatgagttctgtatagtattt

SEQ ID NO: 2307 - DNA, 1077 bp, Muscodor strobelii
  misc_feature: SGI cDNA ID NO. 560397
  misc_feature: Reduced expression when VOC is produced
  misc_feature: Encodes the peptide sequence at SEQ ID NO 2308
atggcagacgcccgcgccctgctccgcgcccaccgcgccgagaacaggataaaacacccccatgccgcctactcggacgccgggaagctgctctgcaagctctgccacgaccccatcaagacagagtctctctgggactcacatatccgaagtcagggccacaggcaacggttacaaggactacaacaatcgcagcaaccccaagatgacaccactcagaagcggaaacgctccgacgatggcgacgaggacatgtcagatgtcgaagacaacgacgccccaaagaagagaagcaagatagatgcagtcaagaacgatgccgagagggccagagaaaacacacaaacaccacccgcgcccggcctggtccggagaacatcaggaaccccgatccagggcgtcgagatcgcgataccgtcgcggcccgccactcctctcgccggttccaactccgccgtctccacccccaagatcacctccatgatgcgctcacccctcgtcggttccgatggctcttccaactcgcgcggcgcaacctccaccccaatatccacagaactcctcgccgtccccaccgccaccaagcccccatcagcacctgcagccaagacagacacgtccggcacagtcgacgacgcagaatgggccgctttcgaggccgagatggaggccgagggcgcacacacaaacaccactaccctgcccagcatccgcgacacatacacggacgccaccatctccgcccccgccctcaccgctgcccaagtggctgcgaaatcccaagaagaggaaaatgagcgcaggaaacacgccgcggacgcccagatggccgacgaccgcgaggatgcaacccgagcactcgaggccgagttcgaggagatggaggagctcgaaggcagagtcaggagactgaaggagaggagagaagagctacgaaagggaagcgtcatgaatctgagagcagctgcggagaagaaagagattggcggcaaggagaataacgcagatggagagctggcagaggagagtgacgaggaggacgaggatgagtttgatggctttcggttccgcgtttag

SEQ ID NO: 2308 - protein, 358 aa, Muscodor strobelii
  misc_feature: SGI Peptide ID NO. 560397
  misc_feature (1)..(357): NCBI GI: 171682788 Blast Desc: protein product [Podospora anserina] gi|170941353|emb|CAP67003.1| protein product [Podospora anserina]
  misc_feature (1)..(312): NCBI GI: 116203051 Blast Desc: CHGG_09410 [Chaetomium globosum CBS 148.51] gi|88177928|gb|EAQ85396.1| CHGG_09410 [Chaetomium globosum CBS 148.51]
  misc_feature (1)..(357): NCBI GI: 256724837 Blast Desc: NECHADRAFT_76938 [Nectria haematococca mpVI 77-13-4]
  misc_feature (1)..(357): NCBI GI: 46121963 Blast Desc: FG05359.1 [Gibberella zeae PH-1]
  misc_feature (1)..(318): NCBI GI: 261361466 Blast Desc: conserved [Verticillium albo-atrum VaMs.102]
  misc_feature (1)..(319): NCBI GI: 39946342 Blast Desc: MGG_08340 [Magnaporthe grisea 70-15] gi|145020012|gb|EDK04240.1| MGG_08340 [Magnaporthe grisea 70-15]
  misc_feature (1)..(294): NCBI GI: 85091207 Blast Desc: NCU05945 [Neurospora crassa OR74A] gi|28920174|gb|EAA29553.1| [Neurospora crassa OR74A]
  misc_feature (1)..(357): NCBI GI: 156060011 Blast Desc: SS1G_02142 [Sclerotinia sclerotiorum 1980] gi|154699552|gb|EDN99290.1| SS1G_02142 [Sclerotinia sclerotiorum 1980]
  misc_feature (1)..(312): NCBI GI: 154311548 Blast Desc: BC1G_06233 [Botryotinia fuckeliana B05.10] gi|150850744|gb|EDN25937.1| BC1G_06233 [Botryotinia fuckeliana B05.10]
  misc_feature (192)..(317): NCBI GI: 145244714 Blast Desc: An11g06740 [Aspergillus niger] gi|134079342|emb|CAK96971.1| protein product [Aspergillus niger]
  misc_feature: Useful for introducing or modulating the production of volatile compounds
MADARALLRAHRAENRIKHPHAAYSDAGKLLCKLCHDPIKTESLWDSHIRSQGHRQRLQGLQQSQQPQDDTTQKRKRSDDGDEDMSDVEDNDAPKKRSKIDAVKNDAERARENTQTPPAPGLVRRTSGTPIQGVEIAIPSRPATPLAGSNSAVSTPKITSMMRSPLVGSDGSSNSRGATSTPISTELLAVPTATKPPSAPAAKTDTSGTVDDAEWAAFEAEMEAEGAHTNTTTLPSIRDTYTDATISAPALTAAQVAAKSQEEENERRKHAADAQMADDREDATRALEAEFEEMEELEGRVRRLKERREELRKGSVMNLRAAAEKKEIGGKENNADGELAEESDEEDEDEFDGFRFRV

SEQ ID NO: 2309 - DNA, 1640 bp, Muscodor strobelii
  misc_feature: SGI EST ID NO. CUFF.5853.0
  misc_feature: Variant of the nucleotide sequence at SEQ ID NO 2307
cacgggtccgtaacttcctagcgttttacatcacgatcgtcactgggcaacagccacaattgttgacttttggacactgtcgatcagttcttttcaatcttcaatcttcaatcttcaatcttcaatcagcagcatcaaacaccaccactcaacaatcatcctctccctcatcctcgacatcccgacctcgacctcgccctccatggcagacgcccgcgccctgctccgcgcccaccgcgccgagaacaggataaaacacccccatgccgcctactcggacgccgggaagctgctctgcaagctctgccacgaccccatcaagacagagtctctctgggactcacatatccgaagtcagggccacaggcaacggttacaaggactacaacaatcgcagcaaccccaagatgacaccactcagaagcggaaacgctccgacgatggcgacgaggacatgtcagatgtcgaagacaacgacgccccaaagaagagaagcaagatagatgcagtcaagaacgatgccgagagggccagagaaaacacacaaacaccacccgcgcccggcctggtccggagaacatcaggaaccccgatccagggcgtcgagatcgcgataccgtcgcggcccgccactcctctcgccggttccaactccgccgtctccacccccaagatcacctccatgatgcgctcacccctcgtcggttccgatggctcttccaactcgcgcggcgcaacctccaccccaatatccacagaactcctcgccgtccccaccgccaccaagcccccatcagcacctgcagccaagacagacacgtccggcacagtcgacgacgcagaatgggccgctttcgaggccgagatggaggccgagggcgcacacacaaacaccactaccctgcccagcatccgcgacacatacacggacgccaccatctccgcccccgccctcaccgctgcccaagtggctgcgaaatcccaagaagaggaaaatgagcgcaggaaacacgccgcggacgcccagatggccgacgaccgcgaggatgcaacccgagcactcgaggccgagttcgaggagatggaggagctcgaaggcagagtcaggagactgaaggagaggagagaagagctacgaaagggaagcgtcatgaatctgagagcagctgcggagaagaaagagattggcggcaaggagaataacgcagatggagagctggcagaggagagtgacgaggaggacgaggatgagtttgatggctttcggttccgcgtttaggggccgagggaactggctgcgttgaatatacattagcgttctcattagctctcatgagagcattgtgtccctaaggacgtgtattatcaggtaaatcatggattggaaaagggatggtgcaatgggcgatgagtcgggcacgggggatattgtctccctgaggcatacattcaagcacagcatctgctccaaagtgggagtggaatgatttgctgtcggacaacacagacgggacacttgtacatacacacgcatacttgtctaccgacacctgccaaatgatgatggaagcagtgttgcttccacaatggctactatgatgagcagtccatgattccaagtaacgacatatgatgtgcat

SEQ ID NO: 2310 - DNA, 720 bp, Muscodor strobelii
  misc_feature: SGI cDNA ID NO. 560398
  misc_feature: Encodes the peptide sequence at SEQ ID NO 2311
atgtcggaaaacgagcgacaggcatcttcgacctggcctccgccgcccttcttttggaaatcacacacacccgagaacgtcgcccgcatcgacgagctgcggaaacaagcggccgaagcctccaacatcgacgacccctccaaagtcgttgtccccaatctcccccgcgacctgcgcttcctccagcctcccgccgagccccccaacggcgaatggcgcatctttggtgacacctaccgtctgaaagatgagctgcccaagctagacgacggccagatcaagcgcctattccccaatccagaggagagacaccaggacggcaagcacttcgaccgtgccaccatcctcaagcgtctggccaagtcgtctctgctcaacttcctcgagctggttgcgagactcgccaccaatcccgaatctgccgaggagaagctcacagacatccgcgacatcctcatcaacatgcaccacctcatcaacgagtaccgcccccaccaggcccgcgagtccctcatctccaccatgcaggcccagctcgaccgcacccgcaccgagaccaacgccatccgcgacgccaaggacaaggccgagcgcgtcctcgagggcctgagcagtctaaccttcaccgagcttcccatcgccatcccgaacggtgaggctgatgaggctcatcggtacggcgagtacgagggctcctgggaggtactgtgtgaagagtag

SEQ ID NO: 2311 - protein, 239 aa, Muscodor strobelii
  misc_feature: SGI Peptide ID NO. 560398
  misc_feature (7)..(212): Pfam Id: PF05983 Pfam Desc: MED7 protein
  misc_feature (63)..(178): Pfam Id: PF05983 Pfam Desc: MED7 protein
  misc_feature (1)..(225): NCBI GI: 46121965 Blast Desc: FG05360.1 [Gibberella zeae PH-1]
  misc_feature (9)..(227): NCBI GI: 256724944 Blast Desc: [Nectria haematococca mpVI 77-13-4]
  misc_feature (3)..(206): NCBI GI: 261361467 Blast Desc: mediator of RNA polymerase II transcription subunit 7 [Verticillium albo-atrum VaMs.102]
  misc_feature (1)..(239): NCBI GI: 145612922 Blast Desc: MGG_08341 [Magnaporthe grisea 70-15] gi|145020011|gb|EDK04239.1| MGG_08341 [Magnaporthe grisea 70-15]
  misc_feature (3)..(212): NCBI GI: 171682786 Blast Desc: protein product [Podospora anserina] gi|170941352|emb|CAP67002.1| protein product [Podospora anserina]
  misc_feature (1)..(210): NCBI GI: 154313932 Blast Desc: BC1G_04909 [Botryotinia fuckeliana B05.10] gi|150849055|gb|EDN24248.1| BC1G_04909 [Botryotinia fuckeliana B05.10]
  misc_feature (7)..(211): NCBI GI: 116203053 Blast Desc: CHGG_09411 [Chaetomium globosum CBS 148.51] gi|121778110|sp|Q2GRJ3.1|MED7_CHAGB RecName: Full=Mediator of RNA polymerase II transcription subunit 7; AltName: Full=Mediator 7
  misc_feature (10)..(225): NCBI GI: 119471098 Blast Desc: RNA polymerase II mediator complex protein (Med7), [Neosartorya fischeri NRRL 181] gi|158512660|sp|A1DN59.1|MED7_NEOFI RecName: Full=Mediator of RNA
  misc_feature (4)..(205): NCBI GI: 145244020 Blast Desc: An11g05320 [Aspergillus niger] gi|158512847|sp|A2QWI7.1|MED7_ASPNC RecName: Full=Mediator of RNA polymerase II transcription subunit 7; AltName: Full=Mediator 7
  misc_feature (4)..(205): NCBI GI: 240278028 Blast Desc: mediator complex subunit 7 [Ajellomyces capsulatus H143]
MSENERQASSTWPPPPFFWKSHTPENVARIDELRKQAAEASNIDDPSKVVVPNLPRDLRFLQPPAEPPNGEWRIFGDTYRLKDELPKLDDGQIKRLFPNPEERHQDGKHFDRATILKRLAKSSLLNFLELVARLATNPESAEEKLTDIRDILINMHHLINEYRPHQARESLISTMQAQLDRTRTETNAIRDAKDKAERVLEGLSSLTFTELPIAIPNGEADEAHRYGEYEGSWEVLCEE

SEQ ID NO: 2312 - DNA, 2093 bp, Muscodor strobelii
  misc_feature: SGI EST ID NO. CUFF.5898.0
  misc_feature: Variant of the nucleotide sequence at SEQ ID NO 2310
gggcccttgtctcctcgagagccttccccattccccaacttcagatggccagaatagtgccaagctctcatgttgctggcttttcgcattgcaatacggatgcccattgcatcttcataaatagcccacaatgtcggaaaacgagcgacaggcatcttcgacctggcctccgccgcccttcttttggaaatcacacacacccgagaacgtcgcccgcatcgacgagctgcggaaacaagcggccgaagcctccaacatcgacgacccctccaaagtcgttgtccccaatctcccccgcgacctgcgcttcctccagcctcccgccgagccccccaacggcgaatggcgcatctttggtgacacctaccgtctgaaagatgagctgcccaagctagacgacggccagatcaagcgcctattccccaatccagaggagagacaccaggacggcaagcacttcgaccgtgccaccatcctcaagcgtctggccaagtcgtctctgctcaacttcctcgagctggttgcgagactcgccaccaatcccgaatctgccgaggagaagctcacagacatccgcgacatcctcatcaacatgcaccacctcatcaacgagtaccgcccccaccaggcccgcgagtccctcatctccaccatgcaggcccagctcgaccgcacccgcaccgagaccaacgccatccgcgacgccaaggacaaggccgagcgcgtcctcgagggcctgagcagtctaaccttcaccgagcttcccatcgccatcccgaacggtgaggctgatgaggctcatcggtacggcgagtacgagggctcctgggaggtactgtgtgaagagtaggaacctcacactcccggggcctatggaagtcatatctgtgttcaagagtacttcttccgcggcatggctgtatggggtgttccacggtttggcgttcaggatttgcttacttaatatgataccccaacgagacggagtgcctccaaaacgagaaaggggcagactgggttatggacaggatagagcttgagcactccctaattggaatgtgatattcataccatcttgacgaagcatatgatcttgttgtctcctacgataggcggtgacacagtggtcgcacatgtggtatgtcagtattcctggtagtcaccatcacacctcaatcagaaaattccagaatccagttatttagatacagaacgagttacgaaagatcatgtcactgctatggaaatatctcggccctatttactcccgctgctgaacaaaagccagaacttctaccttgttcccccaaagattatgattcgtaagaaacgaccctccccgacagaaaacctgagtaccaatcgaatcaaattgaattgagttctccattatatcacatatccagaaacacagcttctgaacacctacagagatgcctgcaacaatacttgacgcgaagcgaaaagccggcgcaaaggtgatacgaaaatgcgaagaggtgtgctgcgatgtttgcgcatgttctccgctaccgtgtcccattctctgatcatgctagagaggaaatttaggacgtttctgattggtcgtgtgcggacatcgtggagctgctgtactgctagctagacaggccccatcatgagaattcaggaagggcctggggaatggttgagaggctggagaactacatatatggagatggggttctgatgctcaggacatagctgagttttcttctacactttggatgagccgaataccggagatgattgatatttgactatgcgagagtagaggagagtagaggagagtagataggggaggtgggtgatgggctttgcatgttatcagttgaatacattgtattgtattctcagtgattacgttaggcaggaaagatgttgctgatatcacgtgaggaaatgagggtatggcaaagggtactataatggctttgttttgggcctccagtacactttgtactactggacaaggctgtacacctcgacttgcaaagtgtgatgtgagaaattgtgaagtgcgctgagacggtgcatacactggacgcttaaggctatatgcttgtctgttt

SEQ ID NO: 2313 - DNA, 756 bp, Muscodor strobelii
  misc_feature: SGI cDNA ID NO. 560399
  misc_feature: Encodes the peptide sequence at SEQ ID NO 2314
atgcccctagaactgtacgacgtcgatcctgccgttgactttcccagccttgcgagatgtgtctttgcagcatacgaagaccctgtgcagccattcttccgtgcctggttccccatatttagtccctcgtctcaagctcgggaggcttctctggaggacgctgcgaatcgactgcgagaatggggcgagccggaggggagttattggaagaaagtggtcgacacagacacgggagtgattgccggcgcttctttatggaaggtataccaaaagaacccatttgaagaagagaggcggtttgaggctatgtggtggccagaggggggtgcaaaactctggactgagaaaatggtggaaggacatgatcggccaagatcagagaaggggcggagaccacatatctatgtctttatactattcactcacccatcctacaagcgtaagggcgttgggctgaagtccctcaattggggtaaaagcaaagccgacgaactgggcttggagattttcctcgatgctacatctgaaggtattccgttgtatgaaaataacgggttccagattgtagaaagaaataaagttgtgccaagtatagaagaagataagaaagatgatgcgtggagagagattgagcagaggattggtgccgtggattttgcactcatgtggagacctgcgtacggcaaacaagaaaagagcgagaagggtgaggatgtgtatccttggataagggagaccgatacgaagccgttgtga

SEQ ID NO: 2314 - protein, 251 aa, Muscodor strobelii
  misc_feature: SGI Peptide ID NO. 560399
  misc_feature (72)..(187): Pfam Id: PF00583 Pfam Desc: Acetyltransferase (GNAT) family
  misc_feature (1)..(239): NCBI GI: 156055888 Blast Desc: SS1G_05296 [Sclerotinia sclerotiorum 1980] gi|154703080|gb|EDO02819.1| SS1G_05296 [Sclerotinia sclerotiorum 1980]
  misc_feature (1)..(224): NCBI GI: 154302378 Blast Desc: BC1G_09973 [Botryotinia fuckeliana B05.10] gi|150855461|gb|EDN30653.1| BC1G_09973 [Botryotinia fuckeliana B05.10]
  misc_feature (1)..(242): NCBI GI: 256720567 Blast Desc: NECHADRAFT_55801 [Nectria haematococca mpVI 77-13-4]
  misc_feature (1)..(242): NCBI GI: 256728132 Blast Desc: NECHADRAFT_102153 [Nectria haematococca mpVI 77-13-4]
  misc_feature (1)..(224): NCBI GI: 154298180 Blast Desc: BC1G_12055 [Botryotinia fuckeliana B05.10] gi|150858241|gb|EDN33433.1| BC1G_12055 [Botryotinia fuckeliana B05.10]
  misc_feature (13)..(247): NCBI GI: 242796234 Blast Desc: conserved [Talaromyces stipitatus ATCC 10500] gi|218719344|gb|EED18764.1| conserved [Talaromyces stipitatus ATCC 10500]
  misc_feature (1)..(242): NCBI GI: 240108921 Blast Desc: GNAT family acetyltransferase, [Coccidioides posadasii C735 delta SOWgp]
  misc_feature (13)..(244): NCBI GI: 212531443 Blast Desc: GNAT family acetyltransferase, [Penicillium marneffei ATCC 18224] gi|210071242|gb|EEA25331.1| GNAT family acetyltransferase, [Penicillium marneffei ATCC 18224]
  misc_feature (12)..(228): NCBI GI: 238839173 Blast Desc: conserved [Microsporum canis CBS 113480]
  misc_feature (13)..(234): NCBI GI: 119499411 Blast Desc: GNAT family acetyltransferase, [Neosartorya fischeri NRRL 181] gi|119414627|gb|EAW24566.1| GNAT family acetyltransferase, [Neosartorya fischeri NRRL 181]
MPLELYDVDPAVDFPSLARCVFAAYEDPVQPFFRAWFPIFSPSSQAREASLEDAANRLREWGEPEGSYWKKVVDTDTGVIAGASLWKVYQKNPFEEERRFEAMWWPEGGAKLWTEKMVEGHDRPRSEKGRRPHIYVFILFTHPSYKRKGVGLKSLNWGKSKADELGLEIFLDATSEGIPLYENNGFQIVERNKVVPSIEEDKKDDAWREIEQRIGAVDFALMWRPAYGKQEKSEKGEDVYPWIRETDTKPL

SEQ ID NO: 2315 - DNA, 1329 bp, Muscodor strobelii
  misc_feature: SGI cDNA ID NO. 560400
  misc_feature: Encodes the peptide sequence at SEQ ID NO 2316
atgtcgaacaccgcagagtcgtcatccaccacagaagccccagcgatggctagcgaaagcacagagaagatagcgctgtcgccattacaagcaacgccagcaacgcccgcgacaccagcaacaacaagtgcacccccgcctcccaatggcggattggtagcttggctgcaggtgctggggagttggtgtttatctttcaactgctggggcattgtgaacacatatggcgaattccagacctactatctaacccagctgcctaaaacacaatccgagctggcatggattggctcgctccagggctttcttctcctcttcgtcggcggcataacgggaccgctgttcgaccggggctacctgcggaccttactcctcgtcggctccctctccatggttgtcggcgcaatgctcttgagtctgagcacagagtactaccagattatcctgacacagggccttttaatggggctaggcggcggctgtctcttcgtgccgagcgtatccatcctgccgacatactttgcttccaagcgcacagcatttagcataggaattgccggtagtggcacagggtttggtggtattatttaccctctcgtcttccgcaggcttctcaacaccttggggtttccctgggcggtgagggtcgtcggcttcatcatgctcgccacactggccattcctctcgtcgtcttgcgtcagcgcgtaaagccgtccaaggcgcgcagcttgttcgatacctctgcgtggagagaacccccatacgtcctcttctctgcggggacgttcttcgggttcatcggcatgtttctgcccctgtactacgtcgagtcctttgcgatagagaaaggaataatgagtcccgcgatggctgccaatttgatccccattctcaatgctgggtcgactgttggtcgtatagttccaaatgtgatatgtagcagtaagactggcccactgaccatgtacgtgccggtctgccttgcactatcagttctgtcttatggctggattggagtccacaacagcccgggccttatcgtcttcaccgttctctacgggttcttctcgggtgcattcttgactctcccgttcagtagcctagcgactttgagtccccatcttggcgtgataggtgtgcgcgtgggaatgtgcgccgcagtttctgccattggcttgctgatcggaactccaatcggaggagcattaacggccaggggctggactgctttgcaagcctttggtgggagcacgcttctactgagcaccgtcttccttgcaggctcaagaatagccaaagttgggtattcaattagaaagagggggtaa

SEQ ID NO: 2316 - protein, 442 aa, Muscodor strobelii
  misc_feature: SGI Peptide ID NO. 560400
  misc_feature (60)..(393): Pfam Id: PF07690 Pfam Desc: Major Facilitator Superfamily
  misc_feature (7)..(433): NCBI GI: 116208398 Blast Desc: CHGG_03492 [Chaetomium globosum CBS 148.51] gi|88184089|gb|EAQ91557.1| CHGG_03492 [Chaetomium globosum CBS 148.51]
  misc_feature (1)..(441): NCBI GI: 67524577 Blast Desc: AN2746.2 [Aspergillus nidulans FGSC A4] gi|40743998|gb|EAA63180.1| AN2746.2 [Aspergillus nidulans FGSC A4] gi|259486340|tpe|CBF84100.1| TPA: MFS monocarboxylate FGSC
  misc_feature (8)..(440): NCBI GI: 156048833 Blast Desc: SS1G_08123 [Sclerotinia sclerotiorum 1980] gi|154692522|gb|EDN92260.1| SS1G_08123 [Sclerotinia sclerotiorum 1980]
  misc_feature (1)..(441): NCBI GI: 145229117 Blast Desc: An01g04400 [Aspergillus niger] gi|134054966|emb|CAK36975.1| protein product [Aspergillus niger]
  misc_feature (23)..(441): NCBI GI: 255941146 Blast Desc: Pc16g10320 [Penicillium chrysogenum Wisconsin 54-1255] gi|211585965|emb|CAP93702.1| Pc16g10320 [Penicillium chrysogenum Wisconsin 54-1255]
  misc_feature (27)..(441): NCBI GI: 67902758 Blast Desc: AN8366.2 [Aspergillus nidulans FGSC A4] gi|40747772|gb|EAA66928.1| AN8366.2 [Aspergillus nidulans FGSC A4] gi|259484294|tpe|CBF80392.1| TPA: conserved [Aspergillus FGSC
  misc_feature (20)..(441): NCBI GI: 121702761 Blast Desc: MFS monocarboxylate transporter, [Aspergillus clavatus NRRL 1] gi|119397788|gb|EAW08219.1| MFS monocarboxylate transporter, [Aspergillus clavatus NRRL 1]
  misc_feature (1)..(406): NCBI GI: 119496753 Blast Desc: MFS monocarboxylate transporter, [Neosartorya fischeri NRRL 181] gi|119413312|gb|EAW23253.1| MFS monocarboxylate transporter, [Neosartorya fischeri NRRL 181]
  misc_feature (5)..(403): NCBI GI: 70990834 Blast Desc: MFS monocarboxylate transporter [Aspergillus fumigatus Af293] gi|66847898|gb|EAL88228.1| MFS monocarboxylate transporter, [Aspergillus fumigatus Af293] MFS monocarboxylate
  misc_feature (6)..(403): NCBI GI: 145244925 Blast Desc: An11g07630 [Aspergillus niger] gi|134079425|emb|CAK45957.1| protein product [Aspergillus niger]
MSNTAESSSTTEAPAMASESTEKIALSPLQATPATPATPATTSAPPPPNGGLVAWLQVLGSWCLSFNCWGIVNTYGEFQTYYLTQLPKTQSELAWIGSLQGFLLLFVGGITGPLFDRGYLRTLLLVGSLSMVVGAMLLSLSTEYYQIILTQGLLMGLGGGCLFVPSVSILPTYFASKRTAFSIGIAGSGTGFGGIIYPLVFRRLLNTLGFPWAVRVVGFIMLATLAIPLVVLRQRVKPSKARSLFDTSAWREPPYVLFSAGTFFGFIGMFLPLYYVESFAIEKGIMSPAMAANLIPILNAGSTVGRIVPNVICSSKTGPLTMYVPVCLALSVLSYGWIGVHNSPGLIVFTVLYGFFSGAFLTLPFSSLATLSPHLGVIGVRVGMCAAVSAIGLLIGTPIGGALTARGWTALQAFGGSTLLLSTVFLAGSRIAKVGYSIRKRG

SEQ ID NO: 2317 - DNA, 2105 bp, Muscodor strobelii
  misc_feature: SGI EST ID NO. CUFF.5875.0
  misc_feature: Variant of the nucleotide sequence at SEQ ID NO 2315
taaagagggaaggtaagtagggtatcattccaagaaggagggaagagaaaactcacatagcctcacataggaatacatcctcgaccgtaaataattaaactctttcttctataagactttgaacacacatgctccaagctatatcatacaggcactgacccaacccaattggatagaagcggcgtccccttgggccatgagcctaaaactaacagcatccagcaacgtgcgccatgtcgaacaccgcagagtcgtcatccaccacagaagccccagcgatggctagcgaaagcacagagaagatagcgctgtcgccattacaagcaacgccagcaacgcccgcgacaccagcaacaacaagtgcacccccgcctcccaatggcggattggtagcttggctgcaggtgctggggagttggtgtttatctttcaactgctggggcattgtgaacacatatggcgaattccagacctactatctaacccagctgcctaaaacacaatccgagctggcatggattggctcgctccagggctttcttctcctcttcgtcggcggcataacgggaccgctgttcgaccggggctacctgcggaccttactcctcgtcggctccctctccatggttgtcggcgcaatgctcttgagtctgagcacagagtactaccagattatcctgacacagggccttttaatggggctaggcggcggctgtctcttcgtgccgagcgtatccatcctgccgacatactttgcttccaagcgcacagcatttagcataggaattgccggtagtggcacagggtttggtggtattatttaccctctcgtcttccgcaggcttctcaacaccttggggtttccctgggcggtgagggtcgtcggcttcatcatgctcgccacactggccattcctctcgtcgtcttgcgtcagcgcgtaaagccgtccaaggcgcgcagcttgttcgatacctctgcgtggagagaacccccatacgtcctcttctctgcggggacgttcttcgggttcatcggcatgtttctgcccctgtactacgtcgagtcctttgcgatagagaaaggaataatgagtcccgcgatggctgccaatttgatccccattctcaatgctgggtcgactgttggtcgtatagttccaaattatgtagcagtaagactggcccactgaccatgtacgtgccggtctgccttgcactatcagttctgtcttatggctggattggagtccacaacagcccgggccttatcgtcttcaccgttctctacgggttcttctcgggtgcattcttgactctcccgttcagtagcctagcgactttgagtccccatcttggcgtgataggtgtgcgcgtgggaatgtgcgccgcagtttctgccattggcttgctgatcggaactccaatcggaggagcattaacggccaggggctggactgctttgcaagcctttggtgggagcacgcttctactgagcaccgtcttccttgcaggctcaagaatagccaaagttgggtattcaattagaaagagggggtaagacggttcgaatttgagcggtagtttcttttataatcacgcggactggacttggtgttaaattaaggaggaaactattgaaattcgtcaaattttagtcgaagaggcagattaccgctaaattctcttggaagcccttgttggttgattgttgaccactgccaagtgcgctaagttatcgtcccgaaggacactggtacatttggtattccccattgtatctcaccagacccttggccatatccaatgccatggagtattgtttaatgctagtcatatgaagcaatgcgagtgcgttgcttccctacagcctcaagatttttcaatcgcgtcgcatgtgttcttaagagtagaatatcccatcactacgcctgaagcagcagctggcactctacaacatcttgtccatacacccaatctcacttgctgtgttattatttggcgcgacgagacagacggcgtccgctgtgccactctaacaataagcagtgaacgcggcttacttcaccacgtctgtttgcaactcttaatgtccatgttattacgaa

SEQ ID NO: 2318 - DNA, 636 bp, Muscodor strobelii
  misc_feature: SGI cDNA ID NO. 560401
  misc_feature: Encodes the peptide sequence at SEQ ID NO 2319
atgacgccaaccaagttcacaactcagctcgacgcgtcctcgtatcttgctccaggaggtggcgatctccattacaaaccattgcgcgacaagatagtcagccaggcgcgcgcacaaggctacgatgaggcaactatgatagagcacggagtaacatgggcagatgaccaggatccttggggtcacatcatgaacgccggttatcctcattatgtgacgacgtgtaacattcgactgttcgaaagcttcgaagtgtaccttaaagatagattccaggacttaatgaaagcccgcggtatcggcgttatcgtcaagacaacaacactagatattaagtcgcccgtttcatacccagattcgatcatcgcggctaatatgattagcgaggttcggcccgatcggtatcatgttataactacaatgtggtcgctgaggcagcaagtccgcgtcgcagagtcaaaagcatgggtagtgttttatgactactccgagagaaagcctgcgaacttgatacaggcaggtagtgtttatgcagatcttcatagagctctcgttaagaaagctacaattgcaaatcagcgacgagcagcatggattgaatcgcatcctaaagagcctcgaggtgcgaaactgtga

SEQ ID NO: 2319 - protein, 211 aa, Muscodor strobelii
  misc_feature: SGI Peptide ID NO. 560401
  misc_feature (7)..(210): NCBI GI: 225562457 Blast Desc: conserved [Ajellomyces capsulatus G186AR]
  misc_feature (7)..(210): NCBI GI: 154279214 Blast Desc: [Ajellomyces capsulatus NAm1] gi|150412363|gb|EDN07750.1| [Ajellomyces capsulatus NAm1]
  misc_feature (25)..(211): NCBI GI: 169610930 Blast Desc: SNOG_08574 [Phaeosphaeria nodorum SN15] gi|111062622|gb|EAT83742.1| SNOG_08574 [Phaeosphaeria nodorum SN15]
  misc_feature (40)..(210): NCBI GI: 240281164 Blast Desc: conserved [Ajellomyces capsulatus H143]
  misc_feature (9)..(162): NCBI GI: 58258841 Blast Desc: [Cryptococcus neoformans var. neoformans JEC21] gi|134106859|ref|XP_777971.1| CNBA4400 [Cryptococcus neoformans var. neoformans B-3501A] gi|50260671|gb|EAL23324.1| CNBA4400 var.
  misc_feature (39)..(172): NCBI GI: 54302857 Blast Desc: thioesterase [Photobacterium profundum SS9] gi|46916281|emb|CAG23050.1| thioesterase [Photobacterium profundum SS9]
  misc_feature (39)..(172): NCBI GI: 90413913 Blast Desc: thioesterase [Photobacterium profundum 3TCK] gi|90324975|gb|EAS41490.1| thioesterase [Photobacterium profundum 3TCK]
  misc_feature (45)..(171): NCBI GI: 149908889 Blast Desc: thioesterase [Moritella sp. PE36] gi|149808163|gb|EDM68104.1| thioesterase [Moritella sp. PE36]
  misc_feature (46)..(170): NCBI GI: 114565118 Blast Desc: thioesterase superfamily protein [Shewanella frigidimarina NCIMB 400] gi|114336411|gb|ABI73793.1| thioesterase superfamily protein [Shewanella frigidimarina NCIMB 400]
  misc_feature (48)..(166): NCBI GI: 50083564 Blast Desc: thioesterase [Acinetobacter sp. ADP1] gi|49529540|emb|CAG67252.1| conserved ; thioesterase [Acinetobacter sp. ADP1]
MTPTKFTTQLDASSYLAPGGGDLHYKPLRDKIVSQARAQGYDEATMIEHGVTWADDQDPWGHIMNAGYPHYVTTCNIRLFESFEVYLKDRFQDLMKARGIGVIVKTTTLDIKSPVSYPDSIIAANMISEVRPDRYHVITTMWSLRQQVRVAESKAWVVFYDYSERKPANLIQAGSVYADLHRALVKKATIANQRRAAWIESHPKEPRGAKL

SEQ ID NO: 2320 - DNA, 750 bp, Muscodor strobelii
  misc_feature: SGI cDNA ID NO. 560402
  misc_feature: Encodes the peptide sequence at SEQ ID NO 2321
atgctcggcgtcattcccacactcattcaggatgatcccgagttctcggaattgccgcctcttgttttggtccatgatggaggtggcactaccatcaaatactactacttggatgatttacagcgacatgtctggggcattagcaatgagaagcttgtcgacgatactgcttggcctggcggtatcaatcaaatggcccaggcttacgtggatgtcatccggtccgaaatgccaagaaggcctctaatactcggaggatggtccgtcggcggactcatcgcattagaaatggcgaaaatatccgcagagaatccggacatttccgttcttggcgccatcatgatggacacctactatcccgccgctgacgacagcggcaatagagacacgcccactatcgaatggggcgaagctacatccgaagaatcaaaggcgataactctgaagagcattgcaaactcggccaagttctctaggcaatggggccgagattctcgaagttccttgacgaggacggaaccaccccccgttattcttctccgagcgagtgagagccatgggccgctagatgcaaagcttcgtgaagggaacaacgtccttgggtgggaggcacatcaatctgacttcttcactcatattctagaagtaccgggaaatcattacactttatttgcagatgagaatgtcgatggattgacagaagaactttctcgagcatgtaagatattaggaagcaagagcaatccttga

SEQ ID NO: 2321 - protein, 249 aa, Muscodor strobelii
  misc_feature: SGI Peptide ID NO. 560402
  misc_feature (19)..(240): Pfam Id: PF00975 Pfam Desc: Thioesterase domain
  misc_feature (19)..(131): Pfam Id: PF00975 Pfam Desc: Thioesterase domain
  misc_feature (1)..(243): NCBI GI: 242811736 Blast Desc: conserved [Talaromyces stipitatus ATCC 10500] gi|218714150|gb|EED13573.1| conserved [Talaromyces stipitatus ATCC 10500]
  misc_feature (8)..(243): NCBI GI: 240111652 Blast Desc: Thioesterase domain containing protein [Coccidioides posadasii C735 delta SOWgp]
  misc_feature (1)..(243): NCBI GI: 242774911 Blast Desc: TSTA_088110 [Talaromyces stipitatus ATCC 10500] gi|218722157|gb|EED21575.1| TSTA_088110 [Talaromyces stipitatus ATCC 10500]
  misc_feature (1)..(243): NCBI GI: 212544186 Blast Desc: conserved [Penicillium marneffei ATCC 18224] gi|210065216|gb|EEA19310.1| conserved [Penicillium marneffei ATCC 18224]
  misc_feature (20)..(240): NCBI GI: 171692453 Blast Desc: protein product [Podospora anserina] gi|170946175|emb|CAP72976.1| protein product [Podospora anserina]
  misc_feature (8)..(243): NCBI GI: 258569262 Blast Desc: [Uncinocarpus reesii 1704] gi|237906821|gb|EEP81222.1| [Uncinocarpus reesii 1704]
  misc_feature (20)..(249): NCBI GI: 145257626 Blast Desc: An04g04360 [Aspergillus niger] gi|134058716|emb|CAK38700.1| protein product [Aspergillus niger]
  misc_feature (20)..(241): NCBI GI: 156622745 Blast Desc: thioesterase domain containing protein [Alternaria alternata] gi|261336134|dbj|BAI44766.1| thioesterase domain containing protein [Alternaria alternata] thioesterase domain
  misc_feature (7)..(227): NCBI GI: 238842992 Blast Desc: Amt4 [Microsporum canis CBS 113480]
  misc_feature (20)..(236): NCBI GI: 46110351 Blast Desc: FG02057.1 [Gibberella zeae PH-1]
  misc_feature: Useful for fungicidal and/or biocontrol applications
MLGVIPTLIQDDPEFSELPPLVLVHDGGGTTIKYYYLDDLQRHVWGISNEKLVDDTAWPGGINQMAQAYVDVIRSEMPRRPLILGGWSVGGLIALEMAKISAENPDISVLGAIMMDTYYPAADDSGNRDTPTIEWGEATSEESKAITLKSIANSAKFSRQWGRDSRSSLTRTEPPPVILLRASESHGPLDAKLREGNNVLGWEAHQSDFFTHILEVPGNHYTLFADENVDGLTEELSRACKILGSKSNP

SEQ ID NO: 2322 - DNA, 450 bp, Muscodor strobelii
  misc_feature: SGI EST ID NO. CUFF.5916.0
  misc_feature: Variant of the nucleotide sequence at SEQ ID NO 2320
gagcattgcaaactcggccaagttctctaggcaatggggccgagattctcgaagttccttgacgaggacggaaccaccccccgttattcttctccgagcgagtgagagccatgggccgctagatgcaaagcttcgtgaagggaacaacgtccttgggtgggaggcacatcaatctgacttcttcactcatattctagaagtaccgggaaatcattacactttatttgcagatgagaatgtcgatggattgacagaagaactttctcgagcatgtaagatattaggaagcaagagcaatccttgaacgtgacggcatcggtggaaacgaccacaacattgaacgctatcatgctatgagtgtcatcaaatagtcagtaccttagagcaaccaactacagatacttaaatgagttattaaggagatgcttaactctgcgagccggtttcgcc

SEQ ID NO: 2323 - DNA, 1794 bp, Muscodor strobelii
  misc_feature: SGI cDNA ID NO. 560403
  misc_feature: Encodes the peptide sequence at SEQ ID NO 2324
atgttggccgtcatgaaagctggagcctgcttcatctcgctggacgaaaacgtgccttcagatcgagtcaaatcgattgccttgaaagtcaaggcacgatttatccttactaccaatgcacccactatgaaatacgacaaaatcgggctccgtaccatcatcctcgatcagttctttgtagagaacgagacgcgacaagaagcagcaaaatggatgtcgcagaactgtagtccgtctaatcttgcctacttgatcttcacatctgggagcacaggtgaacccaagggctgcgccatagagcatcaagcattctgttcctatgcgtcagtgtttggccccgccttccgattaggacctgaaagtcgcgtgttgcaatcaacatcgtactcatttgatgtatcattgaaagagatactgctgagtcttatatccggatcatgtgtctgcgtgccgtccgatcacgacatcatgaatgacattagcggagccgtggcaaagttgggcgtcaattatgctaatttcacgccatctgttatctcgaacttggacttaaagactgcgagcaacatcaaaacactcaatcttggcggggaggccttgacagccgatatcattgccaaatgggcaccacgcgtcgacattctgctcggcggttatggccctagcgaagtttgtccaacttcatcggttgtgggtcccctgtccatgaagtcgcatcctagaaacatcggtcacccggctggaaacaagagttggattgttgatccaaccgaccatgaccgactactgcctgtgggagcgattggggagcttgtgctggagagccatgccattggcagggggtatatcggcgacgaggagcggacgcgtcaggtatttattgaaagcccacggtggtgtatgtggtctgagtttcgccatggaagtccaggccccaagcgccgtatgtacaaaaccggggaccttgtcgcaagatgcggcgacggctcgctgatttactgcggtcgcaaggacatgcaggtcaagctaagaggccaacgtatagaacttggtgacattgaaactcatttgaaagctgccatcacagccgagcttgtggtagagcctggtgttccccgcggagggaccgatgaggacaaaatgctcgtcggcttcatctgtctcggaccagaatcgatgtcttcaattgatctatccccagtggacgccaaagttcaaaccaagctacatgccttgctgggacatgctgaggaatatcttgccagcaaggtcgcgcgctatatgctgccctctgcttacctaccgctcaacactcttcctgtcacaacatcgggcaaacgagatcgtcgacagttgcagcggataattgagtccctaagcaagcaggaagtccttgcttggaatggatcattgaagacagagtcagccggtcgcccacctgtcacaaacatggagcgactagttgcagggttgtgggcccagattctcaggatcaacgtcgaagaactgagcttagatgacgacttcgtcaaaagaggtggggattcgctagctgccatgcgacttgcaaaattagcgaaggagtctgggctcaagttgacgtttagggatatttacctccggaaccgagtattaagcaaccaggtcgaggtatgtctcaaacacgctgccagttcggtaagctataagatagcggccaccgcgataagaaagggccgtattgctgagcggcatcaatatacaagcgatagtgatggtcagttgccagtcaacgcttctatgctcgcaatatga

SEQ ID NO: 2324 - protein, 597 aa, Muscodor strobelii
  misc_feature: SGI Peptide ID NO. 560403
  misc_feature (1)..(371): Pfam Id: PF00501 Pfam Desc: AMP-binding enzyme
  misc_feature (486)..(552): Pfam Id: PF00550 Pfam Desc: Phosphopantetheine attachment site
  misc_feature (486)..(539): Pfam Id: PF00550 Pfam Desc: Phosphopantetheine attachment site
  misc_feature (2)..(539): NCBI GI: 189206197 Blast Desc: HC-toxin synthetase [Pyrenophora tritici-repentis Pt-1C-BFP] gi|187975526|gb|EDU42152.1| HC-toxin synthetase [Pyrenophora tritici-repentis Pt-1C-BFP]
  misc_feature (2)..(561): NCBI GI: 242798980 Blast Desc: nonribosomal peptide synthase, [Talaromyces stipitatus ATCC 10500] gi|218716625|gb|EED16046.1| nonribosomal peptide synthase, [Talaromyces stipitatus ATCC 10500]
  misc_feature (1)..(547): NCBI GI: 169611931 Blast Desc: SNOG_09081 [Phaeosphaeria nodorum SN15] gi|160702400|gb|EAT83273.2| SNOG_09081 [Phaeosphaeria nodorum SN15]
  misc_feature (2)..(552): NCBI GI: 116194143 Blast Desc: CHGG_06789 [Chaetomium globosum CBS 148.51] gi|88182702|gb|EAQ90170.1| CHGG_06789 [Chaetomium globosum CBS 148.51]
  misc_feature (1)..(564): NCBI GI: 46110867 Blast Desc: FG02315.1 [Gibberella zeae PH-1]
  misc_feature (1)..(539): NCBI GI: 116194143 Blast Desc: CHGG_06789 [Chaetomium globosum CBS 148.51] gi|88182702|gb|EAQ90170.1| CHGG_06789 [Chaetomium globosum CBS 148.51]
  misc_feature (2)..(539): NCBI GI: 212541344 Blast Desc: nonribosomal peptide synthase, [Penicillium marneffei ATCC 18224] gi|210068126|gb|EEA22218.1| nonribosomal peptide synthase, [Penicillium marneffei ATCC 18224]
  misc_feature (1)..(552): NCBI GI: 256720559 Blast Desc: NECHADRAFT_44426 [Nectria haematococca mpVI 77-13-4]
  misc_feature (1)..(561): NCBI GI: 59876531 Blast Desc: nonribosomal peptide synthetase 1 [Cochliobolus heterostrophus]
  misc_feature (1)..(539): NCBI GI: 189211621 Blast Desc: HC-toxin synthetase [Pyrenophora tritici-repentis Pt-1C-BFP] gi|187979339|gb|EDU45965.1| HC-toxin synthetase [Pyrenophora tritici-repentis Pt-1C-BFP]
  misc_feature (1)..(538): SWISSPROT Homolog: EC 5.1.1.11 Phenylalanine racemase (ATP-hydrolyzing)
MLAVMKAGACFISLDENVPSDRVKSIALKVKARFILTTNAPTMKYDKIGLRTIILDQFFVENETRQEAAKWMSQNCSPSNLAYLIFTSGSTGEPKGCAIEHQAFCSYASVFGPAFRLGPESRVLQSTSYSFDVSLKEILLSLISGSCVCVPSDHDIMNDISGAVAKLGVNYANFTPSVISNLDLKTASNIKTLNLGGEALTADIIAKWAPRVDILLGGYGPSEVCPTSSVVGPLSMKSHPRNIGHPAGNKSWIVDPTDHDRLLPVGAIGELVLESHAIGRGYIGDEERTRQVFIESPRWCMWSEFRHGSPGPKRRMYKTGDLVARCGDGSLIYCGRKDMQVKLRGQRIELGDIETHLKAAITAELVVEPGVPRGGTDEDKMLVGFICLGPESMSSIDLSPVDAKVQTKLHALLGHAEEYLASKVARYMLPSAYLPLNTLPVTTSGKRDRRQLQRIIESLSKQEVLAWNGSLKTESAGRPPVTNMERLVAGLWAQILRINVEELSLDDDFVKRGGDSLAAMRLAKLAKESGLKLTFRDIYLRNRVLSNQVEVCLKHAASSVSYKIAATAIRKGRIAERHQYTSDSDGQLPVNASMLAI

SEQ ID NO: 2325 - DNA, 230 bp, Muscodor strobelii
  misc_feature: SGI EST ID NO. CUFF.5928.0
  misc_feature: Variant of the nucleotide sequence at SEQ ID NO 2323
tggtgttccccgcggagggaccgatgaggacaaaatgctcgtcggcttcatctgtctcggaccagaatcgatgtcttcaattgatctatccccagtggacgccaaagttcaaaccaagctacatgccttgctgggacatgctgaggaatatcttgccagcaaggtcgcgcgctatatgctgccctctgcttacctaccgctcaacactcttcctgtcacaacatcgggca

SEQ ID NO: 2326 - DNA, 1554 bp, Muscodor strobelii
  misc_feature: SGI cDNA ID NO. 560404
  misc_feature: Encodes the peptide sequence at SEQ ID NO 2327
atgttttctcttcgtgtgctttcttttctggcagtagcctaccaagttgcccatgtctctgcagacctgccacatatcacagacgttaaggcttataacgactggagtcatggtagccgtccgaaccaaacctactactcctctaagctcatatcaccacgatttctcgtaaatgaatgggataagaataagacagcgtcctctggaacgcatcttttcatggcgcctgctatacatggccaaggtgccacgccgttcattatggacgcccgtgatttaagcttagtctatgctgatccagactggaagggcagcatcgatacacggatgcagatccacaatggcgagaagtttttgacgttctggtcaggatgggaccaaaagggacatggcacaggcggaaacatgatgctcgactccaactataggaagttcagaaatctgaccacgacgggtttcacaacgggtgctgatagccacgacttcaaaatgaccaacgatggcggagctatcatgaataactatcacaccatcaagaaggacttgagagagatcggcggtcccaagtatggcgagctcctcgactgcgcatttcaagaggtcgacgttgagactggtgaggtacgattcacctggaaggcaaccgaccacttcaacttgaccgaagctatgggagacaattattggaaagacttatacggctttgattggtttcacatgaacgccatctccaagacgaatgccggcaactacttgatctcgatccgccacttaagaacagtcgctctcattaacggtaccgacggtagcagaatctggcaggttggtggaaaaaacaactccttcaaagacctgagcggcggtaatgcaacgaactttgctttccagcacgatgctcgctttaccgacgacaccgaaaccgaaatcactttgttcgacaaccatgccatgcacgtcacatcgccaacacaaggatgcacgaaggactgctctcgtggtcttcgtatccgactggactatgagaaaatgacagtcaaggtcgtatctgagttttatcaccctgctagcgtgcaagcctgggcacaaggaggttaccacttgctacctaacggccactccgttctcggatggggtgtcgtcccggccttcacggaatttgatgctgatggcaagattgtcatggacgtccaagtccggccttggaacacaacagaaaagggtggcggtcctctataccgtgtctacaagtttgattgggtcggccgacccctctggcagccaagcgcggcctacgtgaatggcactgcctacatcagctggaatggcgcgacagaagtcaagcaatgggttctgtacggcggagatacaccgttgacgctcacgagccagacagttgtcgacaaacgaggcttcgagacttctatcaaaccgccagcccagaaggcattcattcgcatcgatgctctgaatgaggcaggcgaaatgattggctctagcaacgtcgtggatactgcgaccggcaatactgtcggatctataatcaggaaggattag

SEQ ID NO: 2327 - protein, 517 aa, Muscodor strobelii
  misc_feature: SGI Peptide ID NO. 560404
  misc_feature (2)..(503): NCBI GI: 154297697 Blast Desc: BC1G_12260 [Botryotinia fuckeliana B05.10] gi|150858389|gb|EDN33581.1| BC1G_12260 [Botryotinia fuckeliana B05.10]
  misc_feature (27)..(508): NCBI GI: 145237878 Blast Desc: An07g05030 [Aspergillus niger] gi|134076063|emb|CAK39422.1| protein product [Aspergillus niger]
  misc_feature (28)..(504): NCBI GI: 121712289 Blast Desc: conserved [Aspergillus clavatus NRRL 1] gi|119401908|gb|EAW12330.1| conserved [Aspergillus clavatus NRRL 1]
  misc_feature (9)..(499): NCBI GI: 119499051 Blast Desc: NFIA_039620 [Neosartorya fischeri NRRL 181] gi|119414447|gb|EAW24386.1| conserved [Neosartorya fischeri NRRL 181]
  misc_feature (2)..(514): NCBI GI: 119473829 Blast Desc: NFIA_002430 [Neosartorya fischeri NRRL 181] gi|119406943|gb|EAW16893.1| conserved [Neosartorya fischeri NRRL 181]
  misc_feature (19)..(517): NCBI GI: 256728970 Blast Desc: NECHADRAFT_93399 [Nectria haematococca mpVI 77-13-4]
  misc_feature (17)..(502): NCBI GI: 169776173 Blast Desc: [Aspergillus oryzae RIB40] gi|83771288|dbj|BAE61420.1| protein product [Aspergillus oryzae]
  misc_feature (17)..(502): NCBI GI: 238502863 Blast Desc: conserved [Aspergillus flavus NRRL3357] gi|220691475|gb|EED47823.1| conserved [Aspergillus flavus NRRL3357]
  misc_feature (37)..(514): NCBI GI: 70985929 Blast Desc: conserved [Aspergillus fumigatus Af293] gi|66846098|gb|EAL86431.1| conserved [Aspergillus fumigatus Af293]
  misc_feature (37)..(514): NCBI GI: 159128396 Blast Desc: conserved [Aspergillus fumigatus A1163]
MFSLRVLSFLAVAYQVAHVSADLPHITDVKAYNDWSHGSRPNQTYYSSKLISPRFLVNEWDKNKTASSGTHLFMAPAIHGQGATPFIMDARDLSLVYADPDWKGSIDTRMQIHNGEKFLTFWSGWDQKGHGTGGNMMLDSNYRKFRNLTTTGFTTGADSHDFKMTNDGGAIMNNYHTIKKDLREIGGPKYGELLDCAFQEVDVETGEVRFTWKATDHFNLTEAMGDNYWKDLYGFDWFHMNAISKTNAGNYLISIRHLRTVALINGTDGSRIWQVGGKNNSFKDLSGGNATNFAFQHDARFTDDTETEITLFDNHAMHVTSPTQGCTKDCSRGLRIRLDYEKMTVKVVSEFYHPASVQAWAQGGYHLLPNGHSVLGWGVVPAFTEFDADGKIVMDVQVRPWNTTEKGGGPLYRVYKFDWVGRPLWQPSAAYVNGTAYISWNGATEVKQWVLYGGDTPLTLTSQTVVDKRGFETSIKPPAQKAFIRIDALNEAGEMIGSSNVVDTATGNTVGSIIRKD

SEQ ID NO: 2328 - DNA, 3571 bp, Muscodor strobelii
  misc_feature: SGI EST ID NO. CUFF.6105.0
  misc_feature: Variant of the nucleotide sequence at SEQ ID NO 2326
gtgccacgccgttcattatggacgcccgtgatttaagcttagtctatgctgatccagactggaagggcagcatcgatacacggatgcagatccacaatggcgagaagtttttgacgttctggtcaggatgggaccaaaagggacatggcacaggcggaaacatgatgctcgactccaactataggaagttcagaaatctgaccacgacgggtttcacaacgggtgctgatagccacgacttcaaaatgaccaacgatggcggagctatcatgaataactatcacaccatcaagaaggacttgagagagatcggcggtcccaagtatggcgagctcctcgactgcgcatttcaagaggtcgacgttgagactggtgaggtacgattcacctggaaggcaaccgaccacttcaacttgaccgaagctatgggagacaattattggaaagacttatacggctttgattggtttcacatgaacgccatctccaagacgaatgccggcaactacttgatctcgatccgccacttaagaacagtcgctctcattaacggtaccgacggtagcagaatctggcaggttggtggaaaaaacaactccttcaaagacctgagcggcggtaatgcaacgaactttgctttccagcacgatgctcgctttaccgacgacaccgaaaccgaaatcactttgttcgacaaccatgccatgcacgtcacatcgccaacacaaggatgcacgaaggactgctctcgtggtcttcgtatccgactggactatgagaaaatgacagtcaaggtcgtatctgagttttatcaccctgctagcgtgcaagcctgggcacaaggaggttaccacttgctacctaacggccactccgttctcggatggggtgtcgtcccggccttcacggaatttgatgctgatggcaagattgtcatggacgtccaagtccggccttggaacacaacagaaaagggtggcggtcctctataccgtgtctacaagtttgattgggtcggccgacccctctggcagccaagcgcggcctacgtgaatggcactgcctacatcagctggaatggcgcgacagaagtcaagcaatgggttctgtacggcggagatacaccgttgacgctcacgagccagacagttgtcgacaaacgaggcttcgagacttctatcaaaccgccagcccagaaggcattcattcgcatcgatgctctgaatgaggcaggcgaaatgattggctctagcaacgtcgtggatactgcgaccggcaatactgtcggatctataatcaggaaggattagttgtcgttggcatgggcttgctgagatggacacaagcctaggcattcattgaaatttgctggaatttggtccctacgaaggaaccaacaagcataaagcggtccgatcccgaaggcttgttgacgccacgccctggaactaccagttgttcaggctctaataagcgccgagccaaggaaacgggagacggtaccttgccgtatggcaaatgcggactgcgaaacagcgcccgtgatatcaccagcgtttacgcagctgcaatattttgagttaaaggactcgacgccaacctacagtatgtcacatagactatcatctactacatactcattcttgtatatacgtacaatcgggccttggccgagcacattccttgaatacagacaattaagcagttgaacttgtgggtcctctctatcgcctctccgcatccgcattgaagcgaacccgggtctagtcatcatttccgctactgggcaatcccgctgtccctttaccgtagtcctctccataccgttccccattgatgataagtggctgcgtgtcctgaagcacaaacaccatgcgcgtccactccgtcttactcgggttgcgccactatcgcactctcggtcagcgaacggcccctcatcattaaactggttcagtaacaaagaagacacggcaatacttacggcatgcatcgtagccctctgcacggcaatgtcacctctcttcattctcgtgacactaccatcgtcaagcaacatatctgcctcaccctccacgactatgccatagtccaagctctgggttctatgcatcatacattcatacccgggaccgaagtccaccattcggcaaacagtgccgcttttcgtcgccaggccaagattgccgcctgctagcttatcatcgtggtatttgacgtcggcgtcgttatttaggtcggcagggaacggatttgtgtagatctgattaaatcccatgacgccaccttcgaaagccttccaatccgcgtcccgggttgagtgcaagacggctttgccggagctattgtggcctgttatgaaggtctttgtaggagggagggagtcgttttgaactttagtttcatctgacatgttcgctatcgtgatatttgtcgtgaggtgttcagtcggtttcgattctagtattctgacgaagagatcctattggaattagtagagaggaaagtaaacgaagagagaagagtttcgcccgtagtagccgtcttatttattgatgaggcaggccgttacactcgtacagcttcagctgcatgcatctgtagcgatgatcgagaggggtcagatcctcttggtgacatctgcttacatactagactggatgagaatgggaggttatcttgctattgattggatgagatgaacctcctccgcacgcttggggtaatccggaatagagtgctgagtggcttgcatcttacggagctacattccatgataacttcaccaaatgtaattgcctatctcatcttacgaacgtaagacaataaccgcattttgtgtcgataggagagattcttatatcctgagatatttcctttcggatactacgaaaatcgaacttctcttactcagaaaatgcaaaagattaggtatttccgttctttatccatctacatggaatcagctggaaacccgattacgaattctaaagaagagcatatttaatgcgtctaaatcacattttcatctacatctttataccgcattggagacgttgaaatgaagaaagggtgggaccatactccggaattcgcttggaactggtctataacgccaagtagcaaagcgaagacgaaatttaaatcccctcgcattatatgtaagggcgggatcgttcaagatgtcgaccggcaaacgttttattcaatcccttcgttgggagtggagtaccacaagaaaacgctacatatctacactatctcgacttagtagacagtatactcaaggcgctgcgtgacgagtctctcgttatttatggggcatggaacgatgaaatagcaagggaagctgcggagcttcgaacgtatagaactcttcgttatagccttagcccgaagcacgagggcaatttgcaaaaacccggtcgttcaagaccccggtttatgataaaacactgggactgagacgatttaataatgctacgcgagtttgggatatactatcatgaaagatgatagacttatcaaagagaacgttataaacttcgaagtatagacgtttcatagcgag

SEQ ID NO: 2329 - DNA, 573 bp, Muscodor strobelii
  misc_feature: SGI cDNA ID NO. 560405
  misc_feature: Elevated expression when VOC is produced
  misc_feature: Encodes the peptide sequence at SEQ ID NO 2330
atgtcagatgaaactaaagttcaaaacgactccctccctcctacaaagaccttcataacaggccacaatagctccggcaaagccgtcttgcactcaacccgggacgcggattggaaggctttcgaaggtggcgtcatgggatttaatcagatctacacaaatccgttccctgccgacctaaataacgacgccgacgtcaaataccacgatgataagctagcaggcggcaatcttggcctggcgacgaaaagcggcactgtttgccgaatggtggacttcggtcccgggtatgaatgtatgatgcatagaacccagagcttggactatggcatagtcgtggagggtgaggcagatatgttgcttgacgatggtagtgtcacgagaatgaagagaggtgacattgccgtgcagagggctacgatgcatgcctggcgcaacccgagtaagacggagtggacgcgcatggtgtttgtgcttcaggacacgcagccacttatcatcaatggggaacggtatggagaggactacggtaaagggacagcgggattgcccagtagcggaaatgatgactag

SEQ ID NO: 2330 - protein, 190 aa, Muscodor strobelii
  misc_feature: SGI Peptide ID NO. 560405
  misc_feature (89)..(159): Pfam Id: PF07883 Pfam Desc: Cupin domain
  misc_feature (12)..(188): NCBI GI: 85095932 Blast Desc: NCU05630 [Neurospora crassa OR74A] gi|28921653|gb|EAA30938.1| conserved [Neurospora crassa OR74A]
  misc_feature (12)..(189): NCBI GI: 39968041 Blast Desc: MGG_02113 [Magnaporthe grisea 70-15] gi|145012995|gb|EDJ97636.1| MGG_02113 [Magnaporthe grisea 70-15]
  misc_feature (8)..(188): NCBI GI: 255951238 Blast Desc: Pc22g24980 [Penicillium chrysogenum Wisconsin 54-1255] gi|211593403|emb|CAP99786.1| Pc22g24980 [Penicillium chrysogenum Wisconsin 54-1255]
  misc_feature (18)..(188): NCBI GI: 119497801 Blast Desc: cupin domain protein [Neosartorya fischeri NRRL 181] gi|119413822|gb|EAW23761.1| cupin domain protein [Neosartorya fischeri NRRL 181]
  misc_feature (18)..(188): NCBI GI: 159128647 Blast Desc: AFUB_018050 [Aspergillus fumigatus A1163]
  misc_feature (17)..(188): NCBI GI: 171682678 Blast Desc: protein product [Podospora anserina] gi|170941298|emb|CAP66948.1| protein product [Podospora anserina]
  misc_feature (18)..(175): NCBI GI: 121711078 Blast Desc: cupin domain protein [Aspergillus clavatus NRRL 1] gi|119401305|gb|EAW11729.1| cupin domain protein [Aspergillus clavatus NRRL 1]
  misc_feature (8)..(169): NCBI GI: 146322728 Blast Desc: Cupin domain protein [Aspergillus fumigatus Af293] gi|129556773|gb|EBA27305.1| Cupin domain protein [Aspergillus fumigatus Af293]
  misc_feature (11)..(185): NCBI GI: 169777489 Blast Desc: [Aspergillus oryzae RIB40] gi|83771947|dbj|BAE62077.1| protein product [Aspergillus oryzae]
  misc_feature (11)..(186): NCBI GI: 238494638 Blast Desc: Cupin domain protein [Aspergillus flavus NRRL3357] gi|220695205|gb|EED51548.1| Cupin domain protein [Aspergillus flavus NRRL3357]
  misc_feature: Useful for introducing or modulating the production of volatile compounds
MSDETKVQNDSLPPTKTFITGHNSSGKAVLHSTRDADWKAFEGGVMGFNQIYTNPFPADLNNDADVKYHDDKLAGGNLGLATKSGTVCRMVDFGPGYECMMHRTQSLDYGIVVEGEADMLLDDGSVTRMKRGDIAVQRATMHAWRNPSKTEWTRMVFVLQDTQPLIINGERYGEDYGKGTAGLPSSGNDD

SEQ ID NO: 2331 - DNA, 3678 bp, Muscodor strobelii
  misc_feature: SGI EST ID NO. CUFF.6106.1
  misc_feature: Variant of the nucleotide sequence at SEQ ID NO 2329
ctcgctatgaaacgtctatacttcgaagtttataacgttctctttgataagtctatcatctttcatgatagtatatcccaaactcgcgtagcattattaaatcgtctcagtcccagtgttttatcataaaccggggtcttgaacgaccgggtttttgcaaattgccctcgtgcttcgggctaaggctataacgaagagttctatacgttcgaagctccgcagcttcccttgctatttcatcgttccatgccccataaataacgagagactcgtcacgcagcgccttgagtatactgtctactaagtcgagatagtgtagatatgtagcgttttcttgtggtactccactcccaacgaagggattgaataaaacgtttgccggtcgcttgttgtgcggattgtgagttagcgaaaccactgttcatattttcgttgtccaaaactaggtcggtacttggtgaattgaaatcaagcaaacaacttaggttttagacgactagagagacctacacatcttgaacgatcccgcccttacatataatgcgaggggatttaaatttcgtcttcgctttgctacttggcgttatagaccagttccaagcgaattccggagtatggtcccaccctttcttcatttcaacgtctccaatgcggtataaagatgtagatgaaaatgtgatttagacgcattaaatatgctcttctttagaattcgtaatcgggtttccagctgattccatgtagatggataaagaacggaaatacctaatcttttgcattttctgagtaagagaagttcgattttcgtagtatccgaaaggaaatatctcaggatataagaatctctcctatcgacacaaaatgcggttattgtcttacgttcgtaagatgagataggcaattacatttggtgaagttatcatggaatgtagctccgtaagatgcaagccactcagcactctattccggattaccccaagcgtgcggaggaggttcatctcatccaatcaatagcaagataacctcccattctcatccagtctagtatgtaagcagatgtcaccaagaggatctgacccctctcgatcatcgctacagatgcatgcagctgaagctgtacgagtgtaacggcctgcctcatcaataaataagacggctactacgggcgaaactcttctctcttcgtttactttcctctctactaattccaataggatctcttcgtcagaatactagaatcgaaaccgactgaacacctcacgacaaatatcacgatagcgaacatgtcagatgaaactaaagttcaaaacgactccctccctcctacaaagaccttcataacaggccacaatagctccggcaaagccgtcttgcactcaacccgggacgcggattggaaggctttcgaaggtggcgtcatgggatttaatcagatctacacaaatccgttccctgccgacctaaataacgacgccgacgtcaaataccacgatgataagctagcaggcggcaatcttggcctggcgacgaaaagcggcactgtttgccgaatggtggacttcggtcccgggtatgaatgtatgatgcatagaacccagagcttggactatggcatagtcgtggagggtgaggcagatatgttgcttgacgatggtagtgtcacgagaatgaagagaggtgacattgccgtgcagagggctacgatgcatgcctggcgcaacccgagtaagacggagtggacgcgcatggtgtttgtgcttcaggacacgcagccacttatcatcaatggggaacggtatggagaggactacggtaaagggacagcgggattgcccagtagcggaaatgatgactagacccgggttcgcttcaatgcggatgcggagaggcgatagagaggacccacaagttcaactgcttaattgtctgtattcaaggaatgtgctcggccaaggcccgattgtacgtatatacaagaatgagtatgtagtagatgatagtctatgtgacatactgtaggttggcgtcgagtcctttaactcaaaatattgcagctgcgtaaacgctggtgatatcacgggcgctgtttcgcagtccgcatttgccatacggcaaggtaccgtctcccgtttccttggctcggcgcttattagagcctgaacaactggtagttccagggcgtggcgtcaacaagccttcgggatcggaccgctttatgcttgttggttccttcgtagggaccaaattccagcaaatttcaatgaatgcctaggcttgtgtccatctcagcaagcccatgccaacgacaactaatccttcctgattatagatccgacagtattgccggtcgcagtatccacgacgttgctagagccaatcatttcgcctgcctcattcagagcatcgatgcgaatgaatgccttctgggctggcggtttgatagaagtctcgaagcctcgtttgtcgacaactgtctggctcgtgagcgtcaacggtgtatctccgccgtactatcgtgagcgttagtacacatactttcggtaagcatagttcaacaattcagacttaccagaacccattgcttgacttctgtcgcgccattccagctgatgtaggcagtgccattcacgtaggccgcgcttggctgccagaggggtcggccgacccaatcaaacttgtagacacggtatagaggaccgccacccttttctgttgtgttccaaggccggacttggacgtccatgacaatcttgccatcagcatcaaattccgtgaaggccgggacgacaccccatccgagaacggagtggccgttaggtagcaagtggtaacctccttgtgcccaggcttgcacgctagcagggtgataaaactcagatacgaccttgactgtcattttctcatagtccagtcggatacgaagaccacgagagcagtccttcgtgcatccttgtgttggcgatgtgacgtgcatggcatggttgtcgaacaaagtgatttcggtttcggtgtcgtcggtaaagcgagcatcgtgctggaaagcaaagttcgttgcattaccgccgctcaggtctttgaaggagttgttttttccaccaacctgccagattctgctaccgtcggtaccgttaatgagagcgactgttcttaagtggcggatcgagatcaagtagttgccggcattcgtcttggagatggcgttcatgtgaaaccaatcaaagccgtataagtctttccaataattgtctcccatagcttcggtcaagttgaagtggtcggttgccttccaggtgaatcgtacctcaccagtctcaacgtcgacctcttgaaatgcgcagtcgaggagctcgccatacttgggaccgccgatctctctcaagtccttcttgatggtgtgatagttattcatgatagctccgccatcgttggtcattttgaagtcgtggctatcagcacccgttgtgaaacccgtcgtggtcagatttctgaacttcctatagttggagtcgagcatcatgtttccgcctgtgccatgtcccttttggtcccatcctgaccagaacgtcaaaaacttctcgccattgtggatctgcatccgtgtatcgatgctgcccttccagtctggatcagcatagactaagcttaaatcacgggcgtccataatgaacggcgtggcac

SEQ ID NO: 2332 - DNA, 1758 bp, Muscodor strobelii
  misc_feature: SGI cDNA ID NO. 560406
  misc_feature: Elevated expression when VOC is produced
  misc_feature: Encodes the peptide sequence at SEQ ID NO 2333
atggaagcactcacgattctccaagtcgtcgggacggtggtttcgcttggtgacgcggtgataaggtgcattgcccagttgacatcactgaaagcacagtaccaagatgcaccaattatcgtcacagctatgataagccagctccaaatggtgaggatcgcccaagaccagctgtcgtcgattatcgtagcatcctcgaacggcgagccaagacaccatgcacttgccagtgagattggcaatgcacttggtagcttcagcccggttattacggcgctggagaggcaacttcaaagcaagaacgtggcccacggcattgatatgtcgtttagaagcagagttgggttcatacaggatgagaaagcaatgaggaatctctcgatgcttctggatcgacaagttaacgcattgaaccttctgttgcaagccttgcaatgcaaaacatgggctcagcaacggggcttccttactagaccaagaagccaagagatcttgaagctggcggaggattgctcctcgtcaatgatcggccttgatgatgtctgtagtgttaacacgcagaacactgatgacaccactactgtgtttgaattcgacacgattcttcgcaatacagtgctctatcgagtcgccgaagcgacctatacgcaccgtgcgtgtcgaagttccaggctcagaagatccaaagcctttgtcaagtctgattctagtcggttcgcggatgtcgtgaccgaaccagattcgacaggagacgacggacatgtttcgaactcgctaagcgtagaagtgtcgcaagtatcttccctgcagtgttcaaagagcaacaggagaagcgaacttactgcttttgaagaggtcaatctaagagtagggtccatgacagtcagcaagtggctcactttcggtcatgaacttttcagccctgtgcgagacggccttgtaaataacggtcatagtcccctcaagcgtcagtctatacttgttatcgacggtctggataacgatgactggtccttttacgcagcagagacgtatccgacagccagttttttcaatctttctcgtcgatcccccttacctcattcggctcagaaattttcatcatttcccctcgcgccaccgaatcaccaccagattcagtttacttctcatgcagacaaattcccatttagcgcggacagcttcacggcactcgttttccgattcccatccctcgcgcctgttggtcactaccgcaatattcttaccgaagctcggcgagttcttaaacctgggggctttgttgagcttgtgattctcgacgtcgatctaaacaacatgggcaattacacacgaagatctgtgcagcgtctcaaagagcgaattatcactcaatatccggattcgaatctcagtaatacatcggataccctcctacgtctgcttgtcaaggattttaccgatgttaacacgtgtcgcgttggtgtcccagttgctatttccgttgtcgatgctactattaaagatgttaaacgagaggaacgcagtctagccgaaatgatgaatgacgacacattactcgccgacagaaacattgctcatatggtggcgaaggtcggacgttggtggtacagcaaatgcatcggggttcctacgggcgtgagcatctgggacgatcgcgctttactctccgagtgcgaggaatgggggacgagtttgaaactaacagtctgttacgcgaagttgcccgaagctagggtgtgtatcgcttcaatctag

SEQ ID NO: 2333 - protein, 585 aa, Muscodor strobelii
  misc_feature: SGI Peptide ID NO. 560406
  misc_feature (256)..(585): NCBI GI: 116198347 Blast Desc: CHGG_07329 [Chaetomium globosum CBS 148.51] gi|88178608|gb|EAQ86076.1| CHGG_07329 [Chaetomium globosum CBS 148.51]
  misc_feature (281)..(585): NCBI GI: 145605525 Blast Desc: MGG_09215 [Magnaporthe grisea 70-15] gi|145013347|gb|EDJ97988.1| MGG_09215 [Magnaporthe grisea 70-15]
  misc_feature (279)..(585): NCBI GI: 171692401 Blast Desc: protein product [Podospora anserina] gi|170946149|emb|CAP72950.1| protein product [Podospora anserina]
  misc_feature (286)..(585): NCBI GI: 85102112 Blast Desc: NCU04112 [Neurospora crassa OR74A] gi|21622332|emb|CAD36973.1| [Neurospora crassa] gi|28922811|gb|EAA32032.1| [Neurospora crassa OR74A]
  misc_feature (281)..(581): NCBI GI: 256728512 Blast Desc: NECHADRAFT_96869 [Nectria haematococca mpVI 77-13-4]
  misc_feature (285)..(576): NCBI GI: 154312688 Blast Desc: BC1G_05045 [Botryotinia fuckeliana B05.10] gi|150849747|gb|EDN24940.1| BC1G_05045 [Botryotinia fuckeliana B05.10]
  misc_feature (285)..(576): NCBI GI: 156051680 Blast Desc: SS1G_07247 [Sclerotinia sclerotiorum 1980] gi|154705025|gb|EDO04764.1| SS1G_07247 [Sclerotinia sclerotiorum 1980]
  misc_feature (277)..(576): NCBI GI: 258576311 Blast Desc: [Uncinocarpus reesii 1704] gi|237902603|gb|EEP77004.1| [Uncinocarpus reesii 1704]
  misc_feature (282)..(583): NCBI GI: 242803652 Blast Desc: conserved [Talaromyces stipitatus ATCC 10500] gi|218717563|gb|EED16984.1| conserved [Talaromyces stipitatus ATCC 10500]
  misc_feature (282)..(585): NCBI GI: 261196626 Blast Desc: conserved [Ajellomyces dermatitidis SLH14081] gi|239595961|gb|EEQ78542.1| conserved [Ajellomyces dermatitidis SLH14081]
  misc_feature: Useful for introducing or modulating the production of volatile compounds
MEALTILQVVGTVVSLGDAVIRCIAQLTSLKAQYQDAPIIVTAMISQLQMVRIAQDQLSSIIVASSNGEPRHHALASEIGNALGSFSPVITALERQLQSKNVAHGIDMSFRSRVGFIQDEKAMRNLSMLLDRQVNALNLLLQALQCKTWAQQRGFLTRPRSQEILKLAEDCSSSMIGLDDVCSVNTQNTDDTTTVFEFDTILRNTVLYRVAEATYTHRACRSSRLRRSKAFVKSDSSRFADVVTEPDSTGDDGHVSNSLSVEVSQVSSLQCSKSNRRSELTAFEEVNLRVGSMTVSKWLTFGHELFSPVRDGLVNNGHSPLKRQSILVIDGLDNDDWSFYAAETYPTASFFNLSRRSPLPHSAQKFSSFPLAPPNHHQIQFTSHADKFPFSADSFTALVFRFPSLAPVGHYRNILTEARRVLKPGGFVELVILDVDLNNMGNYTRRSVQRLKERIITQYPDSNLSNTSDTLLRLLVKDFTDVNTCRVGVPVAISVVDATIKDVKREERSLAEMMNDDTLLADRNIAHMVAKVGRWWYSKCIGVPTGVSIWDDRALLSECEEWGTSLKLTVCYAKLPEARVCIASI

SEQ ID NO: 2334 - DNA, 1939 bp, Muscodor strobelii
  misc_feature: SGI EST ID NO. CUFF.5986.0
  misc_feature: Variant of the nucleotide sequence at SEQ ID NO 2332
caacaacactacttcgatcaattctcgtcaaacttgcggactcatggaagcactcacgattctccaagtcgtcgggacggtggtttcgcttggtgacgcggtgataaggtgcattgcccagttgacatcactgaaagcacagtaccaagatgcaccaattatcgtcacagctatgataagccagctccaaatggtgaggatcgcccaagaccagctgtcgtcgattatcgtagcatcctcgaacggcgagccaagacaccatgcacttgccagtgagattggcaatgcacttggtagcttcagcccggttattacggcgctggagaggcaacttcaaagcaagaacgtggcccacggcattgatatgtcgtttagaagcagagttgggttcatacaggatgagaaagcaatgaggaatctctcgatgcttctggatcgacaagttaacgcattgaaccttctgttgcaagccttgcaatgcaaaacatgggctcagcaacggggcttccttactagaccaagaagccaagagatcttgaagctggcggaggattgctcctcgtcaatgatcggccttgatgatgtctgtagtgttaacacgcagaacactgatgacaccactactgtgtttgaattcgacacgattcttcgcaatacagtgctctatcgagtcgccgaagcgacctatacgcaccgtgcgtgtcgaagttccaggctcagaagatccaaagcctttgtcaagtctgattctagtcggttcgcggatgtcgtgaccgaaccagattcgacaggagacgacggacatgtttcgaactcgctaagcgtagaagtgtcgcaagtatcttccctgcagtgttcaaagagcaacaggagaagcgaacttactgcttttgaagaggtcaatctaagagtagggtccatgacagtcagcaagtggctcactttcggtcatgaacttttcagccctgtgcgagacggccttgtaaataacggtcatagtcccctcaagcgtcagtctatacttgttatcgacggtctggataacgatgactggtccttttacgcagcagagacgtatccgacagccagttttttcaatctttctcgtcgatcccccttacctcattcggctcagaaattttcatcatttcccctcgcgccaccgaatcaccaccagattcagtttacttctcatgcagacaaattcccatttagcgcggacagcttcacggcactcgttttccgattcccatccctcgcgcctgttggtcactaccgcaatattcttaccgaagctcggcgagttcttaaacctgggggctttgttgagcttgtgattctcgacgtcgatctaaacaacatgggcaattacacacgaagatctgtgcagcgtctcaaagagcgaattatcactcaatatccggattcgaatctcagtaatacatcggataccctcctacgtctgcttgtcaaggattttaccgatgttaacacgtgtcgcgttggtgtcccagttgctatttccgttgtcgatgctactattaaagatgttaaacgagaggaacgcagtctagccgaaatgatgaatgacgacacattactcgccgacagaaacattgctcatatggtggcgaaggtcggacgttggtggtacagcaaatgcatcggggttcctacgggcgtgagcatctgggacgatcgcgctttactctccgagtgcgaggaatgggggacgagtttgaaactaacagtctgttacgcgaagttgcccgaagctagggtgtgtatcgcttcaatctagattcaacctatcactattgggctgtaaagatttactatatgcatagccaatgttaatcacgaagactagacaaattccttctcgtaattgctttactccgcttgtctttctcttcatacaaatcagcgcagtcaagaa

SEQ ID NO: 2335 - DNA, 2463 bp, Muscodor strobelii
  misc_feature: SGI cDNA ID NO. 560407
  misc_feature: Reduced expression when VOC is produced
  misc_feature: Encodes the peptide sequence at SEQ ID NO 2336
atgggcaacagccacacaaaagaagagcgccctgaccagcgcaggggctctaccagcggccaaggggccagccatcttgcggctcttcgggcgggagaagcctccagctctaggcgccccagccgtcccgacctgagtgctcttggtcttactgccaccgcctcccgcgagcaagatgtcccctttgagcgccgggagaccagacaagaacgagaggctcggaagctcgagaaggaacgcgcagcacgactcaaagaacgggaacgtagcatgaaggaggaacatgtcgacggcggctttcttgtcactatgggtgtctatactggcatcgaggatttcagcaagcccacggtccggcatttgcagatcgagagaaagatagcccctttctggcgcggcctcgacgacttcaaagatacctgggccgagcatcagatcatcgccgctgcccgtggccttgaaatccctcctcccgacgaagtgcccgaccatctcagaccccagcccatcaaccgatcccttgcgccgaccgaaggctcctcctccaatctgaacagcctgactgttcccatgggaggacgaacactctcctcatcttctgaccgtgctggctccactcgcggctcagctctaccatcgcccacatcgcccaccgcacccaagactagctctcccttgaaacagcccaagaaagcattggctgcggcgttgagcttgtcacggaacagttcccaaccagacattgcaccccgcgagatcaacctcccggccgacccctttgtcaacggccagccggtcgaggtctttctctacaaggagggtgaagaatgccccttatgcctcatgtactacccaccgtacttgaacaggacgcgttgttgttgtcagctgatctgcagcgagtgctttgtccagatcaagcgcccggacccgcatttaccggaccaccacgacgagaatggcggcgagtcacagccaaacgccgaagagcagcaggaacaactgaccatggagcctgctaagtgtccctattgcacgcagtccgagtttggcatcacctacgatcccccgcccttccgccgcggcttgacctacgcaatctcttctgggttcggtgccctgagccctgccatgtcctcttcaagctctatcaactcgagtctctcaccgaccacggcaggcccatctgtagctaaccgcaaacgggcccagagtgtgtcagctaacgcccctggcgttgtcacaacagatcgcatacgaccagactgggctggcaaactggcagctgctcgtgcacaccagcgtcgcagagctgccgcagccgatgcacttcatcacgctgcttttgtcatggggagccaggagtcgcgctcattgttcggccgctcatctcgattttctcggcgaccagctgggactggtcgtggcacagatagtcctacgggtacccaacaaggaggtactgacgacgccaatcctccctggaatgacccgaatatgccgtccgcacctccccgccaccgtgaacgcatagacgctgctcatctagaacaactcatgatggccgaggcgataaggctcagcctggctgatgaagaagacaggagaaagaaggcagagaaggaagcccgcaaagaagccaagaagaaggagaaggaagacaaaaaagctgctaagaagaaaggcgacgtgtacggtggcggcagcggtagtggtgccagtgcaagctctcttagtttgggactcggccgtaggagaggcaatagtaacgccagcaacctccgcgttgaggccagtgtcgcagcggccacagcaactgctcaggtcgctggcgccggatcatctcaagacaagggaaaaggcgtggagcgcggtactactgacgaaggagccagctccagcatcacctctccatcactgcccattccggtgcctcctaggggtgcgtcccatctgcggcagatgagcaacgccagctccatcagttcaagtggcttggacagtatgccaggaagctacactggcaggaacccgaatgaagatcctcatgctagtggcctgagcctatcagcacagagcgaccaaggcgacaacccgagctctgagcccttgtttaacttccggagtctggccgaggtcgtcggtgtgtcgatagatggagaaggcgaacatgccgatggcgagcaaggtccaaattctaaggtcgacgatcacgagggaccagagcacattgagcatgctacaaagccagcagacgacgagactaccaacactaccaaagcagagacaaaggggtcaagcacttccgagaaagccgcggacgaggcggaagaggcctttcttgacgccccagacgtgattgtaacacctgagacaccggctccaattgacgatgttcatggcgagtccaagagacttggccacttcagtacttcggatcactcatccgaagtcactcagtag

SEQ ID NO: 2336 - protein, 820 aa, Muscodor strobelii
  misc_feature: SGI Peptide ID NO. 560407
  misc_feature (1)..(808): NCBI GI: 46127501 Blast Desc: FG08128.1 [Gibberella zeae PH-1]
  misc_feature (1)..(807): NCBI GI: 116201701 Blast Desc: CHGG_08735 [Chaetomium globosum CBS 148.51] gi|121779217|sp|Q2GTG9.1|SIP5_CHAGB RecName: Full=Protein SIP5 gi|88177253|gb|EAQ84721.1| CHGG_08735 [Chaetomium globosum CBS
  misc_feature (1)..(808): NCBI GI: 256722506 Blast Desc: NECHADRAFT_58744 [Nectria haematococca mpVI 77-13-4]
  misc_feature (1)..(820): NCBI GI: 171678068 Blast Desc: protein product [Podospora anserina] gi|170937103|emb|CAP61761.1| protein product [Podospora anserina]
  misc_feature (1)..(819): NCBI GI: 85097989 Blast Desc: NCU05589 [Neurospora crassa OR74A] gi|74616229|sp|Q7S6X4.1|SIP5_NEUCR RecName: Full=Protein sip-5 gi|28922044|gb|EAA31315.1| [Neurospora crassa OR74A]
  misc_feature (1)..(806): NCBI GI: 145611854 Blast Desc: MGG_00076 [Magnaporthe grisea 70-15] gi|189046713|sp|A4RGE6.1|SIP5_MAGGR RecName: Full=Protein SIP5 gi|145019088|gb|EDK03367.1| MGG_00076 [Magnaporthe grisea 70-15]
  misc_feature (1)..(726): NCBI GI: 119484126 Blast Desc: C2H2 zinc finger protein [Neosartorya fischeri NRRL 181] gi|189046714|sp|A1DB29.1|SIP5_NEOFI RecName: Full=Protein sip5 gi|119410122|gb|EAW20069.1| C2H2 zinc finger protein NRRL
  misc_feature (1)..(726): NCBI GI: 70983396 Blast Desc: C2H2 zinc finger protein [Aspergillus fumigatus Af293] gi|74667257|sp|Q4WCJ7.1|SIP5_ASPFU RecName: Full=Protein sip5 gi|66844851|gb|EAL85187.1| C2H2 zinc finger protein [Aspergillus
  misc_feature (1)..(726): NCBI GI: 189046776 Blast Desc: SIP5_ASPFC RecName: Full=Protein sip5 gi|159123769|gb|EDP48888.1| C2H2 zinc finger protein [Aspergillus fumigatus A1163]
  misc_feature (1)..(715): NCBI GI: 169784378 Blast Desc: [Aspergillus oryzae RIB40] gi|121797748|sp|Q2TZ06.1|SIP5_ASPOR RecName: Full=Protein sip5 gi|83775397|dbj|BAE65517.1| protein product [Aspergillus oryzae]
  misc_feature: Useful for introducing or modulating the production of volatile compounds
MGNSHTKEERPDQRRGSTSGQGASHLAALRAGEASSSRRPSRPDLSALGLTATASREQDVPFERRETRQEREARKLEKERAARLKERERSMKEEHVDGGFLVTMGVYTGIEDFSKPTVRHLQIERKIAPFWRGLDDFKDTWAEHQIIAAARGLEIPPPDEVPDHLRPQPINRSLAPTEGSSSNLNSLTVPMGGRTLSSSSDRAGSTRGSALPSPTSPTAPKTSSPLKQPKKALAAALSLSRNSSQPDIAPREINLPADPFVNGQPVEVFLYKEGEECPLCLMYYPPYLNRTRCCCQLICSECFVQIKRPDPHLPDHHDENGGESQPNAEEQQEQLTMEPAKCPYCTQSEFGITYDPPPFRRGLTYAISSGFGALSPAMSSSSSINSSLSPTTAGPSVANRKRAQSVSANAPGVVTTDRIRPDWAGKLAAARAHQRRRAAAADALHHAAFVMGSQESRSLFGRSSRFSRRPAGTGRGTDSPTGTQQGGTDDANPPWNDPNMPSAPPRHRERIDAAHLEQLMMAEAIRLSLADEEDRRKKAEKEARKEAKKKEKEDKKAAKKKGDVYGGGSGSGASASSLSLGLGRRRGNSNASNLRVEASVAAATATAQVAGAGSSQDKGKGVERGTTDEGASSSITSPSLPIPVPPRGASHLRQMSNASSISSSGLDSMPGSYTGRNPNEDPHASGLSLSAQSDQGDNPSSEPLFNFRSLAEVVGVSIDGEGEHADGEQGPNSKVDDHEGPEHIEHATKPADDETTNTTKAETKGSSTSEKAADEAEEAFLDAPDVIVTPETPAPIDDVHGESKRLGHFSTSDHSSEVTQ

SEQ ID NO: 2337 - DNA, 4265 bp, Muscodor strobelii
  misc_feature: SGI EST ID NO. CUFF.6103.0
  misc_feature: Variant of the nucleotide sequence at SEQ ID NO 2335
tgccaattgtgtgtacatgtgttgctctcccccaagctagcccattcctgacctagatccccacgtctctcaatcacacactctctcagtcacaagaaagggcccaggtcgctcagtcacacaagtcactgttgttggcactggtagctgaatccttgattgataggctaggccggatagctctccaccctggcaaggcctggcccgactctggccaattgtcgtcatatcgtatcgcatcttgcgagcgtcccgcgataaacaaccagcctatctcactcctaataacgtcttgtcactcttgtcactccacctcacccgacaagcacctctcatcatcttcccgcagccaactctgtctgtcttggcgcgctgacagaccgcccgaacaagttggacttcgcgagcagccaggcattaggacagagcctgacatagctctatacctaattctccacatccttgcgtgaggtgtttctaggtgccgggcctaaggatcgttattcacgctgcacggatccaagaggtatagtggatatgagaagctactcataaccagctgcaacggcaacacaatggtgaatagataggccactactctctcgaaaccctcattgcgacctcgactcgacttggacagcagtagagatttaccacaaacagtatgcgctattgttgtcgaggttgctagcagccaagcagcggaaacaatagcatttcagatatccatcatccatgccaagccccgcctccatacgtcaaacagcctgattgatatccaggaatcaccattcgcgtctctcccgcaacgaccgcctcgcgagtggcctctggattcatccaccatctctaccacactcttttcttgtctctttcctccgccggtgtggtttcccttgcctgcaccacttacctttcacggattatcaggatacatccgttgactacggcaccactcttggcccagactcgagccccgagaatcaccacccacttcacctagctggcgtccgctttgccgaacagcatcctcagctgcccacgacaactttcacagtttttgacgcatgcgagccagtgtcccggtcacttgtgaggcataagctatccctccaagcgaccacgattccccaggctacttggccaccggacacagcatcttcaccgaatcccgctacatagtcgcgatgggcaacagccacacaaaagaagagcgccctgaccagcgcaggggctctaccagcggccaaggggccagccatcttgcggctcttcgggcgggagaagcctccagctctaggcgccccagccgtcccgacctgagtgctcttggtcttactgccaccgcctcccgcgagcaagatgtcccctttgagcgccgggagaccagacaagaacgagaggctcggaagctcgagaaggaacgcgcagcacgactcaaagaacgggaacgtagcatgaaggaggaacatgtcgacggcggctttcttgtcactatgggtgtctatactggcatcgaggatttcagcaagcccacggtccggcatttgcagatcgagagaaagatagcccctttctggcgcggcctcgacgacttcaaagatacctgggccgagcatcagatcatcgccgctgcccgtggccttgaaatccctcctcccgacgaagtgcccgaccatctcagaccccagcccatcaaccgatcccttgcgccgaccgaaggctcctcctccaatctgaacagcctgactgttcccatgggaggacgaacactctcctcatcttctgaccgtgctggctccactcgcggctcagctctaccatcgcccacatcgcccaccgcacccaagactagctctcccttgaaacagcccaagaaagcattggctgcggcgttgagcttgtcacggaacagttcccaaccagacattgcaccccgcgagatcaacctcccggccgacccctttgtcaacggccagccggtcgaggtctttctctacaaggagggtgaagaatgccccttatgcctcatgtactacccaccgtacttgaacaggacgcgttgttgttgtcagctgatctgcagcgagtgctttgtccagatcaagcgcccggacccgcatttaccggaccaccacgacgagaatggcggcgagtcacagccaaacgccgaagagcagcaggaacaactgaccatggagcctgctaagtgtccctattgcacgcagtccgagtttggcatcacctacgatcccccgcccttccgccgcggcttgacctacgcaatctcttctgggttcggtgccctgagccctgccatgtcctcttcaagctctatcaactcgagtctctcaccgaccacggcaggcccatctgtagctaaccgcaaacgggcccagagtgtgtcagctaacgcccctggcgttgtcacaacagatcgcatacgaccagactgggctggcaaactggcagctgctcgtgcacaccagcgtcgcagagctgccgcagccgatgcacttcatcacgctgcttttgtcatggggagccaggagtcgcgctcattgttcggccgctcatctcgattttctcggcgaccagctgggactggtcgtggcacagatagtcctacgggtacccaacaaggaggtactgacgacgccaatcctccctggaatgacccgaatatgccgtccgcacctccccgccaccgtgaacgcatagacgctgctcatctagaacaactcatgatggccgaggcgataaggctcagcctggctgatgaagaagacaggagaaagaaggcagagaaggaagcccgcaaagaagccaagaagaaggagaaggaagacaaaaaagctgctaagaagaaaggcgacgtgtacggtggcggcagcggtagtggtgccagtgcaagctctcttagtttgggactcggccgtaggagaggcaatagtaacgccagcaacctccgcgttgaggccagtgtcgcagcggccacagcaactgctcaggtcgctggcgccggatcatctcaagacaagggaaaaggcgtggagcgcggtactactgacgaaggagccagctccagcatcacctctccatcactgcccattccggtgcctcctaggggtgcgtcccatctgcggcagatgagcaacgccagctccatcagttcaagtggcttggacagtatgccaggaagctacactggcaggaacccgaatgaagatcctcatgctagtggcctgagcctatcagcacagagcgaccaaggcgacaacccgagctctgagcccttgtttaacttccggagtctggccgaggtcgtcggtgtgtcgatagatggagaaggcgaacatgccgatggcgagcaaggtccaaattctaaggtcgacgatcacgagggaccagagcacattgagcatgctacaaagccagcagacgacgagactaccaacactaccaaagcagagacaaaggggtcaagcacttccgagaaagccgcggacgaggcggaagaggcctttcttgacgccccagacgtgattgtaacacctgagacaccggctccaattgacgatgttcatggcgagtccaagagacttggccacttcagtacttcggatcactcatccgaagtcactcagtagatgttacgttggcggaaatggtttcatttgtgtacttccttactctcgggagagggggttatgatgatgaggggatctgggtggagggtttcaatgcttgctccggacggacacacggcggtcggcgggccgggcacctttgcatagacaaatgagactgatatgaatatggagcattggtgctttccctaggtgtaggcattggcgttccggacgggaggctagggatgttgttgtactattgtaaatgtcggtatagagggctgggtagcattcgttcaccaatacaatggagttcttcctttccatgtcttgccgcttgcgctctgtgctggattagagtattgatgtgctgggatttcgcgaaattgggagtgaacatggatacagatagccgaatagttaggctctacgagtattgatcgttaggaatcgtcaggccgcggtccagacgtgataagtctcgaacgcgcaactagctacctagtctgatctgaacgtgatcatgttcggataggcagtacgacactagaatgaacaggcactctgagaattattcattagctagctaggcgtcggagacgaatctaaacatgtctagcactgaaaatgcaa

SEQ ID NO: 2338 - DNA, 1707 bp, Muscodor strobelii
  misc_feature: SGI cDNA ID NO. 560408
  misc_feature: Encodes the peptide sequence at SEQ ID NO 2339
atgactgagcagagctttgtacataaacctcctgctagtgatgcattgctcacgtcaaacgatcctatgtggtcgatcgaggcaggttctcccacggatataatggctcaagatgaggcagctacgctcaatcttgatgtagtggacgagcaggctggtgtgatcgactgcttacgcgatgttgaccttcgaacccctgatttcgatgacccggattcgatcatgcctcggccgttctgggccgacaatagttcatcaggttcagaaaattcctctctaaacattattcacttcaatgatcatattctggaaccgtccgccacgcatctacatgtttctggcctgaatgcgtgtgtcgcatctgaagtaccaagctctgctaccagtggaactttggtgcccatgaaatcgtcactgccatgcccgaagtcgagctttacacaattgccaacactcctaccgaagtcccgtattgtccaaacaaggcggcagagtctgcttccactagggaagagaagacgctcacctagcccgatggaggaatggaaggataattgcatgatcaatgtcttctatggctatacaggggtttcaaatggggagagaccgccagaaaagaggaagaagactaaaaaagcctgtgtgcggtgccagttgattcagaagaagtgtgatgagggacgtccttgccttgggcgaacgaacccagtcagctacttgtttgcggagtgtgaatcgttaaaaaatacccaggcagccttcaagagacaaatcgacctactgcttgtaggtccacagctttgggggctctactatcatgcccacgcctcttccatcaccttagaagcagtagtctattacaacgacgcacagaagtatctctgtcacgtcgcagatcttgcggaacttccttcactcaatatttttctcgatctcttgccgcgaaagccaatttgcattgatagacagcagggatatatcaagaacccttacgacgggccctaccatccgcacttcatgtttccatgcttacttcttcatcaccagaaactacaagaatactgtgatattcatcctgaagggatcgaattcgtatgtgccctttcagctgtgaggctgttctcctgtattgaagggttaatcgccaggctcaagaagcaaaagtcaagcgacgagaatgacattgcttcgttggtggtttccctaacggttctaatattcttggtcaagaatgttgatctggggtactgggtttcatatggcaccaccgttgccggacctctgttcgatatgacatctgatgccttggatcatctggcgagctttgcgcagcactggctacgtaaattggctcgacacagccggatgccagaagctattatcacgataatatacaacttggataccctcgctcgcatgacctattcgagcggcacggaatcggatggacctaatctggtctaccgtaaacctgacataagctccaccgagttgagaaacgagtttcagcagttccgctgtcgcaagaaagacgacattcattcattgctactgcatgaccgacttgtctcgaaaacagaacaggaaaaggaaaggctcaaagatctgtacattactgacattagtagaatccgtgaagaagccgcttatttctttccgcacaacatactaggaagcaggtcgagcgttggttggggcaagtcttaa

SEQ ID NO: 2339 - protein, 568 aa, Muscodor strobelii
  misc_feature: SGI Peptide ID NO. 560408
MTEQSFVHKPPASDALLTSNDPMWSIEAGSPTDIMAQDEAATLNLDVVDEQAGVIDCLRDVDLRTPDFDDPDSIMPRPFWADNSSSGSENSSLNIIHFNDHILEPSATHLHVSGLNACVASEVPSSATSGTLVPMKSSLPCPKSSFTQLPTLLPKSRIVQTRRQSLLPLGKRRRSPSPMEEWKDNCMINVFYGYTGVSNGERPPEKRKKTKKACVRCQLIQKKCDEGRPCLGRTNPVSYLFAECESLKNTQAAFKRQIDLLLVGPQLWGLYYHAHASSITLEAVVYYNDAQKYLCHVADLAELPSLNIFLDLLPRKPICIDRQQGYIKNPYDGPYHPHFMFPCLLLHHQKLQEYCDIHPEGIEFVCALSAVRLFSCIEGLIARLKKQKSSDENDIASLVVSLTVLIFLVKNVDLGYWVSYGTTVAGPLFDMTSDALDHLASFAQHWLRKLARHSRMPEAIITIIYNLDTLARMTYSSGTESDGPNLVYRKPDISSTELRNEFQQFRCRKKDDIHSLLLHDRLVSKTEQEKERLKDLYITDISRIREEAAYFFPHNILGSRSSVGWGKS

SEQ ID NO: 2340 - DNA, 2063 bp, Muscodor strobelii
  misc_feature: SGI EST ID NO. CUFF.5999.0
  misc_feature: Variant of the nucleotide sequence at SEQ ID NO 2338
caaactctcacaaaatcggcattcacatcatactctgatatgaatcatttcgttccacaatgggggataactcatgttccatatccaactatccttctaagtctacagatatgactgagcagagctttgtacataaacctcctgctagtgatgcattgctcacgtcaaacgatcctatgtggtcgatcgaggcaggttctcccacggatataatggctcaagatgaggcagctacgctcaatcttgatgtagtggacgagcaggctggtgtgatcgactgcttacgcgatgttgaccttcgaacccctgatttcgatgacccggattcgatcatgcctcggccgttctgggccgacaatagttcatcaggttcagaaaattcctctctaaacattattcacttcaatgatcatattctggaaccgtccgccacgcatctacatgtttctggcctgaatgcgtgtgtcgcatctgaagtaccaagctctgctaccagtggaactttggtgcccatgaaatcgtcactgccatgcccgaagtcgagctttacacaattgccaacactcctaccgaagtcccgtattgtccaaacaaggcggcagagtctgcttccactagggaagagaagacgctcacctagcccgatggaggaatggaaggataattgcatgatcaatgtcttctatggctatacaggggtttcaaatggggagagaccgccagaaaagaggaagaagactaaaaaagcctgtgtgcggtgccagttgattcagaagaagtgtgatgagggacgtccttgtaaggaatgccgtcgacttttggacaacactcagaaaaacatggcggtatactggacccgctgtgttgattcggatgttctctccacgaatcctattattgatggccttgggcgaacgaacccagtcagctacttgtttgcggagtgtgaatcgttaaaaaatacccaggcagccttcaagagacaaatcgacctactgcttgtaggtccacagctttgggggctctactatcatgcccacgcctcttccatcaccttagaagcagtagtctattacaacgacgcacagaagtatctctgtcacgtcgcagatcttgcggaacttccttcactcaatatttttctcgatctcttgccgcgaaagccaatttgcattgatagacagcagggatatatcaagaacccttacgacgggccctaccatccgcacttcatgtttccatgcttacttcttcatcaccagaaactacaagaatactgtgatattcatcctgaagggatcgaattcgtatgtgccctttcagctgtgaggctgttctcctgtattgaagggttaatcgccaggctcaagaagcaaaagtcaagcgacgagaatgacattgcttcgttggtggtttccctaacggttctaatattcttggtcaagaatgttgatctggggtactgggtttcatatggcaccaccgttgccggacctctgttcgatatgacatctgatgccttggatcatctggcgagctttgcgcagcactggctacgtaaattggctcgacacagccggatgccagaagctattatcacgataatatacaacttggataccctcgctcgcatgacctattcgagcggcacggaatcggatggacctaatctggtctaccgtaaacctgacataagctccaccgagttgagaaacgagtttcagcagttccgctgtcgcaagaaagacgacattcattcattgctactgcatgaccgacttgtctcgaaaacagaacaggaaaaggaaaggctcaaagatctgtacattactgacattagtagaatccgtgaagaagccgcttatttctttccgcacaacatactaggaagcaggtcgagcgttggttggggcaagtcttaatggctggcgtacctcattggcagctgagaatacaagtggcacgtgtcggtttctgcgaggcagttgagaagcccctcaatctgaagatttcctaaccacctttcccaaatgctccagaatgaagaacggtatatatgtggg

SEQ ID NO: 2341 - DNA, 1515 bp, Muscodor strobelii
  misc_feature: SGI cDNA ID NO. 560409
  misc_feature: Encodes the peptide sequence at SEQ ID NO 2342
atggtgcggacttctcttgctgtagcagctcttctacatggggcagcatcacaaaacatcactgccccctgtgaagcactcgacaaggccggtttaggataccgcctaatcctaccatctgaccctggttacaacgcagaagtgaactcctggtgggcaggcaacgcgcgccagaacgcatcgtgcttcatcttaccacgaacaaccgaagaagtctcgaaagcgctcagcactcttgtccaagccagtaaattcacaaaatgcgaaaattcaacaccaatttggaacgtcgcagtacgtagcggaggacattcctccactggatcaagcagtacctcgaacggcgtgaccatcgacctgtcgcacatgaactcttcctcgtacgacgcggggacgaacatcgcgagtattcagcctggaggccgctggcaatacgtctaccaaaatctcatccaatacggtattactgtcgcaggcggtcgcgacggagacgtcggcgtcggcggctttctcctaggaggcggcaactcatattactccaatcaagtcggtttcggctgcgacagtgtagtgaatttcgaagtcgttcttgcggatggatccattgtcaatgccaataccactcacaatgccgatctgcacaaagcgctcaagggtggaggtaacaacttcgggattgtcacgcgctacgatatgaccggcataccagccccggatatcttcaccgacacacgcttctacacatccgagtattcctccgaaatgctcgacgctgttgtgggtttcgcggatacaaatgagacgctggctgaggactcattcttcactattttcacacacgacacctcatatatcaactccacttacctagcgttcggcgttttggtcaacacgaaaggcatcgaccacgacacaccattccgtcctgtacagaacctcccagcgttattcaatgagaccgctacagtagatatcgcgaccgctgcattcgcctcgcaagtcaagaatgggacgcagaattttggaatcacgctgacgttcaaaaatactcgggatgtcgcacaaaaggccttggatctacatacagaaatgatatcctccctctccacaatcatgagtcccgacgatttcttcacgcagcttatactgcagcctcttccctcctatcgctttcacatcggcgcagagaatggaggcgatgttcttggacttgagaacatcacccaaaatgcgcttctttggacagccggcgtaggtgtcgcttcgactgatctgccgttcgctgacgcgcaggagatggcaaagaagatggcgaatgatatgcaagcgtatgcgaagcaagcgggtgctgacatggagttcgtctatatgaattatgcggattctagtcaggaccctatcgcgagttatgggaaggggaatgtacagtttatgcgggatgtcgctgcgaagtatgatccggcggctgtctttcagacgcttgtttctgggggttttaagatccccaaggcttag

SEQ ID NO: 2342 - protein, 504 aa, Muscodor strobelii
  misc_feature: SGI Peptide ID NO. 560409
  misc_feature (60)..(206): Pfam Id: PF01565 Pfam Desc: FAD binding domain
  misc_feature (23)..(503): NCBI GI: 239607040 Blast Desc: FAD binding domain-containing protein [Ajellomyces dermatitidis ER-3]
  misc_feature (23)..(503): NCBI GI: 240107551 Blast Desc: FAD binding domain containing protein [Coccidioides posadasii C735 delta SOWgp]
  misc_feature (19)..(502): NCBI GI: 256726365 Blast Desc: NECHADRAFT_39434 [Nectria haematococca mpVI 77-13-4]
  misc_feature (95)..(503): NCBI GI: 261193950 Blast Desc: FAD binding domain-containing protein [Ajellomyces dermatitidis SLH14081] gi|239588394|gb|EEQ71037.1| FAD binding domain-containing protein [Ajellomyces dermatitidis SLH14081]
  misc_feature (30)..(503): NCBI GI: 169612738 Blast Desc: SNOG_09495 [Phaeosphaeria nodorum SN15] gi|111061640|gb|EAT82760.1| SNOG_09495 [Phaeosphaeria nodorum SN15]
  misc_feature (95)..(503): NCBI GI: 119177874 Blast Desc: CIMG_07831 [Coccidioides immitis RS]
  misc_feature (25)..(501): NCBI GI: 256732288 Blast Desc: NECHADRAFT_41792 [Nectria haematococca mpVI 77-13-4]
  misc_feature (24)..(503): NCBI GI: 46118786 Blast Desc: FG04732.1 [Gibberella zeae PH-1]
  misc_feature (25)..(501): NCBI GI: 46110302 Blast Desc: FG02033.1 [Gibberella zeae PH-1]
  misc_feature (7)..(501): NCBI GI: 171679329 Blast Desc: protein product [Podospora anserina] gi|170939290|emb|CAP64518.1| protein product [Podospora anserina]
MVRTSLAVAALLHGAASQNITAPCEALDKAGLGYRLILPSDPGYNAEVNSWWAGNARQNASCFILPRTTEEVSKALSTLVQASKFTKCENSTPIWNVAVRSGGHSSTGSSSTSNGVTIDLSHMNSSSYDAGTNIASIQPGGRWQYVYQNLIQYGITVAGGRDGDVGVGGFLLGGGNSYYSNQVGFGCDSVVNFEVVLADGSIVNANTTHNADLHKALKGGGNNFGIVTRYDMTGIPAPDIFTDTRFYTSEYSSEMLDAVVGFADTNETLAEDSFFTIFTHDTSYINSTYLAFGVLVNTKGIDHDTPFRPVQNLPALFNETATVDIATAAFASQVKNGTQNFGITLTFKNTRDVAQKALDLHTEMISSLSTIMSPDDFFTQLILQPLPSYRFHIGAENGGDVLGLENITQNALLWTAGVGVASTDLPFADAQEMAKKMANDMQAYAKQAGADMEFVYMNYADSSQDPIASYGKGNVQFMRDVAAKYDPAAVFQTLVSGGFKIPKA

SEQ ID NO: 2343 - DNA, 1104 bp, Muscodor strobelii
  misc_feature: SGI cDNA ID NO. 560410
  misc_feature: Encodes the peptide sequence at SEQ ID NO 2344
atgactatcgccagtaagacactcatctacaaggctcacacgactggcctgcccgtggctggcgtccacttggtggttgaaaattgtcccttcgacgatgatgcgccccctcctaatggtggcatcactgtcaagaatgagtacctatccttcgacgcagacatgaggttacaaatgcgtcaatctgacgaatataaccgcgctatctatttgccctggtcggtcggccagcctgcccttgtccctgcgatatcgactgttttgaagacagacaataaggcattccgaccagatgaccgcgtgtatatcattgccccggctggagaatatgttgttgttccggctgatcttgctgcacgagctgcacggcctccatccatacagccactatcggatggaaccaagatcgagcctgccgcattcctaggcgcacttggaaatgcaggctggatagcttatactagtttcagggagtttgtgaagcccccatacacggacaagacaatatgtgtgtcagctgcgtccggcggcgttggacagatcctcggccaaattgccaagatttctggaatgaaagtcatcgggagcaccgggagtgacgcgaaggcggaattcctcgtcaagaggctcggattccacagcgcatggaattacaagcaggagaaaacaagcgacgcgctgaatagacttgcgccagagcttcttgatgtctattatgacaatgtaggaggcgagcaattggagtcaacgctaatgcacatgaagaactttggcaccatcattgcatgtggcatgagctcacagcacaatatgccacaggaggagaattacggtgtcagaaccctacaacagatcatcctcagaggtctcaaggtgttcggcgtcttttctgaagatcaaaatctcttgaagcacaatgctactttttcccaagatatgaaggagtggatcatcgctcgccagattgtgacggaggacgaggttgtgagtgggatggataatgcaccgggggcagtggtcagagtgctcacaggaaacaaattcggaaagatgatcttaaaagttgaccccaaggtacccatacctcgactctctcggaagtag

SEQ ID NO: 2344 - protein, 367 aa, Muscodor strobelii
  misc_feature: SGI Peptide ID NO. 560410
  misc_feature (165)..(312): Pfam Id: PF00107 Pfam Desc: Zinc-binding dehydrogenase
  misc_feature (3)..(355): NCBI GI: 116179324 Blast Desc: CHGG_00290 [Chaetomium globosum CBS 148.51] gi|88184587|gb|EAQ92055.1| CHGG_00290 [Chaetomium globosum CBS 148.51]
  misc_feature (3)..(355): NCBI GI: 156054878 Blast Desc: SS1G_06287 [Sclerotinia sclerotiorum 1980] gi|154704067|gb|EDO03806.1| SS1G_06287 [Sclerotinia sclerotiorum 1980]
  misc_feature (3)..(355): NCBI GI: 169616242 Blast Desc: SNOG_11291 [Phaeosphaeria nodorum SN15] gi|111059879|gb|EAT80999.1| SNOG_11291 [Phaeosphaeria nodorum SN15]
  misc_feature (3)..(355): NCBI GI: 154320546 Blast Desc: BC1G_01745 [Botryotinia fuckeliana B05.10] gi|150853434|gb|EDN28626.1| BC1G_01745 [Botryotinia fuckeliana B05.10]
  misc_feature (1)..(354): NCBI GI: 226278801 Blast Desc: NADP-dependent leukotriene B4 12-hydroxydehydrogenase [Paracoccidioides brasiliensis Pb01]
  misc_feature (1)..(354): NCBI GI: 240274605 Blast Desc: reductase RED1 [Ajellomyces capsulatus H143]
  misc_feature (1)..(354): NCBI GI: 225561503 Blast Desc: reductase RED1 [Ajellomyces capsulatus G186AR]
  misc_feature (1)..(354): NCBI GI: 154282753 Blast Desc: HCAG_02343 [Ajellomyces capsulatus NAm1] gi|150410352|gb|EDN05740.1| HCAG_02343 [Ajellomyces capsulatus NAm1]
  misc_feature (1)..(355): NCBI GI: 238844091 Blast Desc: NADP-dependent leukotriene B4 12-hydroxydehydrogenase [Microsporum canis CBS 113480]
  misc_feature (1)..(354): NCBI GI: 226295266 Blast Desc: NADP-dependent leukotriene B4 12-hydroxydehydrogenase [Paracoccidioides brasiliensis Pb18]
  misc_feature (1)..(355): SWISSPROT Homolog: EC 1.3.1.74 2-alkenal reductase
MTIASKTLIYKAHTTGLPVAGVHLVVENCPFDDDAPPPNGGITVKNEYLSFDADMRLQMRQSDEYNRAIYLPWSVGQPALVPAISTVLKTDNKAFRPDDRVYIIAPAGEYVVVPADLAARAARPPSIQPLSDGTKIEPAAFLGALGNAGWIAYTSFREFVKPPYTDKTICVSAASGGVGQILGQIAKISGMKVIGSTGSDAKAEFLVKRLGFHSAWNYKQEKTSDALNRLAPELLDVYYDNVGGEQLESTLMHMKNFGTIIACGMSSQHNMPQEENYGVRTLQQIILRGLKVFGVFSEDQNLLKHNATFSQDMKEWIIARQIVTEDEVVSGMDNAPGAVVRVLTGNKFGKMILKVDPKVPIPRLSRK

SEQ ID NO: 2345 - DNA, 1650 bp, Muscodor strobelii
  misc_feature: SGI cDNA ID NO. 560411
  misc_feature: Reduced expression when VOC is produced
  misc_feature: Encodes the peptide sequence at SEQ ID NO 2346
atgccgttcctcaagaagcaagcctctgaggcagaaacagcaagggcagccccaaatggagagtcctctgcgtccaacggtatcgtacagggaaggccagcggctaccaatgagccggctttgccggcgaagcagcagagggtcacttttatggcttgtttcctcggtcttgtcgccagtattggaggtttcatgtttggatatgtcagtggccaaatttccggatactttggcatggatgactacgctaggcgctttggtcaagataatggcgatggcacatattccttcgatgccgcgaggcaaggcaccatcacaggtctcctccctgtcggatgtcttttcggtgctttgattgctggaaaactagccgattccgtcggacgtcgcttggcgatctctgcttctgcactttgggcttgtgttggaattatcattgaagtttcgagcgagtacgcgtggtatcaatttgctatcggccgtctcgtcactggtgtttctatcggcgctctctccgtcgtggtgcctatgtatcaatcggaaagcagtcctgcaattatccgaggcatcttagtctcaacttaccaactgttcatcacgcttggtatctggaccagttatatcatcgattggggaacagcggacatgcagaatagcgcttcctggcgtatccctaatgctcttggtttcctttggtctattattcttggtgtcggaatcctattcctccccgagagtccacgatacgcctattacaagggtcgtcatgacgaagcccgacgcactatagcccgtctcgctggcgttgacgaaaatgctcgcacggtcaatgaccagatcacccaaattcgagttaaagtagaagaggagaactccactgtcaaggcaaaatggtacgagatcttcaccggtcctcgaatgttctaccgcactcttctgggagtgactcttcaagctggtcagcagctgaccggtgccaacttctttttctactacggcacgaccgttttcgctgccaccggcttgaaagacagctatgtcactcaaatcatcttgggcagtgtcaacgtcttttgcacattcggaggtctttatgtcgtgcaaaaagtcggacggcgcaaggcactcatggccggtgctggttggatcttcatctgcttcataatttacacattcgtcggcacctacgcactgaattcgacaaatccgcagaacacacctcaagcaggcgccgctctggttgttttctctgccctcgccatcggtgccttcgcagcaacatggggccctatcgtatgggctgtcgtcgctgagctttatcctgcccgttatcgagccccttgcatggctcttgccaccgcttccaactggttttggaacttcctcatctcatttttcacacgcttcatcacggacgcaattcactactggtatggtatggtcttcgctggatcctgtcttgcactcgtcttcattgtctttttcttcatgatcgagacgaaggaccggagtctggaagagattgataccatgtacgtgttgcatgtcaatcctattcattcggccaactgggacggcagcaaagtgccggatgggaatatctccgatagcacagaagaggctgcccagcaggaccatcgccaggtttga

SEQ ID NO: 2346 - protein, 549 aa, Muscodor strobelii
  misc_feature: SGI Peptide ID NO. 560411
  misc_feature (48)..(464): Pfam Id: PF07690 Pfam Desc: Major Facilitator Superfamily
  misc_feature (55)..(512): Pfam Id: PF00083 Pfam Desc: Sugar (and other) transporter
  misc_feature (43)..(540): NCBI GI: 256722930 Blast Desc: NECHADRAFT_102056 [Nectria haematococca mpVI 77-13-4]
  misc_feature (30)..(549): NCBI GI: 171690206 Blast Desc: protein product [Podospora anserina] gi|170945051|emb|CAP71162.1| protein product [Podospora anserina]
  misc_feature (42)..(537): NCBI GI: 46114272 Blast Desc: FG02978.1 [Gibberella zeae PH-1]
  misc_feature (42)..(544): NCBI GI: 283482563 Blast Desc: hexose transporter [Glomerella graminicola]
  misc_feature (21)..(544): NCBI GI: 116204835 Blast Desc: CHGG_10301 [Chaetomium globosum CBS 148.51] gi|88176429|gb|EAQ83897.1| CHGG_10301 [Chaetomium globosum CBS 148.51]
  misc_feature (1)..(548): NCBI GI: 111661051 Blast Desc: hexose transporter-like protein [Hypocrea jecorina]
  misc_feature (43)..(540): NCBI GI: 85077288 Blast Desc: NCU01633 [Neurospora crassa OR74A] gi|18307448|emb|CAD21508.1| low-affinity hexose transporter HXT3 [Neurospora crassa] gi|28917041|gb|EAA26765.1| NCU01633 crassa
  misc_feature (1)..(537): NCBI GI: 169600357 Blast Desc: SNOG_03012 [Phaeosphaeria nodorum SN15] gi|111068623|gb|EAT89743.1| SNOG_03012 [Phaeosphaeria nodorum SN15]
  misc_feature (3)..(537): NCBI GI: 189192204 Blast Desc: hexose transporter HXT13 [Pyrenophora tritici-repentis Pt-1C-BFP] gi|187974047|gb|EDU41546.1| hexose transporter HXT13 [Pyrenophora tritici-repentis Pt-1C-BFP]
  misc_feature (41)..(525): NCBI GI: 154301530 Blast Desc: BC1G_10092 [Botryotinia fuckeliana B05.10] gi|150855754|gb|EDN30946.1| BC1G_10092 [Botryotinia fuckeliana B05.10]
  misc_feature: Useful for introducing or modulating the production of volatile compounds
MPFLKKQASEAETARAAPNGESSASNGIVQGRPAATNEPALPAKQQRVTFMACFLGLVASIGGFMFGYVSGQISGYFGMDDYARRFGQDNGDGTYSFDAARQGTITGLLPVGCLFGALIAGKLADSVGRRLAISASALWACVGIIIEVSSEYAWYQFAIGRLVTGVSIGALSVVVPMYQSESSPAIIRGILVSTYQLFITLGIWTSYIIDWGTADMQNSASWRIPNALGFLWSIILGVGILFLPESPRYAYYKGRHDEARRTIARLAGVDENARTVNDQITQIRVKVEEENSTVKAKWYEIFTGPRMFYRTLLGVTLQAGQQLTGANFFFYYGTTVFAATGLKDSYVTQIILGSVNVFCTFGGLYVVQKVGRRKALMAGAGWIFICFIIYTFVGTYALNSTNPQNTPQAGAALVVFSALAIGAFAATWGPIVWAVVAELYPARYRAPCMALATASNWFWNFLISFFTRFITDAIHYWYGMVFAGSCLALVFIVFFFMIETKDRSLEEIDTMYVLHVNPIHSANWDGSKVPDGNISDSTEEAAQQDHRQV

SEQ ID NO: 2347 - DNA, 2326 bp, Muscodor strobelii
  misc_feature: SGI EST ID NO. CUFF.6117.0
  misc_feature: Variant of the nucleotide sequence at SEQ ID NO 2345
tagtacagcaggttagacgggagctccttctcctaggatatattgacgatgagaactgacataaggtaggtaccttagtcatagttggatattagcgctacctatcaagaaaaatgctgctccgccgggggccacgacaacttttctttgctagactgctgggctcctgtaactcgtcacgcggctagcaagttcgagatcgcgaagccctatttctcttgtttcatgacgtatcaaaatttattagaaataccctcaagcgttggaaacgcacgatcgttgccctaatgcagaacatttcggcccttccacccttctccatctcatatggctctcctcaaagatctcttataaacccacggggcctcctcaatacctaacccgcctccccagagaaactgcaccccaactctgcacccagatcagcaacgtgtttctcaacacaatgccgttcctcaagaagcaagcctctgaggcagaaacagcaagggcagccccaaatggagagtcctctgcgtccaacggtatcgtacagggaaggccagcggctaccaatgagccggctttgccggcgaagcagcagagggtcacttttatggcttgtttcctcggtcttgtcgccagtattggaggtttcatgtttggatatgtcagtggccaaatttccggatactttggcatggatgactacgctaggcgctttggtcaagataatggcgatggcacatattccttcgatgccgcgaggcaaggcaccatcacaggtctcctccctgtcggatgtcttttcggtgctttgattgctggaaaactagccgattccgtcggacgtcgcttggcgatctctgcttctgcactttgggcttgtgttggaattatcattgaagtttcgagcgagtacgcgtggtatcaatttgctatcggccgtctcgtcactggtgtttctatcggcgctctctccgtcgtggtgcctatgtatcaatcggaaagcagtcctgcaattatccgaggcatcttagtctcaacttaccaactgttcatcacgcttggtatctggaccagttatatcatcgattggggaacagcggacatgcagaatagcgcttcctggcgtatccctaatgctcttggtttcctttggtctattattcttggtgtcggaatcctattcctccccgagagtccacgatacgcctattacaagggtcgtcatgacgaagcccgacgcactatagcccgtctcgctggcgttgacgaaaatgctcgcacggtcaatgaccagatcacccaaattcgagttaaagtagaagaggagaactccactgtcaaggcaaaatggtacgagatcttcaccggtcctcgaatgttctaccgcactcttctgggagtgactcttcaagctggtcagcagctgaccggtgccaacttctttttctactacggcacgaccgttttcgctgccaccggcttgaaagacagctatgtcactcaaatcatcttgggcagtgtcaacgtcttttgcacattcggaggtctttatgtcgtgcaaaaagtcggacggcgcaaggcactcatggccggtgctggttggatcttcatctgcttcatgtgagaactccgcaacgagttcacgtcggcacatcaacaggcactaactgtttccagaatttacacattcgtcggcacctacgcactgaattcgacaaatccgcagaacacacctcaagcaggcgccgctctggttgttttctctgccctcgccatcggtgccttcgcagcaacatggggccctatcgtatgggctgtcgtcgctgagctttatcctgcccgttatcgagccccttgcatggctcttgccaccgcttccaactggttttggaacttcctcatctcatttttcacacgcttcatcacggacgcaattcactactggtatggtatggtcttcgctggatcctgtcttgcactcgtcttcattgtctttttcttcatgatcgagacgaaggaccggagtctggaagagattgataccatgtacgtgttgcatgtcaatcctattcattcggccaactgggacggcagcaaagtgccggatgggaatatctccgatagcacagaagaggctgcccagcaggaccatcgccaggtttgatctgatatgtaatggtataaaatagagttgtaaaaacagagcaagagtacatatagaaccgttgtatatctgtaatatgtatatatttaatggcggacttcaggctttcaaaacgatacacctcttcaaaaacatggcatacggtgacccgtatacaacaagaccatatttcgc

SEQ ID NO: 2348 - DNA, 1368 bp, Muscodor strobelii
  misc_feature: SGI cDNA ID NO. 560412
  misc_feature: Encodes the peptide sequence at SEQ ID NO 2349
atgagtgagacgcgagcaattccgatcaccgaagagttatgcaaattcattgtagaaactcactacgaacaactagatgaaaatctcgttgcaaaactaaaagacctcattacggactgcattggtattgctgctggtgcggctgcaatctgcgagtctacggagccattcgtcaaggcagccacagcccttggaggcagagcaggacaatcaacagttttcacgaaaggaagtgtttggtccccacagtacgcaggcttcttaaatgcagcactcgcccattcctttgactttgatgatactcatgcctcctctatcttacatcctggcacgacagcaattccaacagcgctggctcagggcgaactcacgggatgcgatggcaaaacattacttcttgctgtagccgttggttacgagatcacatgccggattggtaagggttttaattatggcggatatacgcgaggttttcataatacagcgacagcaggcatttttggtgcggttgcagcaatttccaaaattaaaagattgtcgttggaacaggtgaagaatgcttttggtctggcgcattcgaaagccgctggctccatgcagttcctcgacaatggttcgtggaacaagaggctgcatcccggatttgtcgtccacgacgcattcgttgcggtcgcgctcgctgaggctggcgtagtaggtgcgacccgaccgattgaaggcaaatatggcgcattgcacatgttctcagccagttcaacgaccgcgggtatggttgatgggcttggttcgcagtggatattcggcgagacagcaatcaaaccattcccagcttgtcgcatgacgcactcggcaatcgaagtggtcagcggcgtggcgaaggaatacaaaggcaagacggtagagcacataaccgttgcactctcgcccggatgttatcccgtcgtcggacctccgcagccgaataggatccatcccaagaccattgtcgacgggcagttctcgatgaactatcaagtggctattgcatggctacatgggatggatatcggatggaggatgtatgacaagtcgcagatggagagctctgaagtcgcagcactcactgagaaggttgaagttgttataaacaaagaggttgctgatcttgaggcacgaatctcgttcaaatgggcggacggaacaacaacagatgctgcacaagtctatccgctcggggaaaacgagcacccattctcaaaagatcgtgtacacgcaaagttccttggaatggttgctccagcgtatgatggagaaacagcgaaggcgattttggatgtgattgagacgattgacaatcgtaacatcggagatctcatgaaattagtctag

SEQ ID NO: 2349 - protein, 455 aa, Muscodor strobelii
  misc_feature: SGI Peptide ID NO. 560412
  misc_feature (7)..(454): Pfam Id: PF03972 Pfam Desc: MmgE/PrpD family
  misc_feature (10)..(453): NCBI GI: 167644465 Blast Desc: MmgE/PrpD family protein [Caulobacter sp. K31] gi|167346895|gb|ABZ69630.1| MmgE/PrpD family protein [Caulobacter sp. K31]
  misc_feature (10)..(445): NCBI GI: 39933639 Blast Desc: MmgE/PrpD family protein [Rhodopseudomonas palustris CGA009] gi|39647485|emb|CAE26006.1| MmgE/PrpD family [Rhodopseudomonas palustris CGA009]
  misc_feature (10)..(445): NCBI GI: 192288994 Blast Desc: MmgE/PrpD family protein [Rhodopseudomonas palustris TIE-1] gi|192282743|gb|ACE99123.1| MmgE/PrpD family protein [Rhodopseudomonas palustris TIE-1]
  misc_feature (10)..(445): NCBI GI: 283839378 Blast Desc: MmgE/PrpD family protein [Rhodopseudomonas palustris DX-1] gi|283579777|gb|EFC27198.1| MmgE/PrpD family protein [Rhodopseudomonas palustris DX-1]
  misc_feature (10)..(445): NCBI GI: 27375927 Blast Desc: bll0816 [Bradyrhizobium japonicum USDA 110] gi|27349065|dbj|BAC46081.1| bll0816 [Bradyrhizobium japonicum USDA 110]
  misc_feature (10)..(426): NCBI GI: 146337186 Blast Desc: MmgE/PrpD family protein [Bradyrhizobium sp. ORS278] gi|146189992|emb|CAL73984.1| Conserved ; MmgE/PrpD family protein [Bradyrhizobium sp. ORS278]
  misc_feature (10)..(445): NCBI GI: 86747831 Blast Desc: MmgE/PrpD [Rhodopseudomonas palustris HaA2] gi|86570859|gb|ABD05416.1| MmgE/PrpD [Rhodopseudomonas palustris HaA2]
  misc_feature (10)..(445): NCBI GI: 91974628 Blast Desc: MmgE/PrpD [Rhodopseudomonas palustris BisB5] gi|91681084|gb|ABE37386.1| MmgE/PrpD [Rhodopseudomonas palustris BisB5]
  misc_feature (10)..(445): NCBI GI: 90421891 Blast Desc: MmgE/PrpD [Rhodopseudomonas palustris BisB18] gi|90103905|gb|ABD85942.1| MmgE/PrpD [Rhodopseudomonas palustris BisB18]
  misc_feature (10)..(426): NCBI GI: 148251642 Blast Desc: BBta_0016 [Bradyrhizobium sp. BTAi1] gi|146403815|gb|ABQ32321.1| BBta_0016 [Bradyrhizobium sp. BTAi1]
MSETRAIPITEELCKFIVETHYEQLDENLVAKLKDLITDCIGIAAGAAAICESTEPFVKAATALGGRAGQSTVFTKGSVWSPQYAGFLNAALAHSFDFDDTHASSILHPGTTAIPTALAQGELTGCDGKTLLLAVAVGYEITCRIGKGFNYGGYTRGFHNTATAGIFGAVAAISKIKRLSLEQVKNAFGLAHSKAAGSMQFLDNGSWNKRLHPGFVVHDAFVAVALAEAGVVGATRPIEGKYGALHMFSASSTTAGMVDGLGSQWIFGETAIKPFPACRMTHSAIEVVSGVAKEYKGKTVEHITVALSPGCYPVVGPPQPNRIHPKTIVDGQFSMNYQVAIAWLHGMDIGWRMYDKSQMESSEVAALTEKVEVVINKEVADLEARISFKWADGTTTDAAQVYPLGENEHPFSKDRVHAKFLGMVAPAYDGETAKAILDVIETIDNRNIGDLMKLV

SEQ ID NO: 2350 - DNA, 2710 bp, Muscodor strobelii
  misc_feature: SGI EST ID NO. CUFF.6012.0
  misc_feature: Variant of the nucleotide sequence at SEQ ID NO 2348
cttcagatatcgatcaaattggctttgtgagaaagaaatcttcttagaaacgagtatcatagcagctacggccacagtcagtctcaggggacttggccaacaatgcaagtgatagataacgccagtggctccattggcaaggataccaaaagcgatgaagattgttcaaagatagtgcggccatgcggctcaacaccggcgcgttcccgtaaattctcgggagctatattagtggattattgacaagcggcgtcggcattagcacgtttgactcgtgatatgatatcaatcgttcaacaactttgacgaggtacagatgggtcctggcaactactcctttcagtctatctcgtctttcggtgaatgatcgttgacgagaagggcaatatgcgaccacggcgtcgtaccagacgtgtgcttgtagatatctggtgaagataacctcaacagacgtgcatcttagcttctgcgtgaagtcgccgatggagtcggtcctatggtggagcaaaagcggctctgcggaagcgtcaacgactaaaagcaaatttcgacgtaagacccttaagctatttgtatagtctcaaggaatgtgctaccagcttacgactcaaggctggtatcgtagtagggcacggtcagttagacaagcgagtcaatattcccgcaccaatctcccggttttcattcttcaagtgctgatctgtcggcccgtctgcttcaaatttgtatcgagagattagatcagctacattgaatgttgtattatcgaggatgcttcagtcagtaaatatgtacataacgccagaaagattttgcgctggcaaagagcatgacatgtgagtgaacagaacgaggtacgcgaagtacgttacattgggtgacatcatccgccgtcttccgttagaacccacagcgatatatatttaggtctgtcctgtctgagtcgcgagccagccatgaaaggactagtgtcatacgagattgatatatgccataatgtctctcaccagtgaaaacatctgaggatgagagcttcatttcgaaactgagatgagcgacaggatgggccaagcttgacgatccaaagacatcaactaatcaacctcggtctttccccgcgttgtctaccccgccatacggatgaaacatggcagaaaccacttcatgtaggtattctgggcgcagaaagcggctctttatagcaagctatctttcgaggctttcgcggctgcgttaaaagtatagatatcaattgcagtatcagggaagtttccagaatactgtttgcaaggtcagccacgatgagtgagacgcgagcaattccgatcaccgaagagttatgcaaattcattgtagaaactcactacgaacaactagatgaaaatctcgttgcaaaactaaaagacctcattacggactgcattggtattgctgctggtgcggctgcaatctgcgagtctacggagccattcgtcaaggcagccacagcccttggaggcagagcaggacaatcaacagttttcacgaaaggaagtgtttggtccccacagtacgcaggcttcttaaatgcagcactcgcccattcctttgactttgatgatactcatgcctcctctatcttacatcctggcacgacagcaattccaacagcgctggctcagggcgaactcacgggatgcgatggcaaaacattacttcttgctgtagccgttggttacgagatcacatgccggattggtaagggttttaattatggcggatatacgcgaggttttcataatacagcgacagcaggcatttttggtgcggttgcagcaatttccaaaattaaaagattgtcgttggaacaggtgaagaatgcttttggtctggcgcattcgaaagccgctggctccatgcagttcctcgacaatggttcgtggaacaagaggctgcatcccggatttgtcgtccacgacgcattcgttgcggtcgcgctcgctgaggctggcgtagtaggtgcgacccgaccgattgaaggcaaatatggcgcattgcacatgttctcagccagttcaacgaccgcgggtatggttgatgggcttggttcgcagtggatattcggcgagacagcaatcaaaccattcccagcttgtcgcatgacgcactcggcaatcgaagtggtcagcggcgtggcgaaggaatacaaaggcaagacggtagagcacataaccgttgcactctcgcccggatgttatcccgtcgtcggacctccgcagccgaataggatccatcccaagaccattgtcgacgggcagttctcgatgaactatcaagtggctattgcatggctacatgggatggatatcggatggaggatgtatgacaagtcgcagatggagagctctgaagtcgcagcactcactgagaaggttgaagttgttataaacaaagaggttgctgatcttgaggcacgaatctcgttcaaatgggcggacggaacaacaacagatgctgcacaagtctatccgctcggggaaaacgagcacccattctcaaaagatcgtgtacacgcaaagttccttggaatggttgctccagcgtatgatggagaaacagcgaaggcgattttggatgtgattgagacgattgacaatcgtaacatcggagatctcatgaaattagtctagaagacgactcgtgaacgaaagaaaacgaaaatatgagatca

SEQ ID NO: 2351 - DNA, 1257 bp, Muscodor strobelii
  misc_feature: SGI cDNA ID NO. 560413
  misc_feature: Reduced expression when VOC is produced
  misc_feature: Encodes the peptide sequence at SEQ ID NO 2352
atggctggtgctgaagtcgtcgctggcctgtgggcagctgaagaggtcatatctactggcattcaggccagtgtagcaggatatgccgttgcgaaaccgacaatgcctctgaaggctacattttctcagattggatctaccaccgacactcagtccaccgcctccctggcacgatcgcatcatacactaactgtcatcggtaatcgggcatggatctttggaggacagaccaccgaaaagcaactgggcacaaacgagattcattcgatagccttgcctgtcaaggatgccgcagagaccgagtatcaggctttccctgcgatcccagtcaatgacggccaacaagttccagctgcacgtgctgagcacgcggcttgtgcaattgggaagcgccttgccatccatggaggtcgcagtgagaatggcacgctcatcgacgaaggcccaaggatctggatcttcgacactgaacagttgacatgggaagctcttgaacctgccagtcatctagagagaacaccaccagccagatgcaagggcaagctactgtcgcacgataagaatctcgtcttgtatggaggtattggatcggacggcgcggctctaacagatgtttggcattttgattgcttcactaaagtctggaatcaactaccgcatgcccctgtggctgcgacaagtgccaccatctctggcgatacgttatatgtgatcgcggcctcagactccttgagcagcgacgtacacagtcttgacatcaaactctacgaatcacaaccgccaacctggaccactgtgtctgttccgacgaacccacttacacctggaccccgtccccgcgagaacggaggattgttaccggtaaccactggcttcggccgtaacttcctgctgtatttctttggcgaacgccaagcagatatcaaggacgatgcgaaggtgttcagcgatctatggacatatcaactcccatccagcgaattacaggctaagctatcaactgaggctatcaagcctgccaaagtcaaagaccagattcgatccgggttgggcgcggacacgggtgaggcaagttgggctgaagttgaggtgcaggcaccggatgaccttcaagctcagagtggcaaagctcaccctggtccccgtggaaatttcggctatgatgtatcgcaagatgggaagaatgtggtcatttggggtggtgtcagtgcagatggcaaggttgaaggcgatgggtggatgatcactttaggttga

SEQ ID NO: 2352 - protein, 418 aa, Muscodor strobelii
  misc_feature: SGI Peptide ID NO. 560413
  misc_feature (176)..(222): Pfam Id: PF01344 Pfam Desc: Kelch motif
  misc_feature (4)..(418): NCBI GI: 256723866 Blast Desc: NECHADRAFT_67881 [Nectria haematococca mpVI 77-13-4]
  misc_feature (66)..(417): NCBI GI: 169621351 Blast Desc: SNOG_13885 [Phaeosphaeria nodorum SN15] gi|160704236|gb|EAT78909.2| SNOG_13885 [Phaeosphaeria nodorum SN15]
  misc_feature (4)..(417): NCBI GI: 46111973 Blast Desc: FG02867.1 [Gibberella zeae PH-1]
  misc_feature (4)..(417): NCBI GI: 85094982 Blast Desc: NCU06131 [Neurospora crassa OR74A] gi|28921451|gb|EAA30757.1| [Neurospora crassa OR74A]
  misc_feature (4)..(417): NCBI GI: 261355536 Blast Desc: conserved [Verticillium albo-atrum VaMs.102]
  misc_feature (32)..(417): NCBI GI: 39942664 Blast Desc: MGG_03412 [Magnaporthe grisea 70-15] gi|145023141|gb|EDK06694.1| MGG_03412 [Magnaporthe grisea 70-15]
  misc_feature (14)..(398): NCBI GI: 171679898 Blast Desc: protein product [Podospora anserina] gi|170939575|emb|CAP64802.1| protein product [Podospora anserina]
  misc_feature (30)..(417): NCBI GI: 169610493 Blast Desc: SNOG_08346 [Phaeosphaeria nodorum SN15] gi|111063502|gb|EAT84622.1| SNOG_08346 [Phaeosphaeria nodorum SN15]
  misc_feature (10)..(417): NCBI GI: 189204976 Blast Desc: conserved [Pyrenophora tritici-repentis Pt-1C-BFP] gi|187985922|gb|EDU51410.1| conserved [Pyrenophora tritici-repentis Pt-1C-BFP]
  misc_feature (16)..(417): NCBI GI: 156055460 Blast Desc: SS1G_05082 [Sclerotinia sclerotiorum 1980] gi|154702866|gb|EDO02605.1| SS1G_05082 [Sclerotinia sclerotiorum 1980]
  misc_feature: Useful for introducing or modulating the production of volatile compounds
MAGAEVVAGLWAAEEVISTGIQASVAGYAVAKPTMPLKATFSQIGSTTDTQSTASLARSHHTLTVIGNRAWIFGGQTTEKQLGTNEIHSIALPVKDAAETEYQAFPAIPVNDGQQVPAARAEHAACAIGKRLAIHGGRSENGTLIDEGPRIWIFDTEQLTWEALEPASHLERTPPARCKGKLLSHDKNLVLYGGIGSDGAALTDVWHFDCFTKVWNQLPHAPVAATSATISGDTLYVIAASDSLSSDVHSLDIKLYESQPPTWTTVSVPTNPLTPGPRPRENGGLLPVTTGFGRNFLLYFFGERQADIKDDAKVFSDLWTYQLPSSELQAKLSTEAIKPAKVKDQIRSGLGADTGEASWAEVEVQAPDDLQAQSGKAHPGPRGNFGYDVSQDGKNVVIWGGVSADGKVEGDGWMITLG

SEQ ID NO: 2353 - DNA, 1622 bp, Muscodor strobelii
  misc_feature: SGI EST ID NO. CUFF.6019.0
  misc_feature: Variant of the nucleotide sequence at SEQ ID NO 2351
caaaaccgtggtctttattgttagcatctgactgtcaccaattcaaagcacaacttcaattcgaactctacaaaatccaacacgaactgctggattgaaatcaaacccaacattccactccaaatctttcgacggtgcatcttaggaacatggctggtgctgaagtcgtcgctggcctgtgggcagctgaagaggtcatatctactggcattcaggccagtgtagcaggatatgccgttgcgaaaccgacaatgcctctgaaggctacattttctcagattggatctaccaccgacactcagtccaccgcctccctggcacgatcgcatcatacactaactgtcatcggtaatcgggcatggatctttggaggacagaccaccgaaaagcaactgggcacaaacgagattcattcgatagccttgcctgtcaaggatgccgcagagaccgagtatcaggctttccctgcgatcccagtcaatgacggccaacaagttccagctgcacgtgctgagcacgcggcttgtgcaattgggaagcgccttgccatccatggaggtcgcagtgagaatggcacgctcatcgacgaaggcccaaggatctggatcttcgacactgaacagttgacatgggaagctcttgaacctgccagtcatctagagagaacaccaccagccagatgcaagggcaagctactgtcgcacgataagaatctcgtcttgtatggaggtattggatcggacggcgcggctctaacagatgtttggcattttgattgcttcactaaagtctggaatcaactaccgcatgcccctgtggctgcgacaagtgccaccatctctggcgatacgttatatgtgatcgcggcctcagactccttgagcagcgacgtacacagtcttgacatcaaactctacgaatcacaaccgccaacctggaccactgtgtctgttccgacgaacccacttacacctggaccccgtccccgcgagaacggaggattgttaccggtaaccactggcttcggccgtaacttcctgctgtatttctttggcgaacgccaagcagatatcaaggacgatgcgaaggtgttcagcgatctatggacatatcaactcccatccagcgaattacaggctaagctatcaactgaggctatcaagcctgccaaagtcaaagaccagattcgatccgggttgggcgcggacacgggtgaggcaagttgggctgaagttgaggtgcaggcaccggatgaccttcaagctcagagtggcaaagctcaccctggtccccgtggaaatttcggctatgatgtatcgcaagatgggaagaatgtggtcatttggggtggtgtcagtgcagatggcaaggttgaaggcgatgggtggatgatcactttaggttgatcagcaacaggcgcatttgtacgaaacaattctatgtacgatatgtgtagttatccatattgtcagacgggtgcaatatggcatggtcagctgcagcttccaatgccctgcaattcatgaaccccgttacacggcaatgaaacggtcaacattcttcaatcaagtctgtgaggtagtgatagtgacaaatgaccgagagcgtgatgagtatttcca

SEQ ID NO: 2354 - DNA, 1209 bp, Muscodor strobelii
  misc_feature: SGI cDNA ID NO. 560414
  misc_feature: Encodes the peptide sequence at SEQ ID NO 2355
atggcgcctccgttccgcgcagaacagatgggttcgctccttcgtcccgaaaatctgctagaaatacgtgcgaacatacgcgagaaaggcatatcggaagaggaagcaggactaccagatgtcgagaaaaaggctgtagcggatgtggtaaagttacaacaagatcttggtatcaaagccgtcacatcgggcgaattcaaccgcacgcgcttctggggtctgatgtgggacgaattcgagggcacgatccagctcaatgacgccaacgccagcatgttccgactgtaccacccagatgtcgtcagccttatcgagacagatcgacacgtcatgcctggcgagtctgtcattgcggggagcaagctctcgcataacgctagcaagtcgacttctaatcttcatgagctcaagcttgtgcaagccgctacacctgagagcgaatggggaaacatcaagctcactatgatcacacccgcttggtttcacatgagatacaagcaaggaaaggcatatacagctgacgcgtacgcaaatgatgcggagtacttcaaagacgttgccaagatttaccaggccgagcttgacatgttgtacaagaacgggttgcgtaacgtccaatttgacgatcccggcatggcctacttttgctctgcgaaatttcgacaaggatgggaagaagataaagataacatcggtacggtagaagaccttctagatgcatacatcgcgttgtacaacgactgcgtgagcaaagcaccagccgatatgcacttcggcatccacttgtgtcgtggcaacttcattggcgggcgacactttgccgaaggcgcatacgacctcattgccaagaaactattccaggaccttaacctccatactttctacctcgagtacgacaccgagcgtgccggtggattcgaacccctaaaattcctgcctaagggcaagagcgtcgtggttggtgttatcagcaccaagctccgggaacttgaggacaaagaagacatgaagaagcgcttgtataaggctgcagagttcgtggctgagggccgtgaagagtctgccgaggaagcattgaagagcatttgtgttagccctcagtgcggatttagtacacacgagactggttatcccctttctcttgaagatgaaaagaagaagcttgcgcttgttagacagatcgccgatgagatctggggcgagccttaa

SEQ ID NO: 2355 - protein, 402 aa, Muscodor strobelii
  misc_feature: SGI Peptide ID NO. 560414
  misc_feature (2)..(402): NCBI GI: 145229591 Blast Desc: An01g06810 [Aspergillus niger] gi|134055212|emb|CAK43799.1| protein product [Aspergillus niger]
  misc_feature (4)..(401): NCBI GI: 171683802 Blast Desc: protein product [Podospora anserina] gi|170941861|emb|CAP67514.1| protein product [Podospora anserina]
  misc_feature (3)..(402): NCBI GI: 116200329 Blast Desc: CHGG_08320 [Chaetomium globosum CBS 148.51] gi|88179599|gb|EAQ87067.1| CHGG_08320 [Chaetomium globosum CBS 148.51]
  misc_feature (3)..(401): NCBI GI: 255941718 Blast Desc: Pc16g13290 [Penicillium chrysogenum Wisconsin 54-1255] gi|211586251|emb|CAP93999.1| Pc16g13290 [Penicillium chrysogenum Wisconsin 54-1255]
  misc_feature (1)..(401): NCBI GI: 46127005 Blast Desc: FG07880.1 [Gibberella zeae PH-1]
  misc_feature (4)..(402): NCBI GI: 256724410 Blast Desc: [Nectria haematococca mpVI 77-13-4]
  misc_feature (10)..(401): NCBI GI: 115386788 Blast Desc: conserved [Aspergillus terreus NIH2624] gi|114190933|gb|EAU32633.1| conserved [Aspergillus terreus NIH2624]
  misc_feature (1)..(402): NCBI GI: 39976371 Blast Desc: MGG_05888 [Magnaporthe grisea 70-15] gi|145011866|gb|EDJ96522.1| MGG_05888 [Magnaporthe grisea 70-15]
  misc_feature (4)..(401): NCBI GI: 85110325 Blast Desc: NCU08434 [Neurospora crassa OR74A] gi|28881257|emb|CAD70516.1| conserved [Neurospora crassa] gi|28925083|gb|EAA34168.1| conserved [Neurospora crassa OR74A]
  misc_feature (3)..(399): NCBI GI: 154305130 Blast Desc: BC1G_08655 [Botryotinia fuckeliana B05.10] gi|150853818|gb|EDN29010.1| BC1G_08655 [Botryotinia fuckeliana B05.10]
MAPPFRAEQMGSLLRPENLLEIRANIREKGISEEEAGLPDVEKKAVADVVKLQQDLGIKAVTSGEFNRTRFWGLMWDEFEGTIQLNDANASMFRLYHPDVVSLIETDRHVMPGESVIAGSKLSHNASKSTSNLHELKLVQAATPESEWGNIKLTMITPAWFHMRYKQGKAYTADAYANDAEYFKDVAKIYQAELDMLYKNGLRNVQFDDPGMAYFCSAKFRQGWEEDKDNIGTVEDLLDAYIALYNDCVSKAPADMHFGIHLCRGNFIGGRHFAEGAYDLIAKKLFQDLNLHTFYLEYDTERAGGFEPLKFLPKGKSVVVGVISTKLRELEDKEDMKKRLYKAAEFVAEGREESAEEALKSICVSPQCGFSTHETGYPLSLEDEKKKLALVRQIADEIWGEP

SEQ ID NO: 2356 - DNA, 1622 bp, Muscodor strobelii
  misc_feature: SGI EST ID NO. CUFF.6156.1
  misc_feature: Variant of the nucleotide sequence at SEQ ID NO 2354
tccgtctattctcgccgtcccctttccctgcgaagtctatcgcaaatccctgtcacattgagaagatgatgactactgctgcaaaccgagccgatggcgcgggctccgccgctcatcgttccccgcacctgcgacggcgtcgcttatactcgctgactttttggggtatatatgggctttatgactgtaaggctgtgcaaggtaaaatgactgattcaccgtgatataaactctgctaaatccctacgaagactgctagaaagcggtgcgagaaacgtacttgcgagagaaatacctcctagacctaccacgaacaacaattgaagatggcgcctccgttccgcgcagaacagatgggttcgctccttcgtcccgaaaatctgctagaaatacgtgcgaacatacgcgagaaaggcatatcggaagaggaagcaggactaccagatgtcgagaaaaaggctgtagcggatgtggtaaagttacaacaagatcttggtatcaaagccgtcacatcgggcgaattcaaccgcacgcgcttctggggtctgatgtgggacgaattcgagggcacgatccagctcaatgacgccaacgccagcatgttccgactgtaccacccagatgtcgtcagccttatcgagacagatcgacacgtcatgcctggcgagtctgtcattgcggggagcaagctctcgcataacgctagcaagtcgacttctaatcttcatgagctcaagcttgtgcaagccgctacacctgagagcgaatggggaaacatcaagctcactatgatcacacccgcttggtttcacatgagatacaagcaaggaaaggcatatacagctgacgcgtacgcaaatgatgcggagtacttcaaagacgttgccaagatttaccaggccgagcttgacatgttgtacaagaacgggttgcgtaacgtccaatttgacgatcccggcatggcctacttttgctctgcgaaatttcgacaaggatgggaagaagataaagataacatcggtacggtagaagaccttctagatgcatacatcgcgttgtacaacgactgcgtgagcaaagcaccagccgatatgcacttcggcatccacttgtgtcgtggcaacttcattggcgggcgacactttgccgaaggcgcatacgacctcattgccaagaaactattccaggaccttaacctccatactttctacctcgagtacgacaccgagcgtgccggtggattcgaacccctaaaattcctgcctaagggcaagagcgtcgtggttggtgttatcagcaccaagctccgggaacttgaggacaaagaagacatgaagaagcgcttgtataaggctgcagagttcgtggctgagggccgtgaagagtctgccgaggaagcattgaagagcatttgtgttagccctcagtgcggatttagtacacacgagactggttatcccctttctcttgaagatgaaaagaagaagcttgcgcttgttagacagatcgccgatgagatctggggcgagccttaagatcggcgaatacagcaatgtgatacatagagcagtgtgatagagatagtaactaaattcgctaccgtagtctattttccttcccaa

SEQ ID NO: 2357 - DNA, 2061 bp, Muscodor strobelii
  misc_feature: SGI cDNA ID NO. 560415
  misc_feature: Encodes the peptide sequence at SEQ ID NO 2358
atgcggttctcttcacaaggggctatggccctggccatgatggcctcggctgccactgccaccaccgacgttgcccctcgccactttaagccgctatcgactgacatcagtctcaacgacgacttgagcggcaagacactgattgctggtgtcctcgccgatgtctctgtcggcaagctcgcctccgccaaggctggtgcccatgttaaggttgtttgcgagcactgtctcgttaagggtgatgtcaaggccaccgtcgacctgaaggatctttccgtcggtcttgacttgaaggatatcgaggctgtcctcgatcttgacatcaacattggtgctgctgctaccattgctgttagccttatcgagcctgccaaggtcactcttcccttcgccggtcttaacgtggaggccctggtcgctctcgatcttgtcttgggtgtccacaccgagttggatgtttctgctggtatctacgtcaagttgcctgaagcttcgttgacaaccgatatcctcagcggtgacttgctcgacaacacaatctctggcaacgttgctgtcaaggttcttcctattgaggtccgcatcggctgcactgagatcctcgctgatcttcgtctccgtgtcgatcttggtgttgccgcagatgtcgatgttgatgagcttcttccgcttgatgagttgctcggccttgagattcccgagattggtgtcggtctggacgtttccgtcttcgccaatcttttggaatacgtcggtttcttctgcgccagcccttcatgcccggtctattatgacagctatggtctgaatgtcggtgctgctgttgagctcgatgttgaggttgaagatctgctctccctcaaccttgcaccctccgttgctctcggtctcttcaccatccctcgccacacctactgcgctcctcccgttcccactgcatctgctaccacatctggctctagcaccgctgcctcaactcctgtcacgacttccgctgcatcgactagccccatctcgtctggtctcgtgcccactgaggttaccagcacccacacatacactgtcacccagtgtgcttgcaatgtcgccaactgcccgtctcagagcgccaccagctacaccatcaccgagacaacgtcgtatgtcacatacgctactgcatcttccagcgagactttcgattactccactgtcactgcccatccttcgagcatgactccttgcagcaccaagtccaccatcactcccaccagtgctccttacaccgttgctacatccactgctcctgcttcttcaagctactctgctgtctcatcggcttcatactcggccgccagcagtgtttccactagctcccctgccggaagctccagttactcggctgcttcgtctagcagctatgctgtaacgtctgcctcgtccagcgctgctccttcgtctacttatcccgctggtggcgagtctagcagctatgctggaagttcgacctacatcgtcacatctagctacggcgcttctccttcatccacatatcctgctggcggcgagtcatcgagctacggtgctggctcgtcttccagctacgttgccacctcgtctagctacgttgcggtgccatcatcgtcgtatcctgcgggcggtgcttccagcagctacggcgctggctcatctagcagctatgtagcatcttctagctacagcgctgttccttcgtccacatatccagctggaggcgcttcatccagttatcctggtgctcctggcgcttcatcatcttcatacccagttggtggtgcttcgtcgagctatcccagctacccaactggtgttgcgacatatcccgctggcggcgcgacctcttacagcgtctcgcccgcgacatcgacttatcctattggcggtcaaggatatcctacgccaagctcatatccaaccggtgctggcaatggaaccacaccgacttacgggtctggatatcctacggctgtcccaaccgccggtgttgccaagatcggtagcagcattgctctcgtcttcgctgccgttgttgctgtgttgtaa

SEQ ID NO: 2358 - protein, 686 aa, Muscodor strobelii
  misc_feature: SGI Peptide ID NO. 560415
  misc_feature (77)..(420): NCBI GI: 46115352 Blast Desc: FG03518.1 [Gibberella zeae PH-1]
  misc_feature (72)..(307): NCBI GI: 156056965 Blast Desc: SS1G_04213 [Sclerotinia sclerotiorum 1980] gi|154701999|gb|EDO01738.1| SS1G_04213 [Sclerotinia sclerotiorum 1980]
MRFSSQGAMALAMMASAATATTDVAPRHFKPLSTDISLNDDLSGKTLIAGVLADVSVGKLASAKAGAHVKVVCEHCLVKGDVKATVDLKDLSVGLDLKDIEAVLDLDINIGAAATIAVSLIEPAKVTLPFAGLNVEALVALDLVLGVHTELDVSAGIYVKLPEASLTTDILSGDLLDNTISGNVAVKVLPIEVRIGCTEILADLRLRVDLGVAADVDVDELLPLDELLGLEIPEIGVGLDVSVFANLLEYVGFFCASPSCPVYYDSYGLNVGAAVELDVEVEDLLSLNLAPSVALGLFTIPRHTYCAPPVPTASATTSGSSTAASTPVTTSAASTSPISSGLVPTEVTSTHTYTVTQCACNVANCPSQSATSYTITETTSYVTYATASSSETFDYSTVTAHPSSMTPCSTKSTITPTSAPYTVATSTAPASSSYSAVSSASYSAASSVSTSSPAGSSSYSAASSSSYAVTSASSSAAPSSTYPAGGESSSYAGSSTYIVTSSYGASPSSTYPAGGESSSYGAGSSSSYVATSSSYVAVPSSSYPAGGASSSYGAGSSSSYVASSSYSAVPSSTYPAGGASSSYPGAPGASSSSYPVGGASSSYPSYPTGVATYPAGGATSYSVSPATSTYPIGGQGYPTPSSYPTGAGNGTTPTYGSGYPTAVPTAGVAKIGSSIALVFAAVVAVL

SEQ ID NO: 2359 - DNA, 2587 bp, Muscodor strobelii
  misc_feature: SGI EST ID NO. CUFF.6046.0
  misc_feature: Variant of the nucleotide sequence at SEQ ID NO 2357
ttctccagttgccggacatgtcactaattagatcttctggtttacactggggtcgaaaggcaggaagaagagttcaaaaggacggcctgtgtcgttttcattgcacctgtttcccttccctctcatcgtgtttctatcagagcaagccactcgtttcctttgctttatagcatattacactcttttttggggtttactggagactattgtcacagttcccgtccattcactaatattaatacgactctatctgacaatgcggttctcttcacaaggggctatggccctggccatgatggcctcggctgccactgccaccaccgacgttgcccctcgccactttaagccgctatcgactgacatcagtctcaacgacgacttgagcggcaagacactgattgctggtgtcctcgccgatgtctctgtcggcaagctcgcctccgccaaggctggtgcccatgttaaggttgtttgcgagcactgtctcgttaagggtgatgtcaaggccaccgtcgacctgaaggatctttccgtcggtcttgacttgaaggatatcgaggctgtcctcgatcttgacatcaacattggtgctgctgctaccattgctgttagccttatcgagcctgccaaggtcactcttcccttcgccggtcttaacgtggaggccctggtcgctctcgatcttgtcttgggtgtccacaccgagttggatgtttctgctggtatctacgtcaagttgcctgaagcttcgttgacaaccgatatcctcagcggtgacttgctcgacaacacaatctctggcaacgttgctgtcaaggttcttcctattgaggtccgcatcggctgcactgagatcctcgctgatcttcgtctccgtgtcgatcttggtgttgccgcagatgtcgatgttgatgagcttcttccgcttgatgagttgctcggccttgagattcccgagattggtgtcggtctggacgtttccgtcttcgccaatcttttggaatacgtcggtttcttctgcgccagcccttcatgcccggtctattatgacagctatggtctgaatgtcggtgctgctgttgagctcgatgttgaggttgaagatctgctctccctcaaccttgcaccctccgttgctctcggtctcttcaccatccctcgccacacctactgcgctcctcccgttcccactgcatctgctaccacatctggctctagcaccgctgcctcaactcctgtcacgacttccgctgcatcgactagccccatctcgtctggtctcgtgcccactgaggttaccagcacccacacatacactgtcacccagtgtgcttgcaatgtcgccaactgcccgtctcagagcgccaccagctacaccatcaccgagacaacgtcgtatgtcacatacgctactgcatcttccagcgagactttcgattactccactgtcactgcccatccttcgagcatgactccttgcagcaccaagtccaccatcactcccaccagtgctccttacaccgttgctacatccactgctcctgcttcttcaagctactctgctgtctcatcggcttcatactcggccgccagcagtgtttccactagctcccctgccggaagctccagttactcggctgcttcgtctagcagctatgctgtaacgtctgcctcgtccagcgctgctccttcgtctacttatcccgctggtggcgagtctagcagctatgctggaagttcgacctacatcgtcacatctagctacggcgcttctccttcatccacatatcctgctggcggcgagtcatcgagctacggtgctggctcgtcttccagctacgttgccacctcgtctagctacgttgcggtgccatcatcgtcgtatcctgcgggcggtgcttccagcagctacggcgctggctcatctagcagctatgtagcatcttctagctacagcgctgttccttcgtccacatatccagctggaggcgcttcatccagttatcctggtgctcctggcgcttcatcatcttcatacccagttggtggtgcttcgtcgagctatcccagctacccaactggtgttgcgacatatcccgctggcggcgcgacctcttacagcgtctcgcccgcgacatcgacttatcctattggcggtcaaggatatcctacgccaagctcatatccaaccggtgctggcaatggaaccacaccgacttacgggtctggatatcctacggctgtcccaaccgccggtgttgccaagatcggtagcagcattgctctcgtcttcgctgccgttgttgctgtgttgtaaggatatgtaattgggttgtggattgattagttgcatgcatataagcgttgtacttctaatgtctggtcatggaaagaaaaataggcgtcgtcatttactcgaagcgatacttagctaatgtcttataacataaacgaatatgaatttatatcattcgtacgccgtggccttgtctcctattgcgaagagctggtttcactgaagtcttccatgtgactttttcaatattctgcttcgtaaatgatgagctatcaatccgcgagcagtaaa

SEQ ID NO: 2360 - DNA, 2226 bp, Muscodor strobelii
  misc_feature: SGI cDNA ID NO. 560416
  misc_feature: Encodes the peptide sequence at SEQ ID NO 2361
atgctgtccactacaagttttggaagtaaaacgctccctgacggcgagaatatcaagcgagagtggaacaacgaggaggaggcacacgatcaccaagaggttgccgtagaacagcgtttcagaaagctggccacccagggcgttgtcgtgatcatcgaggatgaagaaaaggacgacggaaaaacagtgggagagctcgaagacgaaatcaacgatgaagttcgtcctgatcttgtcaacgtcatcgacctgacggaggacgaccccgacgaggacgaaaagcccccttctcgcatttcgctacgcaatggaccaatctcgccaccagacgaacagcttgacagctatgacctgaacggccaacttctcaagcctcaatctgtagttcaaatccaacgtcaagatcaaagcaatctctacagggcttcctttctctggattcagcatataatcaagacgccgaacggggtgaggctccggggcataccgctgactcgtctgagaaatctgcgtggtcgcctccaacgactccgcaacgaggtggcaatggtcctaaatgttgatcaggaggacgagcgcgaacgcaaagtccaggccgctatcgaagtgtctatcgaggacgtgattacgaccagaacatgccacttcacaaataccaagtttccagaacaccgatgccctgttggaatcttccgcactattgacgaaattgaggcgaagggcgtgctgatgtgccgctggcagtgcatcttcatatataaagatgcttcgacacgtatgaagagcggcccgccgatggaattcgtcattcggcatctcgtcgcagaagaggcaagcagaaacagattcagagtctccgagacacatcgccttaatgagtggaggggaggcaaagtccgcggaggggagcataactctggagagcaaggcatctgtggtcaaatcatcgagctcgacgagcaagtggaggaaccagatatcacaccgatccgcaaaaaacctggccagcgatatacctttggcgatatgttcagcggcgctggagggacatcgtgtggtgctaggaaggcaggctttcacattaatgttgcatgcgacaaccactccggggcacaaaagacttactcgagagtctatcccgaagccaagctttactgcattgacatctttgatttcatcgccaccgaacagactgcacatcgtgtcgacgtcttgcacatgtcgccgccatgtcagtactggtcacctgcacatacagtcgagggaaagaacgacgaagcgaatatcgcggtactcttctcctgccacgaactcgtcaagaagctgagacctcggttgttcacactcgagcagacatttggcatcatgcacccgagattcgagttctacttcaatgcgttggtacacggcttcacgcaatacaactactcgatgagatggaaggtctgcgacctagtagtctggggactaccagcccgaagacagagactaatcatgatcgggtcatgcccaggagaggagcttcctccttttccggaggtgactcacgtcccatatgctaacagacgtcctggaaagaagccattttacacggttaggaaagcgttgttcaaaattcccaaggaccaaagcagatgggatgaattacaccgaccagccaccatgatacgcagagattacccgcgctggagcgcgaacaagactttgcagcgagtcattacagcaagcaacggtggtgtgggcaactatcaccctagtggccgacgtgacttcacgaggcgggaattcgctactttgcagacatttccggtgaattatccgttcgaggcacctcatcagctgagacagataggcaatgcattcccacccttggttgtcaaaacgctgtacacacacctgcgaaaatggctggaggagaaggatggaatcatcgagacatcgaatgtgcctgatcccattgacccagatgagttggacgtcgtgatcgttcctgaagacgatgaatacacgagcgactttgttgaatacaccggaactcgacctcgacaagaaagcagcgaagagagtagttcgggagatgagatggatatcgacagcgacggtccggttgtcaatgcttgtgttgatgcgaaccaagagagaatgatctggggcactattgatcttactagaggctcgatcagtcatgctagtggaggcgggtatatcgatctcacgagagagtaa

SEQ ID NO: 2361 - protein, 741 aa, Muscodor strobelii
  misc_feature: SGI Peptide ID NO. 560416
  misc_feature (338)..(635): Pfam Id: PF00145 Pfam Desc: C-5 cytosine-specific DNA methylase
  misc_feature (338)..(501): Pfam Id: PF00145 Pfam Desc: C-5 cytosine-specific DNA methylase
  misc_feature (568)..(635): Pfam Id: PF00145 Pfam Desc: C-5 cytosine-specific DNA methylase
  misc_feature (67)..(723): NCBI GI: 116193601 Blast Desc: CHGG_06518 [Chaetomium globosum CBS 148.51] gi|88182431|gb|EAQ89899.1| CHGG_06518 [Chaetomium globosum CBS 148.51]
  misc_feature (37)..(668): NCBI GI: 261353229 Blast Desc: RIP defective [Verticillium albo-atrum VaMs.102]
  misc_feature (81)..(649): NCBI GI: 20531193 Blast Desc: AF500229_1 RIP defective [Neurospora tetrasperma]
  misc_feature (82)..(647): NCBI GI: 20531189 Blast Desc: AF500227_1 RIP defective [Neurospora crassa]
  misc_feature (82)..(647): NCBI GI: 16945407 Blast Desc: related to cytosine C5-DNA methyltransferase [Neurospora crassa]
  misc_feature (82)..(649): NCBI GI: 20531191 Blast Desc: AF500228_1 RIP defective [Neurospora intermedia]
  misc_feature (49)..(643): NCBI GI: 145610006 Blast Desc: MGG_02795 [Magnaporthe grisea 70-15] gi|145017391|gb|EDK01754.1| MGG_02795 [Magnaporthe grisea 70-15]
  misc_feature (49)..(643): NCBI GI: 149210133 Blast Desc: MGCH7_ch7g548 [Magnaporthe grisea 70-15] gi|86196503|gb|EAQ71141.1| MGCH7_ch7g548 [Magnaporthe grisea 70-15]
  misc_feature (104)..(644): NCBI GI: 164510146 Blast Desc: DNA cytosine methyltransferase [Sordaria macrospora]
  misc_feature (54)..(668): NCBI GI: 171684935 Blast Desc: protein product [Podospora anserina] gi|170942428|emb|CAP68080.1| protein product [Podospora anserina]
MLSTTSFGSKTLPDGENIKREWNNEEEAHDHQEVAVEQRFRKLATQGVVVIIEDEEKDDGKTVGELEDEINDEVRPDLVNVIDLTEDDPDEDEKPPSRISLRNGPISPPDEQLDSYDLNGQLLKPQSVVQIQRQDQSNLYRASFLWIQHIIKTPNGVRLRGIPLTRLRNLRGRLQRLRNEVAMVLNVDQEDERERKVQAAIEVSIEDVITTRTCHFTNTKFPEHRCPVGIFRTIDEIEAKGVLMCRWQCIFIYKDASTRMKSGPPMEFVIRHLVAEEASRNRFRVSETHRLNEWRGGKVRGGEHNSGEQGICGQIIELDEQVEEPDITPIRKKPGQRYTFGDMFSGAGGTSCGARKAGFHINVACDNHSGAQKTYSRVYPEAKLYCIDIFDFIATEQTAHRVDVLHMSPPCQYWSPAHTVEGKNDEANIAVLFSCHELVKKLRPRLFTLEQTFGIMHPRFEFYFNALVHGFTQYNYSMRWKVCDLVVWGLPARRQRLIMIGSCPGEELPPFPEVTHVPYANRRPGKKPFYTVRKALFKIPKDQSRWDELHRPATMIRRDYPRWSANKTLQRVITASNGGVGNYHPSGRRDFTRREFATLQTFPVNYPFEAPHQLRQIGNAFPPLVVKTLYTHLRKWLEEKDGIIETSNVPDPIDPDELDVVIVPEDDEYTSDFVEYTGTRPRQESSEESSSGDEMDIDSDGPVVNACVDANQERMIWGTIDLTRGSISHASGGGYIDLTRE

SEQ ID NO: 2362 - DNA, 1722 bp, Muscodor strobelii
  misc_feature: SGI EST ID NO. CUFF.6028.0
  misc_feature: Variant of the nucleotide sequence at SEQ ID NO 2360
cgagattcgagttctacttcaatgcgttggtacacggcttcacgcaatacaactactcgatgagatggaaggtctgcgacctagtagtctggggactaccagcccgaagacagagactaatcatgatcgggtcatgcccaggagaggagcttcctccttttccggaggtgactcacgtcccatatgctaacagacgtcctggaaagaagccattttacacggttaggaaagcgttgttcaaaattcccaaggaccaaagcagatgggatgaattacaccgaccagccaccatgatacgcagagattacccgcgctggagcgcgaacaagactttgcagcgagtcattacagcaagcaacggtggtgtgggcaactatcaccctagtggccgacgtgacttcacgaggcgggaattcgctactttgcagacatttccggtgaattatccgttcgaggcacctcatcagctgagacagataggcaatgcattcccacccttggttgtcaaaacgctgtacacacacctgcgaaaatggctggaggagaaggatggaatcatcgagacatcgaatgtgcctgatcccattgacccagatgagttggacgtcgtgatcgttcctgaagacgatgaatacacgagcgactttgttgaatacaccggaactcgacctcgacaagaaagcagcgaagagagtagttcgggagatgagatggatatcgacagcgacggtccggttgtcaatgcttgtgttgatgcgaaccaagagagaatgatctggggcactattgatcttactagaggctcgatcagtcatgctagtggaggcgggtatatcgatctcacgagagagtaagtcttgagatgtttcaggtgtcacacgtgtttgtttggcctgatgcgaccgttacgattgagctcgtgatcattggcattggcattggcactggtgtggcctgatactgttataaccgttgggcttagctcaagtttaccagctctagcgctcgagaacattgcgacgcacggacatcgcggttcagccgtcgcgttatggtgctctcattttcgtcaattccacgagatttcttgtttgaagcctgatcgacttggtgttagtgagtgttagttcgtggtctaacgagagacacgagctttgaacagtcgcgcgctgcagactgggagtgatgaaggggcacagggtgcatttaggtatgcctctttgagtcttagtcgacgttagctggcagagtgtagcatctacataagtgaaaattgagagcagtggttcaggcagacacattgcgcatttactaattgatgtcgtgactgggcctcagactgcattcgcgtacggagaggtcgttaatttcggggcaaacatactgctgtacagtagttccatttcttgtcccgactttgcgggggtcggcagtagtacgatccagcttgttttgttccggccgtgattccgggtggtaccaagccccctcaaatgagcaatgcttcttgaagattagttcgcacgtttcattctctagctttcgagagatgaaaagcagttgactagaccctgaagacttgatgcgaggtgagcactaagcaacgaaagaacgcggtctcgacttttgacctaaacagcgggctctcggtatgatatcgagtttgttcaacacgatgttctcgctgcttgagatacaaagtcaaagccttgaactgtctcg

SEQ ID NO: 2363 - DNA, 558 bp, Muscodor strobelii
  misc_feature: SGI cDNA ID NO. 560417
  misc_feature: Elevated expression when VOC is produced
  misc_feature: Encodes the peptide sequence at SEQ ID NO 2364
atgtccaagacggtgctccacaccgccagcataatgcagcctcaataccggaaccggcaccaaaccatgatattcggcggcttccacctaaagcaaaccttcgagctagcattctgctgcgcatcatcattcgcgcacgcccggccgaccttcatcagcgccgacccttgcgtattccgcaaccccgtacccgtaggttccgttctatacctcacagcgacgatcgtatataccgatccgccgctcctcgaagaagacggttccgaaccaaaacaggcttctgaaaaggagcccatgacgaggatacacgtcagagtagatagtaaagttagagatgtggagcatggtcatgcgaagagtactggacagtttaattatacgtttgctgtgccgagagacgtcaaggtgctgccgcatacgtatcaggagtttatgatgtatgtcgatgcgagacgacgggttatggcgggtgatgagagggataggagggataaggggggcagcgggagtgtggaggatagggcgaggagggctgaggaggagagtgttactgagtga

SEQ ID NO: 2364 - protein, 185 aa, Muscodor strobelii
  misc_feature: SGI Peptide ID NO. 560417
  misc_feature (1)..(183): NCBI GI: 46114888 Blast Desc: FG03286.1 [Gibberella zeae PH-1]
  misc_feature (1)..(158): NCBI GI: 256730085 Blast Desc: [Nectria haematococca mpVI 77-13-4]
  misc_feature (1)..(185): NCBI GI: 115398189 Blast Desc: conserved [Aspergillus terreus NIH2624] gi|114192877|gb|EAU34577.1| conserved [Aspergillus terreus NIH2624]
  misc_feature (1)..(185): NCBI GI: 169603966 Blast Desc: SNOG_04991 [Phaeosphaeria nodorum SN15] gi|160706480|gb|EAT87382.2| SNOG_04991 [Phaeosphaeria nodorum SN15]
  misc_feature (1)..(153): NCBI GI: 189195748 Blast Desc: acyl-coenzyme A thioesterase 9 [Pyrenophora tritici-repentis Pt-1C-BFP] gi|187980091|gb|EDU46717.1| acyl-coenzyme A thioesterase 9 [Pyrenophora tritici-repentis
  misc_feature (1)..(185): NCBI GI: 145256774 Blast Desc: An04g01460 [Aspergillus niger] gi|134058421|emb|CAK47908.1| protein product [Aspergillus niger]
  misc_feature (1)..(185): NCBI GI: 238491822 Blast Desc: acyl-CoA thioester hydrolase, [Aspergillus flavus NRRL3357] gi|220697561|gb|EED53902.1| acyl-CoA thioester hydrolase, [Aspergillus flavus NRRL3357]
  misc_feature (1)..(185): NCBI GI: 121706691 Blast Desc: acyl-CoA thioester hydrolase, [Aspergillus clavatus NRRL 1] gi|119399745|gb|EAW10171.1| acyl-CoA thioester hydrolase, [Aspergillus clavatus NRRL 1]
  misc_feature (1)..(185): NCBI GI: 169773803 Blast Desc: [Aspergillus oryzae RIB40] gi|83769231|dbj|BAE59368.1| protein product [Aspergillus oryzae]
  misc_feature (1)..(159): NCBI GI: 258568298 Blast Desc: conserved [Uncinocarpus reesii 1704] gi|237906339|gb|EEP80740.1| conserved [Uncinocarpus reesii 1704]
  misc_feature: Useful for introducing or modulating the production of volatile compounds
MSKTVLHTASIMQPQYRNRHQTMIFGGFHLKQTFELAFCCASSFAHARPTFISADPCVFRNPVPVGSVLYLTATIVYTDPPLLEEDGSEPKQASEKEPMTRIHVRVDSKVRDVEHGHAKSTGQFNYTFAVPRDVKVLPHTYQEFMMYVDARRRVMAGDERDRRDKGGSGSVEDRARRAEEESVTE

SEQ ID NO: 2365 - DNA, 3381 bp, Muscodor strobelii
  misc_feature: SGI EST ID NO. CUFF.6459.0
  misc_feature: Variant of the nucleotide sequence at SEQ ID NO 2363
ggaacactccggctctgatatcgggacttgagtgagactaacggatttactccgaagcaagacgagattttgtcgagctatagtccagcgtcaagacctgattcaaggttgccatgatagtgccattgtttgcgggcagcttacactccctagtcataaaggggattcaaagatgagtcccaccgtcatgacgtgtagagctatctctacgcggcggttcttttcatcctcatgctcaattcttcccatgataagacagatccgccagaatgtgcacagagtgcgtatctgctcaggttctcagaattttcataccacgaccgcacgacatacagatggcgtatttcgcgggctgatagacaaccgcctcccgacaccatggatagaagcattcagacagcagcaggacgggcacaatacggccacggacgaagcgaagcctcaagaacgtgatctatcgcccaagaagatgagcgacagctatcatagcgttatcttgcctcttgggcgcgatccatggttatcagacacttatatcaactcatctggtcacataagactgggaacagtattcatggacctagacgccctctcaggaataattgtctacaaacacaccggtcccggcgtaacaaccgtaaccgcagccctcgaccgcatcaccatcgcccaccccttaaccgaaatctgcgatctcgagtattccggccaagtaacatacgcctccggccgctcctccgtcgagataacctgccgcgtagcccgcgcaccgcccgaaggccaaaaatcctcaccagaagacgtcctgctaacctgcacattcaccatggtggccttggaccccacaacaaaacgcccagtccccatccccaaactcctaacctcaacacccgaagaagaagccatctaccgcgcgggcgaagcagcagccctcgcaaagaaagaagaccgcaaactctccctcctctccaccgagcccaacgacgccgaatccgcactcatccaccgcatctggttacgtcaagtctcctaccacgacccctctacaccgctccgccaacccacaaacgtagtccccatgtccaagacggtgctccacaccgccagcataatgcagcctcaataccggaaccggcaccaaaccatgatattcggcggcttccacctaaagcaaaccttcgagctagcattctgctgcgcatcatcattcgcgcacgcccggccgaccttcatcagcgccgacccttgcgtattccgcaaccccgtacccgtaggttccgttctatacctcacagcgacgatcgtatataccgatccgccgctcctcgaagaagacggttccgaaccaaaacaggcttctgaaaaggagcccatgacgaggatacacgtcagagtagatagtaaagttagagatgtggagcatggtcatgcgaagagtactggacagtttaattatacgtttgctgtgccgagagacgtcaaggtgctgccgcatacgtatcaggagtttatgatgtatgtcgatgcgagacgacgggttatggcgggtgatgagagggataggagggataaggggggcagcgggagtgtggaggatagggcgaggagggctgaggaggagagtgttactgagtgaaggagatatatctggatgctgggtgtaaccgagggaaatctctgtattctctgagctcggatctttacgatttgactccgtatgagactgacagctagtcgtgggatcacaagacgtttcaactagaggtagactagacgtaatgagcatcactgcctatagtatggaaacattgcaaaggacatgaatttcacagtcggtcgatataatacatttgtttatagtatatgacatgttatatctacaagaggtctataattctcctcacacttctcatgatcaagaggatatttctcctccaatcgcctttacacagcccccctaatatcatcgtacagtaccaccatatcatactgctcacccccttaagcagcacccttcaacctctgcagatctttgcccttcatcgcaccgccatgtccccagaggggtagtccacgcttctccagctcagcctgcatgatcttgagtctgccaagcttctcctccttgtgggccttcgtcacgcgcttcgtggcgacggagacattgggcatgttgacgagctcctggcggttctcctggatctcttgggtaagtgtgacgggcttaggcggcgtggtgatggtttgtaggagagagaaaacgtcggagaggagtgggaggcggtggtcggggacgaggtggcctgttagttggaagatgcgcttcgttacctagtgattgcgtcagtaatgagttcccgagagttggggacaggggtcaaacatacagcaaagcgtaacctaggatcagaaagctgaatactcttccaactctgatcccaactctcaacaagtctctcggcctcctcgacaccaatcgcctcggccttcgcatcaaacgcactgccctcatccaagctcacctccataggcttgaactccaacatctccgccacagctgccgcatccccactaagcgtcgcatcacttttcacctcaacgcccagcaccttcatcaagtcctccttgggtacatccatattccacatccccaacaacttatcctccccaccactctgtttcagcgcaagcgcctcgacaaccgcccgtctaacattgacctcgaggagtttcgtatctgtgactttttcttttggacggaaactgataaagttccccgagctgtgccaatggtcctcagtctcccaccacttggccactccacccacagtctccaggttcgagccgtcggtcgcaggtttgtactcaacatccgcaacatcagaaggccgggaggcgtcgcggagttcagtaggggtggtatagggtgtccagacatcttcgtattcctctgctccttcgatgacatctacatcgtcaatccattcgatctcgttctccttgggctgcagggactctatttcttccgggaggtcttctgccggggtagtggttggtttaggttgtctgattgagccgtagaagcgggaagaattggtcgggtacgaggatatcggcgttgctcgtcgagatgtgaggctaggtgaggatgaagcgaatcgttgacattgagatgatatagaggaaccgctgattgtgcgtgggagggtagatggggtgggtagacccgaggcttgtcgtaatcttgctattctgcgcatggttggcaattggcgatgtgatgatgcgcaattgatttgatcgggttgtagatttaagtatgagacgcgaactttttttgatgtaccgacgatgacaggggctaggtagcgcatgatgtgg

SEQ ID NO: 2366 - DNA, 1389 bp, Muscodor strobelii
  misc_feature: SGI cDNA ID NO. 560418
  misc_feature: Reduced expression when VOC is produced
  misc_feature: Encodes the peptide sequence at SEQ ID NO 2367
atgataagacagatccgccagaatgtgcacagagtgcgtatctgctcaggttctcagaattttcataccacgaccgcacgacatacagatggcgtatttcgcgggctgatagacaaccgcctcccgacaccatggatagaagcattcagacagcagcaggacgggcacaatacggccacggacgaagcgaagcctcaagaacgtgatctatcgcccaagaagatgagcgacagctatcatagcgttatcttgcctcttgggcgcgatccatggttatcagacacttatatcaactcatctggtcacataagactgggaacagtattcatggacctagacgccctctcaggaataattgtctacaaacacaccggtcccggcgtaacaaccgtaaccgcagccctcgaccgcatcaccatcgcccaccccttaaccgaaatctgcgatctcgagtattccggccaagtaacatacgcctccggccgctcctccgtcgagataacctgccgcgtagcccgcgcaccgcccgaaggccaaaaatcctcaccagaagacgtcctgctaacctgcacattcaccatggtggccttggaccccacaacaaaacgcccagtccccatccccaaactcctaacctcaacacccgaagaagaagccatctaccgcgcgggcgaagcagcagccctcgcaaagaaagaagaccgcaaactctccctcctctccaccgagcccaacgacgccgaatccgcactcatccaccgcatctggttacgtcaagtctcctaccacgacccctctacaccgctccgccaacccacaaacgtagtccccatgtccaagacggtgctccacaccgccagcataatgcagcctcaataccggaaccggcaccaaaccatgatattcggcggcttccacctaaagcaaaccttcgagctagcattctgctgcgcatcatcattcgcgcacgcccggccgaccttcatcagcgccgacccttgcgtattccgcaaccccgtacccgtaggttccgttctatacctcacagcgacgatcgtatataccgatccgccgctcctcgaagaagacggttccgaaccaaaacaggcttctgaaaaggagcccatgacgaggatacacgtcagagtagatagtaaagttagagatgtggagcatggtcatgcgaagagtactggacagtttaattatacgtttgctgtgccgagagacgtcaaggtgctgccgcatacgtatcaggagtttatgatgtatgtcgatgcgagacgacgggttatggcgggtgatgagagggataggagggataaggggggcagcgggagtgtggaggatagggcgaggagggctgaggaggagagtgttactgagtga

SEQ ID NO: 2367 - protein, 462 aa, Muscodor strobelii
  misc_feature: SGI Peptide ID NO. 560418
  misc_feature (15)..(460): NCBI GI: 46114888 Blast Desc: FG03286.1 [Gibberella zeae PH-1]
  misc_feature (19)..(435): NCBI GI: 256730085 Blast Desc: [Nectria haematococca mpVI 77-13-4]
  misc_feature (13)..(462): NCBI GI: 238491822 Blast Desc: acyl-CoA thioester hydrolase, [Aspergillus flavus NRRL3357] gi|220697561|gb|EED53902.1| acyl-CoA thioester hydrolase, [Aspergillus flavus NRRL3357]
  misc_feature (13)..(462): NCBI GI: 169773803 Blast Desc: [Aspergillus oryzae RIB40] gi|83769231|dbj|BAE59368.1| protein product [Aspergillus oryzae]
  misc_feature (40)..(462): NCBI GI: 115398189 Blast Desc: conserved [Aspergillus terreus NIH2624] gi|114192877|gb|EAU34577.1| conserved [Aspergillus terreus NIH2624]
  misc_feature (1)..(462): NCBI GI: 145256774 Blast Desc: An04g01460 [Aspergillus niger] gi|134058421|emb|CAK47908.1| protein product [Aspergillus niger]
  misc_feature (40)..(430): NCBI GI: 121706691 Blast Desc: acyl-CoA thioester hydrolase, [Aspergillus clavatus NRRL 1] gi|119399745|gb|EAW10171.1| acyl-CoA thioester hydrolase, [Aspergillus clavatus NRRL 1]
  misc_feature (15)..(424): NCBI GI: 255949922 Blast Desc: Pc22g18230 [Penicillium chrysogenum Wisconsin 54-1255] gi|211592745|emb|CAP99111.1| Pc22g18230 [Penicillium chrysogenum Wisconsin 54-1255]
  misc_feature (73)..(430): NCBI GI: 189195748 Blast Desc: acyl-coenzyme A thioesterase 9 [Pyrenophora tritici-repentis Pt-1C-BFP] gi|187980091|gb|EDU46717.1| acyl-coenzyme A thioesterase 9 [Pyrenophora tritici-repentis
  misc_feature (40)..(436): NCBI GI: 259482766 Blast Desc: TPA: acyl-CoA thioester hydrolase, (AFU_orthologue; AFUA_4G07060) [Aspergillus nidulans FGSC A4]
  misc_feature: Useful for introducing or modulating the production of volatile compounds
MIRQIRQNVHRVRICSGSQNFHTTTARHTDGVFRGLIDNRLPTPWIEAFRQQQDGHNTATDEAKPQERDLSPKKMSDSYHSVILPLGRDPWLSDTYINSSGHIRLGTVFMDLDALSGIIVYKHTGPGVTTVTAALDRITIAHPLTEICDLEYSGQVTYASGRSSVEITCRVARAPPEGQKSSPEDVLLTCTFTMVALDPTTKRPVPIPKLLTSTPEEEAIYRAGEAAALAKKEDRKLSLLSTEPNDAESALIHRIWLRQVSYHDPSTPLRQPTNVVPMSKTVLHTASIMQPQYRNRHQTMIFGGFHLKQTFELAFCCASSFAHARPTFISADPCVFRNPVPVGSVLYLTATIVYTDPPLLEEDGSEPKQASEKEPMTRIHVRVDSKVRDVEHGHAKSTGQFNYTFAVPRDVKVLPHTYQEFMMYVDARRRVMAGDERDRRDKGGSGSVEDRARRAEEESVTE

SEQ ID NO: 2368 - DNA, 3381 bp, Muscodor strobelii; identical to SEQ ID NO: 2365
  misc_feature: SGI EST ID NO. CUFF.6459.0
  misc_feature: Variant of the nucleotide sequence at SEQ ID NO 2366

SEQ ID NO: 2369 - DNA, 1203 bp, Muscodor strobelii
  misc_feature: SGI cDNA ID NO. 560419
  misc_feature: Reduced expression when VOC is produced
  misc_feature: Encodes the peptide sequence at SEQ ID NO 2370
atgcgcagaatagcaagattacgacaagcctcgggtctacccaccccatctaccctcccacgcacaatcagcggttcctctatatcatctcaatgtcaacgattcgcttcatcctcacctagcctcacatctcgacgagcaacgccgatatcctcgtacccgaccaattcttcccgcttctacggctcaatcagacaacctaaaccaaccactaccccggcagaagacctcccggaagaaatagagtccctgcagcccaaggagaacgagatcgaatggattgacgatgtagatgtcatcgaaggagcagaggaatacgaagatgtctggacaccctataccacccctactgaactccgcgacgcctcccggccttctgatgttgcggatgttgagtacaaacctgcgaccgacggctcgaacctggagactgtgggtggagtggccaagtggtgggagactgaggaccattggcacagctcggggaactttatcagtttccgtccaaaagaaaaagtcacagatacgaaactcctcgaggtcaatgttagacgggcggttgtcgaggcgcttgcgctgaaacagagtggtggggaggataagttgttggggatgtggaatatggatgtacccaaggaggacttgatgaaggtgctgggcgttgaggtgaaaagtgatgcgacgcttagtggggatgcggcagctgtggcggagatgttggagttcaagcctatggaggtgagcttggatgagggcagtgcgtttgatgcgaaggccgaggcgattggtgtcgaggaggccgagagacttgttgagagttgggatcagagttggaagagtattcagctttctgatcctaggttacgctttgctgtaacgaagcgcatcttccaactaacaggccacctcgtccccgaccaccgcctcccactcctctccgacgttttctctctcctacaaaccatcaccacgccgcctaagcccgtcacacttacccaagagatccaggagaaccgccaggagctcgtcaacatgcccaatgtctccgtcgccacgaagcgcgtgacgaaggcccacaaggaggagaagcttggcagactcaagatcatgcaggctgagctggagaagcgtggactacccctctggggacatggcggtgcgatgaagggcaaagatctgcagaggttgaagggtgctgcttaa

SEQ ID NO: 2370 - protein, 400 aa, Muscodor strobelii
  misc_feature: SGI Peptide ID NO. 560419
  misc_feature (116)..(396): NCBI GI: 85097835 Blast Desc: NCU05552 [Neurospora crassa OR74A] gi|28922007|gb|EAA31278.1| NCU05552 [Neurospora crassa OR74A]
  misc_feature (130)..(395): NCBI GI: 256733422 Blast Desc: NECHADRAFT_103663 [Nectria haematococca mpVI 77-13-4]
  misc_feature (1)..(385): NCBI GI: 145607988 Blast Desc: MGG_09764 [Magnaporthe grisea 70-15] gi|145015455|gb|EDJ99991.1| MGG_09764 [Magnaporthe grisea 70-15]
  misc_feature (133)..(400): NCBI GI: 46127923 Blast Desc: FG08339.1 [Gibberella zeae PH-1]
  misc_feature (1)..(385): NCBI GI: 116201809 Blast Desc: CHGG_08789 [Chaetomium globosum CBS 148.51] gi|88177307|gb|EAQ84775.1| CHGG_08789 [Chaetomium globosum CBS 148.51]
  misc_feature (267)..(379): NCBI GI: 154323606 Blast Desc: BC1G_00202 [Botryotinia fuckeliana B05.10] gi|150842431|gb|EDN17624.1| BC1G_00202 [Botryotinia fuckeliana B05.10]
  misc_feature (274)..(379): NCBI GI: 156056853 Blast Desc: SS1G_04157 [Sclerotinia sclerotiorum 1980] gi|154701943|gb|EDO01682.1| SS1G_04157 [Sclerotinia sclerotiorum 1980]
  misc_feature (256)..(383): NCBI GI: 171681722 Blast Desc: protein product [Podospora anserina] gi|170940820|emb|CAP66469.1| protein product [Podospora anserina]
  misc_feature (126)..(297): NCBI GI: 261360998 Blast Desc: conserved [Verticillium albo-atrum VaMs.102]
  misc_feature (132)..(383): NCBI GI: 119188685 Blast Desc: CIMG_04390 [Coccidioides immitis RS]
  misc_feature: Useful for introducing or modulating the production of volatile compounds
MRRIARLRQASGLPTPSTLPRTISGSSISSQCQRFASSSPSLTSRRATPISSYPTNSSRFYGSIRQPKPTTTPAEDLPEEIESLQPKENEIEWIDDVDVIEGAEEYEDVWTPYTTPTELRDASRPSDVADVEYKPATDGSNLETVGGVAKWWETEDHWHSSGNFISFRPKEKVTDTKLLEVNVRRAVVEALALKQSGGEDKLLGMWNMDVPKEDLMKVLGVEVKSDATLSGDAAAVAEMLEFKPMEVSLDEGSAFDAKAEAIGVEEAERLVESWDQSWKSIQLSDPRLRFAVTKRIFQLTGHLVPDHRLPLLSDVFSLLQTITTPPKPVTLTQEIQENRQELVNMPNVSVATKRVTKAHKEEKLGRLKIMQAELEKRGLPLWGHGGAMKGKDLQRLKGAA

SEQ ID NO: 2371 - DNA, 2671 bp, Muscodor strobelii
  misc_feature: SGI EST ID NO. CUFF.6460.1
  misc_feature: Variant of the nucleotide sequence at SEQ ID NO 2369
gatcaaatcaattgcgcatcatcacatcgccaattgccaaccatgcgcagaatagcaagattacgacaagcctcgggtctacccaccccatctaccctcccacgcacaatcagcggttcctctatatcatctcaatgtcaacgattcgcttcatcctcacctagcctcacatctcgacgagcaacgccgatatcctcgtacccgaccaattcttcccgcttctacggctcaatcagacaacctaaaccaaccactaccccggcagaagacctcccggaagaaatagagtccctgcagcccaaggagaacgagatcgaatggattgacgatgtagatgtcatcgaaggagcagaggaatacgaagatgtctggacaccctataccacccctactgaactccgcgacgcctcccggccttctgatgttgcggatgttgagtacaaacctgcgaccgacggctcgaacctggagactgtgggtggagtggccaagtggtgggagactgaggaccattggcacagctcggggaactttatcagtttccgtccaaaagaaaaagtcacagatacgaaactcctcgaggtcaatgttagacgggcggttgtcgaggcgcttgcgctgaaacagagtggtggggaggataagttgttggggatgtggaatatggatgtacccaaggaggacttgatgaaggtgctgggcgttgaggtgaaaagtgatgcgacgcttagtggggatgcggcagctgtggcggagatgttggagttcaagcctatggaggtgagcttggatgagggcagtgcgtttgatgcgaaggccgaggcgattggtgtcgaggaggccgagagacttgttgagagttgggatcagagttggaagagtattcagctttctgatcctaggttacgctttgctgtaacgaagcgcatcttccaactaacaggccacctcgtccccgaccaccgcctcccactcctctccgacgttttctctctcctacaaaccatcaccacgccgcctaagcccgtcacacttacccaagagatccaggagaaccgccaggagctcgtcaacatgcccaatgtctccgtcgccacgaagcgcgtgacgaaggcccacaaggaggagaagcttggcagactcaagatcatgcaggctgagctggagaagcgtggactacccctctggggacatggcggtgcgatgaagggcaaagatctgcagaggttgaagggtgctgcttaagggggtgagcagtatgatatggtggtactgtacgatgatattaggggggctgtgtaaaggcgattggaggagaaatatcctcttgatcatgagaagtgtgaggagaattatagacctcttgtagatataacatgtcatatactataaacaaatgtattatatcgaccgactgtgaaattcatgtcctttgcaatgtttccatactataggcagtgatgctcattacgtctagtctacctctagttgaaacgtcttgtgatcccacgactagctgtcagtctcatacggagtcaaatcgtaaagatccgagctcagagaatacagagatttccctcggttacacccagcatccagatatatctccttcactcagtaacactctcctcctcagccctcctcgccctatcctccacactcccgctgccccccttatccctcctatccctctcatcacccgccataacccgtcgtctcgcatcgacatacatcataaactcctgatacgtatgcggcagcaccttgacgtctctcggcacagcaaacgtataattaaactgtccagtactcttcgcatgaccatgctccacatctctaactttactatctactctgacgtgtatcctcgtcatgggctccttttcagaagcctgttttggttcggaaccgtcttcttcgaggagcggcggatcggtatatacgatcgtcgctgtgaggtatagaacggaacctacgggtacggggttgcggaatacgcaagggtcggcgctgatgaaggtcggccgggcgtgcgcgaatgatgatgcgcagcagaatgctagctcgaaggtttgctttaggtggaagccgccgaatatcatggtttggtgccggttccggtattgaggctgcattatgctggcggtgtggagcaccgtcttggacatggggactacgtttgtgggttggcggagcggtgtagaggggtcgtggtaggagacttgacgtaaccagatgcggtggatgagtgcggattcggcgtcgttgggctcggtggagaggagggagagtttgcggtcttctttctttgcgagggctgctgcttcgcccgcgcggtagatggcttcttcttcgggtgttgaggttaggagtttggggatggggactgggcgttttgttgtggggtccaaggccaccatggtgaatgtgcaggttagcaggacgtcttctggtgaggatttttggccttcgggcggtgcgcgggctacgcggcaggttatctcgacggaggagcggccggaggcgtatgttacttggccggaatactcgagatcgcagatttcggttaaggggtgggcgatggtgatgcggtcgagggctgcggttacggttgttacgccgggaccggtgtgtttgtagacaattattcctgagagggcgtctaggtcca

SEQ ID NO: 2372 - DNA, 492 bp, Muscodor strobelii
  misc_feature: SGI cDNA ID NO. 560420
  misc_feature: Encodes the peptide sequence at SEQ ID NO 2373
atgtctcgattccaccacctcttattcctcctattaggagtattaaccaccaccacaatatcagcctccgccccaacattctgcaaatgcacctgcttcaaaaacagcaccctaatccaactcggtccccaaacctcctcctccgattctcccacaaacccaccacgatctcttgccacccgcgcagcatcagcctcctgcacccaatgcacgcgcgccttctgcctagcgcaacacctccccatctgcgacgacgccctcgagaccgacgtagtagcgacctgtttccagcgcgactcccgcaaggaccagatcatcgtctggggcttcatcctcggcaccaccggccttttgggctgggcggcagccaagcgcgtcgctgagtttagggagaagaagaagaccgctgctctcgggttggggatggggaatgcgggtggtggtgatgctaggaggggtgcttatgcgcctgtgcctagggctagagggtag

SEQ ID NO: 2373 - protein, 163 aa, Muscodor strobelii
  misc_feature: SGI Peptide ID NO. 560420
  misc_feature (1)..(143): NCBI GI: 39963581 Blast Desc: MGG_09765 [Magnaporthe grisea 70-15] gi|145015454|gb|EDJ99990.1| MGG_09765 [Magnaporthe grisea 70-15]
  misc_feature (1)..(128): NCBI GI: 85097814 Blast Desc: NCU05547 [Neurospora crassa OR74A] gi|28922002|gb|EAA31273.1| [Neurospora crassa OR74A]
  misc_feature (1)..(127): NCBI GI: 256733895 Blast Desc: NECHADRAFT_8744 [Nectria haematococca mpVI 77-13-4]
  misc_feature (8)..(158): NCBI GI: 154323608 Blast Desc: BC1G_00203 [Botryotinia fuckeliana B05.10] gi|150842432|gb|EDN17625.1| BC1G_00203 [Botryotinia fuckeliana B05.10]
  misc_feature (1)..(144): NCBI GI: 169610431 Blast Desc: SNOG_08314 [Phaeosphaeria nodorum SN15] gi|111063470|gb|EAT84590.1| SNOG_08314 [Phaeosphaeria nodorum SN15]
  misc_feature (18)..(128): NCBI GI: 261192186 Blast Desc: conserved [Ajellomyces dermatitidis SLH14081] gi|239589375|gb|EEQ72018.1| conserved [Ajellomyces dermatitidis SLH14081] gi|239615092|gb|EEQ92079.1| conserved [Ajellomyces
  misc_feature (1)..(124): NCBI GI: 242794949 Blast Desc: MFS transporter, [Talaromyces stipitatus ATCC 10500] gi|218719068|gb|EED18488.1| MFS transporter, [Talaromyces stipitatus ATCC 10500]
  misc_feature (1)..(159): NCBI GI: 240276805 Blast Desc: conserved [Ajellomyces capsulatus H143]
  misc_feature (1)..(159): NCBI GI: 225554818 Blast Desc: conserved [Ajellomyces capsulatus G186AR]
  misc_feature (20)..(128): NCBI GI: 226283324 Blast Desc: conserved [Paracoccidioides brasiliensis Pb01]
MSRFHHLLFLLLGVLTTTTISASAPTFCKCTCFKNSTLIQLGPQTSSSDSPTNPPRSLATRAASASCTQCTRAFCLAQHLPICDDALETDVVATCFQRDSRKDQIIVWGFILGTTGLLGWAAAKRVAEFREKKKTAALGLGMGNAGGGDARRGAYAPVPRARG

SEQ ID NO: 2374 - DNA, 3057 bp, Muscodor strobelii
  misc_feature: SGI EST ID NO. CUFF.6777.0
  misc_feature: Variant of the nucleotide sequence at SEQ ID NO 2372
cgagacacacctgcgatatcgaggagccgtcatatccaattcgatctcgaaacccaattactttctcgcgccaacagcgatagcatatattatagctcgcctaatatctcactcgatccctacatcctccttcaattcaaatggaagtgttataacctcgtcaaatccacgacatagatacccatcatgtctcgattccaccacctcttattcctcctattaggagtattaaccaccaccacaatatcagcctccgccccaacattctgcaaatgcacctgcttcaaaaacagcaccctaatccaactcggtccccaaacctcctcctccgattctcccacaaacccaccacgatctcttgccacccgcgcagcatcagcctcctgcacccaatgcacgcgcgccttctgcctagcgcaacacctccccatctgcgacgacgccctcgagaccgacgtagtagcgacctgtttccagcgcgactcccgcaaggaccagatcatcgtctggggcttcatcctcggcaccaccggccttttgggctgggcggcagccaagcgcgtcgctgagtttagggagaagaagaagaccgctgctctcgggttggggatggggaatgcgggtggtggtgatgctaggaggggtgcttatgcgcctgtgcctagggctagagggtagattttggggcgaagcgtaggaatagagggtacttgtttatttggccggtgtttggagtttaaggggtatgttgaatattatgttttgagagcgatgttaggatgtatttgcgaagcagtcggggctacgatgtggacatgaatgtgcaagaaatgagacggcgctcaagtattggcacaatctcaaccagcacagagaatacgatccgagagagttcatcagtcttcattctacatcatctttgtgtatggtatggccagctaggtatcctcaatcaagattcccgtgaagcttttcatcaccgtatgtaccttttatttctcgaaaccttcccaaacccctgacgccgcggcagaaatctgttgcctttttgtctcattgcaattctcacttgtcgacactctacggctggtatcgttttccttttccgatgccgaatgctcgtctacccaaatgcaggttcgtctgccttctcccagttcaacttacatccttttctctagtcacccacccattgtatcaataaagttgtattgaacatcgttgttcaagcactggcaccgtttgccgagccattcttctcacgacgggcgcgaactgcagctgcgagatcctccaggacctcgaccgtactctcccaattgatgcaggcatctgtgatgctgacgcccttcttcaagccagcggggccctcggacggtaccttttggttgccctcgttgatgttggactcgatcattacaccgatgatcgacttctcgccttctctcagctgctcaccgacgaccttggccaccttaggctggttacggtggtccttgtttgagttacctaaatacggatcagcataatgtcacatgatgttttgtattggggtaatccccctatgcttaaccgcagctatcggcagggagagtaataaagaatccgcttaccgtgggagcagtcgaccataatagcctgcttttggcccttcttcgtcaacgtctccttggccgtcgcaatgctctccttgtcgtagttggtgcccttggtgccacctctcaagatgacgaatccgtgagggttgccggtagttcttgtgatggcagccagcccctgcttcgtcacgcccataaagtgatgcttggcggccgccgagccaatagcgtcaatggctactcccaaacttccgtccgtaccattcttgaaaccgatggggtaggatagacccgaggcgagctcccggtgaagctgagactcggtcgtgcgcgcaccgatagcaccgacggagatgaaatcggcaaggaactggggtgagatggtatccaacatctcactggcgatcggcataccggcgttggtgagatcgctgaacaactggcgagagatacgaagacccttgttgatcttgaaagtgtcgtcgatatcggggtcgttgatcagacctttccaaccgaccgtggtacgaggcttctcgaggtaggcgcgcatgataatgcataagtcgccagatagcttatcagatagctgtttgagacgaccacagtactcctgagctgtagctgggtcgtgcatagagcaagggccgacgacaaccaacagtctatcgcttttgcccatgatgatagagactgcatcacgacgacccttgactacggtttgcagggaggcatcggtcatagggatttcctcgatgagcagggcaggcgggatcaagggatcctgacccaggactgagatgttgttatatattagcatgatgctactaatattttcatgtagatcgaggtggaagtcgacgatgggtggactgtgaaaccgaaacacaacataagatctatcagatcatgtagatgaggaatctgccacgaaaccatagagctccgaatctattcccaatgtctcgatgaactggtacttttcaatatcgacagaggaaactcgccctgacaaacgaacaaaataaaagcttgcaagtgatagatgcaagtgcgaagatgcaaggattcttggcaacgtacctcttaagttgtcggccttgagcggttccatgtcgactcccggcatattgatgcagctggacggatgtgagtatgggttgatgcagaaaaacgaaaagaatttctgtttgcgtgtcgaattgactggttcaactcgacaactcgggaagctgagcaatcagaattgggcgttttcgtctgtgtgtgaaaactcaattcggggacgttttgttcgagaattaatcgaaagagggtgacgtagtggcaccacggtggtaaggtgctaggaagaattgagccgttggtctcctgtcgaagaagagaaagggtatctagaggcaagaaaacaacataatcagatgaaaagacgagaagaaatggtcaattgggacaaaag

SEQ ID NO: 2375 - DNA, 1110 bp, Muscodor strobelii
  misc_feature: SGI cDNA ID NO. 560421
  misc_feature: Reduced expression when VOC is produced
  misc_feature: Encodes the peptide sequence at SEQ ID NO 2376
atgccgggagtcgacatggaaccgctcaaggccgacaacttaagagtcctgggtcaggatcccttgatcccgcctgccctgctcatcgaggaaatccctatgaccgatgcctccctgcaaaccgtagtcaagggtcgtcgtgatgcagtctctatcatcatgggcaaaagcgatagactgttggttgtcgtcggcccttgctctatgcacgacccagctacagctcaggagtactgtggtcgtctcaaacagctatctgataagctatctggcgacttatgcattatcatgcgcgcctacctcgagaagcctcgtaccacggtcggttggaaaggtctgatcaacgaccccgatatcgacgacactttcaagatcaacaagggtcttcgtatctctcgccagttgttcagcgatctcaccaacgccggtatgccgatcgccagtgagatgttggataccatctcaccccagttccttgccgatttcatctccgtcggtgctatcggtgcgcgcacgaccgagtctcagcttcaccgggagctcgcctcgggtctatcctaccccatcggtttcaagaatggtacggacggaagtttgggagtagccattgacgctattggctcggcggccgccaagcatcactttatgggcgtgacgaagcaggggctggctgccatcacaagaactaccggcaaccctcacggattcgtcatcttgagaggtggcaccaagggcaccaactacgacaaggagagcattgcgacggccaaggagacgttgacgaagaagggccaaaagcaggctattatggtcgactgctcccacggtaactcaaacaaggaccaccgtaaccagcctaaggtggccaaggtcgtcggtgagcagctgagagaaggcgagaagtcgatcatcggtgtaatgatcgagtccaacatcaacgagggcaaccaaaaggtaccgtccgagggccccgctggcttgaagaagggcgtcagcatcacagatgcctgcatcaattgggagagtacggtcgaggtcctggaggatctcgcagctgcagttcgcgcccgtcgtgagaagaatggctcggcaaacggtgccagtgcttga

SEQ ID NO: 2376 - protein, 369 aa, Muscodor strobelii
  misc_feature: SGI Peptide ID NO. 560421
  misc_feature (31)..(348): Pfam Id: PF00793 Pfam Desc: DAHP synthetase I family
  misc_feature (1)..(364): NCBI GI: 156058015 Blast Desc: conserved [Sclerotinia sclerotiorum 1980] gi|154702524|gb|EDO02263.1| conserved [Sclerotinia sclerotiorum 1980]
  misc_feature (1)..(361): NCBI GI: 171681728 Blast Desc: protein product [Podospora anserina] gi|170940823|emb|CAP66472.1| protein product [Podospora anserina]
  misc_feature (6)..(367): NCBI GI: 116201835 Blast Desc: conserved [Chaetomium globosum CBS 148.51] gi|88177320|gb|EAQ84788.1| conserved [Chaetomium globosum CBS 148.51]
  misc_feature (1)..(362): NCBI GI: 85097818 Blast Desc: phospho-2-dehydro-3-deoxyheptonate aldolase [Neurospora crassa OR74A] gi|28922003|gb|EAA31274.1| phospho-2-dehydro-3-deoxyheptonate aldolase [Neurospora crassa
  misc_feature (3)..(358): NCBI GI: 39963594 Blast Desc: conserved [Magnaporthe grisea 70-15] gi|59803020|gb|AAX07693.1| phospho-2-dehydro-3-deoxyheptonate aldolase-like protein [Magnaporthe grisea] conserved [Magnaporthe
  misc_feature (1)..(361): NCBI GI: 46127921 Blast Desc: FG08338.1 [Gibberella zeae PH-1]
  misc_feature (1)..(363): NCBI GI: 256733421 Blast Desc: [Nectria haematococca mpVI 77-13-4]
  misc_feature (1)..(367): NCBI GI: 169598604 Blast Desc: SNOG_02108 [Phaeosphaeria nodorum SN15] gi|160704430|gb|EAT90320.2| SNOG_02108 [Phaeosphaeria nodorum SN15]
  misc_feature (1)..(369): NCBI GI: 242775395 Blast Desc: phospho-2-dehydro-3-deoxyheptonate aldolase [Talaromyces stipitatus ATCC 10500] gi|218722254|gb|EED21672.1| phospho-2-dehydro-3-deoxyheptonate aldolase [Talaromyces ATCC
  misc_feature (1)..(364): NCBI GI: 212532375 Blast Desc: phospho-2-dehydro-3-deoxyheptonate aldolase [Penicillium marneffei ATCC 18224] gi|210071708|gb|EEA25797.1| phospho-2-dehydro-3-deoxyheptonate aldolase [Penicillium ATCC
  misc_feature (12)..(361): SWISSPROT Homolog: EC 2.5.1.54 3-deoxy-7-phosphoheptulonate synthase
  misc_feature: Useful for introducing or modulating the production of volatile compounds
MPGVDMEPLKADNLRVLGQDPLIPPALLIEEIPMTDASLQTVVKGRRDAVSIIMGKSDRLLVVVGPCSMHDPATAQEYCGRLKQLSDKLSGDLCIIMRAYLEKPRTTVGWKGLINDPDIDDTFKINKGLRISRQLFSDLTNAGMPIASEMLDTISPQFLADFISVGAIGARTTESQLHRELASGLSYPIGFKNGTDGSLGVAIDAIGSAAAKHHFMGVTKQGLAAITRTTGNPHGFVILRGGTKGTNYDKESIATAKETLTKKGQKQAIMVDCSHGNSNKDHRNQPKVAKVVGEQLREGEKSIIGVMIESNINEGNQKVPSEGPAGLKKGVSITDACINWESTVEVLEDLAAAVRARREKNGSANGASA

SEQ ID NO: 2377 - DNA, 2752 bp, Muscodor strobelii
  misc_feature: SGI EST ID NO. CUFF.6778.1
  misc_feature: Variant of the nucleotide sequence at SEQ ID NO 2375
cttttgtcccaattgaccatttcttctcgtcttttcatctgattatgttgttttcttgcctctagataccctttctcttcttcgacaggagaccaacggctcaattcttcctagcaccttaccaccgtggtgccactacgtcaccctctttcgattaattctcgaacaaaacgtccccgaattgagttttcacacacagacgaaaacgcccaattctgattgctcagcttcccgagttgtcgagttgaaccagtcaattcgacacgcaaacagaaattcttttcgtttttctgcatcaacccatactcacatccgtccagctgcatcaatatgccgggagtcgacatggaaccgctcaaggccgacaacttaagagtcctgggtcaggatcccttgatcccgcctgccctgctcatcgaggaaatccctatgaccgatgcctccctgcaaaccgtagtcaagggtcgtcgtgatgcagtctctatcatcatgggcaaaagcgatagactgttggttgtcgtcggcccttgctctatgcacgacccagctacagctcaggagtactgtggtcgtctcaaacagctatctgataagctatctggcgacttatgcattatcatgcgcgcctacctcgagaagcctcgtaccacggtcggttggaaaggtctgatcaacgaccccgatatcgacgacactttcaagatcaacaagggtcttcgtatctctcgccagttgttcagcgatctcaccaacgccggtatgccgatcgccagtgagatgttggataccatctcaccccagttccttgccgatttcatctccgtcggtgctatcggtgcgcgcacgaccgagtctcagcttcaccgggagctcgcctcgggtctatcctaccccatcggtttcaagaatggtacggacggaagtttgggagtagccattgacgctattggctcggcggccgccaagcatcactttatgggcgtgacgaagcaggggctggctgccatcacaagaactaccggcaaccctcacggattcgtcatcttgagaggtggcaccaagggcaccaactacgacaaggagagcattgcgacggccaaggagacgttgacgaagaagggccaaaagcaggctattatggtcgactgctcccacggtaactcaaacaaggaccaccgtaaccagcctaaggtggccaaggtcgtcggtgagcagctgagagaaggcgagaagtcgatcatcggtgtaatgatcgagtccaacatcaacgagggcaaccaaaaggtaccgtccgagggccccgctggcttgaagaagggcgtcagcatcacagatgcctgcatcaattgggagagtacggtcgaggtcctggaggatctcgcagctgcagttcgcgcccgtcgtgagaagaatggctcggcaaacggtgccagtgcttgaacaacgatgttcaatacaactttattgatacaatgggtgggtgactagagaaaaggatgtaagttgaactgggagaaggcagacgaacctgcatttgggtagacgagcattcggcatcggaaaaggaaaacgataccagccgtagagtgtcgacaagtgagaattgcaatgagacaaaaaggcaacagatttctgccgcggcgtcaggggtttgggaaggtttcgagaaataaaaggtacatacggtgatgaaaagcttcacgggaatcttgattgaggatacctagctggccataccatacacaaagatgatgtagaatgaagactgatgaactctctcggatcgtattctctgtgctggttgagattgtgccaatacttgagcgccgtctcatttcttgcacattcatgtccacatcgtagccccgactgcttcgcaaatacatcctaacatcgctctcaaaacataatattcaacataccccttaaactccaaacaccggccaaataaacaagtaccctctattcctacgcttcgccccaaaatctaccctctagccctaggcacaggcgcataagcacccctcctagcatcaccaccacccgcattccccatccccaacccgagagcagcggtcttcttcttctccctaaactcagcgacgcgcttggctgccgcccagcccaaaaggccggtggtgccgaggatgaagccccagacgatgatctggtccttgcgggagtcgcgctggaaacaggtcgctactacgtcggtctcgagggcgtcgtcgcagatggggaggtgttgcgctaggcagaaggcgcgcgtgcattgggtgcaggaggctgatgctgcgcgggtggcaagagatcgtggtgggtttgtgggagaatcggaggaggaggtttggggaccgagttggattagggtgctgtttttgaagcaggtgcatttgcagaatgttggggcggctgtgggtattgttagcttgaagttcagggagaggaagatatatatgaggagatgtggaggagggatagagagaatgaagagcttacaggctgatattgtggtggtggttaatactcctaataggaggaataagaggtggtggaatcgagacatgatgggtatctatgtcgtggatttgacgaggttataacacttccatttgaattgaaggaggatgtagggatcgagtgagatattaggcgagctataatatatgctatcgctgttggcgcgagaaagtaattgggtttcgagatcgaattggatatgacggctcctcgatatcgcaggtgtgtctcg

SEQ ID NO: 2378 - DNA, 1359 bp, Muscodor strobelii
  misc_feature: SGI cDNA ID NO. 560422
  misc_feature: Encodes the peptide sequence at SEQ ID NO 2379
atgaggctcaatcctttgtctgtagtagcttatctactatggtctgcctgtgtggccggtctcccaacaccaacacgcgttgaagatttggagaagaggcaggatgctgacaatcattgggtggccacgtggacttccatgccacaactcgttgagcaaagcaacctacccccatccccctttactggctccagtgttttcaaagatgccacgcttcgacagacacttcatatgtctatcggcgccgagagaatacgcattcagatatccaacacattcggcggtagtgatttacctatcacggcagcgtcgttagcattgccgactggcggcaaggcaggagccaatggaatcgacacgacgacgctcagagctctgacattcaatggctcggcttcagtgaccgtgccgagaggtcaagttgtatacaccgatgccatcgatttcaaaatcagcccgcaatctatgattacggtaactgtatactcgcaagcgggacagtccggaactagcatcacggggcaccccggaagtcgaacgacttcgtggatgcagacgggtaaccatctcaacgcatcgaccgtcacgggagctagcgtggcgcactggtacttcttgactgcggtagaagcatgggccccgaagacgacttcagccttggtaattcttggtgatagtatcaccgatggacgtggaagcgacgataatgggaataatcgctggccagatctacttcttgctaggatgcaaaaggagggcctcaccaatattgccgtagtcaatcaagcagctggtggtaatgcagtgctcacagcgtctaatggtcttggcccggcgcttttggacagatacaagcgagatctcctgcaatgtgccggggctaagtatgctttgatcttcgaaggcgtcaacgacatcggtgtggcgtcagcggactcaggcacgcaaacacgcatcggcacccaactcgaggctgcgttcaaacagatctcaactgatgccaaagctgcgggcatcaccgtgttcggggcgactatcacaccatttggaggctctggacaagcatacagcaatacagtccgcgactcgaaccgacagacagtcaacaagtggattctggctggtggcgatggctcttacaatgccacaattgacttcgccaagatcgtggccaacccatcaaacgcggcacagttagcaacgcaatatgatggtggtgaccatctgcatccaaatgtagcagggtatcaggccattgcagatcaatttcctttagacatattcaagggaagtgtcaaaaacgtgtcgagagcgctctacggcttgaagcagttgcaaaataatccaaagctgtggtaa

SEQ ID NO: 2379 - protein, 452 aa, Muscodor strobelii
  misc_feature: SGI Peptide ID NO. 560422
  misc_feature (220)..(423): Pfam Id: PF00657 Pfam Desc: GDSL-like Lipase/Acylhydrolase
  misc_feature (21)..(429): NCBI GI: 171693127 Blast Desc: protein product [Podospora anserina] gi|170946512|emb|CAP73313.1| protein product [Podospora anserina]
  misc_feature (27)..(429): NCBI GI: 189201804 Blast Desc: lipolytic enzyme [Pyrenophora tritici-repentis Pt-1C-BFP] gi|187984337|gb|EDU49825.1| lipolytic enzyme [Pyrenophora tritici-repentis Pt-1C-BFP]
  misc_feature (27)..(429): NCBI GI: 169594724 Blast Desc: SNOG_00090 [Phaeosphaeria nodorum SN15] gi|160700923|gb|EAT91585.2| SNOG_00090 [Phaeosphaeria nodorum SN15]
  misc_feature (1)..(428): NCBI GI: 67904600 Blast Desc: AN9287.2 [Aspergillus nidulans FGSC A4] gi|40747198|gb|EAA66354.1| AN9287.2 [Aspergillus nidulans FGSC A4] gi|259488121|tpe|CBF87336.1| TPA: extracellular GDSL-like A4]
  misc_feature (21)..(429): NCBI GI: 116199053 Blast Desc: CHGG_07682 [Chaetomium globosum CBS 148.51] gi|88178961|gb|EAQ86429.1| CHGG_07682 [Chaetomium globosum CBS 148.51]
  misc_feature (31)..(429): NCBI GI: 46110957 Blast Desc: FG02360.1 [Gibberella zeae PH-1]
  misc_feature (38)..(428): NCBI GI: 119497771 Blast Desc: extracellular GDSL-like lipase/acylhydrolase, [Neosartorya fischeri NRRL 181] gi|119413807|gb|EAW23746.1| extracellular GDSL-like lipase/acylhydrolase, [Neosartorya NRRL
  misc_feature (38)..(428): NCBI GI: 70988725 Blast Desc: extracellular GDSL-like lipase/acylhydrolase [Aspergillus fumigatus Af293] gi|66846850|gb|EAL87181.1| extracellular GDSL-like lipase/acylhydrolase, [Aspergillus Af293]
  misc_feature (34)..(429): NCBI GI: 169777475 Blast Desc: [Aspergillus oryzae RIB40] gi|83771940|dbj|BAE62070.1| protein product [Aspergillus oryzae]
  misc_feature (38)..(428): NCBI GI: 169848652 Blast Desc: CC1G_09296 [Coprinopsis cinerea okayama7#130] gi|116507924|gb|EAU90819.1| CC1G_09296 [Coprinopsis cinerea okayama7#130]
MRLNPLSVVAYLLWSACVAGLPTPTRVEDLEKRQDADNHWVATWTSMPQLVEQSNLPPSPFTGSSVFKDATLRQTLHMSIGAERIRIQISNTFGGSDLPITAASLALPTGGKAGANGIDTTTLRALTFNGSASVTVPRGQVVYTDAIDFKISPQSMITVTVYSQAGQSGTSITGHPGSRTTSWMQTGNHLNASTVTGASVAHWYFLTAVEAWAPKTTSALVILGDSITDGRGSDDNGNNRWPDLLLARMQKEGLTNIAVVNQAAGGNAVLTASNGLGPALLDRYKRDLLQCAGAKYALIFEGVNDIGVASADSGTQTRIGTQLEAAFKQISTDAKAAGITVFGATITPFGGSGQAYSNTVRDSNRQTVNKWILAGGDGSYNATIDFAKIVANPSNAAQLATQYDGGDHLHPNVAGYQAIADQFPLDIFKGSVKNVSRALYGLKQLQNNPKLW

SEQ ID NO: 2380 - DNA, 1594 bp, Muscodor strobelii
  misc_feature: SGI EST ID NO. CUFF.6790.0
  misc_feature: Variant of the nucleotide sequence at SEQ ID NO 2378
ttcaagagctgtcacaatggccagcaaaatggttgtcttggcatctcgtaccccaattattctcctagatcgcaatataagtgacgagatatcggaatcatgaggctcaatcctttgtctgtagtagcttatctactatggtctgcctgtgtggccggtctcccaacaccaacacgcgttgaagatttggagaagaggcaggatgctgacaatcattgggtggccacgtggacttccatgccacaactcgttgagcaaagcaacctacccccatccccctttgtacgagaacccacttccaataatacctaagccaatctgagtactgacaatgatatagactggctccagtgttttcaaagatgccacgcttcgacagacacttcatatgtctatcggcgccgagagaatacgcattcagatatccaacacattcggcggtagtgatttacctatcacggcagcgtcgttagcattgccgactggcggcaaggcaggagccaatggaatcgacacgacgacgctcagagctctgacattcaatggctcggcttcagtgaccgtgccgagaggtcaagttgtatacaccgatgccatcgatttcaaaatcagcccgcaatctatgattacggtaactgtatactcgcaagcgggacagtccggaactagcatcacggggcaccccggaagtcgaacgacttcgtggatgcagacgggtaaccatctcaacgcatcgaccgtcacgggagctagcgtggcgcactggtacttcttgactgcggtagaagcatgggccccgaagacgacttcagccttggtaattcttggtgatagtatcaccgatggacgtggaagcgacgataatgggaataatcgctggccagatctacttcttgctaggatgcaaaaggagggcctcaccaatattgccgtagtcaatcaagcagctggtggtaatgcagtgctcacagcgtctaatggtcttggcccggcgcttttggacagatacaagcgagatctcctgcaatgtgccggggctaagtatgctttgatcttcgaaggcgtcaacgacatcggtgtggcgtcagcggactcaggcacgcaaacacgcatcggcacccaactcgaggctgcgttcaaacagatctcaactgatgccaaagctgcgggcatcaccgtgttcggggcgactatcacaccatttggaggctctggacaagcatacagcaatacagtccgcgactcgaaccgacagacagtcaacaagtggattctggctggtggcgatggctcttacaatgccacaattgacttcgccaagatcgtggccaacccatcaaacgcggcacagttagcaacgcaatatgatggtggtgaccatctgcatccaaatgtagcagggtatcaggccattgcagatcaatttcctttagacatattcaagggaagtgtcaaaaacgtgtcgagagcgctctacggcttgaagcagttgcaaaataatccaaagctgtggtaactggatctctaaggatgttatggttgtaactccctatcctccatatcaaaatgccgaaataggataatcagtccacga

SEQ ID NO: 2381 - DNA, 1182 bp, Muscodor strobelii
  misc_feature: SGI cDNA ID NO. 560423
  misc_feature: Encodes the peptide sequence at SEQ ID NO 2382
atgacggatatggaaaaccaatataaattagctcccgtgaatcctcacgcggaaccttcgaccgtatactccgagtttagaggttcatttgcaacacattgcaattctgatctcatccgcctaattgatcatgccgttggtctatcagaggaggaacaagacatgattcgtgcacagatcgcatgggatgatggccagggtgatcccaacagaccttgcctcctcgtccctgagccagataatcactacgaggtcgttggcggcagactcggtcgtgatcatactttcgaggatgtccctaagcatcgtgcacgggactgcctcatggactatattaacgtcaaaatgaatgatgaagaaaagaaactttgggctcgtcgagccatttgtcccgatcttaacgaacaggaaatcagcgactatgcttttctcatcgcgaagactagaaaagaaatgggtgacccctttgatctcatgattgaggcattcagacgccgaggcatcgaactggagaagcgaacgcaaccagtcaagaagaagaatccactgcaagaacttgagcgattcaagcaaatcatcgaggatgattctgtgaagagcattgcggaagctcagaatatcatgcgccaagaagacctactagaggccatcgacgactttattgacttgagccccgttctgcctgtcaagaatctgattgacgatgacatcctcctcgatttccagattcttgccaacagctctctcccgggcgatgagacaatctatgcagaccttcttaaggcagtgcgcgaagaaggcgttgatcatgacgctgatcaagtacgggctatgatcaagatcttcgtgcaatcaaacaactggagtcttgaccagttcagacgagctatccacatggacgcgcgaaagccgtttatcgagtttctcgaaaagaaaggaccagtctacggtgttaatagcctatcctacaaatggagctgggcattcttcaagatccgacaacttcgtaacctaccgctgaagggcgcgccggccggcagcgttctgcaacaacgcgatccaaaccgcgggcagaagcggcgaagtataggggcagaagatgacaaagagaatctagcggacatgccaccagatgttgcggtcttccccgtagccaaggctccaagacttcaagctgtttaa

SEQ ID NO: 2382 - protein, 393 aa, Muscodor strobelii
  misc_feature: SGI Peptide ID NO. 560423
MTDMENQYKLAPVNPHAEPSTVYSEFRGSFATHCNSDLIRLIDHAVGLSEEEQDMIRAQIAWDDGQGDPNRPCLLVPEPDNHYEVVGGRLGRDHTFEDVPKHRARDCLMDYINVKMNDEEKKLWARRAICPDLNEQEISDYAFLIAKTRKEMGDPFDLMIEAFRRRGIELEKRTQPVKKKNPLQELERFKQIIEDDSVKSIAEAQNIMRQEDLLEAIDDFIDLSPVLPVKNLIDDDILLDFQILANSSLPGDETIYADLLKAVREEGVDHDADQVRAMIKIFVQSNNWSLDQFRRAIHMDARKPFIEFLEKKGPVYGVNSLSYKWSWAFFKIRQLRNLPLKGAPAGSVLQQRDPNRGQKRRSIGAEDDKENLADMPPDVAVFPVAKAPRLQAV

SEQ ID NO: 2383 - DNA, 2073 bp, Muscodor strobelii
  misc_feature: SGI EST ID NO. CUFF.6052.0
  misc_feature: Variant of the nucleotide sequence at SEQ ID NO 2381
attcctcctgggagtccgtggcttggccttaccgcgccgacggacattctgacgtcgctctagatcacatggactcaagcttgttggtgtgagtttgataaacaaacaatccgcttcacggtctgataaccgatagtttggtaccaaactacagatgtatgcagcatcacaagggccccctacagccatgatgtaataaatgctccctgctcaactccctcatttcttcttcaaaaaggtgagattgatacactgttgcattgaatatctacgtcactttgtgcatatccatgctgatcattccggggtgcatttttctaccgcgtcgcgtctcgcaatttgtgttgacttattgcctatttcggacgccagaacgacgtcacggcataataacataaatcttacatggttttttggctgcgcagattattcaacgtcatcggcatgacaaggaatgcgaagtgtttaaaaggcgagatgattcgggttgactctgtttcgaaaatgttggatcgatatcaaaacgaacaccatttgtactattcattctaaagcaattagaccatacgacctattgtaagctcaagcttaacttctaaccattgtctgatcaatacttcgcaaatcattcaaaatgacggatatggaaaaccaatataaattagctcccgtgaatcctcacgcggaaccttcgaccgtatactccgagtttagaggttcatttgcaacacattgcaattctgatctcatccgcctaattgatcatgccgttggtctatcagaggaggaacaagacatgattcgtgcacagatcgcatgggatgatggccagggtgatcccaacagaccttgcctcctcgtccctgagccagataatcactacgaggtcgttggcggcagactcggtcgtgatcatactttcgaggatgtccctaagcatcgtgcacgggactgcctcatggactatattaacgtcaaaatgaatgatgaagaaaagaaactttgggctcgtcgagccatttgtcccgatcttaacgaacaggaaatcagcgactatgcttttctcatcgcgaagactagaaaagaaatgggtgacccctttgatctcatgattgaggcattcagacgccgaggcatcgaactggagaagcgaacgcaaccagtcaagaagaagaatccactgcaagaacttgagcgattcaagcaaatcatcgaggatgattctgtgaagagcattgcggaagctcagaatatcatgcgccaagaagacctactagaggccatcgacgactttattgacttgagccccgttctgcctgtcaagaatctgattgacgatgacatcctcctcgatttccagattcttgccaacagctctctcccgggcgatgagacaatctatgcagaccttcttaaggcagtgcgcgaagaaggcgttgatcatgacgctgatcaagtacgggctatgatcaagatcttcgtgcaatcaaacaactggagtcttgaccagttcagacgagctatccacatggacgcgcgaaagccgtttatcgagtttctcgaaaagaaaggaccagtctacggtgttaatagcctatcctacaaatggagctgggcattcttcaagatccgacaacttcgtaacctaccgctgaagggcgcgccggccggcagcgttctgcaacaacgcgatccaaaccgcgggcagaagcggcgaagtataggggcagaagatgacaaagagaatctagcggacatgccaccagatgttgcggtcttccccgtagccaaggctccaagacttcaagctgtttaagcctgccgtatgctgcggtttttgtacacattattgtatgatgagatgtatgagatattgtgtgacctccattgttagaactgtatagccattactgtcaatggatggaggattgagcgcgcatgtattttggataaggaacaagacactgagatgatttgtatgagaaagagatgaattttagttatgcgtgaagccggcatggcccctatcagatgtttcgcgacgtacatttgtcttatgtgattatctcaaca

SEQ ID NO: 2384 - DNA, 939 bp, Muscodor strobelii
  misc_feature: SGI cDNA ID NO. 560424
  misc_feature: Encodes the peptide sequence at SEQ ID NO 2385
atggaacagagcagcggaagtcagccgctccaggaagtgagatctgaggctacttacatcgtacaaccgagagctgttcatactcacacgataatccttcttcacggtttcagctccaacggcgaaaaattcgggaaagagcttctcgagactggtataacgtcaagtgggaagacatttcaagatctgctgcccggtgctcgcttcgtcttccctactgccaaacgccgacgctcaagcgcatttgggagaaagaggctcaccatctggtttgacattgctcgtctccctgatccatcgtgtagacgagaaacacagctgcaagggctggcagagtctgcggttgagattcgcgagttgcttcggcgggagatggatttggtcccggcgaagaatataattctcggtggaatgagcaatggctgtgcgatgtctctttctgttttgatgggcctggagtaccctctaggagggtatattggcatgtctggatatctgcccttttggcaagagatcgaggacgctatgcatagcgtcgaggggacaacggacgatgagttagatgctgatgatccatttgcgtcatctgacgacgacgatcctttcgaaacctcgaagaacaaggataagagtcctaatgagccgaccctgcaagcgatgcatttcgaaagggaccttctctgcattgaagcaatccccggtgccacaatcagccaaacagcgcaatcaacaccgatcttccttggtcatggcgatcaagatgagaagaagccgtatgtggagggcgagagggcagaaagaatcatgcgagctgccggcttcaacgtcggttggaaactataccctggacttggccactggtacagaatccccgatgagatcgacgatatcatgcatttcattcgtgacaaagtgggatggggaccggcagagacatga

SEQ ID NO: 2385 - protein, 312 aa, Muscodor strobelii
  misc_feature: SGI Peptide ID NO. 560424
  misc_feature (15)..(305): Pfam Id: PF02230 Pfam Desc: Phospholipase/Carboxylesterase
  misc_feature (90)..(173): Pfam Id: PF02230 Pfam Desc: Phospholipase/Carboxylesterase
  misc_feature (238)..(305): Pfam Id: PF02230 Pfam Desc: Phospholipase/Carboxylesterase
  misc_feature (19)..(304): NCBI GI: 46115032 Blast Desc: FG03358.1 [Gibberella zeae PH-1]
  misc_feature (27)..(306): NCBI GI: 238500726 Blast Desc: acyl-protein thioesterase 1,2, [Aspergillus flavus NRRL3357] gi|220691834|gb|EED48181.1| acyl-protein thioesterase 1,2, [Aspergillus flavus NRRL3357]
  misc_feature (20)..(305): NCBI GI: 238840819 Blast Desc: conserved [Microsporum canis CBS 113480]
  misc_feature (27)..(312): NCBI GI: 121700755 Blast Desc: phospholipase/carboxylesterase, [Aspergillus clavatus NRRL 1] gi|119396785|gb|EAW07216.1| phospholipase/carboxylesterase, [Aspergillus clavatus NRRL 1]
  misc_feature (9)..(306): NCBI GI: 225556826 Blast Desc: acyl-protein thioesterase [Ajellomyces capsulatus G186AR]
  misc_feature (27)..(306): NCBI GI: 240276084 Blast Desc: acyl-protein thioesterase [Ajellomyces capsulatus H143]
  misc_feature (27)..(306): NCBI GI: 255957011 Blast Desc: Pc21g22910 [Penicillium chrysogenum Wisconsin 54-1255] gi|211590969|emb|CAP97188.1| Pc21g22910 [Penicillium chrysogenum Wisconsin 54-1255]
  misc_feature (27)..(312): NCBI GI: 119482948 Blast Desc: phospholipase/carboxylesterase, [Neosartorya fischeri NRRL 181] gi|119409657|gb|EAW19605.1| phospholipase/carboxylesterase, [Neosartorya fischeri NRRL 181]
  misc_feature (28)..(308): NCBI GI: 225554323 Blast Desc: conserved [Ajellomyces capsulatus G186AR]
  misc_feature (19)..(306): NCBI GI: 258570005 Blast Desc: [Uncinocarpus reesii 1704] gi|237904076|gb|EEP78477.1| [Uncinocarpus reesii 1704]
  misc_feature (20)..(306): SWISSPROT Homolog: EC 3.1.1.1 Carboxylesterase
MEQSSGSQPLQEVRSEATYIVQPRAVHTHTIILLHGFSSNGEKFGKELLETGITSSGKTFQDLLPGARFVFPTAKRRRSSAFGRKRLTIWFDIARLPDPSCRRETQLQGLAESAVEIRELLRREMDLVPAKNIILGGMSNGCAMSLSVLMGLEYPLGGYIGMSGYLPFWQEIEDAMHSVEGTTDDELDADDPFASSDDDDPFETSKNKDKSPNEPTLQAMHFERDLLCIEAIPGATISQTAQSTPIFLGHGDQDEKKPYVEGERAERIMRAAGFNVGWKLYPGLGHWYRIPDEIDDIMHFIRDKVGWGPAET

SEQ ID NO: 2386 - DNA, 1522 bp, Muscodor strobelii
  misc_feature: SGI EST ID NO. CUFF.6058.0
  misc_feature: Variant of the nucleotide sequence at SEQ ID NO 2384
gtcgggtctaaaatggaacttgtatgggctgggatttctttatctgaagttcatcattatgagaatatgtcaaaaatcagccttcaattgaaattgactacatatcctctgccacctcttgcgcttgacacgaatgtgcttcccatcctcaccaatgatcaaccttcacgcagatgcccgagagtgttcaacatacaaaactagtagaaatagtaggattgaccacatatttggccttgaccctctacattctcatttctgtagcgatgatactctatgtcgatcttcgagcaaaggattaggcgctggggatggtcgctggggatggccgctggggatggccaaagaggcctcctggcctatagccccactgttggtatcacattggtagtgagtcatatgaacatgctgcttacaacaggacaataactgcacacaataatcacttttgattgcttgggcgagtcgagtactaataatgtgtgcgatatcaattaaacaccaagaaaatggaacagagcagcggaagtcagccgctccaggaagtgagatctgaggctacttacatcgtacaaccgagagctgttcatactcacacgataatccttcttcacggtttcagctccaacggcgaaaaattcgggaaagagcttctcgagactggtataacgtcaagtgggaagacatttcaagatctgctgcccggtgctcgcttcgtcttccctactgccaaacgccgacgctcaagcgcatttgggagaaagaggctcaccatctggtttgacattgctcgtctccctgatccatcgtgtagacgagaaacacagctgcaagggctggcagagtctgcggttgagattcgcgagttgcttcggcgggagatggatttggtcccggcgaagaatataattctcggtggaatgagcaatggctgtgcgatgtctctttctgttttgatgggcctggagtaccctctaggagggtatattggcatgtctggatatctgcccttttggcaagagatcgaggacgctatgcatagcgtcgaggggacaacggacgatgagttagatgctgatgatccatttgcgtcatctgacgacgacgatcctttcgaaacctcgaagaacaaggataagagtcctaatgagccgaccctgcaagcgatgcatttcgaaagggaccttctctgcattgaagcaatccccggtgccacaatcagccaaacagcgcaatcaacaccgatcttccttggtcatggcgatcaagatgagaagaagccgtatgtggagggcgagagggcagaaagaatcatgcgagctgccggcttcaacgtcggttggaaactataccctggacttggccactggtacagaatccccgatgagatcgacgatatcatgcatttcattcgtgacaaagtgggatggggaccggcagagacatgagataattgtattcttaaaatgaattttgtagtatattatactttacatagattcattagaggactgataagttc

SEQ ID NO: 2387 - DNA, 870 bp, Muscodor strobelii
  misc_feature: SGI cDNA ID NO. 560425
  misc_feature: Encodes the peptide sequence at SEQ ID NO 2388
atgtcgggccttgttgatgggttgggtgacgctctgggtgggctaactggtgatctgggtctggatggagccaacgatcccaacaatgctcccgcgacgacttcgtctacgggagcgaaagagactggaagtgctgatgcgggtgcaactgcaactgcaggtgtgggaaatgatgacggtccaagttctacggctgccgacgctgctcagtctacatcatcagtcgtctcggatgcaccaacaagcacaagtgctgatgctcaaaccacagccgagagctcaagtgccacgacgacttctcaatcttcaagtgtatcatcatcagttgtatcattatcaagcacgacttccccggttggaagtcaaacaactctcattgcttcaactttgacacctgcaaccccatcatcaacgccaatctcagacagcatcgcgagtagcctagggctttcaacttcgacaagtccgtcaagcttcaagacgtcaattacttcagcctccaacaccgcgctcacaagcgctgtatcctcaagcagcacagcgggagcaagtgcaacaccagcggccatcacgaatggcacaaaaacttcagacaatgccaaaggtggcatgtctacagcgactatcgccggaattgccggaggcgttggcggtgctgcattgattgtgtctacaatcttcatcctccgccgggtttggcgcaagagaagacttggaaacgatgaagcactcgatcgattagaccagatgtacgaaaatggcaagcccctagcctcgacatcgactgagagactggtgcgttggaataagggcttgtcggacttgcacggcccttccgccggtttaggcggtcagggttaccgcatgtaa

SEQ ID NO: 2388 - protein, 289 aa, Muscodor strobelii
  misc_feature: SGI Peptide ID NO. 560425
MSGLVDGLGDALGGLTGDLGLDGANDPNNAPATTSSTGAKETGSADAGATATAGVGNDDGPSSTAADAAQSTSSVVSDAPTSTSADAQTTAESSSATTTSQSSSVSSSVVSLSSTTSPVGSQTTLIASTLTPATPSSTPISDSIASSLGLSTSTSPSSFKTSITSASNTALTSAVSSSSTAGASATPAAITNGTKTSDNAKGGMSTATIAGIAGGVGGAALIVSTIFILRRVWRKRRLGNDEALDRLDQMYENGKPLASTSTERLVRWNKGLSDLHGPSAGLGGQGYRM

SEQ ID NO: 2389 - DNA, 1219 bp, Muscodor strobelii
  misc_feature: SGI EST ID NO. CUFF.6064.0
  misc_feature: Variant of the nucleotide sequence at SEQ ID NO 2387
cgttcatatgagtcacgcctggcatacatcgtccgaaagtctcattgctaagtctttgacatttttgcgggatgggtaatcaactcaaaccaacttcgatgtttgacacttgatacaaccaacaatcttttcgttttgcattcttctcttcgttgaacctggtgttccttatttacttgattattcacaatgtcgggccttgttgatgggttgggtgacgctctgggtgggctaactggtgatctgggtctggatggagccaacgatcccaacaatgctcccgcgacgacttcgtctacgggagcgaaagagactggaagtgctgatgcgggtgcaactgcaactgcaggtgtgggaaatgatgacggtccaagttctacggctgccgacgctgctcagtctacatcatcagtcgtctcggatgcaccaacaagcacaagtgctgatgctcaaaccacagccgagagctcaagtgccacgacgacttctcaatcttcaagtgtatcatcatcagttgtatcattatcaagcacgacttccccggttggaagtcaaacaactctcattgcttcaactttgacacctgcaaccccatcatcaacgccaatctcagacagcatcgcgagtagcctagggctttcaacttcgacaagtccgtcaagcttcaagacgtcaattacttcagcctccaacaccgcgctcacaagcgctgtatcctcaagcagcacagcgggagcaagtgcaacaccagcggccatcacgaatggcacaaaaacttcagacaatgccaaaggtggcatgtctacagcgactatcgccggaattgccggaggcgttggcggtgctgcattgattgtgtctacaatcttcatcctccgccgggtttggcgcaagagaagacttggaaacgatgaagcactcgatcgattagaccagatgtacgaaaatggcaagcccctagcctcgacatcgactgagagactggtgcgttggaataagggcttgtcggacttgcacggcccttccgccggtttaggcggtcagggttaccgcatgtaatttattatgtatcatatgtcatacaggcgttgggcgttcggtgtgagcagtcgtatcttgcgatgactaactacatgcacttggaattacggtatacattaaggctctctgtagctcaattgataaatgataaatatagtatagcagatctcacgaaaag

SEQ ID NO: 2390 - DNA, 855 bp, Muscodor strobelii
  misc_feature: SGI cDNA ID NO. 560426
  misc_feature: Elevated expression when VOC is produced
  misc_feature: Encodes the peptide sequence at SEQ ID NO 2391
atgccgtcggtcatcgcacctgttatcatgccgccgtcaaagcccgccaagattagtctcttgccggagtcaagacaagctcttcggatacgcaagcgcttgacacgccgttctcgtattagcactgcttctgtttttgtaccaagtgatcccagcctcacaccggagcagcatttcccactgcagacggtctacaccaggacctcacagccgagattcgtcaatctctatgacagtcgcgagattctcttaaccgtggatggaagctgtttgaataacggtagcaaagaccctgccactcggccacctgccggaggctgtagtttttcctttaagggtgctagcaaacagggccacactatgtcattcccctttgccaccagtagtcagatcgaagggggtatcatcgggtttccgcttgaacaagcaggtcctggcggagagaatcacaatgcgactagcaaccgagcgaagctacgagcggtcattgccgcactcgagttccgcgaatggcaacaggagggatggaggtccatcgttatcgcgaccgatctcgaatacgtggtatcgggcgcgacagtatggttgccaatttgggcaaaacgaggttggaagaaacgcaagtcttgccatgttattgccaaccgagatctgtgggaagaactgcacggtatcattgaccggctggccctgttgggaacacatgtttccttctggctgatacgctctcgaagtcccaccggagaatcgtccgccctagtacaagacaccaaatatgtggccagagaagcagcggcaatgcctggtaatgcaatgacccaggagttcacaaggctttgcggcatcgaggtctga

SEQ ID NO: 2391 - protein, 284 aa, Muscodor strobelii
  misc_feature: SGI Peptide ID NO. 560426
  misc_feature (79)..(235): Pfam Id: PF00075 Pfam Desc: RNase H
  misc_feature (143)..(223): Pfam Id: PF00075 Pfam Desc: RNase H
  misc_feature (72)..(266): NCBI GI: 242816035 Blast Desc: ribonuclease H1, [Talaromyces stipitatus ATCC 10500] gi|218715028|gb|EED14451.1| ribonuclease H1, [Talaromyces stipitatus ATCC 10500]
  misc_feature (39)..(241): NCBI GI: 145246266 Blast Desc: An12g03040 [Aspergillus niger] gi|134080096|emb|CAK41142.1| protein product [Aspergillus niger]
  misc_feature (46)..(241): NCBI GI: 119492692 Blast Desc: RNase H domain protein [Neosartorya fischeri NRRL 181] gi|119411825|gb|EAW21768.1| RNase H domain protein [Neosartorya fischeri NRRL 181]
  misc_feature (33)..(282): NCBI GI: 255940342 Blast Desc: Pc16g06030 [Penicillium chrysogenum Wisconsin 54-1255] gi|211585563|emb|CAP93273.1| Pc16g06030 [Penicillium chrysogenum Wisconsin 54-1255]
  misc_feature (46)..(241): NCBI GI: 256730423 Blast Desc: NECHADRAFT_82905 [Nectria haematococca mpVI 77-13-4]
  misc_feature (44)..(241): NCBI GI: 116202849 Blast Desc: CHGG_09309 [Chaetomium globosum CBS 148.51] gi|88177827|gb|EAQ85295.1| CHGG_09309 [Chaetomium globosum CBS 148.51]
  misc_feature (151)..(284): NCBI GI: 171681592 Blast Desc: protein product [Podospora anserina] gi|170940755|emb|CAP66404.1| protein product [Podospora anserina]
  misc_feature (72)..(252): NCBI GI: 256732321 Blast Desc: NECHADRAFT_80795 [Nectria haematococca mpVI 77-13-4]
  misc_feature (72)..(284): NCBI GI: 154318074 Blast Desc: BC1G_03020 [Botryotinia fuckeliana B05.10] gi|150843678|gb|EDN18871.1| BC1G_03020 [Botryotinia fuckeliana B05.10]
  misc_feature (55)..(241): NCBI GI: 256725157 Blast Desc: NECHADRAFT_55208 [Nectria haematococca mpVI 77-13-4]
  misc_feature: Useful for introducing or modulating the production of volatile compounds
MPSVIAPVIMPPSKPAKISLLPESRQALRIRKRLTRRSRISTASVFVPSDPSLTPEQHFPLQTVYTRTSQPRFVNLYDSREILLTVDGSCLNNGSKDPATRPPAGGCSFSFKGASKQGHTMSFPFATSSQIEGGIIGFPLEQAGPGGENHNATSNRAKLRAVIAALEFREWQQEGWRSIVIATDLEYVVSGATVWLPIWAKRGWKKRKSCHVIANRDLWEELHGIIDRLALLGTHVSFWLIRSRSPTGESSALVQDTKYVAREAAAMPGNAMTQEFTRLCGIEV

SEQ ID NO: 2392 - DNA, 1849 bp, Muscodor strobelii
  misc_feature: SGI EST ID NO. CUFF.6068.0
  misc_feature: Variant of the nucleotide sequence at SEQ ID NO 2390
cccgactgtcgacctcttcttgtaaacctccagacacataagatcactcaatgattgacgcaaagtagattcaaatacactcttcgttgcccttcgaaagaccacttgatagtagacggttctcaaatattgccttgtcaagcagcttgcagccatcttcacacactcgtctagaatccgagccatgccgtcggtcatcgcacctgttatcatgccgccgtcaaagcccgccaagattagtctcttgccggagtcaagacaagctcttcggatacgcaagcgcttgacacgccgttctcgtattagcactgcttctgtttttgtaccaagtgatcccagcctcacaccggagcagcatttcccactgcagacggtctacaccaggacctcacagccgagattcgtcaatctctatgacagtcgcgagattctcttaaccgtggatggaagctgtttgaataacggtagcaaagaccctgccactcggccacctgccggaggctgtagtttttcctttaagggtgctagcaaacagggccacactatgtcattcccctttgccaccagtagtcagatcgaagggggtatcatcgggtttccgcttgaacaagcaggtcctggcggagagaatcacaatgcgactagcaaccgagcgaagctacgagcggtcattgccgcactcgagttccgcgaatggcaacaggagggatggaggtccatcgttatcgcgaccgatctcgaatacgtggtatcgggcgcgacagtatggttgccaatttgggcaaaacgaggttggaagaaacgcaagtcttgccatgttattgccaaccgagatctgtgggaagaactgcacggtatcattgaccggctggccctgttgggaacacatgtttccttctggctgatacgctctcgaagtcccaccggagaatcgtccgccctagtacaagacaccaaatatgtggccagagaagcagcggcaatgcctggtaatgcaatgacccaggagttcacaaggctttgcggcatcgaggtctgagcgcgagaccatttttcagtcaaaagcttgcatcatacccacgtatctttcatgcaaatccgcttgcgattcaactgcagtattttatcgactacgcggagcttcggtttttcaaatcaacagcaggaacttgaaatgttccatgctacagacggatgaccgaagccagcacggtattcgaattttaacagcgcgcctcaaagcaaatcatatcacgcactctgtacagaaacacgacctcatccttgagcagcgaacaattcatagaatttgcacttgcatgcttggttggtaattgagcgaaaaatgaggtggtacttatatcttggagggttgtcccacgctggagcgcgtaatcttcgctgaagtctccaatcacggaattgtagattccgatattttcgcgctttggtactagcagtaaccgtggacactggaagtcaggtcatttcaacctacagtgccagcaatggtgctaggtactattatggcggtgtaatggtctatgagagagattcattgatgatcaatttgttccgtcgccaaatggagcaatgaaacattcgctcagcgattaggacattgtcatacgctggggcgcgggaaacactcgaggggctctggttccgagtgccagactggttcggggtgaagatactgaaatcgcaaagatgcatagcatattctatgactaggtgtaatatcattgaaagtacgattaagacattcgaattcatacttgaaaactccttacgctgcgattgtaggtgcatgtttccgacaagctcaatccgaaacagagggccctga

SEQ ID NO: 2393 - DNA, 255 bp, Muscodor strobelii
  misc_feature: SGI cDNA ID NO. 560427
  misc_feature: Encodes the peptide sequence at SEQ ID NO 2394
atgcaattcactctgttctccgtcattgccttggctgctcttgccaccgcgtctcccgcaaccagatctaccaatacaaaaagcggctcctgcaacggaacatcttgcagagttggcttcgccaactacgaatgcaacaagggatcatgcgttggtgagggcggcggtgacggagcaaagtgcaccgttgttgacaacgacgatggctcagttacaagctggtgccctggatgtggtgacagcaacctttgctga

SEQ ID NO: 2394 - protein, 84 aa, Muscodor strobelii
  misc_feature: SGI Peptide ID NO. 560427
MQFTLFSVIALAALATASPATRSTNTKSGSCNGTSCRVGFANYECNKGSCVGEGGGDGAKCTVVDNDDGSVTSWCPGCGDSNLC

SEQ ID NO: 2395 - DNA, 1995 bp, Muscodor strobelii
  misc_feature: SGI cDNA ID NO. 560428
  misc_feature: Encodes the peptide sequence at SEQ ID NO 2396
atggcagcgttgccaggagcgagactattggatgctggcttcgacatcgagggttccagtgacgaaattcgagaagcatatttctgggcagcgcggaaaggagactgcggtgctctcaagttactgctggaattggaaacggaagtgtcacttgccgatgcaaatggatggactgccctgcactacgcggcacgttatgggttcaaagagatggcagagttagtcatcgaggagggcggtgacatgtttgccaaggataaggaaggtcaaacgccacttcatctggcagtgcattacggccatgatgccgttgtccaggtccttaccagtggacaagtcgatcttccgacaagggacagtgctcaaggctctacatcacatcttggcgcaaatcaaggcctggagggcgcagtctcatcacttgcagttaacagcacggacagctcggaacaggaggccaaaaaattagatcatgtacctcttgccacagaaaatggtcgcgaaagcggtgccgagacgcccacgggtagatccacaacttcaccagtgctgcccgggagagaacatgatgttgcgacgatgcaaagtgaaccacacgacagcgttgtgaattcagacccaatcgcagaaaacaaagccgagagagacacaaccgtgtcagaaaccattgccttagacatccatgatgactctgttgctgaggtcagctcggcgggtgataacatgatcaacaccgtaagcgcaagtggatggacaccaatcaatgcagctgctttcaacggtcatgtcagccttctcctcgcaaagaatgccgagttagagacagctaataagggagggtggacaccattgaattcggcagcaagtagcggccatctcgaagttgttaagcttctcgttgaaaagggcgctaatccaggcacacgaaacgcatcaggggtatcaccactgaactcagcagcaagtaatggtcatatcggagttgttaagctcctcgtcgcaagaggcgtcgatgtggagacgaggagcgacaccggccaaacgccagtttactcggctgcaaaccagggccacatcgaggtactgcgagcactgcttgagcatggcgccagcttaagtgtttcgaacaacactggttttacacccctagtcacggccgcaaatcgtggacacactgagtgcgttaaatacctcctcgaaaaaggcgccgaaataaatgccacagaaaacctcgggcagtccgcagtatataggtcagccgccaacggtcatctagaggcccttcagctactcgtagataagggcgccgatatccatgttccgtccaatactggctggacaccgctgaatgcggccgcgagcgttggccatgtgcaaattgctaagttgcttctcgagcacggcgccagggttgacgacaccgaggacaccggacaatccgcagtctataaagccgcagtcaacgggcatctagaggtcgtaaggcttctcgtagaaaaggacgccgatgtgaataagcggtcgaaagcaggctggacgccgatcaatgcagctgccagtagaggacagatacaagtggttaggttgctcctcgacaatggcgcagacatcaatacgccgcaggattcgggacagacaccgctatattcggcgaccctgaagggcttttttgatgtcgtccaactgcttgcagaaaggggtgccggtctagctcctgctaacaccggtggctggacgccgctgaatgtcgccgcgagtaatggatttatcaagattgttgagttactgctcgacaagggtgtcgccatcgatacgccgaacaactcaaagcaaacgcctctatattcagcatctgacaagggtcatactgatattgtaaaattacttctagaacgaggtgcagacagaactgcgcaaagtcaggatgagatgacaccgctttacgctgcttccaatggtgggcatgatgaagtcgtccggctgcttctggaatag

SEQ ID NO: 2396 - protein, 664 aa, Muscodor strobelii
  misc_feature: SGI Peptide ID NO. 560428
  misc_feature (378)..(410): Pfam Id: PF00023 Pfam Desc: Ankyrin repeat
  misc_feature (279)..(311): Pfam Id: PF00023 Pfam Desc: Ankyrin repeat
  misc_feature (55)..(87): Pfam Id: PF00023 Pfam Desc: Ankyrin repeat
  misc_feature (609)..(641): Pfam Id: PF00023 Pfam Desc: Ankyrin repeat
  misc_feature (444)..(476): Pfam Id: PF00023 Pfam Desc: Ankyrin repeat
  misc_feature (510)..(542): Pfam Id: PF00023 Pfam Desc: Ankyrin repeat
  misc_feature (345)..(377): Pfam Id: PF00023 Pfam Desc: Ankyrin repeat
  misc_feature (88)..(120): Pfam Id: PF00023 Pfam Desc: Ankyrin repeat
  misc_feature (576)..(608): Pfam Id: PF00023 Pfam Desc: Ankyrin repeat
  misc_feature (477)..(509): Pfam Id: PF00023 Pfam Desc: Ankyrin repeat
  misc_feature (312)..(344): Pfam Id: PF00023 Pfam Desc: Ankyrin repeat
  misc_feature (411)..(443): Pfam Id: PF00023 Pfam Desc: Ankyrin repeat
  misc_feature (9)..(664): NCBI GI: 157106769 Blast Desc: ankyrin 2,3/unc44 [Aedes aegypti] gi|108868779|gb|EAT33004.1| ankyrin 2,3/unc44 [Aedes aegypti]
  misc_feature (30)..(664): NCBI GI: 157106769 Blast Desc: ankyrin 2,3/unc44 [Aedes aegypti] gi|108868779|gb|EAT33004.1| ankyrin 2,3/unc44 [Aedes aegypti]
  misc_feature (9)..(635): NCBI GI: 157106769 Blast Desc: ankyrin 2,3/unc44 [Aedes aegypti] gi|108868779|gb|EAT33004.1| ankyrin 2,3/unc44 [Aedes aegypti]
  misc_feature (24)..(664): NCBI GI: 70990006 Blast Desc: Pfs, NACHT and Ankyrin domain protein [Aspergillus fumigatus Af293] gi|66847484|gb|EAL87814.1| Pfs, NACHT and Ankyrin domain protein [Aspergillus fumigatus Af293]
  misc_feature (71)..(664): NCBI GI: 157106769 Blast Desc: ankyrin 2,3/unc44 [Aedes aegypti] gi|108868779|gb|EAT33004.1| ankyrin 2,3/unc44 [Aedes aegypti]
  misc_feature (9)..(663): NCBI GI: 115877255 Blast Desc: : similar to ankyrin 2,3/unc44, partial [Strongylocentrotus purpuratus] gi|115970262|ref|XP_001190373.1| : similar to ankyrin 2,3/unc44, partial [Strongylocentrotus
  misc_feature (9)..(664): NCBI GI: 157106389 Blast Desc: ankyrin 2,3/unc44 [Aedes aegypti] gi|108868849|gb|EAT33074.1| ankyrin 2,3/unc44 [Aedes aegypti]
  misc_feature (13)..(663): NCBI GI: 115720245 Blast Desc: : similar to ankyrin 2,3/unc44, partial [Strongylocentrotus purpuratus]
  misc_feature (48)..(662): NCBI GI: 115950018 Blast Desc: : similar to ankyrin 2,3/unc44, partial [Strongylocentrotus purpuratus]
  misc_feature (9)..(664): NCBI GI: 115738320 Blast Desc: : similar to ankyrin 2,3/unc44 [Strongylocentrotus purpuratus] gi|115939509|ref|XP_001189781.1| : similar to ankyrin 2,3/unc44 [Strongylocentrotus purpuratus]
  misc_feature (252)..(629): SWISSPROT Homolog: EC 2.7.11.1 Non-specific serine/threonine protein kinase
MAALPGARLLDAGFDIEGSSDEIREAYFWAARKGDCGALKLLLELETEVSLADANGWTALHYAARYGFKEMAELVIEEGGDMFAKDKEGQTPLHLAVHYGHDAVVQVLTSGQVDLPTRDSAQGSTSHLGANQGLEGAVSSLAVNSTDSSEQEAKKLDHVPLATENGRESGAETPTGRSTTSPVLPGREHDVATMQSEPHDSVVNSDPIAENKAERDTTVSETIALDIHDDSVAEVSSAGDNMINTVSASGWTPINAAAFNGHVSLLLAKNAELETANKGGWTPLNSAASSGHLEVVKLLVEKGANPGTRNASGVSPLNSAASNGHIGVVKLLVARGVDVETRSDTGQTPVYSAANQGHIEVLRALLEHGASLSVSNNTGFTPLVTAANRGHTECVKYLLEKGAEINATENLGQSAVYRSAANGHLEALQLLVDKGADIHVPSNTGWTPLNAAASVGHVQIAKLLLEHGARVDDTEDTGQSAVYKAAVNGHLEVVRLLVEKDADVNKRSKAGWTPINAAASRGQIQVVRLLLDNGADINTPQDSGQTPLYSATLKGFFDVVQLLAERGAGLAPANTGGWTPLNVAASNGFIKIVELLLDKGVAIDTPNNSKQTPLYSASDKGHTDIVKLLLERGADRTAQSQDEMTPLYAASNGGHDEVVRLLLE

SEQ ID NO: 2397 - DNA, 2675 bp, Muscodor strobelii
  misc_feature: SGI EST ID NO. CUFF.6077.0
  misc_feature: Variant of the nucleotide sequence at SEQ ID NO 2395
ttgcaatcttacaaggttcgtcagggttgttgatattaaaactgggtctcgatgttcagctcgaatttttggaacactagatggacagcaggaacaaagcactcaattcatacaattgcttcacctgaccattaaacatttggttcaatctgaactgtattctgtgccttttcaagacggttaatgattcgttccgttcgcttgaggcattgggacgcgctgcttgaaatcgtgtttcgcgccccacaatggcagcgttgccaggagcgagactattggatgctggcttcgacatcgagggttccagtgacgaaattcgagaagcatatttctgggcagcgcggaaaggagactgcggtgctctcaagttactgctggaattggaaacggaagtgtcacttgccgatgcaaatggatggactgccctgcactacgcggcacgttatgggttcaaagagatggcagagttagtcatcgaggagggcggtgacatgtttgccaaggataaggaaggtcaaacgccacttcatctggcagtgcattacggccatgatgccgttgtccaggtccttaccagtggacaagtcgatcttccgacaagggacagtgctcaaggctctacatcacatcttggcgcaaatcaaggcctggagggcgcagtctcatcacttgcagttaacagcacggacagctcggaacaggaggccaaaaaattagatcatgtacctcttgccacagaaaatggtcgcgaaagcggtgccgagacgcccacgggtagatccacaacttcaccagtgctgcccgggagagaacatgatgttgcgacgatgcaaagtgaaccacacgacagcgttgtgaattcagacccaatcgcagaaaacaaagccgagagagacacaaccgtgtcagaaaccattgccttagacatccatgatgactctgttgctgaggtcagctcggcgggtgataacatgatcaacaccgtaagcgcaagtggatggacaccaatcaatgcagctgctttcaacggtcatgtgggtaattttgtgttttggtcagaagaactagcaacagctggagcatatctaaacagaatgattccattctagatacaagcaaatgaaagaacgggctaatatatcttaatacactagacaaaggtagtcagccttctcctcgcaaagaatgccgagttagagacagctaataagggagggtggacaccattgaattcggcagcaagtagcggccatctcgaagttgttaagcttctcgttgaaaagggcgctaatccaggcacacgaaacgcatcaggggtatcaccactgaactcagcagcaagtaatggtcatatcggagttgttaagctcctcgtcgcaagaggcgtcgatgtggagacgaggagcgacaccggccaaacgccagtttactcggctgcaaaccagggccacatcgaggtactgcgagcactgcttgagcatggcgccagcttaagtgtttcgaacaacactggttttacacccctagtcacggccgcaaatcgtggacacactgagtgcgttaaatacctcctcgaaaaaggcgccgaaataaatgccacagaaaacctcgggcagtccgcagtatataggtcagccgccaacggtcatctagaggcccttcagctactcgtagataagggcgccgatatccatgttccgtccaatactggctggacaccgctgaatgcggccgcgagcgttggccatgtgcaaattgctaagttgcttctcgagcacggcgccagggttgacgacaccgaggacaccggacaatccgcagtctataaagccgcagtcaacgggcatctagaggtcgtaaggcttctcgtagaaaaggacgccgatgtgaataagcggtcgaaagcaggctggacgccgatcaatgcagctgccagtagaggacagatacaagtggttaggttgctcctcgacaatggcgcagacatcaatacgccgcaggattcgggacagacaccgctatattcggcgaccctgaagggcttttttgatgtcgtccaactgcttgcagaaaggggtgccggtctagctcctgctaacaccggtggctggacgccgctgaatgtcgccgcgagtaatggatttatcaagattgttgagttactgctcgacaagggtgtcgccatcgatacgccgaacaactcaaagcaaacgcctctatattcagcatctgacaagggtcatactgatattgtaaaattacttctagaacgaggtgcagacagaactgcgcaaagtcaggatgagatgacaccgctttacgctgcttccaatggtgggcatgatgaagtcgtccggctgcttctggaatagcgacaatcgcaattaactgtcataaagagatgatgacacacagaagaaattcggctgtaactgcttgcattgataccatggtctactcgggttttggatgcgacagttcatcgaatcgtcatgtgcatgacgtgtcggaggatggctgatgggtctttcttgcgtccacacgagactagacatgtatatataaggtaattattatgtaaatatagtccttatctggatatgcgcatagaaacgacaggccaacgcacaggattggaggcatttcgaactatcagcccagatgttcgaagatat

SEQ ID NO: 2398 - DNA, 4467 bp, Muscodor strobelii
  misc_feature: SGI cDNA ID NO. 560429
  misc_feature: Encodes the peptide sequence at SEQ ID NO 2399
atgcgccttcacaatgcagcgcgctatggccacgaagcgacggcgcgtcgtctactggaaagcggcgttgacgcctcggcctccgatgaatatggcttgacggcactccattacgcagcacgcgccggacacgcgtcagttgttcaactgctcataagccataactgcgacatatcgacaccggacaactcaggtttcacggccagctatcgtgcggcgcaaggtggccatgtggccgttatcaaaatacttttggcccatgatgttgggattttatcagcgcgagatagtcatgggtttactgtccttcacagcgcggcgcggaacaaccaggtttcagtcgtcggcttcctccttgacaatgccgccgacatctcgacacaggattctatggggtggactgcacttcactgggcatcaattaatggtcatgaagccgttgtgtgttcccttctggataggcatgcaaacccatcggcaatcgacaaccaaggaatgacgtccctattccatgcagtgagaaatggccacggccacgtcgtacaggcccttctgagacatggtgcagatgtgaacatacgtaacaaccagaattggatggcccttcataatgcgtcacgcctcggacacgcctctattgtgcgaattctcttagacaataatgcagacatgtccgccaaggctgctgatggttggcctcccctacactatgcagcgcgcaacgatcaccagcatgtagctcagttgctcttagatagaggcgcagatgtgtcggcgagggatgattaccaattcgcagcacttcatcatgcctcgcgggccggtcatgcttccgttgtgcgcattctgttggatagtggtgcagatatgtctgccagagctagcgacggatggccagccttgaactatgccgcagctaatggtcatcatcatatagctcagctactcttagatagaggcgcagatttgtccgcaagagacgatcatcaattttctgctctgcaccatgcttgccgcgccgggcatgagactgttgtccagctccttatatccagaggcagtgatatctcggctggagccaaaggtggctggacacctcttcattatgcagcggcgaatggtagagacaacattattgcattgctattgggtcagcatgccgatatatcggcacaagacaatttcaagtgtactgctttctatcgagcggcgcagaacggccatgattctgctgtgcgcctatttcttagccacggtataaacgcatctgcaccgaacgccgatcaatggacagcccttcatgtcgcggcaaaaaatggccacgagtccatcgttcgggcattgctaaatggaggcgcgaatgtggctgcgaaagctcaccagcagtggacaccccttcactgcgcggcgttgggaggtcatgaagcaatagtcgcaatgctgcttgagaataacgctgacttatcggcccaggatgacctcaagcatacgccactatttcgcgcagcggagaacggtcatgttgctgttataaagttattgtccgcccagggtgcagagctgtttacccccgatgggaaaggatggacggcttttactgctgccgcccgcaacggacatgatgaagccgttcgactactcttgcataggggtgccgaaataacctctaaggacaatactggttggacagcgcttcatcatgcggcccgggcaggtcaagaggctgttgttcggctgttgatagatatgggcgcgcaaatcgatccagaagaaacaaatgggaggaccccattacatctcgccgcgtattgggatcatgaagtggtccttcgcatcctggtagagaaaggggcagcgattggaatgacggacaggctcaatcaaacgccgttagtcttggcagccgcacagggaaacgacttaatcgcgagggcgcttttggaatgcgagcatcgtgattctgtgatagcgagtgatggctggataggcttgcattgcttggcacgctacaatcatcataatgcgttaagaaagttgctagatcacaaagtcaatctctccgtgcgaaccaagaccggtcgaaccgctttgatgctgggggcgaagcacaatcatgctacgatagtgggtttgcttcttgacgccaacgctgttgttacagaagccgacagccacggcttcactgcactacacttcgcagcacgctttgggcatgagtctgtagggaaaatgctttgcgagcatgagctggacatcgacgcaaagagcgaaagtggccagacagctctcagtcttgccgtagagcagggacatcttgaagtagtacagctgttagttaacagaggagcagacccgaaggtgaaagaccgtgccggatggacagcgcttcaccatgcgtcgaggcacgagaatgagaagatatttcaggccctcctcaacactagaatcgacatcaatgcaatagatactaatggatggacgccacttcacatcgcggcccggtttggaaatgactcggctttgcggttgcttgtggattatcatgccaacgttgacgcacaaggcaattacgatcgtacagctctgagccttgctgcggagtatgggcatgtcaagtcactgcagtgtttatttgatatgctcgctcgcgatcgacgcagcgtgtctgaatatgaattaaggcttaaagaaaacgactcagctgctttagacccagatctattaagtcactttataacgaaaacaagactggccaacagcagtgctgtaccccaccagagcaatcaggaggctccgtcatggaaatctagctcgtcatcgtcatcgttattctcgtttggcggcctttatgatgcgttgtctagtgaacgcagtttcagagtccttcaacttcagccaggcagatttggtgatccaatcaattgcgcgtttcatataactacactggacgatcaaagtgtttcttacgaggcggtatcctacgtttggggcatagaagatgcggatcagttcatacacttcccgcaaggaagcatcgcggttcgaccgaatatttaccatgctctcacacgatttcgtgacccagtgcatgtaagaaatctttgggttgatgcgatatgtattgatcaagacaacattcaagaaaggaacaagcagattacattgatgaaggacatctattctattgcatctcatgtcctaatctggctagggacagatgacagggcgctttgtgctgcctttcagtcgatcttggacgctgttgcttggaagcaaatgtcatatccaaacgatttggacagtaaacaaattctaagtcgatgggacaaggatgtgacgctgcttttcaacaatccttggtttgaaagagcctggatttatcaggagatcatttgttccgtggcagctagtgtctattgtggaacacgagatggttcctggagcctcagacagaactcgctgccgtggtctgctctccatacattcttcacactgttcgaagaaacacaggccggcgagcagacactgttcaactgcagtattctgagtcctatcatcttcggccagcagtattatcacgcggactcacatactcacagcgacttcgagctcctgacactccttgaaatgcgacgggacagtaaagctacggatccccgtgacaaggtgttttctctcctgggcctttcgaaccaagggcagaggcgcttagtgaaggcagactactccgagcctctggcgcgcgtgtacaccgatgttgcgcgtctacttatcgattcacgtagagaccttcgtattctgagcgccgtgcaacatccgaatgatagtgctgacctgccatcatgggtacccgattggcgccagccctggagggcaggatcataccgatcttccgcgattggcactgatggagcaatcgaaacaactcgtgccgcattcggaaccgccttagatcgggggcttgcgagctgcgaggcgcaaggtatcaacgggctgaagctaatcggcagatgctttgccagaatcgagaatgtcgcagagtacctcccagaaggtctggactacggacgcgcattttcgaaaaagatcacatacttgaaagagcaaggctttcccctggacagcaagtatccacacacaaagcggacatacaaagcttcgctctatgcctttttagaagcaccaaatctcgctggcttacaaacggatgccgaaagtgttggagatggtgttcagcctcggcgactgttccttgcaagtaatggctttgtcggactaggtccaccgagtactgaagtcggtgatgagatttgcttcctgtttggcggcgacgtgccttatgttgtacgggccaagagcgatgttttcgagttccttggtgattgttattgccatgggattactgtattagacgatgcaattgaggattgtataggtaatcaggataagacttatgtgctctactag

SEQ ID NO: 2399 - protein, 1488 aa, Muscodor strobelii
  misc_feature: SGI Peptide ID NO. 560429
  misc_feature (230)..(262): Pfam Id: PF00023 Pfam Desc: Ankyrin repeat
  misc_feature (362)..(394): Pfam Id: PF00023 Pfam Desc: Ankyrin repeat
  misc_feature (461)..(493): Pfam Id: PF00023 Pfam Desc: Ankyrin repeat
  misc_feature (31)..(63): Pfam Id: PF00023 Pfam Desc: Ankyrin repeat
  misc_feature (824)..(856): Pfam Id: PF00023 Pfam Desc: Ankyrin repeat
  misc_feature (296)..(328): Pfam Id: PF00023 Pfam Desc: Ankyrin repeat
  misc_feature (131)..(163): Pfam Id: PF00023 Pfam Desc: Ankyrin repeat
  misc_feature (428)..(460): Pfam Id: PF00023 Pfam Desc: Ankyrin repeat
  misc_feature (164)..(196): Pfam Id: PF00023 Pfam Desc: Ankyrin repeat
  misc_feature (758)..(790): Pfam Id: PF00023 Pfam Desc: Ankyrin repeat
  misc_feature (593)..(625): Pfam Id: PF00023 Pfam Desc: Ankyrin repeat
  misc_feature (98)..(130): Pfam Id: PF00023 Pfam Desc: Ankyrin repeat
  misc_feature (329)..(361): Pfam Id: PF00023 Pfam Desc: Ankyrin repeat
  misc_feature (263)..(295): Pfam Id: PF00023 Pfam Desc: Ankyrin repeat
  misc_feature (560)..(592): Pfam Id: PF00023 Pfam Desc: Ankyrin repeat
  misc_feature (527)..(559): Pfam Id: PF00023 Pfam Desc: Ankyrin repeat
  misc_feature (725)..(757): Pfam Id: PF00023 Pfam Desc: Ankyrin repeat
  misc_feature (791)..(823): Pfam Id: PF00023 Pfam Desc: Ankyrin repeat
  misc_feature (692)..(724): Pfam Id: PF00023 Pfam Desc: Ankyrin repeat
  misc_feature (197)..(229): Pfam Id: PF00023 Pfam Desc: Ankyrin repeat
  misc_feature (989)..(1129): Pfam Id: PF06985 Pfam Desc: Heterokaryon incompatibility protein (HET)
  misc_feature (659)..(691): Pfam Id: PF00023 Pfam Desc: Ankyrin repeat
  misc_feature (494)..(526): Pfam Id: PF00023 Pfam Desc: Ankyrin repeat
  misc_feature (1031)..(1129): Pfam Id: PF06985 Pfam Desc: Heterokaryon incompatibility protein (HET)
  misc_feature (3)..(879): NCBI GI: 189502738 Blast Desc: Aasi_1435 [Candidatus Amoebophilus asiaticus 5a2] gi|189498179|gb|ACE06726.1| Aasi_1435 [Candidatus Amoebophilus asiaticus 5a2]
  misc_feature (3)..(846): NCBI GI: 189502738 Blast Desc: Aasi_1435 [Candidatus Amoebophilus asiaticus 5a2] gi|189498179|gb|ACE06726.1| Aasi_1435 [Candidatus Amoebophilus asiaticus 5a2]
  misc_feature (3)..(879): NCBI GI: 189502738 Blast Desc: Aasi_1435 [Candidatus Amoebophilus asiaticus 5a2] gi|189498179|gb|ACE06726.1| Aasi_1435 [Candidatus Amoebophilus asiaticus 5a2]
  misc_feature (3)..(879): NCBI GI: 157106389 Blast Desc: ankyrin 2,3/unc44 [Aedes aegypti] gi|108868849|gb|EAT33074.1| ankyrin 2,3/unc44 [Aedes aegypti]
  misc_feature (3)..(879): NCBI GI: 189502738 Blast Desc: Aasi_1435 [Candidatus Amoebophilus asiaticus 5a2] gi|189498179|gb|ACE06726.1| Aasi_1435 [Candidatus Amoebophilus asiaticus 5a2]
  misc_feature (80)..(856): NCBI GI: 157106769 Blast Desc: ankyrin 2,3/unc44 [Aedes aegypti] gi|108868779|gb|EAT33004.1| ankyrin 2,3/unc44 [Aedes aegypti]
  misc_feature (1)..(923): NCBI GI: 115926458 Blast Desc: : similar to ankyrin 2,3/unc44 [Strongylocentrotus purpuratus]
  misc_feature (67)..(879): NCBI GI: 157106389 Blast Desc: ankyrin 2,3/unc44 [Aedes aegypti] gi|108868849|gb|EAT33074.1| ankyrin 2,3/unc44 [Aedes aegypti]
  misc_feature (15)..(792): NCBI GI: 157106769 Blast Desc: ankyrin 2,3/unc44 [Aedes aegypti] gi|108868779|gb|EAT33004.1| ankyrin 2,3/unc44 [Aedes aegypti]
  misc_feature (1)..(883): NCBI GI: 115926458 Blast Desc: : similar to ankyrin 2,3/unc44 [Strongylocentrotus purpuratus]
  misc_feature (103)..(796): SWISSPROT Homolog: EC 2.4.2.30 NAD(+) ADP-ribosyltransferase
MRLHNAARYGHEATARRLLESGVDASASDEYGLTALHYAARAGHASVVQLLISHNCDISTPDNSGFTASYRAAQGGHVAVIKILLAHDVGILSARDSHGFTVLHSAARNNQVSVVGFLLDNAADISTQDSMGWTALHWASINGHEAVVCSLLDRHANPSAIDNQGMTSLFHAVRNGHGHVVQALLRHGADVNIRNNQNWMALHNASRLGHASIVRILLDNNADMSAKAADGWPPLHYAARNDHQHVAQLLLDRGADVSARDDYQFAALHHASRAGHASVVRILLDSGADMSARASDGWPALNYAAANGHHHIAQLLLDRGADLSARDDHQFSALHHACRAGHETVVQLLISRGSDISAGAKGGWTPLHYAAANGRDNIIALLLGQHADISAQDNFKCTAFYRAAQNGHDSAVRLFLSHGINASAPNADQWTALHVAAKNGHESIVRALLNGGANVAAKAHQQWTPLHCAALGGHEAIVAMLLENNADLSAQDDLKHTPLFRAAENGHVAVIKLLSAQGAELFTPDGKGWTAFTAAARNGHDEAVRLLLHRGAEITSKDNTGWTALHHAARAGQEAVVRLLIDMGAQIDPEETNGRTPLHLAAYWDHEVVLRILVEKGAAIGMTDRLNQTPLVLAAAQGNDLIARALLECEHRDSVIASDGWIGLHCLARYNHHNALRKLLDHKVNLSVRTKTGRTALMLGAKHNHATIVGLLLDANAVVTEADSHGFTALHFAARFGHESVGKMLCEHELDIDAKSESGQTALSLAVEQGHLEVVQLLVNRGADPKVKDRAGWTALHHASRHENEKIFQALLNTRIDINAIDTNGWTPLHIAARFGNDSALRLLVDYHANVDAQGNYDRTALSLAAEYGHVKSLQCLFDMLARDRRSVSEYELRLKENDSAALDPDLLSHFITKTRLANSSAVPHQSNQEAPSWKSSSSSSSLFSFGGLYDALSSERSFRVLQLQPGRFGDPINCAFHITTLDDQSVSYEAVSYVWGIEDADQFIHFPQGSIAVRPNIYHALTRFRDPVHVRNLWVDAICIDQDNIQERNKQITLMKDIYSIASHVLIWLGTDDRALCAAFQSILDAVAWKQMSYPNDLDSKQILSRWDKDVTLLFNNPWFERAWIYQEIICSVAASVYCGTRDGSWSLRQNSLPWSALHTFFTLFEETQAGEQTLFNCSILSPIIFGQQYYHADSHTHSDFELLTLLEMRRDSKATDPRDKVFSLLGLSNQGQRRLVKADYSEPLARVYTDVARLLIDSRRDLRILSAVQHPNDSADLPSWVPDWRQPWRAGSYRSSAIGTDGAIETTRAAFGTALDRGLASCEAQGINGLKLIGRCFARIENVAEYLPEGLDYGRAFSKKITYLKEQGFPLDSKYPHTKRTYKASLYAFLEAPNLAGLQTDAESVGDGVQPRRLFLASNGFVGLGPPSTEVGDEICFLFGGDVPYVVRAKSDVFEFLGDCYCHGITVLDDAIEDCIGNQDKTYVLY

SEQ ID NO: 2400 - DNA, 4648 bp, Muscodor strobelii
  misc_feature: SGI EST ID NO. CUFF.6079.0
  misc_feature: Variant of the nucleotide sequence at SEQ ID NO 2398
ccacctctggccattcaccgccgtcctcaattgcttcaatcaatgcgccttcacaatgcagcgcgctatggccacgaagcgacggcgcgtcgtctactggaaagcggcgttgacgcctcggcctccgatgaatatggcttgacggcactccattacgcagcacgcgccggacacgcgtcagttgttcaactgctcataagccataactgcgacatatcgacaccggacaactcaggtttcacggccagctatcgtgcggcgcaaggtggccatgtggccgttatcaaaatacttttggcccatgatgttgggattttatcagcgcgagatagtcatgggtttactgtccttcacagcgcggcgcggaacaaccaggtttcagtcgtcggcttcctccttgacaatgccgccgacatctcgacacaggattctatggggtggactgcacttcactgggcatcaattaatggtcatgaagccgttgtgtgttcccttctggataggcatgcaaacccatcggcaatcgacaaccaaggaatgacgtccctattccatgcagtgagaaatggccacggccacgtcgtacaggcccttctgagacatggtgcagatgtgaacatacgtaacaaccagaattggatggcccttcataatgcgtcacgcctcggacacgcctctattgtgcgaattctcttagacaataatgcagacatgtccgccaaggctgctgatggttggcctcccctacactatgcagcgcgcaacgatcaccagcatgtagctcagttgctcttagatagaggcgcagatgtgtcggcgagggatgattaccaattcgcagcacttcatcatgcctcgcgggccggtcatgcttccgttgtgcgcattctgttggatagtggtgcagatatgtctgccagagctagcgacggatggccagccttgaactatgccgcagctaatggtcatcatcatatagctcagctactcttagatagaggcgcagatttgtccgcaagagacgatcatcaattttctgctctgcaccatgcttgccgcgccgggcatgagactgttgtccagctccttatatccagaggcagtgatatctcggctggagccaaaggtggctggacacctcttcattatgcagcggcgaatggtagagacaacattattgcattgctattgggtcagcatgccgatatatcggcacaagacaatttcaagtgtactgctttctatcgagcggcgcagaacggccatgattctgctgtgcgcctatttcttagccacggtataaacgcatctgcaccgaacgccgatcaatggacagcccttcatgtcgcggcaaaaaatggccacgagtccatcgttcgggcattgctaaatggaggcgcgaatgtggctgcgaaagctcaccagcagtggacaccccttcactgcgcggcgttgggaggtcatgaagcaatagtcgcaatgctgcttgagaataacgctgacttatcggcccaggatgacctcaagcatacgccactatttcgcgcagcggagaacggtcatgttgctgttataaagttattgtccgcccagggtgcagagctgtttacccccgatgggaaaggatggacggcttttactgctgccgcccgcaacggacatgatgaagccgttcgactactcttgcataggggtgccgaaataacctctaaggacaatactggttggacagcgcttcatcatgcggcccgggcaggtcaagaggctgttgttcggctgttgatagatatgggcgcgcaaatcgatccagaagaaacaaatgggaggaccccattacatctcgccgcgtattgggatcatgaagtggtccttcgcatcctggtagagaaaggggcagcgattggaatgacggacaggctcaatcaaacgccgttagtcttggcagccgcacagggaaacgacttaatcgcgagggcgcttttggaatgcgagcatcgtgattctgtgatagcgagtgatggctggataggcttgcattgcttggcacgctacaatcatcataatgcgttaagaaagttgctagatcacaaagtcaatctctccgtgcgaaccaagaccggtcgaaccgctttgatgctgggggcgaagcacaatcatgctacgatagtgggtttgcttcttgacgccaacgctgttgttacagaagccgacagccacggcttcactgcactacacttcgcagcacgctttgggcatgagtctgtagggaaaatgctttgcgagcatgagctggacatcgacgcaaagagcgaaagtggccagacagctctcagtcttgccgtagagcagggacatcttgaagtagtacagctgttagttaacagaggagcagacccgaaggtgaaagaccgtgccggatggacagcgcttcaccatgcgtcgaggcacgagaatgagaagatatttcaggccctcctcaacactagaatcgacatcaatgcaatagatactaatggatggacgccacttcacatcgcggcccggtttggaaatgactcggctttgcggttgcttgtggattatcatgccaacgttgacgcacaaggcaattacgatcgtacagctctgagccttgctgcggagtatgggcatgtcaagtcactgcagtgtttatttgatatgctcgctcgcgatcgacgcagcgtgtctgaatatgaattaaggcttaaagaaaacgactcagctgctttagacccagatctattaagtcactttataacgaaaacaagactggccaacagcagtgctgtaccccaccagagcaatcaggaggctccgtcatggaaatctagctcgtcatcgtcatcgttattctcgtttggcggcctttatgatgcgttgtctagtgaacgcagtttcagagtccttcaacttcagccaggcagatttggtgatccaatcaattgcgcgtttcatataactacactggacgatcaaagtgtttcttacgaggcggtatcctacgtttggggcatagaagatgcggatcagttcatacacttcccgcaaggaagcatcgcggttcgaccgaatatttaccatgctctcacacgatttcgtgacccagtgcatgtaagaaatctttgggttgatgcgatatgtattgatcaagacaacattcaagaaaggaacaagcagattacattgatgaaggacatctattctattgcatctcatgtcctaatctggctagggacagatgacagggcgctttgtgctgcctttcagtcgatcttggacgctgttgcttggaagcaaatgtcatatccaaacgatttggacagtaaacaaattctaagtcgatgggacaaggatgtgacgctgcttttcaacaatccttggtttgaaagagcctggatttatcaggagatcatttgttccgtggcagctagtgtctattgtggaacacgagatggttcctggagcctcagacagaactcgctgccgtggtctgctctccatacattcttcacactgttcgaagaaacacaggccggcgagcagacactgttcaactgcagtattctgagtcctatcatcttcggccagcagtattatcacgcggactcacatactcacagcgacttcgagctcctgacactccttgaaatgcgacgggacagtaaagctacggatccccgtgacaaggtgttttctctcctgggcctttcgaaccaagggcagaggcgcttagtgaaggcagactactccgagcctctggcgcgcgtgtacaccgatgttgcgcgtctacttatcgattcacgtagagaccttcgtattctgagcgccgtgcaacatccgaatgatagtgctgacctgccatcatgggtacccgattggcgccagccctggagggcaggatcataccgatcttccgcgattggcactgatggagcaatcgaaacaactcgtgccgcattcggaaccgccttagatcgggggcttgcgagctgcgaggcgcaaggtatcaacgggctgaagctaatcggcagatgctttgccagaatcgagaatgtcgcagagtacctcccagaaggtctggactacggacgcgcattttcgaaaaagatcacatacttgaaagagcaaggctttcccctggacagcaagtatccacacacaaagcggacatacaaagcttcgctctatgcctttttagaagcaccaaatctcgctggcttacaaacggatgccgaaagtgttggagatggtgttcagcctcggcgactgttccttgcaagtaatggctttgtcggactaggtccaccgagtactgaagtcggtgatgagatttgcttcctgtttggcggcgacgtgccttatgttgtacgggccaagagcgatgttttcgagttccttggtgattgttattgccatgggattactgtattagacgatgcaattgaggattgtataggtaatcaggataagacttatgtgctctactagaaaattttccagacagatcgtcctgagatctatcatgaagtaggaataattgctctttattcaggacgtccaacaaatggtaggcggcaacgcaaccatgtagcaatagtagagacgtcagaccctcaacagaataaat

SEQ ID NO: 2401 - DNA, 318 bp, Muscodor strobelii
  misc_feature: SGI cDNA ID NO. 560430
  misc_feature: Elevated expression when VOC is produced
  misc_feature: Encodes the peptide sequence at SEQ ID NO 2402
atgtctgctccgtacataatgaccgtagtctaccctgccgggacgaagtttgacatggattattatatgtccacgcatatgccactagttcagaagcagtgggctcctcagggtcttaaggcatggaaggtccacgagtatacgtctcctggcgcaggttacactgtgcaagccatcctcgaatgggagagcaaggaagcatgtgataaagcccagaaaactcctgaaggggcagctgtctttggagatgtccccaacttcagcgacaagacacctgctgtatggactggtgatttcaaaggatcagcaacttgttaa

SEQ ID NO: 2402 - protein, 105 aa, Muscodor strobelii
  misc_feature: SGI Peptide ID NO. 560430
  misc_feature (5)..(100): Pfam Id: PF07110 Pfam Desc: EthD protein
  misc_feature (7)..(97): NCBI GI: 46114568 Blast Desc: FG03126.1 [Gibberella zeae PH-1]
  misc_feature (6)..(94): NCBI GI: 154292909 Blast Desc: [Botryotinia fuckeliana B05.10] gi|150845762|gb|EDN20955.1| [Botryotinia fuckeliana B05.10]
  misc_feature (8)..(99): NCBI GI: 145240575 Blast Desc: An08g08200 [Aspergillus niger] gi|134077457|emb|CAK40022.1| protein product [Aspergillus niger]
  misc_feature (5)..(98): NCBI GI: 156063824 Blast Desc: [Sclerotinia sclerotiorum 1980] gi|154697364|gb|EDN97102.1| [Sclerotinia sclerotiorum 1980]
  misc_feature (6)..(102): NCBI GI: 188582009 Blast Desc: Ethyl tert-butyl ether degradation EthD [Methylobacterium populi BJ001] gi|179345507|gb|ACB80919.1| Ethyl tert-butyl ether degradation EthD [Methylobacterium populi BJ001]
  misc_feature (7)..(105): NCBI GI: 256723280 Blast Desc: NECHADRAFT_51984 [Nectria haematococca mpVI 77-13-4]
  misc_feature (5)..(97): NCBI GI: 255954115 Blast Desc: Pc21g07700 [Penicillium chrysogenum Wisconsin 54-1255] gi|211589521|emb|CAP95667.1| Pc21g07700 [Penicillium chrysogenum Wisconsin 54-1255]
  misc_feature (7)..(100): NCBI GI: 261352864 Blast Desc: VDBG_01401 [Verticillium albo-atrum VaMs.102]
  misc_feature (6)..(93): NCBI GI: 46203564 Blast Desc: Magn03005464 [Magnetospirillum magnetotacticum MS-1]
  misc_feature (5)..(98): NCBI GI: 145249142 Blast Desc: An14g02850 [Aspergillus niger] gi|134081587|emb|CAK41996.1| protein product [Aspergillus niger]
  misc_feature: Useful for introducing or modulating the production of volatile compounds
MSAPYIMTVVYPAGTKFDMDYYMSTHMPLVQKQWAPQGLKAWKVHEYTSPGAGYTVQAILEWESKEACDKAQKTPEGAAVFGDVPNFSDKTPAVWTGDFKGSATC

SEQ ID NO: 2403 - DNA, 718 bp, Muscodor strobelii
  misc_feature: SGI EST ID NO. CUFF.6082.0
  misc_feature: Variant of the nucleotide sequence at SEQ ID NO 2401
caccagtgacattgatcgggaagcggggtcgaaaggttggtcatggaggtagtatatatatccatactcactccactcgcgatctcttagcaattcgtcgggtcgaacaataaaccgaggccgcttcccactcagtactgggaacttgctacaaacgcaattgctttctaaatatcttctcaataacaccaatctccagctcgtatcatcacaaaacagcggctgtggcttaagaccatttcgtttactgccatcatgtctgctccgtacataatgaccgtagtctaccctgccgggacgaagtttgacatggattattatatgtccacgcatatgccactagttcagaagcagtgggctcctcagggtcttaaggcatggaaggtccacgagtatacgtctcctggcgcaggttacactgtgcaagccatcctcgaatgggagagcaaggaagcatgtgataaagcccagaaaactcctgaaggggcagctgtctttggagatgtccccaacttcagcgacaagacacctgctgtatggactggtgatttcaaaggatcagcaacttgttaatcaggcacagtgcgctttgttaaagatcattcaagtgaaccaaccttgggttataagctcgagaaagagcttagtgattatgtgcaacagtcagacgagcgtatcttcaaattagcaacccgaattataagttgcctcataagtc

SEQ ID NO: 2404 - DNA, 903 bp, Muscodor strobelii
  misc_feature: SGI cDNA ID NO. 560431
  misc_feature: Encodes the peptide sequence at SEQ ID NO 2405
atgactgtcaacggaaagactgagtctatctacgtacttaacgatggatcatcggacgctgaacacgagcgattgaaccttcaacaccgcctgtttgacgatataatgcagaacaagctactgcctcctcatatccattcatctatcacggagactacgacaggaccgaaagtcttggatctcgcaacaggaacaggggtatggcttatctcagtcgcgaagaccctaccaccggactctgaacttctcggtcttgatttcgatacctcaaagttcccgccagccgcctctttgcctcctaatatcactctgagaaaagggaacatctttgaacctttcccagaagatctccttgggaaattcgatatcgtcaatctgaggctcattctcctagccctgaaggttggtgatgggacagctttgatgaagaacgtgatgagcctgctcaagccaggaggatttgtcgtctggagcgaaacgggtccgactgtgcaggccgtcgagcctccgagctttgcattctttaagttccaagatatacactggcgatatgctaaacaatttggaggagatttgaacttgccccttggaatggtggcctatatcaaagaagcaggctacattgactttggagatacggcatatcctggtggatcgcaattgtatactcgcaaagattggctcgagaggagtcatagacagatcctgacattcatcccacagactctgcgagggatcgttagtttaggtggagtggaaggcatggaaactaaagaacaggttgacgaactcgtggcagagcttcgtaaggattttgtaggtgatcgaaaagtccaccccttgttcattcgagcttggggcaagaaaccagagtcattgatgaataatggaacgggaatctag

SEQ ID NO: 2405 - protein, 300 aa, Muscodor strobelii
  misc_feature: SGI Peptide ID NO. 560431
  misc_feature (59)..(155): Pfam Id: PF08242 Pfam Desc: Methyltransferase domain
  misc_feature (11)..(212): NCBI GI: 170940319 Blast Desc: protein product [Podospora anserina]
  misc_feature (3)..(159): NCBI GI: 145236407 Blast Desc: An06g00230 [Aspergillus niger] gi|134075305|emb|CAK44939.1| protein product [Aspergillus niger]
  misc_feature (11)..(159): NCBI GI: 121712234 Blast Desc: conserved [Aspergillus clavatus NRRL 1] gi|119401884|gb|EAW12306.1| conserved [Aspergillus clavatus NRRL 1]
  misc_feature (11)..(159): NCBI GI: 119489946 Blast Desc: NFIA_061940 [Neosartorya fischeri NRRL 181] gi|119411090|gb|EAW21033.1| conserved [Neosartorya fischeri NRRL 181]
  misc_feature (11)..(171): NCBI GI: 115384358 Blast Desc: [Aspergillus terreus NIH2624] gi|114196418|gb|EAU38118.1| [Aspergillus terreus NIH2624]
  misc_feature (20)..(159): NCBI GI: 70998775 Blast Desc: conserved [Aspergillus fumigatus Af293] gi|66851746|gb|EAL92071.1| conserved [Aspergillus fumigatus Af293] gi|159127128|gb|EDP52243.1| conserved [Aspergillus A1163]
  misc_feature (21)..(289): NCBI GI: 157382473 Blast Desc: methyltransferase [Hypocrea virens]
  misc_feature (24)..(231): NCBI GI: 121712493 Blast Desc: conserved [Aspergillus clavatus NRRL 1] gi|119402010|gb|EAW12432.1| conserved [Aspergillus clavatus NRRL 1]
  misc_feature (24)..(209): NCBI GI: 154301246 Blast Desc: [Botryotinia fuckeliana B05.10] gi|150856194|gb|EDN31386.1| [Botryotinia fuckeliana B05.10]
  misc_feature (24)..(159): NCBI GI: 238839097 Blast Desc: conserved [Microsporum canis CBS 113480]
MTVNGKTESIYVLNDGSSDAEHERLNLQHRLFDDIMQNKLLPPHIHSSITETTTGPKVLDLATGTGVWLISVAKTLPPDSELLGLDFDTSKFPPAASLPPNITLRKGNIFEPFPEDLLGKFDIVNLRLILLALKVGDGTALMKNVMSLLKPGGFVVWSETGPTVQAVEPPSFAFFKFQDIHWRYAKQFGGDLNLPLGMVAYIKEAGYIDFGDTAYPGGSQLYTRKDWLERSHRQILTFIPQTLRGIVSLGGVEGMETKEQVDELVAELRKDFVGDRKVHPLFIRAWGKKPESLMNNGTGI

SEQ ID NO: 2406 - DNA, 1446 bp, Muscodor strobelii
  misc_feature: SGI cDNA ID NO. 560432
  misc_feature: Encodes the peptide sequence at SEQ ID NO 2407
atgagcggcgattcgaagactatgcctctgaggcaggggacgacctttagcgatgatgctgtccccgatatcgaccctacaactaccgcaggtctccttaccgaacgcctgcaagcctggaaacacgcatgcgggtatctggaggactacgtgagcgcagtggagaaggtacacaaggcgcatgccaaggagtatgagaaggtcctcaagacgatctcccaccctctgaaggagggcgcccacttcgaccagggcctaggcggtgttgctggcttcttcgaaaacatgcgacaaaacacacaggcaatggtcaattccaacacggagaccgagaagacacttaagggtactgtcttgcccattcttgagcggctacacaaagagataaaagccaagcacaaggaggtctacactggtgtagagaaaagcgccaaggaaattgagaagagtagaaacaccacacagaagcatatcgaactcttaggacaacattcagcatcatttgaatcaactggtgggaagttgaatccttcagatgatccgtacgttatcaagcgcggggtgttccaccgcttgaacaagcaagtcattgcagagaataatcacaggaatgatctcatccacgtccaagacggattccaggccttcgaggctcacgtaattgaggtcttccagcaggccatagaagccttcaatggagtggcaggtggtcaggccgaaaagactcgggcgctgtatgcggatatgctcggggcagtacagcgtattactggcgattttgagtggaaggggttcaacgcccgcgagggtcatcggttggttaataagaatgatccccctaggagcctcgaagccatcaatttcccgaatcaagatcattcttcgaccaaggcgctgatcgagggcagcctcgagcgcaagtcgcggaacaagctcgcgtggggtacacagtctggctactacgtagtcaccccctctaagtacctccacgagttcaaggacgacgacaacttgcaccatgatcctaagccggaaatgtctatctacttgcctgaagccgtcatcggtacaccagctggggagaaattcaacgtcaagggcaaggacaagaacaagagcttcagtagcaagctcgccggatcatctgagatctcattcaaagctcattctgcagcggaggcacagaagtggtttgaagcccttcaagtcgcagctggctctacaggcgcaacaggtcctgcttacgaaagcacgcccaactctcctgtagtgggcggccctgagtctgcagacggatcattctcaaatgccccgaaagtagacaccggacacaaagaacaggaggctggcatcactggacaagacacggtagccagccctacggttgtatcaccaaccacgccgggagctactgcccctggcgaggaaaagaagcttgcagcttag

SEQ ID NO: 2407 - protein, 481 aa, Muscodor strobelii
  misc_feature: SGI Peptide ID NO. 560432
  misc_feature (298)..(406): Pfam Id: PF00169 Pfam Desc: PH domain
  misc_feature (11)..(473): NCBI GI: 145610621 Blast Desc: MGG_01047 [Magnaporthe grisea 70-15] gi|145017999|gb|EDK02278.1| MGG_01047 [Magnaporthe grisea 70-15]
  misc_feature (5)..(459): NCBI GI: 256733970 Blast Desc: [Nectria haematococca mpVI 77-13-4]
  misc_feature (8)..(453): NCBI GI: 46128143 Blast Desc: FG08449.1 [Gibberella zeae PH-1]
  misc_feature (1)..(451): NCBI GI: 261359448 Blast Desc: PH domain-containing protein [Verticillium albo-atrum VaMs.102]
  misc_feature (5)..(465): NCBI GI: 171682436 Blast Desc: protein product [Podospora anserina] gi|170941177|emb|CAP66827.1| protein product [Podospora anserina]
  misc_feature (8)..(423): NCBI GI: 154292960 Blast Desc: BC1G_14378 [Botryotinia fuckeliana B05.10] gi|150845719|gb|EDN20912.1| BC1G_14378 [Botryotinia fuckeliana B05.10]
  misc_feature (8)..(422): NCBI GI: 156034394 Blast Desc: SS1G_13500 [Sclerotinia sclerotiorum 1980] gi|154698903|gb|EDN98641.1| SS1G_13500 [Sclerotinia sclerotiorum 1980]
  misc_feature (1)..(409): NCBI GI: 85085592 Blast Desc: NCU03886 [Neurospora crassa OR74A] gi|28918618|gb|EAA28289.1| NCU03886 [Neurospora crassa OR74A]
  misc_feature (9)..(470): NCBI GI: 70991667 Blast Desc: PH domain protein [Aspergillus fumigatus Af293] gi|66848315|gb|EAL88644.1| PH domain protein [Aspergillus fumigatus Af293]
  misc_feature (9)..(470): NCBI GI: 159124245 Blast Desc: PH domain protein [Aspergillus fumigatus A1163]
MSGDSKTMPLRQGTTFSDDAVPDIDPTTTAGLLTERLQAWKHACGYLEDYVSAVEKVHKAHAKEYEKVLKTISHPLKEGAHFDQGLGGVAGFFENMRQNTQAMVNSNTETEKTLKGTVLPILERLHKEIKAKHKEVYTGVEKSAKEIEKSRNTTQKHIELLGQHSASFESTGGKLNPSDDPYVIKRGVFHRLNKQVIAENNHRNDLIHVQDGFQAFEAHVIEVFQQAIEAFNGVAGGQAEKTRALYADMLGAVQRITGDFEWKGFNAREGHRLVNKNDPPRSLEAINFPNQDHSSTKALIEGSLERKSRNKLAWGTQSGYYVVTPSKYLHEFKDDDNLHHDPKPEMSIYLPEAVIGTPAGEKFNVKGKDKNKSFSSKLAGSSEISFKAHSAAEAQKWFEALQVAAGSTGATGPAYESTPNSPVVGGPESADGSFSNAPKVDTGHKEQEAGITGQDTVASPTVVSPTTPGATAPGEEKKLAA

SEQ ID NO: 2408 - DNA, 2520 bp, Muscodor strobelii
  misc_feature: SGI EST ID NO. CUFF.6433.1
  misc_feature: Variant of the nucleotide sequence at SEQ ID NO 2406
tgcgggtataccaccactctttcagctatcattcctctagctattgttcactgcattttgcggtcaagtgatcaggtttcctgcttctcgctgaaagacgggatcgatgacctcagcaccttgaagcatcgcgttggcttcgtgaacccctctcatatccatatttaggcgcttgtatgtataaaacatgtgcgatctgtttcatctgatttgaatgatcgaccgtcgcatctccaccctgttccagcctaaccagtttgcctagacatcccacctattgcgactttggactccagtatcacggttctcaaaggagcctatgagataacaaattccacgcttgataattacatagttctttgactgacccattctacccccgcgtccacctcaatcagcgagtttgagtgttcgataaatacgaaaactcttagatatagtcctcggtgtcgccgctagctttccggcataccaccctctctcgtctcacgcaatcgctctgcgccgatcgagcatcgagcactacgacattcgaactacctacctaaccatctacctacattttactatatccctacagtacccacggatcagagacttgtaacgaaccggattcagaatgagcggcgattcgaagactatgcctctgaggcaggggacgacctttagcgatgatgctgtccccgatatcgaccctacaactgtgagtcgcatcgcgtctatctcgcgttacgccgactaagtaattgtataacagaccgcaggtctccttaccgaacgcctgcaagcctggaaacacgcatgcgggtatctggaggactacgtgagcgcagtggagaaggtacacaaggcgcatgccaaggagtatgagaaggtcctcaagacgatctcccaccctctgaaggagggcgcccacttcgaccagggcctaggcggtgttgctggcttcttcgaaaacatgcgacaaaacacacaggcaatggtcaattccaacacggagaccgagaagacacttaagggtactgtcttgcccattcttgagcggctacacaaagagataaaagccaagcacaaggaggtctacactggtgtagagaaaagcgccaaggaaattgagaagagtagaaacaccacacagaagcatatcgaactcttaggacaacattcagcatcatttgaatcaactggtgggaagttgaatccttcagatgatccgtacgttatcaagcgcggggtgttccaccgcttgaacaagcaagtcattgcagagaataatcacaggaatgatctcatccacgtccaagacggattccaggccttcgaggctcacgtaattgaggtcttccagcaggccatagaagccttcaatggagtggcaggtggtcaggccgaaaagactcgggcgctgtatgcggatatgctcggggcagtacagcgtattactggcgattttgagtggaaggggttcaacgcccgcgagggtcatcggttggttaataagaatgatccccctaggagcctcgaagccatcaatttcccgaatcaagatcattcttcgaccaaggcgctgatcgagggcagcctcgagcgcaagtcgcggaacaagctcgcgtggggtacacagtctggctactacgtagtcaccccctctaagtacctccacgagttcaaggacgacgacaacttgcaccatgatcctaagccggaaatgtctatctacttgcctgaagccgtcatcggtacaccagctggggagaaattcaacgtcaagggcaaggacaagaacaagagcttcagtagcaagctcgccggatcatctgagatctcattcaaagctcattctgcagcggaggcacagaagtggtttgaagcccttcaagtcgcagctggctctacaggcgcaacaggtcctgcttacgaaagcacgcccaactctcctgtagtgggcggccctgagtctgcagacggatcattctcaaatgccccgaaagtagacaccggacacaaagaacaggaggctggcatcactggacaagacacggtagccagccctacggttgtatcaccaaccacgccgggagctactgcccctggcgaggaaaagaagcttgcagcttagaaacgcagcggatcaatcgcttcgtcttcacggccggggccggggtagtctaggaagtgttagggtcagaagatgggtccagggacgcgatgaacaacgtcgcaaccttagcccttgagttgtgtctgaggaggaataggagtcctactaaggaatcaataaacaaaacgcatgatgagacaaaggcgatggagtttgagtggtaaacatggatcgtttcccgtttctctcctaagtattcaaataacgaataatgaacatatttctaatattgcccgaattgcgttttcaatgtcctctcgtttattatgactcttttgatgatagtggcgatgtagtaaggtagtatgtgggacagtttgatcggcccgtcgaatgaggaatgagacattgggttgcag

SEQ ID NO: 2409 - DNA, 1854 bp, Muscodor strobelii
  misc_feature: SGI cDNA ID NO. 560433
  misc_feature: Encodes the peptide sequence at SEQ ID NO 2410
atgccatcatttaatcctttctcatcggctaccaacaggcatgcctactctctattcgagatacgtctcgagaatgatttcgtcgtcttcagaggcaatgacgatgaggcttctgggcagattctcaagggtgtactcgttctatgcctgggagaatcaatgaaagttgatgatgttcatttacgacttacgggccagtgccgaataacctggctcgatggaaggcaaacgccctctggaatccataattcgaaaattgacaagacaacgtcagtaatgagacacacttggcccccttttgtcggtcaagattcccaccgcgatactttggcacctgggaactacgaatggcctttcgaaatagaattaccaggcaacacaccagagagtgtcgagggtctttttcaaacaggcattacctatctcctcaaggcaaccgttgcccgaggcaatctgaaaaagaatctccactgccacaaacgagtccgaatcgtccgaacgttggatcctgctgctttagagttcaaccatgctatgagtgtcgaaaatgtctggcccgacaaaattgaatattcactcgtcataccccgcaaagctatcgtctttggaaccagcgttcctcttgagatgcgattcacacccttgttgaaaggtcttgaaatggggagcgttactgttcggttattagagagccaggaattcacagttcagggtcccacgaggacacacaagtacgatcgtgaagtaacgacgtggaactttgaggtgacacgtgagaagcattggctggacaacatcgaagagacaggacaggagggttggcttgttaaacgagaccttcctctgccgaagaagctgaatcggctcattcaggactgtaccgttctaggcatcaaaatcagacataaactgaagctgaccatagcccttaacaaccctgatggccatgtatctgagcttagggcaacactacccgtaactatctttatatcaccaaatgtaccgcttgatgaagagggcaatattgtgcagcaaacgcctggtgaatcaagcgccgctaccagcgaggagacgaatctagcgccgccaggttatggtcagcatatcctcgatcagctttatgatggtgttgacaccagtggaatcatgactccaggaattcaaagtggcgtcagcacccctttttacacccaatcacgacatgggtcgtcggaaaatctagcagcaatcttgcacggctccgtcccgcctgctgcactcacatcgcgactgcaaaacatgtcgcttgatgatcttcgcaggcgcgggcaacaaacgccgtatgatgccggctcaggaagcatatcaccacctttagcgcatgatagcgaacatgctggagattcatcgcatcctcaatcgagcgacccgtctcgccgtcctagtgaggagggtatcgagcaccatcaccaccaccacgagcattcgggtcatgatacgccacctgaacataccgaattccccagcatggagcagctcgccaaagtaccgagctacaacaccgcgacgaggacaccgttgccgagaacccctagcttcttgggaaccctcggcttaccggattatatgacggcgacgagcgcgccgtccacaccggcgttcacagccatcaaccccatggacacgattacagagagaactacgacagaagctcaggatggaaacaacaacaggtcgagaagcccttcctcggcaggtcacagtagaaccggctctagggttcatgcacccagtcatgcgcacgttgggagtactgacggcgagaggcttttcagactgcttcaacgtagaggcgttgaatcgaatcattactga

SEQ ID NO: 2410 - protein, 617 aa, Muscodor strobelii
  misc_feature: SGI Peptide ID NO. 560433
  misc_feature (185)..(333): Pfam Id: PF02752 Pfam Desc: Arrestin (or S-antigen), C-terminal domain
  misc_feature (19)..(171): Pfam Id: PF00339 Pfam Desc: Arrestin (or S-antigen), N-terminal domain
  misc_feature (1)..(583): NCBI GI: 46128141 Blast Desc: FG08448.1 [Gibberella zeae PH-1]
  misc_feature (1)..(563): NCBI GI: 256733971 Blast Desc: NECHADRAFT_77628 [Nectria haematococca mpVI 77-13-4]
  misc_feature (1)..(577): NCBI GI: 39973617 Blast Desc: MGG_01045 [Magnaporthe grisea 70-15] gi|145018001|gb|EDK02280.1| MGG_01045 [Magnaporthe grisea 70-15]
  misc_feature (5)..(541): NCBI GI: 85085596 Blast Desc: NCU03887 [Neurospora crassa OR74A] gi|28918619|gb|EAA28290.1| conserved [Neurospora crassa OR74A]
  misc_feature (1)..(610): NCBI GI: 154311867 Blast Desc: BC1G_05967 [Botryotinia fuckeliana B05.10] gi|150850617|gb|EDN25810.1| BC1G_05967 [Botryotinia fuckeliana B05.10]
  misc_feature (1)..(549): NCBI GI: 156060513 Blast Desc: SS1G_02395 [Sclerotinia sclerotiorum 1980] gi|154699803|gb|EDN99541.1| SS1G_02395 [Sclerotinia sclerotiorum 1980]
  misc_feature (23)..(545): NCBI GI: 171682438 Blast Desc: protein product [Podospora anserina] gi|170941178|emb|CAP66828.1| protein product [Podospora anserina]
  misc_feature (19)..(540): NCBI GI: 119469039 Blast Desc: carbon catabolite repression protein CreD, [Neosartorya fischeri NRRL 181] gi|119406063|gb|EAW16014.1| carbon catabolite repression protein CreD, [Neosartorya fischeri
  misc_feature (19)..(547): NCBI GI: 212529202 Blast Desc: carbon catabolite repression protein CreD, [Penicillium marneffei ATCC 18224] gi|210074156|gb|EEA28243.1| carbon catabolite repression protein CreD, [Penicillium marneffei
  misc_feature (19)..(518): NCBI GI: 242764130 Blast Desc: carbon catabolite repression protein CreD, [Talaromyces stipitatus ATCC 10500] gi|218723910|gb|EED23327.1| carbon catabolite repression protein CreD, [Talaromyces ATCC
MPSFNPFSSATNRHAYSLFEIRLENDFVVFRGNDDEASGQILKGVLVLCLGESMKVDDVHLRLTGQCRITWLDGRQTPSGIHNSKIDKTTSVMRHTWPPFVGQDSHRDTLAPGNYEWPFEIELPGNTPESVEGLFQTGITYLLKATVARGNLKKNLHCHKRVRIVRTLDPAALEFNHAMSVENVWPDKIEYSLVIPRKAIVFGTSVPLEMRFTPLLKGLEMGSVTVRLLESQEFTVQGPTRTHKYDREVTTWNFEVTREKHWLDNIEETGQEGWLVKRDLPLPKKLNRLIQDCTVLGIKIRHKLKLTIALNNPDGHVSELRATLPVTIFISPNVPLDEEGNIVQQTPGESSAATSEETNLAPPGYGQHILDQLYDGVDTSGIMTPGIQSGVSTPFYTQSRHGSSENLAAILHGSVPPAALTSRLQNMSLDDLRRRGQQTPYDAGSGSISPPLAHDSEHAGDSSHPQSSDPSRRPSEEGIEHHHHHHEHSGHDTPPEHTEFPSMEQLAKVPSYNTATRTPLPRTPSFLGTLGLPDYMTATSAPSTPAFTAINPMDTITERTTTEAQDGNNNRSRSPSSAGHSRTGSRVHAPSHAHVGSTDGERLFRLLQRRGVESNHY

SEQ ID NO: 2411 - DNA, 5706 bp, Muscodor strobelii
  misc_feature: SGI EST ID NO. CUFF.6218.1
  misc_feature: Variant of the nucleotide sequence at SEQ ID NO 2409
gtcagagtttggtatagagagattttaggtatgcaatatttgtccgtgacgttgcatgggaatatgcaggcgcgaaatgtgatgagagaatatctagatctatcaatatagtgtccggcatatcatatcacacatgcccttgcaggataccgaagaatgactaagctatagacggatgcggctcttttcggggaaataggtgtggcatcgagactccttgatgtgacttggcagcatcaatgaagtagttccttatgcgagtttcttgcgcgctgaaagcgtagatcaagtctgacatagactaaagagaaatgtttcgtgtcaacgacgaccatatacaccttcataaaacggcatttgttgggactatcacggcatggatcgcaagagcggccggcgaccagcctagcgcgacccgccaaatctgcagaggcgcgggacctactcgatggctcttctgtgatcagcacgctttcttgaggacaaggatgtttcattaggcatgtgaagaaacagcgcgatagggcagaattggtattttgcgcggcattgaagttcaaaccatgccaagtttcacaatgtgaagtaagtcatgtggttatgacccccacgcagcatggacctttataacctcatgcaagggacgtatactcatatgctcaagtgccagtcagtcatcgctgtcgggcaacgtcttgaaatctgtgatgctaaccttggcgatttcccccgtataactgaggcctgcttcattttggttgataagaaacgatcttggttcgggaaatatcgcaacaaagtgaatgattatatccgtcttctctctagcttggttgaatttttcaccgctttgagatttgaggtttttattcggaccctttcccagcagtgttcttcaaaattgggctgcttggcagcagagagtggacccttgtggcgcctctaaagtatattttagtacaggcaaacagagcctcttaaaggcaaggttctagggttggcattgttgagaccaaatttgggagcatgagaagacatgcgtgcgaatgcaatgctatgaaacagacaacacagataacgacagtgaagaatggagctaagtacaccgcgaacgccgtagagatagcgaatctggtactcatcgtgattgtaaagggttacttcgatacctgtctcaactgttttgaatttgaggcggctggccttcgctgggaatattcccgctatctgccattaatgattgagtgggacaagactaatgggctggacgcacgcattcctgggttatgctagactgcaaaggtcccttccgggcaataggggcccacgtaagtggaattgagctattttgactgatgtattaaacactctcggtgtcttaccctctgctctaattccgctagatagctttagcggcaattagataaatgttgtgactattttcaggggacttggtcaagtgttatgacgacaatgatattggaccactctaggaagagctgccgatgtcggactaccgcacgccactcacgtcgattcatgtatgctgcttgaaaatagcctggtgattatcgagttatatgtgaaggttttgcacctgtggtacggatatcaaatttgctaggaagtgcaaatatttctaatgggcgaactattcgctttgtaggtgaggtcgttggagttcattggtgcggtaggcatgacgaacctaagcttttgataagccaccgccgtccgcgttagagcgcggagccactcgggcggaaccaatgcataagtgcgtcagatcctgggcgtttccatggcgtgttgtcagccgatcctgttgtacatctgagcaacgtccgtcgtaagattgttggtttattcggacggccgataaaaacaatgccgtgctcattgggcccgggatcctatcatcaagaccctcggacgatagccgaagcaaggagacactactccgtttgaactctgcgcgcttcttctccattacaattgtgcttgcgaggacaatgcatagtggcgttgtgtcagacgttacaaaacccattgcactctgctcctggcgctgacgaggccagtgctagcgaatatgtagaactcagatcagtagcacaggactcgttcgattggtctctgatggctgctaaaatcttcgatggtgttgacaagtagagaactaggtagcctcaattactgcgggagtcttaacgctggaagcgcatcttttcccgcaggtcctcctaccgaacagaatctacaactttcaggcagtgtcgaacttaatcaaggctgtggtgtatgatacatcagggcggccaatagtcgcgccagcattcctgccctggcgtgactcggggcgagcgcgacctgtctaaaaactgttcctttggcccacaatcgtactgtagacctgtgacagtcccacaccttatctttctctacaatatccaataacatgagtgatttggacgaatgcagactcttcgcagaaagggttgtgaggggcaaatccatcccacgttctctacaagtcaactttcgtcaatccttgtcggcgatctacctgcaagtgtttttcacaggttgataattgagtgagccatttcagctcccacagacacagcgtgtcgaaggcatagagcggagctttccaggttctcccaacccatgcccgcgtgtcgtgtacaaaacaattgcgttatcccgttcaccacttgtccgtcccgccctgtgatttggtaaggttcctcccaaccaatgacctaaataattagcaccactaaatctctgacgaaatggcacatactcggggtcccgtataatgctcctccttgcagtatgattgccggctatcaccgccactagaagcaattcgtaaggtttgtcgacgcgaacgggcgggaagccgttggtgccactgggaattccacaatctcggcgagaccctgaccaaggcgacgccgtcgaattgaacgctgttatatgtacccatcgcctcagctttacggttagatagtctgcacatagcccccccatcgtacatcatcgtaacgaactgtcttcattcctcttctccctcgtcgcccctgaattacggcgcatagccaagacgctcctccaacgcgacacagtcatccatccttccacttccattagttcctaaatagaactgagctggccttacctagtacaagttgtcttgaacctgccgtcatacgggattcacttgcattttgtcttctgcccatctttggtcgcacttgttgtctttttgcaattcggaaaggcaacgcgttttgagatgggaaattagtttttgcccacggcatttccatcaagtttccaattgatttgtagctcttgtcggacgttagttcgtcactcacgaccagcgctcatcaacattactcaaatcaagttgtaatagagcttaaagggcgagttatatgtcactgaatgactcgccaacaataatctaacagactcgtaaaaatttggggtacctcatcacctagcaattcgatgagaatatttcagcctctcaattgctgtcaccgaaacaactagtctctgtcgcttgccgagacgatgccatcatttaatcctttctcatcggctaccaacaggcatgcctactctctattcgagatacgtctcgagaatgatttcgtcgtcttcagaggcaatgacgatgaggcttctgggcagattctcaagggtgtactcgttctatgcctgggagaatcaatgaaagttgatgatgttcatttacgacttacgggccagtgccgaataacctggctcgatggaaggcaaacgccctctggaatccataattcgaaaattgacaagacaacgtcagtaatgagacacacttggcccccttttgtcggtcaagattcccaccgcgatactttggcacctgggaactacgaatggcctttcgaaatagaattaccaggcaacacaccagagagtgtcgagggtctttttcaaacaggcattacctatctcctcaaggcaaccgttgcccgaggcaatctgaaaaagaatctccactgccacaaacgagtccgaatcgtccgaacgttggatcctgctgctttagagttcaaccatgctatgagtgtcgaaaatgtctggcccgacaaaattgaatattcactcgtcataccccgcaaagctatcgtctttggaaccagcgttcctcttgagatgcgattcacacccttgttgaaaggtcttgaaatggggagcgttactgttcggttattagagagccaggaattcacagttcagggtcccacgaggacacacaagtacgatcgtgaagtaacgacgtggaactttgaggtgacacgtgagaagcattggctggacaacatcgaagagacaggacaggagggttggcttgttaaacgagaccttcctctgccgaagaagctgaatcggctcattcaggactgtaccgttctaggcatcaaaatcagacataaactgaagctgaccatagcccttaacaaccctgatggccatgtatctgagcttagggcaacactacccgtaactatctttatatcaccaaatgtaccgcttgatgaagagggcaatattgtgcagcaaacgcctggtgaatcaagcgccgctaccagcgaggagacgaatctagcgccgccaggttatggtcagcatatcctcgatcagctttatgatggtgttgacaccagtggaatcatgactccaggaattcaaagtggcgtcagcacccctttttacacccaatcacgacatgggtcgtcggaaaatctagcagcaatcttgcacggctccgtcccgcctgctgcactcacatcgcgactgcaaaacatgtcgcttgatgatcttcgcaggcgcgggcaacaaacgccgtatgatgccggctcaggaagcatatcaccacctttagcgcatgatagcgaacatgctggagattcatcgcatcctcaatcgagcgacccgtctcgccgtcctagtgaggagggtatcgagcaccatcaccaccaccacgagcattcgggtcatgatacgccacctgaacataccgaattccccagcatggagcagctcgccaaagtaccgagctacaacaccgcgacgaggacaccgttgccgagaacccctagcttcttgggaaccctcggcttaccggattatatgacggcgacgagcgcgccgtccacaccggcgttcacagccatcaaccccatggacacgattacagagagaactacgacagaagctcaggatggaaacaacaacaggtcgagaagcccttcctcggcaggtcacagtagaaccggctctagggttcatgcacccagtcatgcgcacgttgggagtactgacggcgagaggcttttcagactgcttcaacgtagaggcgttgaatcgaatcattactgagattataatacttcaactaatgttccggcgttaaaaatccgacggtctcctttctttgacacttcgggggggcttattcccaaagcattactattgtcgaaatatccgaggcatagcatgaagatgaaaggcacgcatgaatagagacatggataacacaggcgggatagactagaggcgctttgattccagtacgacgagacgttagtgataccaggcagacttacctaatacaattggaattattattatcaggcaagg

SEQ ID NO: 2412 - DNA, 1827 bp, Muscodor strobelii
  misc_feature: SGI cDNA ID NO. 560434
  misc_feature: Encodes the peptide sequence at SEQ ID NO 2413
atgtttgttctcccgcctccgccgagatatcccacacaggcagcatacaatgctgccgtcgccgccggccatgccaccccgatgatcgagaccaacaacatcctctccagtcccgacgatcacttcttggtcggcgagggccaatacctgctcaaagaggaccttctcctggccacgccgccccctcatccctccgaagctcccatcgtaaaccccaatcctctagccacgaccccgcagcctgccaccgccggcaccaaggtctccctcctgagcatcgaaggccgtccgccgcctccagctttctataagctagcagccgccgcgaccctgacgaccaatagcatcgccgaacatccaaacgagggacgattctccaacgatgccaagtttagtagcgatggcgacaagacgtcgatgagcgatgttggcggtccgggctcggtaacggcttcctcaacgccagcctttggcggtgggaatgcgcttctagcaccagagaagttcaaggaccccaataaacgaaagaagcccaagaacaacatgagcaagagcaattcttccttcatctcccggatcatcatcaacgagagcttatcgaagaaattgggtgatcgcccgagcgacggtatattcgcctttgcaaacgttaatcgcgctttccaatggctggatctgtcgtcgtcctccaagtctgattacctggctaagatcctcttcaccaaagcccattgcctatgtcacgatgtaaatcatatcacgaagagctccaaccatgtcgacatgatcatgggcttctcgaccggagagatcatctggtgggagcctatatcccagcgttatactagaatcaacaaaaacggcatcataaataaaactccagtctcccagatacggtggattcccggcgcggaaaacctattcttagccgcacacatggacggcacactaattgtatatgacaaagaaaaggaggacgttgcttttgtcccggaagagcctgaggtggcacaaaacggcgagagcgcaccttcggtctcgcccgaccgttccgaagaaatctctgttcagaaatcatatcactcaaagaaccaaaagaacaatcccgtcgccgtatggaagctgtccaatcaacggatcaacgctttccagttctcccccgataaccgccaccttgcggttgtatcagaagatggaacaatgcggataattgactaccttaaagaagaattactcagcatatataatgcatactatggtggattcacctgtgtctgctggtctcccgatggtcgatacgtcttgacgggatcgcaagatgacttaatttccatttggtctccgcaagagaatgcgctcatagcacgatgtcaaggtcatcaatcgtgggtcacatccgtcgctttcgacccatggagatgcgatatgaagaattaccggtttggtagtgtgggtgaggactgtcgcttgtgtctctgggatttcaacgttggcatgttgaataagccgaaaggcgcttcacagcgtcatcgaggctcggtctcttctcacctgcatcgtgccgagactcaaggcacctcatcgggcagggcacgcgctgactcgaccttatcaaatgcagatggtgatgatgagaagtcatcaatcaactacccggtggaaccacggtcgaatgtggcgatattgccccccgttttgaccaaggtcgcggataaggatccgttgagctggatcgctttcactgaggatgctatcatgactagttgcaaaacaggtcatattcgaacttggacgaggccttcagatgcgcctgctcaggctgcttga

SEQ ID NO: 2413 - protein, 608 aa, Muscodor strobelii
  misc_feature: SGI Peptide ID NO. 560434
  misc_feature (409)..(447): Pfam Id: PF00400 Pfam Desc: WD domain, G-beta repeat
  misc_feature (451)..(494): Pfam Id: PF00400 Pfam Desc: WD domain, G-beta repeat
  misc_feature (367)..(405): Pfam Id: PF00400 Pfam Desc: WD domain, G-beta repeat
  misc_feature (1)..(600): NCBI GI: 256733972 Blast Desc: NECHADRAFT_58956 [Nectria haematococca mpVI 77-13-4]
  misc_feature (3)..(602): NCBI GI: 40882320 Blast Desc: WD40 repeat protein CreC [Neurospora crassa]
  misc_feature (3)..(566): NCBI GI: 85085928 Blast Desc: catabolite repression protein creC [Neurospora crassa OR74A] gi|28918697|gb|EAA28368.1| catabolite repression protein creC [Neurospora crassa OR74A]
  misc_feature (14)..(602): NCBI GI: 171682440 Blast Desc: protein product [Podospora anserina] gi|170941179|emb|CAP66829.1| protein product [Podospora anserina]
  misc_feature (1)..(603): NCBI GI: 212529212 Blast Desc: catabolite repressor protein (CreC), [Penicillium marneffei ATCC 18224] gi|210074161|gb|EEA28248.1| catabolite repressor protein (CreC), [Penicillium marneffei ATCC 18224]
  misc_feature (1)..(605): NCBI GI: 189201631 Blast Desc: catabolite repression protein creC [Pyrenophora tritici-repentis Pt-1C-BFP] gi|187984251|gb|EDU49739.1| catabolite repression protein creC [Pyrenophora tritici-repentis
  misc_feature (9)..(603): NCBI GI: 226284522 Blast Desc: mitochondrial Rho GTPase [Paracoccidioides brasiliensis Pb01]
  misc_feature (1)..(602): NCBI GI: 238054265 Blast Desc: CREC_EMENI RecName: Full=Catabolite repression protein creC gi|259481237|tpe|CBF74571.1| TPA: Catabolite repression protein creC [Source:UniProtKB/Swiss-Prot;Acc:Q9P4R5] nidulans
  misc_feature (9)..(602): NCBI GI: 7528186 Blast Desc: CreC [Emericella nidulans]
  misc_feature (9)..(603): NCBI GI: 119469029 Blast Desc: catabolite repressor protein (CreC), [Neosartorya fischeri NRRL 181] gi|119406058|gb|EAW16009.1| catabolite repressor protein (CreC), [Neosartorya fischeri NRRL 181]
MFVLPPPPRYPTQAAYNAAVAAGHATPMIETNNILSSPDDHFLVGEGQYLLKEDLLLATPPPHPSEAPIVNPNPLATTPQPATAGTKVSLLSIEGRPPPPAFYKLAAAATLTTNSIAEHPNEGRFSNDAKFSSDGDKTSMSDVGGPGSVTASSTPAFGGGNALLAPEKFKDPNKRKKPKNNMSKSNSSFISRIIINESLSKKLGDRPSDGIFAFANVNRAFQWLDLSSSSKSDYLAKILFTKAHCLCHDVNHITKSSNHVDMIMGFSTGEIIWWEPISQRYTRINKNGIINKTPVSQIRWIPGAENLFLAAHMDGTLIVYDKEKEDVAFVPEEPEVAQNGESAPSVSPDRSEEISVQKSYHSKNQKNNPVAVWKLSNQRINAFQFSPDNRHLAVVSEDGTMRIIDYLKEELLSIYNAYYGGFTCVCWSPDGRYVLTGSQDDLISIWSPQENALIARCQGHQSWVTSVAFDPWRCDMKNYRFGSVGEDCRLCLWDFNVGMLNKPKGASQRHRGSVSSHLHRAETQGTSSGRARADSTLSNADGDDEKSSINYPVEPRSNVAILPPVLTKVADKDPLSWIAFTEDAIMTSCKTGHIRTWTRPSDAPAQAA

SEQ ID NO: 2414 - DNA, 3232 bp, Muscodor strobelii
  misc_feature: SGI EST ID NO. CUFF.6165.1
  misc_feature: Variant of the nucleotide sequence at SEQ ID NO 2412
cgaccgagctaacgacatgctgcccacgttgcgctgctgctagatggaccccatgagacgaccccttccttccctccatccatgtgtctccaatgcggatgccgtagtcgtgatttcctgagagctactcatgtttttcgtccaatgcactttcttgcgtatgtgctcgtcaattggccatctcagctctccttaattgccatctgagcacgaccacgtatgagttgtacactttcaatgagcttggtggcttccagcatgacgtcggcgcgcactcaacaccactgactacctatatcttctgttgcgcattgtgtatagctgttgaaacatcgttattgtattacattttgcaacgccctaggtatataataagccactagtgactgcgccgagcaagatatcttgctggcgataccgagatatcgacttggcgccacttcttagacaccctcccccctcgactccgacaggccatcatgtttgttctcccgcctccgccgagatatcccacacaggcagcatacaatgctgccgtcgccgccggccatgccaccccgatgatcgagaccaacaacatcctctccagtcccgacgatcacttcttggtcggcgagggccaatacctgctcaaagaggaccttctcctggccacgccgccccctcatccctccgaagctcccatcgtaaaccccaatcctctagccacgaccccgcagcctgccaccgccggcaccaaggtctccctcctgagcatcgaaggccgtccgccgcctccagctttctataagctagcagccgccgcgaccctgacgaccaatagcatcgccgaacatccaaacgagggacgattctccaacgatgccaagtttagtagcgatggcgacaagacgtcgatgagcgatgttggcggtccgggctcggtaacggcttcctcaacgccagcctttggcggtgggaatgcgcttctagcaccagagaagttcaaggaccccaataaacgaaagaagcccaagaacaacatgagcaagagcaattcttccttcatctcccggatcatcatcaacgagagcttatcgaagaaattgggtgatcgcccgagcgacggtatattcgcctttgcaaacgttaatcgcgctttccaatggctggatctgtcgtcgtcctccaagtctgattacctggctaagatcctcttcaccaaagcccattgcctatgtcacgatgtaaatcatatcacgaagagctccaaccatgtcgacatgatcatgggcttctcgaccggagagatcatctggtgggagcctatatcccagcgttatactagaatcaacaaaaacggcatcataaataaaactccagtctcccagatacggtggattcccggcgcggaaaacctattcttagccgcacacatggacggcacactaattgtatatgacaaagaaaaggaggacgttgcttttgtcccggaagagcctgaggtggcacaaaacggcgagagcgcaccttcggtctcgcccgaccgttccgaagaaatctctgttcagaaatcatatcactcaaagaaccaaaagaacaatcccgtcgccgtatggaagctgtccaatcaacggatcaacgctttccagttctcccccgataaccgccaccttgcggttgtatcagaagatggaacaatgcggataattgactaccttaaagaagaattactcagcatatataatgcatactatggtggattcacctgtgtctgctggtctcccgatggtcgatacgtcttgacgggatcgcaagatgacttaatttccatttggtctccgcaagagaatgcgctcatagcacgatgtcaaggtcatcaatcgtgggtcacatccgtcgctttcgacccatggagatgcgatatgaagaattaccggtttggtagtgtgggtgaggactgtcgcttgtgtctctgggatttcaacgttggcatgttgaataagccgaaaggcgcttcacagcgtcatcgaggctcggtctcttctcacctgcatcgtgccgagactcaaggcacctcatcgggcagggcacgcgctgactcgaccttatcaaatgcagatggtgatgatgagaagtcatcaatcaactacccggtggaaccacggtcgaatgtggcgatattgccccccgttttgaccaaggtcgcggataaggatccgttgagctggatcgctttcactgaggatgctatcatgactagttgcaaaacaggtcatattcgaacttggacgaggccttcagatgcgcctgctcaggctgcttgattatacatgtcgaataggatcagtgatattgtagagtggcatggcgctacccttggctcttcttcatctctgctggggtcttacacaacaatgtgatacactatgctagatagctcaaagatcaaaagttaattttgagtgatcgtcatttcgtctctaatactaagccgatttgaattgcggttcttgtgtattaccaacatggacgaacgacgtgtgtaggcgagtgccaaccggcattgattctagccggtctgctatgagcagcttgtcgcattgcatgtgtgccacagagcataatcgatattgtagttaaatttttggcactttatactaattttgacggaatatattatgccgtacacatgtatagatatgcatggatctcattctcatatgtgtcttaatacatcttagaggctcctcgcacatccatattttatagggaaacccaatggggaggtgtcgcatgcattagtctgatgaatgtggaaatacctatgacgtatgagcgagagtgtaaattggcgagaaggctgaatctggttgccaagatgcggatgaaatgatagggggcaccgccttaaaagtgaattgtaaaatgctattcagagatatgcacgtgattgagcgcctctaattatagaattgtattatttgtgtaatggagtcgaacgcaccgccttaaaatcgaatagcacaatggcatttggagatgtgcatgtgactgcaagactaggtactcctgctgtagatgctgattccgtatctgcccacttcaagcattccagtacttgatatgactagaagatgctttagcctgatagtgcaattttcacacatacgatgtattacctcctcttcaagtatcagataggggtcttcactgcatgtgtgcgtagatacgtacttgaacctctcgtttg

SEQ ID NO: 2415 - DNA, 1881 bp, Muscodor strobelii
  misc_feature: SGI cDNA ID NO. 560435
  misc_feature: Encodes the peptide sequence at SEQ ID NO 2416
atggctacggtgcgcatctgtgtctgtggcgacgagggcacgggcaagtccagtcttattgcctcgctcgttaaggacgtcttcgtgagcaacaagatccagccggtactcccccagatcaccatcccacccagcatcggcaccccggagaacgtcaccaccaccatcgtcgacacctccgcccgcccccaagaccgaacgacgctgcgcaaagagatccgcaagtccaacgtcatcctcctcgtctacgccgaccactacagctacgagcgcgtcgccctcttctggatgccctacttccgctccctcggcgtcaatgtccccgtcgtactgtgcgccaacaagtccgacctcaccgagaaccccacgccccaggtcgtcgaggaggagatgctacctgtcatgagcgagttccgcgagatcgactcctgcatacgtgccagcgcccgcgagcaccagaacgtcaacgagactttctttctgtgccaaaaggccgtaacacaccccatcgcacccctcttcgactacaaagaaggcaacttgaagcctgcttgcatatccgccctaaagcgagtcttctacttgtgcgacaaggaccaagatggttatctgaatgatcaggagatccaagagttccaagccaagtgtttcgacaagccactatcccccgaagacctcgagaacatcaagctatccatctccaaatctgttcatgggtccgataccgagaagggagtcactatgaagggctttctccaactgaacaagatgtatgctgaaaagggccgtcatgagacgatatgggtcatactgcgcaaataccattacaccgacagcttgagtctggaggacaatttcattcatcccaagttcgacgtccccgaatacgcatctgccgagctcagcccagccggatatcgcttctttatggatctattcctcctattcgacaaggacaacgatggtgggttgaacgaccgagagctcgaggcgctgtttgctcctacaccaggcccaccacaatcgtgggttgaggcttcctttccatcttcgacggttcggaacgaagcgggctatatcactttgcagggctggcttgctcaatggagtatgaccacattcctggaacctaaaacgacgctggaatatcttgcttacctgggctttgaatccccaaatcctcgcgactcgctgacttccgctctcaaagtcacccggccgcgtaagcgaaggagacgccctggccgtgtcgagcgaaatgtggtgctttgttatattgtgggcgcggccggtgctggaaagtcctctctgctagattcgtttctcagtcgacccttcgacgggctgtatcatcctacaatcaagccacggagagtggtgaacagcgtggaactccagggcggcaaacagtgctatctcatcctcgaagagcttggcgagctagagcctgccatcttggagaatcagaccaagctggatgcttgcgacctcttgtgctactcttacgactcgtcagacccagactctttctctcatatcgtcgaccttcgaaagaattaccctcatctagatgatttgccatcggtttacattgctctgaaagcggatagagacaagacgactcagcgatctgaattgcaaccggaccaatatacatcaagcctgatgatgggcacgccagttcatgtcagcgtcacctggaacagcattgcagagttatttgttgccctcgccgaggcagccactcatccgagtaccgcatttccgaagagtgaagagccgccgcccgacagaaccagcctttatctggctttgggagcaacgacatgtgccgcagtggctgcgtttatgatatggagaaggtcgactaactccgcctga

SEQ ID NO: 2416 - protein, 626 aa, Muscodor strobelii
  misc_feature: SGI Peptide ID NO. 560435
  misc_feature (342)..(417): Pfam Id: PF08355 Pfam Desc: EF hand associated
  misc_feature (217)..(306): Pfam Id: PF08356 Pfam Desc: EF hand associated
  misc_feature (5)..(117): Pfam Id: PF08477 Pfam Desc: Miro-like protein
  misc_feature (423)..(536): Pfam Id: PF08477 Pfam Desc: Miro-like protein
  misc_feature (5)..(168): Pfam Id: PF00071 Pfam Desc: Ras family
  misc_feature (424)..(536): Pfam Id: PF08477 Pfam Desc: Miro-like protein
  misc_feature (1)..(625): NCBI GI: 46128137 Blast Desc: FG08446.1 [Gibberella zeae PH-1] gi|108935990|sp|Q4I2W2.1|GEM1_GIBZE RecName: Full=Mitochondrial Rho GTPase 1; AltName: Full=GTPase EF-hand protein of 1
  misc_feature (1)..(626): NCBI GI: 261359441 Blast Desc: mitochondrial Rho GTPase [Verticillium albo-atrum VaMs.102]
  misc_feature (1)..(625): NCBI GI: 256734073 Blast Desc: [Nectria haematococca mpVI 77-13-4]
  misc_feature (1)..(625): NCBI GI: 39973619 Blast Desc: MGG_01044 [Magnaporthe grisea 70-15] gi|145018003|gb|EDK02282.1| MGG_01044 [Magnaporthe grisea 70-15]
  misc_feature (4)..(626): NCBI GI: 85085933 Blast Desc: NCU03966 [Neurospora crassa OR74A] gi|74614280|sp|Q7RZA2.1|GEM1_NEUCR RecName: Full=Mitochondrial Rho GTPase 1; AltName: Full=GTPase EF-hand protein of 1 NCU03966
  misc_feature (4)..(625): NCBI GI: 116202597 Blast Desc: conserved [Chaetomium globosum CBS 148.51] gi|88177701|gb|EAQ85169.1| conserved [Chaetomium globosum CBS 148.51]
  misc_feature (4)..(625): NCBI GI: 171682442 Blast Desc: protein product [Podospora anserina] gi|170941180|emb|CAP66830.1| protein product [Podospora anserina]
  misc_feature (1)..(625): NCBI GI: 189201629 Blast Desc: mitochondrial Rho GTPase 1 [Pyrenophora tritici-repentis Pt-1C-BFP] gi|187984250|gb|EDU49738.1| mitochondrial Rho GTPase 1 [Pyrenophora tritici-repentis
  misc_feature (1)..(626): NCBI GI: 154315447 Blast Desc: BC1G_04296 [Botryotinia fuckeliana B05.10] gi|150847236|gb|EDN22429.1| BC1G_04296 [Botryotinia fuckeliana B05.10]
  misc_feature (1)..(625): NCBI GI: 169619716 Blast Desc: SNOG_13056 [Phaeosphaeria nodorum SN15] gi|160703888|gb|EAT79383.2| SNOG_13056 [Phaeosphaeria nodorum SN15]
MATVRICVCGDEGTGKSSLIASLVKDVFVSNKIQPVLPQITIPPSIGTPENVTTTIVDTSARPQDRTTLRKEIRKSNVILLVYADHYSYERVALFWMPYFRSLGVNVPVVLCANKSDLTENPTPQVVEEEMLPVMSEFREIDSCIRASAREHQNVNETFFLCQKAVTHPIAPLFDYKEGNLKPACISALKRVFYLCDKDQDGYLNDQEIQEFQAKCFDKPLSPEDLENIKLSISKSVHGSDTEKGVTMKGFLQLNKMYAEKGRHETIWVILRKYHYTDSLSLEDNFIHPKFDVPEYASAELSPAGYRFFMDLFLLFDKDNDGGLNDRELEALFAPTPGPPQSWVEASFPSSTVRNEAGYITLQGWLAQWSMTTFLEPKTTLEYLAYLGFESPNPRDSLTSALKVTRPRKRRRRPGRVERNVVLCYIVGAAGAGKSSLLDSFLSRPFDGLYHPTIKPRRVVNSVELQGGKQCYLILEELGELEPAILENQTKLDACDLLCYSYDSSDPDSFSHIVDLRKNYPHLDDLPSVYIALKADRDKTTQRSELQPDQYTSSLMMGTPVHVSVTWNSIAELFVALAEAATHPSTAFPKSEEPPPDRTSLYLALGATTCAAVAAFMIWRRSTNSA

SEQ ID NO: 2417 - DNA, 2920 bp, Muscodor strobelii
  misc_feature: SGI EST ID NO. CUFF.6119.0
  misc_feature: Variant of the nucleotide sequence at SEQ ID NO 2415
gtgggacggtatgcggggagcactgaggtcccattaattctcaccactacttgaagacagaaagccgctggcagagaataaagttaatgaaagttatttgtgatcttatgtcctacataaactcaattggttcaaggaaacgggcgacaatggaaagagtttgtgtgctcccaacgttgaacgaacgatttgagattcagcgtctatccggccaaataagacgagatgccgaagacagatccagtggactgttggggtgatgatgatcccactagagatccctaaaacgatctagccgatcccgcccggtactgcagccggtgttgaaagctactgtactggcagctacagtattgactttgccaaattccagccactcatcgcctgtcacactgattgagatgcagaaagaggagaactctcgcagtccaatccgacgatagacgctgctatttccctcttcccctccacggcgagcttgcagattaatcccctcatcgtctgtcgcttcagtatcagagtcttagtcgtctgtgtagcgctattgtatcacaggcattgattgagcaggccatctagccacccctgcccctatctctcccaacgacatcatcgaacttccgggcaatggcaccaccttcgtgagtgcttccaacaaacgcccacaccccagcactccgagccggcaagatggctacggtgcgcatctgtgtctgtggcgacgagggcacgggcaagtccagtcttattgcctcgctcgttaaggacgtcttcgtgagcaacaagatccagccggtactcccccagatcaccatcccacccagcatcggcaccccggagaacgtcaccaccaccatcgtcgacacctccgcccgcccccaagaccgaacgacgctgcgcaaagagatccgcaagtccaacgtcatcctcctcgtctacgccgaccactacagctacgagcgcgtcgccctcttctggatgccctacttccgctccctcggcgtcaatgtccccgtcgtactgtgcgccaacaagtccgacctcaccgagaaccccacgccccaggtcgtcgaggaggagatgctacctgtcatgagcgagttccgcgagatcgactcctgcatacgtgccagcgcccgcgagcaccagaacgtcaacgagactttctttctgtgccaaaaggccgtaacacaccccatcgcacccctcttcgactacaaagaaggcaacttgaagcctgcttgcatatccgccctaaagcgagtcttctacttgtgcgacaaggaccaagatggttatctgaatgatcaggagatccaagagttccaagccaagtgtttcgacaagccactatcccccgaagacctcgagaacatcaagctatccatctccaaatctgttcatgggtccgataccgagaagggagtcactatgaagggctttctccaactgaacaagatgtatgctgaaaagggccgtcatgagacgatatgggtcatactgcgcaaataccattacaccgacagcttgagtctggaggacaatttcattcatcccaagttcgacgtccccgaatacgcatctgccgagctcagcccagccggatatcgcttctttatggatctattcctcctattcgacaaggacaacgatggtgggttgaacgaccgagagctcgaggcgctgtttgctcctacaccaggcccaccacaatcgtgggttgaggcttcctttccatcttcgacggttcggaacgaagcgggctatatcactttgcagggctggcttgctcaatggagtatgaccacattcctggaacctaaaacgacgctggaatatcttgcttacctgggctttgaatccccaaatcctcgcgactcgctgacttccgctctcaaagtcacccggccgcgtaagcgaaggagacgccctggccgtgtcgagcgaaatgtggtgctttgttatattgtgggcgcggccggtgctggaaagtcctctctgctagattcgtttctcagtcgacccttcgacgggctgtatcatcctacaatcaagccacggagagtggtgaacagcgtggaactccagggcggcaaacagtgctatctcatcctcgaagagcttggcgagctagagcctgccatcttggagaatcagaccaagctggatgcttgcgacctcttgtgctactcttacgactcgtcagacccagactctttctctcatatcgtcgaccttcgaaagaattaccctcatctagatgatttgccatcggtttacattgctctgaaagcggatagagacaagacgactcagcgatctgaattgcaaccggaccaatatacatcaagcctgatgatgggcacgccagttcatgtcagcgtcacctggaacagcattgcagagttatttgttgccctcgccgaggcagccactcatccgagtaccgcatttccgaagagtgaagagccgccgcccgacagaaccagcctttatctggctttgggagcaacgacatgtgccgcagtggctgcgtttatgatatggagaaggtcgactaactccgcctgatcccatcttcctgcagcttcgaaaccgccatccattttacataataatcctaatatcgaacacaaacatcatctcacgaaatccccccttttacgaatttctctctatttcttcatgaatggacggatccccactcttatttaccctgctgattatgatacccctaagaatcttctacttatggagcataaatgtttatgtaccgatatttacatacatactttaccaccttacctatctacctgtacttgtctagtcgatagtgaatctaatgtcttgtttacctgactcgcctcgcgaggcactccagcttgcgaactccgctatcgattgtgatgaaatctccact

SEQ ID NO: 2418 - DNA, 1047 bp, Muscodor strobelii
  misc_feature: SGI cDNA ID NO. 560436
  misc_feature: Elevated expression when VOC is produced
  misc_feature: Encodes the peptide sequence at SEQ ID NO 2419
atgccgaaaccacagcccccgaccaccgaacaacttgacgcagttcgcacttcgatacgatccctcctgcaccagccagcatacgacgacggatctgcaggtccggtactagtccgtctagcatggcacagcgcaggcacatacgataaagaaacaaacacgggaggatcgaacggcgcgggcatgcgctacgaagcagaaggtggtgatcccgcgaacgccggcctacaacatgccagagcgtttttggaacccgtgaagaagcaatatccatggataacgtacgccgatctctggacacttgcagcgatcgtagctattgaggagatgggcggtccttctatcccctggcagggcggcagaacagatttcacggatgacgaggcaccgaagaggttaccaccaagaggaaggctgccggatgctgcacaaggcgcgcagcatctgaggatgatattcggacgcatgggattcaatgaccaagagatcgttgcgttgagtggtgcgcataatctgggaagatgtcatagtgatagaagtggatttgaggggaagtgggttaatcaaccgacgagattcagcaatcagtattttcggctacttctaggcaatgaaggggcttggaagaaaacgaaattacagaatggggttgagcagtttgtttatacggaagaagctgatgatgagatggataaagaaggcgaagatggagaaaaggagaagcaagagggactcatgatgctgcccacagacatgtgtctgctgagcgacaaggaatttaggcactgggttgagaggtatgcggatgataaggagttgttctttgacgatttcaaagaggtttttggcaagttgatggagttgggtattaaacgggatgggcaggggaatgtagttaatgaggagaatgtcgagagtgggtataagagtgcgccgaagaagagcgatgaggctactgctgagggaacgcagaataggggccaggttggcaatgaggcgggtgttttgaggaggcagaatgagggttttaggaggtcgaagctgtga

SEQ ID NO: 2419 - protein, 348 aa, Muscodor strobelii
  misc_feature: SGI Peptide ID NO. 560436
  misc_feature (15)..(270): Pfam Id: PF00141 Pfam Desc: Peroxidase
  misc_feature (14)..(348): NCBI GI: 154298312 Blast Desc: BC1G_11611 [Botryotinia fuckeliana B05.10] gi|150858064|gb|EDN33256.1| BC1G_11611 [Botryotinia fuckeliana B05.10]
  misc_feature (14)..(348): NCBI GI: 156045027 Blast Desc: SS1G_09702 [Sclerotinia sclerotiorum 1980] gi|154694097|gb|EDN93835.1| SS1G_09702 [Sclerotinia sclerotiorum 1980]
  misc_feature (13)..(339): NCBI GI: 121700292 Blast Desc: cytochrome c peroxidase, [Aspergillus clavatus NRRL 1] gi|119396553|gb|EAW06985.1| cytochrome c peroxidase, [Aspergillus clavatus NRRL 1]
  misc_feature (13)..(319): NCBI GI: 67538540 Blast Desc: AN5440.2 [Aspergillus nidulans FGSC A4] gi|74595142|sp|Q5B1Z0.1|CCPR2_EMENI RecName: Full= heme-binding peroxidase gi|40743410|gb|EAA62600.1| AN5440.2 [Aspergillus FGSC
  misc_feature (12)..(319): NCBI GI: 119196897 Blast Desc: CIMG_02823 [Coccidioides immitis RS] gi|240110752|gb|EER28908.1| cytochrome c peroxidase, [Coccidioides posadasii C735 delta SOWgp]
  misc_feature (14)..(329): NCBI GI: 238844621 Blast Desc: cytochrome c peroxidase [Microsporum canis CBS 113480]
  misc_feature (8)..(327): NCBI GI: 169784882 Blast Desc: [Aspergillus oryzae RIB40] gi|238507892|ref|XP_002385147.1| cytochrome c peroxidase, [Aspergillus flavus NRRL3357] gi|83775649|dbj|BAE65769.1| protein
  misc_feature (14)..(319): NCBI GI: 242772077 Blast Desc: cytochrome c peroxidase, [Talaromyces stipitatus ATCC 10500] gi|218721588|gb|EED21006.1| cytochrome c peroxidase, [Talaromyces stipitatus ATCC 10500]
  misc_feature (12)..(320): NCBI GI: 239610315 Blast Desc: cytochrome c peroxidase [Ajellomyces dermatitidis ER-3]
  misc_feature (12)..(320): NCBI GI: 154270967 Blast Desc: cytochrome c peroxidase, mitochondrial precursor [Ajellomyces capsulatus NAm1] gi|150409560|gb|EDN05004.1| cytochrome c peroxidase, mitochondrial precursor [Ajellomyces
  misc_feature (13)..(303): SWISSPROT Homolog: EC 1.11.1.5 Cytochrome-c peroxidase
  misc_feature: Useful for introducing or modulating the production of volatile compounds
MPKPQPPTTEQLDAVRTSIRSLLHQPAYDDGSAGPVLVRLAWHSAGTYDKETNTGGSNGAGMRYEAEGGDPANAGLQHARAFLEPVKKQYPWITYADLWTLAAIVAIEEMGGPSIPWQGGRTDFTDDEAPKRLPPRGRLPDAAQGAQHLRMIFGRMGFNDQEIVALSGAHNLGRCHSDRSGFEGKWVNQPTRFSNQYFRLLLGNEGAWKKTKLQNGVEQFVYTEEADDEMDKEGEDGEKEKQEGLMMLPTDMCLLSDKEFRHWVERYADDKELFFDDFKEVFGKLMELGIKRDGQGNVVNEENVESGYKSAPKKSDEATAEGTQNRGQVGNEAGVLRRQNEGFRRSKL

SEQ ID NO: 2420 - DNA, 1769 bp, Muscodor strobelii
  misc_feature: SGI EST ID NO. CUFF.6122.0
  misc_feature: Variant of the nucleotide sequence at SEQ ID NO 2418
tgggtgtcacaggagaacccacttgaggctccgcaaggcgaagagcttgtggattcatagagagctatcgtcccaccattcagcccgtctagatgatgagctagagaaatgatgaagctattcttatctagagtgggctccggtccggaagaatttcatgagggccgaggtttgccataacctccccagactgcggctgtctggagtgaagagacttctttcattgatatcctgtattctttacctatttttgtttgttccaacaacgtcttgctaaacatcgcaggagaaatatgtttgatcaacctcaatagctcatcacctactacctctcacactcaaccatcgaacctacagacctaaacgtaatcacaacgcgaccaacgctcacgatgccgaaaccacagcccccgaccaccgaacaacttgacgcagttcgcacttcgatacgatccctcctgcaccagccagcatacgacgacggatctgcaggtccggtactagtccgtctagcatggcacagcgcaggcacatacgataaagaaacaaacacgggaggatcgaacggcgcgggcatgcgctacgaagcagaaggtggtgatcccgcgaacgccggcctacaacatgccagagcgtttttggaacccgtgaagaagcaatatccatggataacgtacgccgatctctggacacttgcagcgatcgtagctattgaggagatgggcggtccttctatcccctggcagggcggcagaacagatttcacggatgacgaggcaccgaagaggttaccaccaagaggaaggctgccggatgctgcacaaggcgcgcagcatctgaggatgatattcggacgcatgggattcaatgaccaagagatcgttgcgttgagtggtgcgcataatctgggaagatgtcatagtgatagaagtggatttgaggggaagtgggttaatcaaccgacgagattcagcaatcagtattttcggctacttctaggcaatgaaggggcttggaagaaaacgaaattacagaatggggttgagcagtttgtttatacggaagaagctgatgatgagatggataaagaaggcgaagatggagaaaaggagaagcaagagggactcatgatgctgcccacagacatgtgtctgctgagcgacaaggaatttaggcactgggttgagaggtatgcggatgataaggagttgttctttgacgatttcaaagaggtttttggcaagttgatggagttgggtattaaacgggatgggcaggggaatgtagttaatgaggagaatgtcgagagtgggtataagagtgcgccgaagaagagcgatgaggctactgctgagggaacgcagaataggggccaggttggcaatgaggcgggtgttttgaggaggcagaatgagggttttaggaggtcgaagctgtgagaatagggatggcgatgggtagatggatagagcatagagacagaagttggctcggacttgacctcggacttgacctcgggagttaggatttgaagatacagagtagacatatagaccgattattaaacttcgtccatatctcgatatgtggcttatgtattatgttaatgagcaatcaacattgtcttattccagttcactatttcaacatgtcaacagagacgaagaataacgagactgaggccgcagtaacatcaaactcttttgcccacctcatagccatttacatagtatttccctgacgaacggcatcttactctataggaagta

SEQ ID NO: 2421 - DNA, 864 bp, Muscodor strobelii
  misc_feature: SGI cDNA ID NO. 560437
  misc_feature: Encodes the peptide sequence at SEQ ID NO 2422
atgcgctacgaagcagaaggtggtgatcccgcgaacgccggcctacaacatgccagagcgtttttggaacccgtgaagaagcaatatccatggataacgtacgccgatctctggacacttgcagcgatcgtagctattgaggagatgggcggtccttctatcccctggcagggcggcagaacagatttcacggatgacgaggcaccgaagaggttaccaccaagaggaaggctgccggatgctgcacaaggcgcgcagcatctgaggatgatattcggacgcatgggattcaatgaccaagagatcgttgcgttgagtggtgcgcataatctgggaagatgtcatagtgatagaagtggatttgaggggaagtgggttaatcaaccgacgagattcagcaatcagtattttcggctacttctaggcaatgaaggggcttggaagaaaacgaaattacagaatggggttgagcagtttgtttatacggaagaagctgatgatgagatggataaagaaggcgaagatggagaaaaggagaagcaagagggactcatgatgctgcccacagacatgtgtctgctgagcgacaaggaatttaggcactgggttgagaggtatgcggatgataaggagttgttctttgacgatttcaaagaggtttttggcaagttgatggagttgggtattaaacgggatgggcaggggaatgtagttaatgaggagaatgtcgagagtgggtataagagtgcgccgaagaagagcgatgaggctactgctgagggaacgcagaataggggccaggttggcaatgaggcgggtgttttgaggaggcagaatgagggttttaggaggtcgaagctgtga

SEQ ID NO: 2422 - protein, 287 aa, Muscodor strobelii
  misc_feature: SGI Peptide ID NO. 560437
  misc_feature (1)..(209): Pfam Id: PF00141 Pfam Desc: Peroxidase
  misc_feature (10)..(209): Pfam Id: PF00141 Pfam Desc: Peroxidase
  misc_feature (1)..(287): NCBI GI: 154298312 Blast Desc: BC1G_11611 [Botryotinia fuckeliana B05.10] gi|150858064|gb|EDN33256.1| BC1G_11611 [Botryotinia fuckeliana B05.10]
  misc_feature (1)..(287): NCBI GI: 156045027 Blast Desc: SS1G_09702 [Sclerotinia sclerotiorum 1980] gi|154694097|gb|EDN93835.1| SS1G_09702 [Sclerotinia sclerotiorum 1980]
  misc_feature (1)..(267): NCBI GI: 67538540 Blast Desc: AN5440.2 [Aspergillus nidulans FGSC A4] gi|74595142|sp|Q5B1Z0.1|CCPR2_EMENI RecName: Full= heme-binding peroxidase gi|40743410|gb|EAA62600.1| AN5440.2 [Aspergillus FGSC
  misc_feature (1)..(278): NCBI GI: 121700292 Blast Desc: cytochrome c peroxidase, [Aspergillus clavatus NRRL 1] gi|119396553|gb|EAW06985.1| cytochrome c peroxidase, [Aspergillus clavatus NRRL 1]
  misc_feature (1)..(268): NCBI GI: 238844621 Blast Desc: cytochrome c peroxidase [Microsporum canis CBS 113480]
  misc_feature (1)..(258): NCBI GI: 119196897 Blast Desc: CIMG_02823 [Coccidioides immitis RS] gi|240110752|gb|EER28908.1| cytochrome c peroxidase, [Coccidioides posadasii C735 delta SOWgp]
  misc_feature (1)..(266): NCBI GI: 169784882 Blast Desc: [Aspergillus oryzae RIB40] gi|238507892|ref|XP_002385147.1| cytochrome c peroxidase, [Aspergillus flavus NRRL3357] gi|83775649|dbj|BAE65769.1| protein
  misc_feature (1)..(258): NCBI GI: 242772077 Blast Desc: cytochrome c peroxidase, [Talaromyces stipitatus ATCC 10500] gi|218721588|gb|EED21006.1| cytochrome c peroxidase, [Talaromyces stipitatus ATCC 10500]
  misc_feature (1)..(259): NCBI GI: 239610315 Blast Desc: cytochrome c peroxidase [Ajellomyces dermatitidis ER-3]
  misc_feature (1)..(258): NCBI GI: 115390158 Blast Desc: cytochrome c peroxidase, mitochondrial precursor [Aspergillus terreus NIH2624] gi|114194980|gb|EAU36680.1| cytochrome c peroxidase, mitochondrial precursor [Aspergillus
  misc_feature (1)..(235): SWISSPROT Homolog: EC 1.11.1.5 Cytochrome-c peroxidase
MRYEAEGGDPANAGLQHARAFLEPVKKQYPWITYADLWTLAAIVAIEEMGGPSIPWQGGRTDFTDDEAPKRLPPRGRLPDAAQGAQHLRMIFGRMGFNDQEIVALSGAHNLGRCHSDRSGFEGKWVNQPTRFSNQYFRLLLGNEGAWKKTKLQNGVEQFVYTEEADDEMDKEGEDGEKEKQEGLMMLPTDMCLLSDKEFRHWVERYADDKELFFDDFKEVFGKLMELGIKRDGQGNVVNEENVESGYKSAPKKSDEATAEGTQNRGQVGNEAGVLRRQNEGFRRSKL

SEQ ID NO: 2423 - DNA, 1769 bp, Muscodor strobelii; identical to SEQ ID NO: 2420
  misc_feature: SGI EST ID NO. CUFF.6122.0
  misc_feature: Variant of the nucleotide sequence at SEQ ID NO 2421

SEQ ID NO: 2424 - DNA, 1062 bp, Muscodor strobelii
  misc_feature: SGI cDNA ID NO. 560438
  misc_feature: Elevated expression when VOC is produced
  misc_feature: Encodes the peptide sequence at SEQ ID NO 2425
atgttgacgctccaaggtaccatcatcctgacgggagcaaatggtgggcttggtgctgggatagccggcctgatcggctcgagtgcagacctcgtagcattccattgcatttatgccgttcgagaccccgatttggctacctctctgcagtctgctctgcaccgcacacatgcagagactcgctcgtacgaggtgatagccctcgacctctgcaatctggccaatgtacggcaggctgcaggagctatcaacgcgaaagtccattctcgagagattcccaagatcaaggcactaattttgactgctggtcttcgagagccttatggccagacctggactgaaagcggactcgatgtcacctttgcaagtaactatcttggccattggttgttgacgttgcttcttctgcaaagcatggacagcgtttcggcccgagtggtcgttgtgggaagctctgcacatgaccctctcgatccggcaaataagatgaacggtgcctttgcagacgagaagtggcatcaattttttgctgattccaagactgccactattgacgctatcgcccaagggagatggagtccaagtgacacacgagacaagaattcagttaagtttgccggcatccgacgctatggagccgccaagctttgcagtactatgatgattgttgagcttcagcagcgcttagaccgagaccccgagctcagccatatctgcgtcttaggcgtagacccaggaaccatgccaaccaagattaccaccaacggtcagccctggtttatcagtcctgtgttctcgttcatactatatgtcgtagcacagatctcgcccaacggcgccattcgctcatcacgcaagtctgcagatgacgtcttggcagctgcacttcggcacgacccgccactaggagacgcgccgaaggggttatatttaaatggatctgtgtcgaaattgatgagtgccgaagctcgcgatgacgagaagagggcacaggtatggagggcaagtgtaaagtacaccggtttatcaaagcacgagactcggctcttgagatggaattga

SEQ ID NO: 2425 - protein, 353 aa, Muscodor strobelii
  misc_feature: SGI Peptide ID NO. 560438
  misc_feature (4)..(352): NCBI GI: 39942728 Blast Desc: MGG_03444 [Magnaporthe grisea 70-15] gi|145010010|gb|EDJ94666.1| MGG_03444 [Magnaporthe grisea 70-15]
  misc_feature (2)..(352): NCBI GI: 242764805 Blast Desc: short-chain dehydrogenase, [Talaromyces stipitatus ATCC 10500] gi|218724042|gb|EED23459.1| short-chain dehydrogenase, [Talaromyces stipitatus ATCC 10500]
  misc_feature (5)..(352): NCBI GI: 212528992 Blast Desc: short-chain dehydrogenase, [Penicillium marneffei ATCC 18224] gi|210074051|gb|EEA28138.1| short-chain dehydrogenase, [Penicillium marneffei ATCC 18224]
  misc_feature (3)..(353): NCBI GI: 212538423 Blast Desc: short-chain dehydrogenase, [Penicillium marneffei ATCC 18224] gi|210069109|gb|EEA23200.1| short-chain dehydrogenase, [Penicillium marneffei ATCC 18224]
  misc_feature (3)..(353): NCBI GI: 242765007 Blast Desc: short-chain dehydrogenase, [Talaromyces stipitatus ATCC 10500] gi|218724083|gb|EED23500.1| short-chain dehydrogenase, [Talaromyces stipitatus ATCC 10500]
  misc_feature (5)..(349): NCBI GI: 238840352 Blast Desc: conserved [Microsporum canis CBS 113480]
  misc_feature (25)..(353): NCBI GI: 154323033 Blast Desc: BC1G_00859 [Botryotinia fuckeliana B05.10] gi|150848193|gb|EDN23386.1| BC1G_00859 [Botryotinia fuckeliana B05.10]
  misc_feature (1)..(352): NCBI GI: 46108216 Blast Desc: FG00990.1 [Gibberella zeae PH-1]
  misc_feature (1)..(352): NCBI GI: 256735183 Blast Desc: NECHADRAFT_74766 [Nectria haematococca mpVI 77-13-4]
  misc_feature (4)..(349): NCBI GI: 238842886 Blast Desc: oxidoreductase [Microsporum canis CBS 113480]
  misc_feature: Useful for introducing or modulating the production of volatile compounds
MLTLQGTIILTGANGGLGAGIAGLIGSSADLVAFHCIYAVRDPDLATSLQSALHRTHAETRSYEVIALDLCNLANVRQAAGAINAKVHSREIPKIKALILTAGLREPYGQTWTESGLDVTFASNYLGHWLLTLLLLQSMDSVSARVVVVGSSAHDPLDPANKMNGAFADEKWHQFFADSKTATIDAIAQGRWSPSDTRDKNSVKFAGIRRYGAAKLCSTMMIVELQQRLDRDPELSHICVLGVDPGTMPTKITTNGQPWFISPVFSFILYVVAQISPNGAIRSSRKSADDVLAAALRHDPPLGDAPKGLYLNGSVSKLMSAEARDDEKRAQVWRASVKYTGLSKHETRLLRWN

SEQ ID NO: 2426 - DNA, 1563 bp, Muscodor strobelii
  misc_feature: SGI EST ID NO. CUFF.6134.1
  misc_feature: Variant of the nucleotide sequence at SEQ ID NO 2424
tctcaatatggtaacactgcagggcttttgagtagtgtagtgacttccccaggcgtggccagggggaatccgcagtgggtgttcacacgttttgtcctgaaggcttcaagattcggggttgaccccaacatagctgagcgttgacatcacccctcctccaataaagccatacctagtaccgtagcacattctattaatcgacctacatttgaagagagccgtcacgtcaatcctcgcatatgacgggatcaagcgatgacgaccctgaaacccctcttcggctataattagttggtgccgccatcgcacgactgtagatgcatggcctgtggacgtgaaaaactacgcgagcaataactgttctacaatgttgacgctccaaggtaccatcatcctgacgggagcaaatggtgggcttggtgctgggatagccggcctgatcggctcgagtgcagacctcgtagcattccattgcatttatgccgttcgagaccccgatttggctacctctctgcagtctgctctgcaccgcacacatgcagagactcgctcgtacgaggtgatagccctcgacctctgcaatctggccaatgtacggcaggctgcaggagctatcaacgcgaaagtccattctcgagagattcccaagatcaaggcactaattttgactgctggtcttcgagagccttatggccagacctggactgaaagcggactcgatgtcacctttgcaagtaactatcttggccattggttgttgacgttgcttcttctgcaaagcatggacagcgtttcggcccgagtggtcgttgtgggaagctctgcacatgaccctctcgatccggcaaataagatgaacggtgcctttgcagacgagaagtggcatcaattttttgctgattccaagactgccactattgacgctatcgcccaagggagatggagtccaagtgacacacgagacaagaattcagttaagtttgccggcatccgacgctatggagccgccaagctttgcagtactatgatgattgttgagcttcagcagcgcttagaccgagaccccgagctcagccatatctgcgtcttaggcgtagacccaggaaccatgccaaccaagattaccaccaacggtcagccctggtttatcagtcctgtgttctcgttcatactatatgtcgtagcacagatctcgcccaacggcgccattcgctcatcacgcaagtctgcagatgacgtcttggcagctgcacttcggcacgacccgccactaggagacgcgccgaaggggttatatttaaatggatctgtgtcgaaattgatgagtgccgaagctcgcgatgacgagaagagggcacaggtatggagggcaagtgtaaagtacaccggtttatcaaagcacgagactcggctcttgagatggaattgacgtatgactattcgattccttggcgtcggtgtccggaatgtaccgatcgaaatatatcggacaccaaatattaagatcaacccctactttacttgaggaactaacaccgtaattctagctaaattgcatctaga

SEQ ID NO: 2427 - DNA, 1257 bp, Muscodor strobelii
  misc_feature: SGI cDNA ID NO. 560439
  misc_feature: Encodes the peptide sequence at SEQ ID NO 2428
atgtctagcagactcatgtcccgtgctcagcgcgaccgtgaacgcgggcgcccgagtctcgcttcagcgtcatcaaatacccagaggaagcctcgacaggcgacactgccagactacgaacctccctcatgcccactcgacaatcaagcgcgtcgggctcttgctgagctcgttaccaacaatgccgatactcgcaaatacgaagagcagctcaagcagtccatctcgcttctcaccaccagcgtgagcgacatcaatgatcgctacgagaagcgacgaaccacgttgaagcgcttacaagatcgccgtcgacgtcaagccgaagagggtggtgaggatgccaacagcaaatccgagcgtgagcgtgccgaggaagctgcgactgtgcgattacgcgaaacagtgccttccctcacgcaggactgcgaaagtgctgtgcgagaggtcattgacttacgggtagagcttgaagatggccggcaagctatgcaagacacgttgcatagagccgaagaggagagcataaatgctgcgaatagggagagggataatgcggatgcggatgacgatgcgatggaagacgccaagagcgccatcctcgggccattacggattctaaagcaggagaagaagaaggcagcagaaaactacgcaacgaaatctatggagcagcgctatgccgtagacaatgactacatcgggttcaagcgcctgtggtgggatgctgctcatggcactgacggcaagcctctccctgatgcttcgcgctggtttgcccgtaacgatggtgaagaggaagaggaagaggaagaggaggacgatttagtcattgctgaggagcatgtcagcatctactgcccgctctctatggtgatcatgaacgagccctttacgagccggacgtgcaagcatacgttcaacaagccagctattgtgcagttcctccagtctcagcccaaccgtacggcgacctgtccactgccgggttgtaacaaggaggtctcaatcaaagatttcgcagacgatcctgtcatgttgcgcaagatcgagcgagcaaaagcggaaagggaacggaggaatgccgaggaccatggcgacgagcatgaagacgaggaggaagttgacgcagatggcgacgcatctatgcaggagacaccaagacgtagtgtcaagtctgaacgcgcaaagaatagaggtcgtcagctactagctaatgtagggcttggcgggggagacggagatggggatgaggattaa

SEQ ID NO: 2428 - protein, 418 aa, Muscodor strobelii
  misc_feature: SGI Peptide ID NO. 560439
  misc_feature (14)..(362): NCBI GI: 171682398 Blast Desc: protein product [Podospora anserina] gi|170941158|emb|CAP66808.1| protein product [Podospora anserina]
  misc_feature (36)..(395): NCBI GI: 256733967 Blast Desc: NECHADRAFT_67189 [Nectria haematococca mpVI 77-13-4]
  misc_feature (36)..(353): NCBI GI: 46128155 Blast Desc: FG08455.1 [Gibberella zeae PH-1]
  misc_feature (21)..(375): NCBI GI: 85085941 Blast Desc: NCU03968 [Neurospora crassa OR74A] gi|28918700|gb|EAA28371.1| [Neurospora crassa OR74A] gi|40882317|emb|CAF06139.1| related to DNA repair protein MMS21
  misc_feature (20)..(409): NCBI GI: 39973623 Blast Desc: MGG_01042 [Magnaporthe grisea 70-15] gi|145018005|gb|EDK02284.1| MGG_01042 [Magnaporthe grisea 70-15]
  misc_feature (43)..(401): NCBI GI: 116202585 Blast Desc: CHGG_09177 [Chaetomium globosum CBS 148.51] gi|88177695|gb|EAQ85163.1| CHGG_09177 [Chaetomium globosum CBS 148.51]
  misc_feature (4)..(414): NCBI GI: 156060553 Blast Desc: SS1G_02415 [Sclerotinia sclerotiorum 1980] gi|154699823|gb|EDN99561.1| SS1G_02415 [Sclerotinia sclerotiorum 1980]
  misc_feature (36)..(410): NCBI GI: 154311817 Blast Desc: BC1G_05942 [Botryotinia fuckeliana B05.10] gi|150850592|gb|EDN25785.1| BC1G_05942 [Botryotinia fuckeliana B05.10]
  misc_feature (1)..(379): NCBI GI: 70991625 Blast Desc: chromosomal organization and DNA repair protein Mms21 [Aspergillus fumigatus Af293] gi|66848294|gb|EAL88623.1| chromosomal organization and DNA repair protein Mms21, fumigatus
  misc_feature (1)..(368): NCBI GI: 119468812 Blast Desc: chromosomal organization and DNA repair protein Mms21, [Neosartorya fischeri NRRL 181] gi|119406040|gb|EAW15991.1| chromosomal organization and DNA repair protein Mms21, fischeri
MSSRLMSRAQRDRERGRPSLASASSNTQRKPRQATLPDYEPPSCPLDNQARRALAELVTNNADTRKYEEQLKQSISLLTTSVSDINDRYEKRRTTLKRLQDRRRRQAEEGGEDANSKSERERAEEAATVRLRETVPSLTQDCESAVREVIDLRVELEDGRQAMQDTLHRAEEESINAANRERDNADADDDAMEDAKSAILGPLRILKQEKKKAAENYATKSMEQRYAVDNDYIGFKRLWWDAAHGTDGKPLPDASRWFARNDGEEEEEEEEEDDLVIAEEHVSIYCPLSMVIMNEPFTSRTCKHTFNKPAIVQFLQSQPNRTATCPLPGCNKEVSIKDFADDPVMLRKIERAKAERERRNAEDHGDEHEDEEEVDADGDASMQETPRRSVKSERAKNRGRQLLANVGLGGGDGDGDED

SEQ ID NO: 2429 - DNA, 2966 bp, Muscodor strobelii
  misc_feature: SGI EST ID NO. CUFF.6258.1
  misc_feature: Variant of the nucleotide sequence at SEQ ID NO 2427
cacgaactggcggcgagcctggcgagcctaggctgcctagcttagtcgactattcgtcctttacccgtttgatcagaatgggggctgtttcaattagggcttatccctgcagtacaaccatttcgcggggacgacaagaaatcctgatttatgccacctgattgctgtcatctctgggtgaccaggcgagccaggtcatctgttgtactgcgaaaatcgaaaaggctatgtcccgtcgcaactctttcggtcgtaacactgtgagagtgagagacgcaatgagatgatcgtccgatcttctacgaagggatccgaatgtaacccaaggtcctcttctaagttatttttatgctcctcgttattcgaccaagatagtccggtagtattggcggggtcggtcagcgaagaacttgctgccgatgccctccgtgtctgattgtctttattcaattctacattcgttgcactcgaggacctagcatcgcaacatccatatgaaggtagatagtgtggcaggtactaatattgggatactggcttgactggctcgccggctgggacgccagtgcaggtgctaatagcccactgtggggcggggcccaggtcctcggtgctacccctccagaaagaactactgccattaacgcggttcgggaagcagctttacgcgttcgctagtaactcgcagctactcaagtgatatccaatttgccccataaggtagtagcagacaagaattaaatgacaataacaacaagcacgttatcaccgacttctctatttttcaacttacttctgaaggccattggcaccctttgcgcatgcagcaacttaagtcgtcttgaaggccgaagctatgtctagcagactcatgtcccgtgctcagcgcgaccgtgaacgcgggcgcccgagtctcgcttcagcgtcatcaaatacccagaggaagcctcgacaggcgacactgccagactacgaacctccctcatgcccactcgacaatcaagcgcgtcgggctcttgctgagctcgttaccaacaatgccgatactcgcaaatacgaagagcagctcaagcagtccatctcgcttctcaccaccagcgtgagcgacatcaatgatcgctacgagaagcgacgaaccacgttgaagcgcttacaagatcgccgtcgacgtcaagccgaagagggtggtgaggatgccaacagcaaatccgagcgtgagcgtgccgaggaagctgcgactgtgcgattacgcgaaacagtgccttccctcacgcaggactgcgaaagtgctgtgcgagaggtcattgacttacgggtagagcttgaagatggccggcaagctatgcaagacacgttgcatagagccgaagaggagagcataaatgctgcgaatagggagagggataatgcggatgcggatgacgatgcgatggaagacgccaagagcgccatcctcgggccattacggattctaaagcaggagaagaagaaggcagcagaaaactacgcaacgaaatctatggagcagcgctatgccgtagacaatgactacatcgggttcaagcgcctgtggtgggatgctgctcatggcactgacggcaagcctctccctgatgcttcgcgctggtttgcccgtaacgatggtgaagaggaagaggaagaggaagaggaggacgatttagtcattgctgaggagcatgtcagcatctactgcccgctctctatggtgatcatgaacgagccctttacgagccggacgtgcaagcatacgttcaacaagccagctattgtgcagttcctccagtctcagcccaaccgtacggcgacctgtccactgccgggttgtaacaaggaggtctcaatcaaagatttcgcagacgatcctgtcatgttgcgcaagatcgagcgagcaaaagcggaaagggaacggaggaatgccgaggaccatggcgacgagcatgaagacgaggaggaagttgacgcagatggcgacgcatctatgcaggagacaccaagacgtagtgtcaagtctgaacgcgcaaagaatagaggtcgtcagctactagctaatgtagggcttggcgggggagacggagatggggatgaggattaatgaataatgggatgagatatgagataccacggaaactccgcatctttttgctgacattgaattcttctctacgtagaaaattagctgatatattatatggtaaagcacagatgagtcgccgaacatttcgcgggactctatacgagaagcttaaaaactgcacgcatgagccacaccactctcaagtcgtgctccatcaccagatatcttaggtagtcttgtccgctaccttcctcgtcgctgaactgtctaacggcaaagtccccgtcttttccattaagcctcgtacctctgcgctctggcaaagatattgcttagccataggtagtcttcgtgcttccggtgttgctgagtgatacatggaagcaaggcctctagtaaccgaggaggaatcaactcgcgactttacgtctaacttcaagtttatattgcttatgactagaacgctacgatctcgctggaacaatccgtcgttgatagaattgtatcacgcctctcctcgtctatacaatacacgttgtaggctgcacaatgccagtcgaaaacactcgcaagaagtcaaaagatgacattcgtcaatagaagctctcgagattatctgtaagctggggttcaagcatagtggtagctttcctggcagacggtcagctcttgccggatcacgtgcagatcttcaataacaatttcattctcatttctaaggcggtgcatatccctcatcagctgctacccaacaacattggcgaggaaaagccatccaattaagttgcattcgaccgcctcactcctgcagccgcctcacttgaccaactttgggtcaagggccgattttgccacgattgaccgatgtcgt

SEQ ID NO: 2430 - DNA, 1149 bp, Muscodor strobelii
  misc_feature: SGI cDNA ID NO. 560440
  misc_feature: Encodes the peptide sequence at SEQ ID NO 2431
atggaccgaatagggtcaatgtggtcggcgctgccaatcggaaaatcagccgatggtaatcgattgagaaggaaactccaaaaggtcgggaatcagcaacggccttattctaccaactatagtgatacgacagcaagttccataacttcaccgactacgagtgccatacacgtgaataaatccaattcacgtttgtctattacgtcgagagagccctcgttggcaccatcccgggagctagacgatacgacatggcttgaagatttccgcaagagcggatatgttcaccgcgaagtcaactctgcgtcccggcgcgctcaacagaaaccgcgagtgcgcccttcgagtgttgtgccagaatttgcgcatctcactattaacgacccagcgccgaggcagcctccccaacctgttacaaggaacgtacctcactcccttcgcaccacaagaaggtatgcgaagacacccgtatcttcaatcggccagcttgaaagcaagacgacaagcaataatgacgattcgtcgcaaacaagcccgaatatcgaaaacattgccgagtcttacagagctctgttggaatcccgatgctcgttcatgagcgaggctcccatggacagagatgttaattcagagcaagaagatatacactacatcaaagatcacaggataacagctcctgatttcttagaaccggttgttgaagtgcctgagacgcctctcatgactgggtcacccaagtctgacgaggccactctgtttgctttcgaggacgaaccgatttatgttaaaccgcacttgtcatctcggagtagctacgaaaccgccttgcccgtgttagatcaaaatctagcaacgccttcagatagtccaagcttgcaaatttgcttcgatcttttgacgagagaactatcttcagcggtgagcggctcaacaacacgaccaagcaccgagacgtcatcgctgcagatatgggttatgatcgaggcatacgagaagttacgcgaccagattgttaagacgcagagcaatgaggcagataagagtgccatgattgcgacattcgacatgtggctgaagggcttacatgccgtacacagcaagatgactggaggtgatggacaacggagcgagagtaattatggagactag

SEQ ID NO: 2431 - protein, 382 aa, Muscodor strobelii
  misc_feature: SGI Peptide ID NO. 560440
  misc_feature (5)..(382): NCBI GI: 171682144 Blast Desc: protein product [Podospora anserina] gi|170941031|emb|CAP66681.1| protein product [Podospora anserina]
  misc_feature (23)..(371): NCBI GI: 256727740 Blast Desc: NECHADRAFT_66834 [Nectria haematococca mpVI 77-13-4]
  misc_feature (118)..(369): NCBI GI: 46134237 Blast Desc: FG09258.1 [Gibberella zeae PH-1]
  misc_feature (239)..(382): NCBI GI: 145610669 Blast Desc: MGG_11455 [Magnaporthe grisea 70-15] gi|145018048|gb|EDK02327.1| MGG_11455 [Magnaporthe grisea 70-15]
  misc_feature (79)..(264): NCBI GI: 261359651 Blast Desc: conserved [Verticillium albo-atrum VaMs.102]
  misc_feature (274)..(369): NCBI GI: 85096835 Blast Desc: NCU07065 [Neurospora crassa OR74A] gi|28921818|gb|EAA31094.1| [Neurospora crassa OR74A]
  misc_feature (151)..(375): NCBI GI: 156057625 Blast Desc: [Sclerotinia sclerotiorum 1980] gi|154702329|gb|EDO02068.1| [Sclerotinia sclerotiorum 1980]
MDRIGSMWSALPIGKSADGNRLRRKLQKVGNQQRPYSTNYSDTTASSITSPTTSAIHVNKSNSRLSITSREPSLAPSRELDDTTWLEDFRKSGYVHREVNSASRRAQQKPRVRPSSVVPEFAHLTINDPAPRQPPQPVTRNVPHSLRTTRRYAKTPVSSIGQLESKTTSNNDDSSQTSPNIENIAESYRALLESRCSFMSEAPMDRDVNSEQEDIHYIKDHRITAPDFLEPVVEVPETPLMTGSPKSDEATLFAFEDEPIYVKPHLSSRSSYETALPVLDQNLATPSDSPSLQICFDLLTRELSSAVSGSTTRPSTETSSLQIWVMIEAYEKLRDQIVKTQSNEADKSAMIATFDMWLKGLHAVHSKMTGGDGQRSESNYGD

SEQ ID NO: 2432 - DNA, 3361 bp, Muscodor strobelii
  misc_feature: SGI EST ID NO. CUFF.6158.0
  misc_feature: Variant of the nucleotide sequence at SEQ ID NO 2430
cgttattaattttgcattgtgaaatagtttctgcgtacactgtttcaacggtgatttgaatcataattgctaatttacttaatatataacaagatcgtgaagatggaccgaatagggtcaatgtggtcggcgctgccaatcggaaaatcagccgatggtaatcgattgagaaggaaactccaaaaggtcgggaatcagcaacggccttattctaccaactatagtgatacgacagcaagttccataacttcaccgactacgagtgccatacacgtgaataaatccaattcacgtttgtctattacgtcgagagagccctcgttggcaccatcccgggagctagacgatacgacatggcttgaagatttccgcaagagcggatatgttcaccgcgaagtcaactctgcgtcccggcgcgctcaacagaaaccgcgagtgcgcccttcgagtgttgtgccagaatttgcgcatctcactattaacgacccagcgccgaggcagcctccccaacctgttacaaggaacgtacctcactcccttcgcaccacaagaaggtatgcgaagacacccgtatcttcaatcggccagcttgaaagcaagacgacaagcaataatgacgattcgtcgcaaacaagcccgaatatcgaaaacattgccgagtcttacagagctctgttggaatcccgatgctcgttcatgagcgaggctcccatggacagagatgttaattcagagcaagaagatatacactacatcaaagatcacaggataacagctcctgatttcttagaaccggttgttgaagtgcctgagacgcctctcatgactgggtcacccaagtctgacgaggccactctgtttgctttcgaggacgaaccgatttatgttaaaccgcacttgtcatctcggagtagctacgaaaccgccttgcccgtgttagatcaaaatctagcaacgccttcagatagtccaagcttgcaaatttgcttcgatcttttgacgagagaactatcttcagcggtgagcggctcaacaacacgaccaagcaccgagacgtcatcgctgcagatatgggttatgatcgaggcatacgagaagttacgcgaccagattgttaagacgcagagcaatgaggcagataagagtgccatgattgcgacattcgacatgtggctgaagggcttacatgccgtacacagcaagatgactggaggtgatggacaacggagcgagagtaattatggagactagaaagaattctaaaaaggtcccgttacgagatgtttgcctcgcacagcttctattttgccatgcgccgtttctactgatgtgttcaccgctaaactcgtcattctgtaaggcgaagattgatcgacagaacacattatttagaggacttggtcacttcttagtgtgggggataagcggatcacgtcgatgagattttagatacacttttaaccctgtaaggttaagtggcgcttagacaattcccaaagttccaatgtctggcttgggtctggtgcgcctgggcaagtgatcccagtcagaaaagaggtagtgataaagggcaggagctggcgaccacgcaagggagacagactcaacagagatcaacttagaggggtacagcactccgcgcagtccgattatctgtatattttctttcgtaacgactgatagactcagctcatcacttgaaacatagcgtcgggatctacagagtaatcagtatcttcatcgctgtctcatcatgcctcaaaccttaatcccaacgctccaccacctgagccattctggtgcgttcagatgtctttgggctctcgaggagctcaaggaagcaaaaggcatcgaatacaagctcaagacctacgaacggaaaatggggtcagcaccaccggggctcagagaagtatttccaatgggaaagtcaccaattataacgctcgagacaaccgatccgggagtagctctgcctacggttcaactcgtgcccggagtcatcactgaaggaatgttgatcctccgttaccttaatgaggaattcggagaaggcatatggactccagcaagcgaagacaagaatcgcgacgagttctttcaggtctttgcaaacaatagtatcatgagccaacttgcctcgattctactgcccgagtctatagttgctgcttgtccaattggaatatcggcgttgatgggattacttgtgtccccattgacgtcgatgttcaaaagtcgccttcagcctgcgttcaaacttcttgatgacgaacttgaacacaagccttggttcgccggcaccaaattcggagtggctgatatcgatgtgtgctggccgatggatatatcttcggagaggggctatcttgactttgagaggtacccgcgactgagagattggcacaaaagggtcaaatccaggccagcgtactcgagggcactgaatttatgtaatggttacaatttgaagacatttggtatttaatagccgctgtatcaccatcatagcatgtagtcatagaaccaagacgctgaggcttccttgaagtctgtcaaattcagcaaaccaagatatcgtcaatctctatgcaacagtatagttctcggcttaagcgagcttagaccagatagtttgcacattgcagtatcctttaagaccttccagccctccctctacacctattccactagacttaaatcccccaaagggtattttagcatccaactgtgcatgagtattaatccatacactaccggcttgtagttgacgggcaatccgacctgcctgagttgtgtcgtttgaccatacagaagcgccaagaccatagtcagtcttattggcgcgctcgataacctctgcttcatccgtccatctcattatggggatgactggcccaaaaggctcctctgtcacgattctcgatgtgtcaggtggattatcaacgaccgtgggctgcaagaaaaacccgttttgaccatcatctgtagaagatcgcgtactgccggccgcaacagtgagcttattggcctcaatatctgcgaggagattcttgacactgtcgaactgggcctggttagagaccgggccaatggcctcgtcgctagccattttgagattcttcgcataaccgaccatgatggcaaggaaaccatcataaatggactcgtgcacgtaaattcgcttagggatggtacagatctgccccgcgttcgcgaataccaagtacgcgacaaccggtgcaaccttcgcgacgtcgacgtcagcgcagatgatggcagcatcattgcctccgagctcgagaataacccttttcaagctcttgctacaggactccatcactttcttgccggttgcaac

SEQ ID NO: 2433 - DNA, 735 bp, Muscodor strobelii
  misc_feature: SGI cDNA ID NO. 560441
  misc_feature: Reduced expression when VOC is produced
  misc_feature: Encodes the peptide sequence at SEQ ID NO 2434
atgcctcaaaccttaatcccaacgctccaccacctgagccattctggtgcgttcagatgtctttgggctctcgaggagctcaaggaagcaaaaggcatcgaatacaagctcaagacctacgaacggaaaatggggtcagcaccaccggggctcagagaagtatttccaatgggaaagtcaccaattataacgctcgagacaaccgatccgggagtagctctgcctacggttcaactcgtgcccggagtcatcactgaaggaatgttgatcctccgttaccttaatgaggaattcggagaaggcatatggactccagcaagcgaagacaagaatcgcgacgagttctttcaggtctttgcaaacaatagtatcatgagccaacttgcctcgattctactgcccgagtctatagttgctgcttgtccaattggaatatcggcgttgatgggattacttgtgtccccattgacgtcgatgttcaaaagtcgccttcagcctgcgttcaaacttcttgatgacgaacttgaacacaagccttggttcgccggcaccaaattcggagtggctgatatcgatgtgtgctggccgatggatatatcttcggagaggggctatcttgactttgagaggtacccgcgactgagagattggcacaaaagggtcaaatccaggccagcgtactcgagggcactgaatttatgtaatggttacaatttgaagacatttggtatttaa

SEQ ID NO: 2434 - protein, 244 aa, Muscodor strobelii
  misc_feature: SGI Peptide ID NO. 560441
  misc_feature (140)..(225): Pfam Id: PF00043 Pfam Desc: Glutathione S-transferase, C-terminal domain
  misc_feature (161)..(225): Pfam Id: PF00043 Pfam Desc: Glutathione S-transferase, C-terminal domain
  misc_feature (7)..(244): NCBI GI: 242787898 Blast Desc: glutathione S-transferase, [Talaromyces stipitatus ATCC 10500] gi|218721257|gb|EED20676.1| glutathione S-transferase, [Talaromyces stipitatus ATCC 10500]
  misc_feature (7)..(239): NCBI GI: 212543845 Blast Desc: glutathione S-transferase, [Penicillium marneffei ATCC 18224] gi|210066984|gb|EEA21077.1| glutathione S-transferase, [Penicillium marneffei ATCC 18224]
  misc_feature (1)..(239): NCBI GI: 156062726 Blast Desc: SS1G_01479 [Sclerotinia sclerotiorum 1980] gi|154696815|gb|EDN96553.1| SS1G_01479 [Sclerotinia sclerotiorum 1980]
  misc_feature (6)..(239): NCBI GI: 154313049 Blast Desc: glutathione S-transferase [Botryotinia fuckeliana B05.10] gi|150849611|gb|EDN24804.1| glutathione S-transferase [Botryotinia fuckeliana B05.10]
  misc_feature (8)..(239): NCBI GI: 90421547 Blast Desc: glutathione S-transferase-like [Rhodopseudomonas palustris BisB18] gi|90103561|gb|ABD85598.1| glutathione S-transferase-like [Rhodopseudomonas palustris BisB18]
  misc_feature (9)..(239): NCBI GI: 115376594 Blast Desc: glutathione S-transferase family protein [Stigmatella aurantiaca DW4/3-1] gi|115366399|gb|EAU65403.1| glutathione S-transferase family protein [Stigmatella aurantiaca DW4/3-1]
  misc_feature (8)..(239): NCBI GI: 91779815 Blast Desc: glutathione S-transferase [Burkholderia xenovorans LB400] gi|91692475|gb|ABE35673.1| glutathione S-transferase [Burkholderia xenovorans LB400]
  misc_feature (8)..(239): NCBI GI: 91975204 Blast Desc: glutathione S-transferase-like [Rhodopseudomonas palustris BisB5] gi|91681660|gb|ABE37962.1| glutathione S-transferase-like [Rhodopseudomonas palustris BisB5]
  misc_feature (8)..(239): NCBI GI: 86747148 Blast Desc: glutathione S-transferase-like protein [Rhodopseudomonas palustris HaA2] gi|86570176|gb|ABD04733.1| Glutathione S-transferase-like [Rhodopseudomonas palustris HaA2]
  misc_feature (8)..(239): NCBI GI: 283839802 Blast Desc: Glutathione S-transferase domain protein [Rhodopseudomonas palustris DX-1] gi|283579262|gb|EFC26684.1| Glutathione S-transferase domain protein [Rhodopseudomonas DX-1]
  misc_feature (24)..(243): SWISSPROT Homolog: EC 2.5.1.18 Glutathione transferase
  misc_feature: Useful for introducing or modulating the production of volatile compounds
MPQTLIPTLHHLSHSGAFRCLWALEELKEAKGIEYKLKTYERKMGSAPPGLREVFPMGKSPIITLETTDPGVALPTVQLVPGVITEGMLILRYLNEEFGEGIWTPASEDKNRDEFFQVFANNSIMSQLASILLPESIVAACPIGISALMGLLVSPLTSMFKSRLQPAFKLLDDELEHKPWFAGTKFGVADIDVCWPMDISSERGYLDFERYPRLRDWHKRVKSRPAYSRALNLCNGYNLKTFGI

SEQ ID NO: 2435 - DNA, 3361 bp, Muscodor strobelii; identical to SEQ ID NO: 2432
  misc_feature: SGI EST ID NO. CUFF.6158.0
  misc_feature: Variant of the nucleotide sequence at SEQ ID NO 2433

SEQ ID NO: 2436 - DNA, 1455 bp, Muscodor strobelii
  misc_feature: SGI cDNA ID NO. 560442
  misc_feature: Elevated expression when VOC is produced
  misc_feature: Encodes the peptide sequence at SEQ ID NO 2437
atgacttctaaatctagtgtcaagatcgaattcagtaccttctccaacgtcattgacggtaaatgcgtcagaacaaccccgggacagactcgtcatactctaaatcccgcgactctcgaggacaacccgaaggttccgatcacgactcgtgatgaagtcgatagagcagtcaatggggctcagagagcaggtaaactctgggcggctcttccgtgggaaactcgtcgagccaaattgaatgatttcttcgatgctctcgaagcaaactcggcgagtttcgcggagatgttggtaagagaacaaggcaagacgctgaatgaggcacgaggtgaaatgtacttaagtattcaattcctccgcggaacggtgactttagagctacctggcgaagaggaaattgatcgaaccgagcaacgtcaagtcatcaagcgctaccttccgctcggcgtcgctgttggtattgtgccttggaactatcctgttttcttggcttgtcaaagaatgggacaggctctgataacgggcaacgctttcattctcaaaccgtcaccatttgcaccatattgcaatcttaaagaccagcttgccgaactaggaacacatttcttgcctccgggcgttctacaagcccttagtggagaagacgatctagggccctacctgatctcgcgagacggagtcgatgtcgtgacgttcgggggttccgttgcaaccggcaagaaagtgatggagtcctgtagcaagagcttgaaaagggttattctcgagctcggaggcaatgatgctgccatcatctgcgctgacgtcgacgtcgcgaaggttgcaccggttgtcgcgtacttggtattcgcgaacgcggggcagatctgtaccatccctaagcgaatttacgtgcacgagtccatttatgatggtttccttgccatcatggtcggttatgcgaagaatctcaaaatggctagcgacgaggccattggcccggtctctaaccaggcccagttcgacagtgtcaagaatctcctcgcagatattgaggccaataagctcactgttgcggccggcagtacgcgatcttctacagatgatggtcaaaacgggtttttcttgcagcccacggtcgttgataatccacctgacacatcgagaatcgtgacagaggagccttttgggccagtcatccccataatgagatggacggatgaagcagaggttatcgagcgcgccaataagactgactatggtcttggcgcttctgtatggtcaaacgacacaactcaggcaggtcggattgcccgtcaactacaagccggtagtgtatggattaatactcatgcacagttggatgctaaaataccctttgggggatttaagtctagtggaataggtgtagagggagggctggaaggtcttaaaggatactgcaatgtgcaaactatctggtctaagctcgcttaa

SEQ ID NO: 2437 - protein, 484 aa, Muscodor strobelii
  misc_feature: SGI Peptide ID NO. 560442
  misc_feature (23)..(479): Pfam Id: PF00171 Pfam Desc: Aldehyde dehydrogenase family
  misc_feature (1)..(480): NCBI GI: 46140055 Blast Desc: FG11542.1 [Gibberella zeae PH-1]
  misc_feature (1)..(480): NCBI GI: 256728282 Blast Desc: NECHADRAFT_54099 [Nectria haematococca mpVI 77-13-4]
  misc_feature (1)..(480): NCBI GI: 238838612 Blast Desc: aldehyde dehydrogenase [Microsporum canis CBS 113480]
  misc_feature (7)..(480): NCBI GI: 145249146 Blast Desc: An14g02870 [Aspergillus niger] gi|134081589|emb|CAK41998.1| protein product [Aspergillus niger]
  misc_feature (9)..(484): NCBI GI: 67525495 Blast Desc: AN3205.2 [Aspergillus nidulans FGSC A4] gi|40743743|gb|EAA62930.1| AN3205.2 [Aspergillus nidulans FGSC A4] gi|259485835|tpe|CBF83194.1| TPA: aldehyde dehydrogenase, A4]
  misc_feature (9)..(484): NCBI GI: 154282809 Blast Desc: conserved [Ajellomyces capsulatus NAm1] gi|150410380|gb|EDN05768.1| conserved [Ajellomyces capsulatus NAm1]
  misc_feature (1)..(484): NCBI GI: 46110677 Blast Desc: FG02220.1 [Gibberella zeae PH-1]
  misc_feature (7)..(482): NCBI GI: 70981881 Blast Desc: aldehyde dehydrogenase [Aspergillus fumigatus Af293] gi|66844092|gb|EAL84431.1| aldehyde dehydrogenase, [Aspergillus fumigatus Af293] gi|159122305|gb|EDP47427.1| aldehyde fumigatus
  misc_feature (7)..(482): NCBI GI: 119487483 Blast Desc: aldehyde dehydrogenase [Neosartorya fischeri NRRL 181] gi|119410691|gb|EAW20637.1| aldehyde dehydrogenase [Neosartorya fischeri NRRL 181]
  misc_feature (9)..(482): NCBI GI: 226278777 Blast Desc: betaine aldehyde dehydrogenase [Paracoccidioides brasiliensis Pb01]
  misc_feature (18)..(483): SWISSPROT Homolog: EC 1.2.1.8 Betaine-aldehyde dehydrogenase
  misc_feature: Useful for introducing or modulating the production of volatile compounds
  misc_feature: Useful for fungicidal and/or biocontrol applications
MTSKSSVKIEFSTFSNVIDGKCVRTTPGQTRHTLNPATLEDNPKVPITTRDEVDRAVNGAQRAGKLWAALPWETRRAKLNDFFDALEANSASFAEMLVREQGKTLNEARGEMYLSIQFLRGTVTLELPGEEEIDRTEQRQVIKRYLPLGVAVGIVPWNYPVFLACQRMGQALITGNAFILKPSPFAPYCNLKDQLAELGTHFLPPGVLQALSGEDDLGPYLISRDGVDVVTFGGSVATGKKVMESCSKSLKRVILELGGNDAAIICADVDVAKVAPVVAYLVFANAGQICTIPKRIYVHESIYDGFLAIMVGYAKNLKMASDEAIGPVSNQAQFDSVKNLLADIEANKLTVAAGSTRSSTDDGQNGFFLQPTVVDNPPDTSRIVTEEPFGPVIPIMRWTDEAEVIERANKTDYGLGASVWSNDTTQAGRIARQLQAGSVWINTHAQLDAKIPFGGFKSSGIGVEGGLEGLKGYCNVQTIWSKLA

SEQ ID NO: 2438 - DNA, 836 bp, Muscodor strobelii
  misc_feature: SGI EST ID NO. CUFF.6162.0
  misc_feature: Variant of the nucleotide sequence at SEQ ID NO 2436
acgaaatcagaggtagtcattatattttacagaacggattctctaaaagtagttctatagttcggctcatcaatctcaacgtaactttagcttgatttgacctctttggctcgccatcatgacttctaaatctagtgtcaagatcgaattcagtaccttctccaacgtcattgacggtaaatgcgtcagaacaaccccgggacagactcgtcatactctaaatcccgcgactctcgaggacaacccgaaggttccgatcacgactcgtgatgaagtcgatagagcagtcaatggggctcagagagcaggtaaactcgtgagtagcttcctctgatgagagactgttgcgctctgacccaaacatctgcttcaacagtgggcggctcttccgtgggaaactcgtcgagccaaattgaatgatttcttcgatgctctcgaagcaaactcggcgagtttcgcggagatgttggtaagagaacaaggcaagacgctgaatgaggcacgaggtgaaatgtacttaagtattcaattcctccgcggaacggtgactttagagctacctggcgaagaggaaattgatcgaaccgagcaacgtcaagtcatcaagcgctaccttccgctcggcgtcgctgttggtattgtgccttggaactatcctgttttcttggcttgtcaaagaatgggacaggctctgataacgggcaacgctttcattctcaaaccgtcaccatttgcaccatattgcaatcttaaaggtatggacgaacctgtcgcctatttacgaactttgatatcatctcagcgctaacgtaaatctagtaagtacgaagttatct

SEQ ID NO: 2439 - DNA, 1050 bp, Muscodor strobelii
  misc_feature: SGI cDNA ID NO. 560443
  misc_feature: Elevated expression when VOC is produced
  misc_feature: Encodes the peptide sequence at SEQ ID NO 2440
atggctgtcagtcgtaaatccagcaaaagcgacggtgctgcgttgctgaaagctgtactcttgcttcggattttctgcaacacaggatctgcaagcgaagctctatccaaatttgacgagtatgaattacttccggatgagagcctgagtctacttcagcaaaatgacgaggccatatgcacgagttgtaaaagcgatgttctgtcggtccataatataatcggaaggcgacatgatttcctacgtggacggttgaaatgccaagcatgttccgaagggtcgtctcttgccatattctctggaaaagactacgaggatatgaacgcagcgacaaacgaggcgactattgcgggtgatacttccgtgtccgaagagaattcgcgaaacaatgaggttcgagacatcagcaacgattttcatgacaactcgatctttcgaaatacggtatcttcagatggcttacaccattcgtcaaaggctctatccctactcactgatattcaagagcactacgaggaagacaagagtattgtgttttctttctggagacgcactctcgatcatgttgaaagcttatttcaagccaacggtattgaatatcgacgagtcgatggcaacatacatgtgtcccaacgaaaaaaacttctaacagagtttcaaaccaatgactctgttcgagtgcttctaatgacaataggaactggtgcgattggcctcaacaatctttctgtggcgaatcgcattcacattctcgagccccagtggaatccttccgtcgaggatcaagcgattggccgggtgagacgattagggcagaataagaaagtaagcgtcattcgctacatcatggagagaacgattgaagagagcattgaaactcggcagcttatgaagcttcaacttgcattaaagggtgggctgaagtcgtcggaccaggggatttctgagcgccagaagaggattgatcgtcttgatgcgctgagtgaactcatcaagtccaagatctcatctaagccagagaatagctcacagccagagcatatcgaatag

SEQ ID NO: 2440 - protein, 349 aa, Muscodor strobelii
  misc_feature: SGI Peptide ID NO. 560443
  misc_feature (192)..(271): Pfam Id: PF00271 Pfam Desc: Helicase conserved C-terminal domain
  misc_feature (15)..(303): NCBI GI: 145231016 Blast Desc: An01g13710 [Aspergillus niger] gi|134055899|emb|CAK37377.2| protein product [Aspergillus niger]
  misc_feature (1)..(327): NCBI GI: 189199576 Blast Desc: DNA repair protein rad5 [Pyrenophora tritici-repentis Pt-1C-BFP] gi|187983224|gb|EDU48712.1| DNA repair protein rad5 [Pyrenophora tritici-repentis Pt-1C-BFP]
  misc_feature (3)..(330): NCBI GI: 145604058 Blast Desc: MGG_11047 [Magnaporthe grisea 70-15] gi|145012150|gb|EDJ96806.1| MGG_11047 [Magnaporthe grisea 70-15]
  misc_feature (157)..(289): NCBI GI: 189201379 Blast Desc: PTRG_06693 [Pyrenophora tritici-repentis Pt-1C-BFP] gi|187984125|gb|EDU49613.1| PTRG_06693 [Pyrenophora tritici-repentis Pt-1C-BFP]
  misc_feature (2)..(331): NCBI GI: 171679323 Blast Desc: protein product [Podospora anserina] gi|170939287|emb|CAP64515.1| protein product [Podospora anserina]
  misc_feature (174)..(324): NCBI GI: 169608872 Blast Desc: SNOG_07521 [Phaeosphaeria nodorum SN15] gi|111063867|gb|EAT84987.1| SNOG_07521 [Phaeosphaeria nodorum SN15]
  misc_feature (14)..(321): NCBI GI: 169765752 Blast Desc: [Aspergillus oryzae RIB40] gi|83765202|dbj|BAE55345.1| protein product [Aspergillus oryzae]
  misc_feature (9)..(313): NCBI GI: 238482351 Blast Desc: helicase, [Aspergillus flavus NRRL3357] gi|220700464|gb|EED56802.1| helicase, [Aspergillus flavus NRRL3357]
  misc_feature (175)..(298): NCBI GI: 171681303 Blast Desc: protein product [Podospora anserina] gi|170940610|emb|CAP65838.1| protein product [Podospora anserina]
  misc_feature (14)..(302): NCBI GI: 212529810 Blast Desc: helicase, [Penicillium marneffei ATCC 18224] gi|210074460|gb|EEA28547.1| helicase, [Penicillium marneffei ATCC 18224]
  misc_feature: Useful for introducing or modulating the production of volatile compounds
MAVSRKSSKSDGAALLKAVLLLRIFCNTGSASEALSKFDEYELLPDESLSLLQQNDEAICTSCKSDVLSVHNIIGRRHDFLRGRLKCQACSEGSSLAIFSGKDYEDMNAATNEATIAGDTSVSEENSRNNEVRDISNDFHDNSIFRNTVSSDGLHHSSKALSLLTDIQEHYEEDKSIVFSFWRRTLDHVESLFQANGIEYRRVDGNIHVSQRKKLLTEFQTNDSVRVLLMTIGTGAIGLNNLSVANRIHILEPQWNPSVEDQAIGRVRRLGQNKKVSVIRYIMERTIEESIETRQLMKLQLALKGGLKSSDQGISERQKRIDRLDALSELIKSKISSKPENSSQPEHIE

SEQ ID NO: 2441 - DNA, 3240 bp, Muscodor strobelii
  misc_feature: SGI EST ID NO. CUFF.6215.1
  misc_feature: Variant of the nucleotide sequence at SEQ ID NO 2439
caaacttaaagctacttctatacatggaattaatatgtttccacctcctacgtccaactggctaccggaatatactttcagagagcatttgtttagatatttcactttcaatcaaccgcaaggatcctaaagagaaggtaaacgattatcaggcgctagagacccagctgcaagcaacttaggcttgcttagcatcctttgaggagcgacaatttgcacctgggaaacattgcaattgattagcaaaaaactagacgcgaaaatagctatagtacggacaagcttccacaatgttgcaccaaccagcaccaaagcggcattttgactcacttgagcgtcacgatgagagtgcaagcaaccatcatgctaagagacaatacaccaccaacaacaggccgcacagcgttcaaaccttcacactattaatcacctcttgaatcctgagcctgaaatcatatgttacggcatgttgaacaacatccagattcaattcctaaaaaggcaaagtatacaaacaatagaatttaccgaaacagggagaaacgacgagctatttgctgcgcttgatttacagatcagtaaaagtcgttgtgacgttcttgtagcaggtatgcacgtcgctacgatgaacagtaaaaccaactccgccgtcgcatcgctgtcttcagcagagtcaataacatggactggtatcctgctacaagaacaacttcaaaacaactcaactctgcccacaaaggcactttcttctgccccttcgaggctgacgtgtgggatgtcgttgatcgtgcatggtccagagtcaattggagaacgacttgccaaagacctctcccggagtcatctgttcttacaacgtccggtcccggtcgccgccgatgccgtgtacaaaaatccacagtctctcgatatgaccctacttggcaatcctgctctcctatcgccgatgttggatgacgagctccttcccgaccaagaacacatctcggatccggacgatgatgtggagatggatttgcttgacgtagtggacaacttaccaaagcaagataacttgcaggaggcggaggttgacatgagaatcataacccccctactacggtagttcatccacgaagaggaaaagattatgttctaatgcttacttattctctcttagccaccagaaagaagcggtcgacttcatagtttgcagagagtctcccgaagataaaaaactgcaacgcttatgggaaatcgaaaacactgagtccgaaactgcattatataggcacgttatagagggctccaagcgcgaagagcctgaggacatgcacggaggcatcttggcagatggaatgggactgggcaagacgttgacaatgcttgcgtgtgttgtagcgacgcttgaacgagcaaaagaattcgagtgtggtatgcacactgatatacaagacagtggagcacctcgaatgcggtcaagctctaccctcgtgatcttgccctcaatcttactgcttgatagctgggtggatgaactagaaaaacatgttacccctgagacgctgtcctattacaaataccacgggccaaatcggatgcttccatcctgctcgccacctgcgtataatctggtattcacgacatatggcactgtagctgcagattttcgtcacaaagaaggtgggatactgagccaattttactgatatcgcctcattcttgacgaagctcatattgtacggaattggtcgaccaagcagtttaaagccgtagcggatctttctgcgtctatccgatggtgccttacaggaactccaatacaaaattcccttagagatctcagttctctcgtcacattcctccgtctgcctattctctgcgatgctgcaactttccgaaagcatatagaacgcaatcgaaaaacatcatacgggacttatcagccagattatgcgaatctcagaactttgcttgggtcaatatgtctcagacgatgtacgtctactattttagaatcactgggcgtagaatattatactcggcgtccacctctatcggaagaagaacggaaacaatacgatacattaagcatcagatgcagtcaacaaattaaaatggctgtcagtcgtaaatccagcaaaagcgacggtgctgcgttgctgaaagctgtactcttgcttcggattttctgcaacacaggatctgcaagcgaagctctatccaaatttgacgagtatgaattacttccggatgagagcctgagtctacttcagcaaaatgacgaggccatatgcacgagttgtaaaagcgatgttctgtcggtccataatataatcggaaggcgacatgatttcctacgtggacggttgaaatgccaagcatgttccgaagggtcgtctcttgccatattctctggaaaagactacgaggatatgaacgcagcgacaaacgaggcgactattgcgggtgatacttccgtgtccgaagagaattcgcgaaacaatgaggttcgagacatcagcaacgattttcatgacaactcgatctttcgaaatacggtatcttcagatggcttacaccattcgtcaaaggctctatccctactcactgatattcaagagcactacgaggaagacaagagtattgtgttttctttctggagacgcactctcgatcatgttgaaagcttatttcaagccaacggtattgaatatcgacgagtcgatggcaacatacatgtgtcccaacgaaaaaaacttctaacagagtttcaaaccaatgactctgttcgagtgcttctaatgacaataggaactggtgcgattggcctcaacaatctttctgtggcgaatcgcattcacattctcgagccccagtggaatccttccgtcgaggatcaagcgattggccgggtgagacgattagggcagaataagaaagtaagcgtcattcgctacatcatggagagaacgattgaagagagcattgaaactcggcagcttatgaagcttcaacttgcattaaagggtgggctgaagtcgtcggaccaggggatttctgagcgccagaagaggattgatcgtcttgatgcgctgagtgaactcatcaagtccaagatctcatctaagccagagaatagctcacagccagagcatatcgaatagtcaattgcttaaccgagaagctattctcgaacgataaagatgacaaacttaattcagccgatttagcaaacaaaataatgtttattaagggtcg

SEQ ID NO: 2442 - DNA, 1242 bp, Muscodor strobelii
  misc_feature: SGI cDNA ID NO. 560444
  misc_feature: Elevated expression when VOC is produced
  misc_feature: Encodes the peptide sequence at SEQ ID NO 2443
atgttgcaccaaccagcaccaaagcggcattttgactcacttgagcgtcacgatgagagtgcaagcaaccatcatgctaagagacaatacaatcctagccaccaacaacaggccgcacagcgttcaaaccttcacactattaatcacctcttgaatcctgagcctgaaatcatatgttacggcatgttgaacaacatccagattcaattcctaaaaaggcaaagtatacaaacaatagaatttaccgaaacagggagaaacgacgagctatttgctgcgcttgatttacagatcagtaaaagtcgttgtgacgttcttgtagcaggtatgcacgtcgctacgatgaacagtaaaaccaactccgccgtcgcatcgctgtcttcagcagagtcaataacatggactggtatcctgctacaagaacaacttcaaaacaactcaactctgcccacaaaggcactttcttctgccccttcgaggctgacgtgtgggatgtcgttgatcgtgcatggtccagagtcaattggagaacgacttgccaaagacctctcccggagtcatctgttcttacaacgtccggtcccggtcgccgccgatgccgtgtacaaaaatccacagtctctcgatatgaccctacttggcaatcctgctctcctatcgccgatgttggatgacgagctccttcccgaccaagaacacatctcggatccggacgatgatgtggagatggatttgcttgacgtagtggacaacttaccaaagcaagataacttgcaggaggcggaggttgacatgagaatcataacccccctactacgccaccagaaagaagcggtcgacttcatagtttgcagagagtctcccgaagataaaaaactgcaacgcttatgggaaatcgaaaacactgagtccgaaactgcattatataggcacgttatagagggctccaagcgcgaagagcctgaggacatgcacggaggcatcttggcagatggaatgggactgggcaagacgttgacaatgcttgcgtgtgttgtagcgacgcttgaacgagcaaaagaattcgagtgtggtatgcacactgatatacaagacagtggagcacctcgaatgcggtcaagctctaccctcgtgatcttgccctcaatcttactgcttgatagctgggtggatgaactagaaaaacatgttacccctgagacgctctcatattgtacggaattggtcgaccaagcagtttaa

SEQ ID NO: 2443 - protein, 413 aa, Muscodor strobelii
  misc_feature: SGI Peptide ID NO. 560444
  misc_feature (274)..(397): Pfam Id: PF00176 Pfam Desc: SNF2 family N-terminal domain
  misc_feature (32)..(404): NCBI GI: 145231016 Blast Desc: An01g13710 [Aspergillus niger] gi|134055899|emb|CAK37377.2| protein product [Aspergillus niger]
  misc_feature (54)..(404): NCBI GI: 189201379 Blast Desc: PTRG_06693 [Pyrenophora tritici-repentis Pt-1C-BFP] gi|187984125|gb|EDU49613.1| PTRG_06693 [Pyrenophora tritici-repentis Pt-1C-BFP]
  misc_feature (53)..(397): NCBI GI: 261336158 Blast Desc: similar to helicase [Alternaria alternata]
  misc_feature (57)..(404): NCBI GI: 212539075 Blast Desc: alpha-1,6-mannosyltransferase subunit, [Penicillium marneffei ATCC 18224] gi|210069435|gb|EEA23526.1| alpha-1,6-mannosyltransferase subunit, [Penicillium marneffei
  misc_feature (152)..(397): NCBI GI: 46137913 Blast Desc: FG10471.1 [Gibberella zeae PH-1]
  misc_feature (165)..(382): NCBI GI: 145604058 Blast Desc: MGG_11047 [Magnaporthe grisea 70-15] gi|145012150|gb|EDJ96806.1| MGG_11047 [Magnaporthe grisea 70-15]
  misc_feature (56)..(397): NCBI GI: 242762199 Blast Desc: helicase, [Talaromyces stipitatus ATCC 10500] gi|218723523|gb|EED22940.1| helicase, [Talaromyces stipitatus ATCC 10500]
  misc_feature (155)..(397): NCBI GI: 256728050 Blast Desc: NECHADRAFT_122747 [Nectria haematococca mpVI 77-13-4]
  misc_feature (274)..(402): NCBI GI: 115384112 Blast Desc: [Aspergillus terreus NIH2624] gi|114196295|gb|EAU37995.1| [Aspergillus terreus NIH2624]
  misc_feature (141)..(383): NCBI GI: 115387833 Blast Desc: [Aspergillus terreus NIH2624] gi|114195506|gb|EAU37206.1| [Aspergillus terreus NIH2624]
  misc_feature: Useful for introducing or modulating the production of volatile compounds
MLHQPAPKRHFDSLERHDESASNHHAKRQYNPSHQQQAAQRSNLHTINHLLNPEPEIICYGMLNNIQIQFLKRQSIQTIEFTETGRNDELFAALDLQISKSRCDVLVAGMHVATMNSKTNSAVASLSSAESITWTGILLQEQLQNNSTLPTKALSSAPSRLTCGMSLIVHGPESIGERLAKDLSRSHLFLQRPVPVAADAVYKNPQSLDMTLLGNPALLSPMLDDELLPDQEHISDPDDDVEMDLLDVVDNLPKQDNLQEAEVDMRIITPLLRHQKEAVDFIVCRESPEDKKLQRLWEIENTESETALYRHVIEGSKREEPEDMHGGILADGMGLGKTLTMLACVVATLERAKEFECGMHTDIQDSGAPRMRSSSTLVILPSILLLDSWVDELEKHVTPETLSYCTELVDQAV

SEQ ID NO: 2444 - DNA, 3240 bp, Muscodor strobelii; identical to SEQ ID NO: 2441
  misc_feature: SGI EST ID NO. CUFF.6215.1
  misc_feature: Variant of the nucleotide sequence at SEQ ID NO 2442

SEQ ID NO: 2445 - DNA, 1269 bp, Muscodor strobelii
  misc_feature: SGI cDNA ID NO. 560445
  misc_feature: Encodes the peptide sequence at SEQ ID NO 2446
atgttgcaccaaccagcaccaaagcggcattttgactcacttgagcgtcacgatgagagtgcaagcaaccatcatgctaagagacaatacaatcctagccaccaacaacaggccgcacagcgttcaaaccttcacactattaatcacctcttgaatcctgagcctgaaatcatatgttacggcatgttgaacaacatccagattcaattcctaaaaaggcaaagtatacaaacaatagaatttaccgaaacagggagaaacgacgagctatttgctgcgcttgatttacagatcagtaaaagtcgttgtgacgttcttgtagcaggtatgcacgtcgctacgatgaacagtaaaaccaactccgccgtcgcatcgctgtcttcagcagagtcaataacatggactggtatcctgctacaagaacaacttcaaaacaactcaactctgcccacaaaggcactttcttctgccccttcgaggctgacgtgtgggatgtcgttgatcgtgcatggtccagagtcaattggagaacgacttgccaaagacctctcccggagtcatctgttcttacaacgtccggtcccggtcgccgccgatgccgtgtacaaaaatccacagtctctcgatatgaccctacttggcaatcctgctctcctatcgccgatgttggatgacgagctccttcccgaccaagaacacatctcggatccggacgatgatgtggagatggatttgcttgacgtagtggacaacttaccaaagcaagataacttgcaggaggcggaggttgacatgagaatcataacccccctactacgccaccagaaagaagcggtcgacttcatagtttgcagagagtctcccgaagataaaaaactgcaacgcttatgggaaatcgaaaacactgagtccgaaactgcattatataggcacgttatagagggctccaagcgcgaagagcctgaggacatgcacggaggcatcttggcagatggaatgggactgggcaagacgttgacaatgcttgcgtgtgttgtagcgacgcttgaacgagcaaaagaattcgagtgtgtactgcttgatagctgggtggatgaactagaaaaacatgttacccctgagacgctgtcctattacaaataccacgggccaaatcggatgcttccatcctgctcgccacctgcgtataatctggtattcacgacatatggcactgtagctgcagattttcgtcacaaagaaggtgggatactgagccaattttactga

SEQ ID NO: 2446 - protein, 422 aa, Muscodor strobelii
  misc_feature: SGI Peptide ID NO. 560445
  misc_feature (274)..(388): Pfam Id: PF00176 Pfam Desc: SNF2 family N-terminal domain
  misc_feature (32)..(421): NCBI GI: 145231016 Blast Desc: An01g13710 [Aspergillus niger] gi|134055899|emb|CAK37377.2| protein product [Aspergillus niger]
  misc_feature (54)..(410): NCBI GI: 189201379 Blast Desc: PTRG_06693 [Pyrenophora tritici-repentis Pt-1C-BFP] gi|187984125|gb|EDU49613.1| PTRG_06693 [Pyrenophora tritici-repentis Pt-1C-BFP]
  misc_feature (57)..(414): NCBI GI: 212539075 Blast Desc: alpha-1,6-mannosyltransferase subunit, [Penicillium marneffei ATCC 18224] gi|210069435|gb|EEA23526.1| alpha-1,6-mannosyltransferase subunit, [Penicillium marneffei
  misc_feature (53)..(417): NCBI GI: 261336158 Blast Desc: similar to helicase [Alternaria alternata]
  misc_feature (149)..(413): NCBI GI: 116196398 Blast Desc: CHGG_04797 [Chaetomium globosum CBS 148.51] gi|88180710|gb|EAQ88178.1| CHGG_04797 [Chaetomium globosum CBS 148.51]
  misc_feature (136)..(413): NCBI GI: 156062442 Blast Desc: SS1G_01337 [Sclerotinia sclerotiorum 1980] gi|154696673|gb|EDN96411.1| SS1G_01337 [Sclerotinia sclerotiorum 1980]
  misc_feature (156)..(413): NCBI GI: 154302115 Blast Desc: BC1G_09738 [Botryotinia fuckeliana B05.10] gi|150855512|gb|EDN30704.1| BC1G_09738 [Botryotinia fuckeliana B05.10]
  misc_feature (56)..(413): NCBI GI: 212530198 Blast Desc: SNF2 family helicase/ATPase, [Penicillium marneffei ATCC 18224] gi|210074654|gb|EEA28741.1| SNF2 family helicase/ATPase, [Penicillium marneffei ATCC 18224]
  misc_feature (58)..(413): NCBI GI: 121716002 Blast Desc: SNF2 family helicase/ATPase, [Aspergillus clavatus NRRL 1] gi|119403767|gb|EAW14184.1| SNF2 family helicase/ATPase, [Aspergillus clavatus NRRL 1]
  misc_feature (239)..(417): NCBI GI: 256727456 Blast Desc: SNF2 family DNA-dependent ATPase [Nectria haematococca mpVI 77-13-4]
MLHQPAPKRHFDSLERHDESASNHHAKRQYNPSHQQQAAQRSNLHTINHLLNPEPEIICYGMLNNIQIQFLKRQSIQTIEFTETGRNDELFAALDLQISKSRCDVLVAGMHVATMNSKTNSAVASLSSAESITWTGILLQEQLQNNSTLPTKALSSAPSRLTCGMSLIVHGPESIGERLAKDLSRSHLFLQRPVPVAADAVYKNPQSLDMTLLGNPALLSPMLDDELLPDQEHISDPDDDVEMDLLDVVDNLPKQDNLQEAEVDMRIITPLLRHQKEAVDFIVCRESPEDKKLQRLWEIENTESETALYRHVIEGSKREEPEDMHGGILADGMGLGKTLTMLACVVATLERAKEFECVLLDSWVDELEKHVTPETLSYYKYHGPNRMLPSCSPPAYNLVFTTYGTVAADFRHKEGGILSQFY

SEQ ID NO: 2447 - DNA, 3240 bp, Muscodor strobelii; identical to SEQ ID NO: 2441
  misc_feature: SGI EST ID NO. CUFF.6215.1
  misc_feature: Variant of the nucleotide sequence at SEQ ID NO 2445

SEQ ID NO: 2448 - DNA, 3669 bp, Muscodor strobelii
  misc_feature: SGI cDNA ID NO. 560446
  misc_feature: Elevated expression when VOC is produced
  misc_feature: Encodes the peptide sequence at SEQ ID NO 2449
atgtggattcgcgacgcgctcccaaagcagatcggaggcattagagccatactttacggatatgatagcaaacttcatagaagccagtcttttcaaaagataccagatctcgcaaaacaatttatcgactttcttcaggcttatggttggagctcgcgatccgcaaaacccctttccttcctcgcacacagcctgggggggcttgtacttaaagaagctttagtacggctggccagcgagtcgaacgaagagtacaagtgcattctaaatcttgtgctcggtgcgatcctcttcggcgtaccaaatttgggcatgaagaaagatcacttccaagtagttgtgggagacagtcctaaccaaggcctgatcgatgatataggcattcattcgccatatgttggtgaattgaatgaaagcttctttactacgcacaaactgcatgagcgtatcaaatgtctttgggcatatgagctcctgaaatctcccacagtaactatattgggaagcaaccagaataatagcagagaagctacccttatgaaagaatgtcaacaagccttcgcagctcaaaacagcgacgattcaaatccgagccatttcgatatgacagccgagttgcttgctttccggcagctatcgaccatcagtgataatgaagaaaatcgcttcgtatcaactagctttagcacaattcacacattctgtaatgaccttcaagcgcgccaggagcatgaacaaagtttgatgcatctccgacgtctcgaaccattcctcaaagcgatgaaagagcttgaagacctcaatgatgcccttggaatatcatacggcgattgctctctgaaggcatacacatgggggcccatggatctcatcttacgagcaagtcatcttcgtattaattttcggacgaagcagttttcgattatttggcttactttcaaatgggatgaaattccacgtttaggtactctgcaatcattgatatcctccgaaccatttttcaaagaaattctagcccaaatatacaaagatatcctatggtttcatgctgaactacttcacagactgaagcgacgaggatggaagaaggcattcagagcctcctggaccagcttcacataccagcttcaaccgatcaaagccaacctcactcgaaacaaaaagttgcttgagaacgacgtctcatttatagcatttcagcaagtacaggatcttcgatctagtgctttgcagactttccagacgaacgcttcggcacaatccactttctaccgtgccacagtgatgcagtggttagggtcctacgattgcagattacaacacgaaaagcaccagaagatacgatctatgtgccaagatccagggacctggttggtaaatgataggcagctgggaagctggctcaatcccgaaacatgcgaagcgccaacgctctggctgtgtgggataccgggagctgggaaatcagtgcttgcatcgataatcattgatcgagcacagcaagatcctggcaacactgtcttgtacttttactgcaagttcggtgacgagacgcgcaactctttcattagtcttgccagatcattgttgtctcaactgttgactcatgatccaggcattctgccggttctctacgagaaggccgcgttaagcggtgacgtcttactaacatctacgtcgtctgccgaagaaatacttcaactggcgttaggcagctgtgagaagaggtgtctcattatcatcgacggcgttgatgagtgtgggcgagatgatcgaaaagccatttcggctttcttccggtccctcgtagcagaagtacccgtggaagagacgggctcgatcagatgcttgtttgtcagtcaggacgatggcatcgcccgtcgtaatttccaagatctcccattgatcaaaattgcaaacgaaaatcagagcgaccttgaaaattttgctactgcgtggcaaatggaaatagaagggaaatttggcaatttacgatctaaaggattcaacatctctaaaatcatttctgctcgagctggaggaatgttcattttcgctgagctcttcgccaaatttctgataggtctaccaaactatgcaactctggtagagcagcttgatccagcaaaattgcctattaccctagatcacgtatatgagcgcattcttgaacgcatatttgaggataagaacgactatagctcaggcgctttccggcaagctctgggatggattgcctgcgcgagacggcctttgagatgggctgaaatacaaggagctctctgtattgatttggagacccaaatactcaaccaggaaagaaagctcttagatactcctagacggctctttgcctctttggtcgaagcgcaagccgatggcacgatcgagcttgttcatagcacggcacgcgagtttctcatccgcaaacgcgtaatccagaaacgcgaggccgaatacgagttggcaattttgagcatcggataccttgctttcccccaagtagataagaatcgtgccgatgaagaagttgaagttgatattctcagtggaatccatgtcttctacgactatgcatcggcatgctgggcgagtcatttactggacagtgtttcagagttgaagtctggagataagctcattgatctcaaagagagcttggagacattcatcgagctacattggtcgtctgaacacaaaccgctggcaaatgtcaaaagaattcaggattcattgaaatcattcaaagcttcaaccttctacgacgatattacgcaagctgttggatgggctcgcaagcagtctagcaaacatggccaaggtccgactcaagatgaacccttggacatatggcaagtgacccataagatcaggtcggtccttgagtcttttcagattcgtaggcggccagaaaatgaagaagttgtactccaagagttctacggcgacggatggttcaagtgccccagggtcaattgtctccattattatagagggttctgcagtatggaagagcggcagcaccatatcaacaagcatgaccgtccttatttatgctatgttcccggatgccacatggaagtattcggctacgcagtagcaaaggacctgaagaagcatcttctgaaatatcatggtatagatctatctgacgatacagatccgctcgaattcccgaatccgtcaaaacgggacgtggttagtcaagtcgagactcaagcaacctttgcttgcccagattgcgacaagaaatttacgagaaagcacaatttgactaatcacacacgatcacacacgggcgagaaggcatattcatgtgacctttgcgggcttgacttcatgcgatcggccgactgcgaacggcacaaacgtggacatgaaggaaagaagtttgtatgtaccggcgctttgagagacgggaacatatggggctgccagaattcgttcggacggcaggacaacctcataacccattaccgaagtcaaaccgggcaaagatgtttgaaaccaagattggaggatatattgcaagaatgtggcaatatagagctagtgtcaaccaaaagactcttcgaagacgaagtaggagtgaatgcagatgtcctccaggctgttggtagatcactgccggctattggagagctctgtaggctctgtgggctagattag

SEQ ID NO: 2449 - protein, 1222 aa, Muscodor strobelii
  misc_feature: SGI Peptide ID NO. 560446
  misc_feature (1076)..(1098): Pfam Id: PF00096 Pfam Desc: Zinc finger, C2H2 type
  misc_feature (1)..(1201): NCBI GI: 145231014 Blast Desc: An01g13700 [Aspergillus niger] gi|134055898|emb|CAK37376.1| protein product [Aspergillus niger]
  misc_feature (200)..(1174): NCBI GI: 115384114 Blast Desc: [Aspergillus terreus NIH2624] gi|114196296|gb|EAU37996.1| [Aspergillus terreus NIH2624]
  misc_feature (316)..(1174): NCBI GI: 189201381 Blast Desc: conserved [Pyrenophora tritici-repentis Pt-1C-BFP] gi|187984126|gb|EDU49614.1| conserved [Pyrenophora tritici-repentis Pt-1C-BFP]
  misc_feature (223)..(1168): NCBI GI: 171679325 Blast Desc: protein product [Podospora anserina] gi|170939288|emb|CAP64516.1| protein product [Podospora anserina]
  misc_feature (223)..(1130): NCBI GI: 242762193 Blast Desc: zinc finger protein, [Talaromyces stipitatus ATCC 10500] gi|218723522|gb|EED22939.1| zinc finger protein, [Talaromyces stipitatus ATCC 10500]
  misc_feature (223)..(1106): NCBI GI: 212529812 Blast Desc: conserved [Penicillium marneffei ATCC 18224] gi|210074461|gb|EEA28548.1| conserved [Penicillium marneffei ATCC 18224]
  misc_feature (205)..(1130): NCBI GI: 238482559 Blast Desc: zinc finger protein, [Aspergillus flavus NRRL3357] gi|220700568|gb|EED56906.1| zinc finger protein, [Aspergillus flavus NRRL3357]
  misc_feature (215)..(1124): NCBI GI: 115387835 Blast Desc: [Aspergillus terreus NIH2624] gi|114195507|gb|EAU37207.1| [Aspergillus terreus NIH2624]
  misc_feature (223)..(1130): NCBI GI: 116195250 Blast Desc: CHGG_04223 [Chaetomium globosum CBS 148.51] gi|88180136|gb|EAQ87604.1| CHGG_04223 [Chaetomium globosum CBS 148.51]
  misc_feature (170)..(1127): NCBI GI: 261336159 Blast Desc: C2H2 domain containing protein [Alternaria alternata]
  misc_feature: Useful for introducing or modulating the production of volatile compounds
MWIRDALPKQIGGIRAILYGYDSKLHRSQSFQKIPDLAKQFIDFLQAYGWSSRSAKPLSFLAHSLGGLVLKEALVRLASESNEEYKCILNLVLGAILFGVPNLGMKKDHFQVVVGDSPNQGLIDDIGIHSPYVGELNESFFTTHKLHERIKCLWAYELLKSPTVTILGSNQNNSREATLMKECQQAFAAQNSDDSNPSHFDMTAELLAFRQLSTISDNEENRFVSTSFSTIHTFCNDLQARQEHEQSLMHLRRLEPFLKAMKELEDLNDALGISYGDCSLKAYTWGPMDLILRASHLRINFRTKQFSIIWLTFKWDEIPRLGTLQSLISSEPFFKEILAQIYKDILWFHAELLHRLKRRGWKKAFRASWTSFTYQLQPIKANLTRNKKLLENDVSFIAFQQVQDLRSSALQTFQTNASAQSTFYRATVMQWLGSYDCRLQHEKHQKIRSMCQDPGTWLVNDRQLGSWLNPETCEAPTLWLCGIPGAGKSVLASIIIDRAQQDPGNTVLYFYCKFGDETRNSFISLARSLLSQLLTHDPGILPVLYEKAALSGDVLLTSTSSAEEILQLALGSCEKRCLIIIDGVDECGRDDRKAISAFFRSLVAEVPVEETGSIRCLFVSQDDGIARRNFQDLPLIKIANENQSDLENFATAWQMEIEGKFGNLRSKGFNISKIISARAGGMFIFAELFAKFLIGLPNYATLVEQLDPAKLPITLDHVYERILERIFEDKNDYSSGAFRQALGWIACARRPLRWAEIQGALCIDLETQILNQERKLLDTPRRLFASLVEAQADGTIELVHSTAREFLIRKRVIQKREAEYELAILSIGYLAFPQVDKNRADEEVEVDILSGIHVFYDYASACWASHLLDSVSELKSGDKLIDLKESLETFIELHWSSEHKPLANVKRIQDSLKSFKASTFYDDITQAVGWARKQSSKHGQGPTQDEPLDIWQVTHKIRSVLESFQIRRRPENEEVVLQEFYGDGWFKCPRVNCLHYYRGFCSMEERQHHINKHDRPYLCYVPGCHMEVFGYAVAKDLKKHLLKYHGIDLSDDTDPLEFPNPSKRDVVSQVETQATFACPDCDKKFTRKHNLTNHTRSHTGEKAYSCDLCGLDFMRSADCERHKRGHEGKKFVCTGALRDGNIWGCQNSFGRQDNLITHYRSQTGQRCLKPRLEDILQECGNIELVSTKRLFEDEVGVNADVLQAVGRSLPAIGELCRLCGLD

SEQ ID NO: 2450 - DNA, 5024 bp, Muscodor strobelii
  misc_feature: SGI EST ID NO. CUFF.6199.0
  misc_feature: Variant of the nucleotide sequence at SEQ ID NO 2448
actctgtactatgtcgagtaatagacattgctatgaccctgttgcgatccaatgcatttgatagtctcatttcgatcatctctaacccccaaaaggatcgtggattcggaattccttttttgaagctcattttctgtcccctttatatttcatctcccaacttcctagtgctttatgttcccgttcaggccgctcactcgagatggtgtctgtcaactcattgactacccatattgagcattgtatataaattagcaagatggaacaagatacgaatagatggtcaaagacagtctttcgattaagggggctgccattcagcattgcatcacgcgatgatgtcgcggatctagtgtgtaatgaactccgtccgccatggcctatgccttctgtctattcattatcgacgtcgcttaatcctcgcgaaaatccaaaaacgaaagtcgccaccatcatgttcggatcgataccatcggtaattcaaacttcacctgatgcaaatgaatggcatattcaaatgcgacgcggatcggaaatctatgatctcatattggatgtcaactttctgggaatgacaccacttaacgacgtgaagccattgtatcatacatgcgagtgagaggattgcttgtgaaatcacgcagaaggcggctgactattgtagctgtatcgctatttccggactcgctagtcatgcatttggatcctggcagccaaaaggtgacgacaaaactttcatgtggattcgcgacgcgctcccaaagcagatcggaggcattagagccatactttacggatatgatagcaaacttcatagaagccagtcttttcaaaagataccagatctcgcaaaacaatttatcgactttcttcaggcttatggttggagctcgcgatccgcaaaacccctttccttcctcgcacacagcctgggggggcttgtacttaaagaagctttagtacggctggccagcgagtcgaacgaagagtacaagtgcattctaaatcttgtgctcggtgcgatcctcttcggcgtaccaaatttgggcatgaagaaagatcacttccaagtagttgtgggagacagtcctaaccaaggcctgatcgatgatataggcattcattcgccatatgttggtgaattgaatgaaagcttctttactacgcacaaactgcatgagcgtatcaaatgtctttgggcatatgagctcctgaaatctcccacagtaactgtgagtagatgttgacacttgtttccgaacaaacactcgaaggctcacagaaataaaagctacgctctggtacagtagacaggggcggaaaactggctgttcttgtaagccgcgaatccgcgacatatagatttcacgaaacggatgtcccttccacgatccccattgatgcaacccattctgatatagtcaaatttccacgagactctcatactcttcatataattatctctaaagtatctcagatattgggaagcaaccagaataatagcagagaagctacccttatgaaagaatgtcaacaagccttcgcagctcaaaacagcgacgattcaaatccgagccatttcgatatgacagccgagttgcttgctttccggcagctatcgaccatcagtgataatgaagaaaatcgcttcgtatcaactagctttagcacaattcacacattctgtaatgaccttcaagcgcgccaggagcatgaacaaagtttgatgcatctccgacgtctcgaaccattcctcaaagcgatgaaagagcttgaagacctcaatgatgcccttggaatatcatacggcgattgctctctgaaggcatacacatgggggcccatggatctcatcttacgagcaagtcatcttcgtattaattttcggacgaagcagttttcgattatttggcttactttcaaatgtaggcaacgtgcacataccacgaaatatttgactgcattctgaacgtgtaccaagaaataggggatgaaattccacgtttaggtactctgcaatcattgatatcctccgaaccatttttcaaagaaattctagcccaaatatacaaagatatcctatggtttcatgctgaactacttcacagactgaagcgacgaggatggaagaaggcattcagagcctcctggaccagcttcacataccagcttcaaccgatcaaagccaacctcactcgaaacaaaaagttgcttgagaacgacgtctcatttatagcatttcagcaagtacaggatcttcgatctagtgctttgcagactttccagacgaacgcttcggcacaatccactttctaccgtgccacagtgatgcagtggttagggtcctacgattgcagattacaacacgaaaagcaccagaagatacgatctatgtgccaagatccagggacctggttggtaaatgataggcagctgggaagctggctcaatcccgaaacatgcgaagcgccaacgctctggctgtgtgggataccgggagctgggaaatcagtgcttgcatcgataatcattgatcgagcacagcaagatcctggcaacactgtcttgtacttttactgcaagttcggtgacgagacgcgcaactctttcattagtcttgccagatcattgttgtctcaactgttgactcatgatccaggcattctgccggttctctacgagaaggccgcgttaagcggtgacgtcttactaacatctacgtcgtctgccgaagaaatacttcaactggcgttaggcagctgtgagaagaggtgtctcattatcatcgacggcgttgatgagtgtgggcgagatgatcgaaaagccatttcggctttcttccggtccctcgtagcagaagtacccgtggaagagacgggctcgatcagatgcttgtttgtcagtcaggacgatggcatcgcccgtcgtaatttccaagatctcccattgatcaaaattgcaaacgaaaatcagagcgaccttgaaaattttgctactgcgtggcaaatggaaatagaagggaaatttggcaatttacgatctaaaggattcaacatctctaaaatcatttctgctcgagctggaggaatgttcattttcgctgagctcttcgccaaatttctgataggtctaccaaactatgcaactctggtagagcagcttgatccagcaaaattgcctattaccctagatcacgtatatgagcgcattcttgaacgcatatttgaggataagaacgactatagctcaggcgctttccggcaagctctgggatggattgcctgcgcgagacggcctttgagatgggctgaaatacaaggagctctctgtattgatttggagacccaaatactcaaccaggaaagaaagctcttagatactcctagacggctctttgcctctttggtcgaagcgcaagccgatggcacgatcgagcttgttcatagcacggcacgcgagtttctcatccgcaaacgcgtaatccagaaacgcgaggccgaatacgagttggcaattttgagcatcggataccttgctttcccccaagtagataagaatcgtgccgatgaagaagttgaagttgatattctcagtggaatccatgtcttctacgactatgcatcggcatgctgggcgagtcatttactggacagtgtttcagagttgaagtctggagataagctcattgatctcaaagagagcttggagacattcatcgagctacattggtcgtctgaacacaaaccgctggcaaatgtcaaaagaattcaggattcattgaaatcattcaaagcttcaaccttctacgacgatattacgcaagctgttggatgggctcgcaagcagtctagcaaacatggccaaggtccgactcaagatgaacccttggacatatggcaagtgacccataagatcaggtcggtccttgagtcttttcagattcgtaggcggccagaaaatgaagaagttgtactccaagagttctacggcgacggatggttcaagtgccccagggtcaattgtctccattattatagagggttctgcagtatggaagagcggcagcaccatatcaacaagcatgaccgtccttatttatgctatgttcccggatgccacatggaagtattcggctacgcagtagcaaaggacctgaagaagcatcttctgaaatatcatggtatagatctatctgacgatacagatccgctcgaattcccgaatccgtcaaaacgggacgtggttagtcaagtcgagactcaagcaacctttgcttgcccagattgcgacaagaaatttacgagaaagcacaatttgactaatcacacacgatcacacacgggcgagaaggcatattcatgtgacctttgcgggcttgacttcatgcgatcggccgactgcgaacggcacaaacgtggacatgaaggaaagaagtttgtatgtaccggcgctttgagagacgggaacatatggggctgccagaattcgttcggacggcaggacaacctcataacccattaccgaagtcaaaccgggcaaagatgtttgaaaccaagattggaggatatattgcaagaatgtggcaatatagagctagtgtcaaccaaaagactcttcgaagacgaagtaggagtgaatgcagatgtcctccaggctgttggtagatcactgccggctattggagagctctgtaggctctgtgggctagattagctgcactttcggttcccaaatgaactagtcaggtgcaaagtcataacgtcttatgacatggcatgctccaaaagggtgaatatttgcctctaaaaataatacttggacgctcaaaggaccgctaaatacctatctacacatctgcagtagctcgtctccaatacaatgtgaaggcaattttttgctacgtacactgattgtatcgtcttggccgtcgagtcgtgcctgtacggtgttccagtggctgtgatagtctcccatcttactggtcgagccccgcatctgtaaggcctccaggcgaaatcgtcagc

SEQ ID NO: 2451 - DNA, 1035 bp, Muscodor strobelii
  misc_feature: SGI cDNA ID NO. 560447
  misc_feature: Encodes the peptide sequence at SEQ ID NO 2452
atggcaactcaggctaccgtcagacgacttgggaagaatggcccgaacgttgccgcattaggcttcggcatgattgcgttatcatcaggacattatggaacactccctagcaatgaagagagtctcgaagttctttctcgggctcacgagctgggttacaccttttgggatagttctgatctctacggtagcaacgaggaactcattggtgaatgggtgaagaaaacgggcaagcgtgatgaagtgttcattgcaactaaatttggcttcgtcaaaggcagtaagacatacgaggtcaatagctctgctgcgtactgcaaacaatgctgtgcagaaagtcttgctagacttaaggtcgatttcatcgacctgtactacctacacagtccaaatcccaatactccgattgaagaaacgatgagagcactaaaagagctacaagacgagggaaaaattaaacacattggtctctcgtcgatttcctcttcctcattacgtcgtgcttacaagatcgcaccggttgcggcatgtcagatagattattccgtattcatgcgggacgtagaaggacttactggggataatttgattgccacatgccgggaacttgggatcgccatcgttgctgccatgcctctaggtcgtggtatgatcacatccagtttcagcaataatgaaacctccgatgacgcacaagacattcgttcaaaggcaatgcctcgattccaggaagctaaccgcgagcataacgccaaaattatcgcgagcttcaaaggattcgcagacaagaagggatgtacggtctctcaacttgctcttgcatggctgttgaagcaaggcaatgacattatcccaatcccaggcactaagcgagtgaagtacgtggaggagaattgggcagctactggtatcgctctcactgacgaggaggaaagcgaaattagagcttttgtggaaaggaatgaggttgcgggcaaggtcatgcccccgggaatggaggattattattatcgagacacaaaggaagaacagtag

SEQ ID NO: 2452 - protein, 344 aa, Muscodor strobelii
  misc_feature: SGI Peptide ID NO. 560447
  misc_feature (11)..(319): Pfam Id: PF00248 Pfam Desc: Aldo/keto reductase family
  misc_feature (10)..(343): NCBI GI: 256728942 Blast Desc: NECHADRAFT_40120 [Nectria haematococca mpVI 77-13-4]
  misc_feature (8)..(343): NCBI GI: 119476590 Blast Desc: aldo/keto reductase [Neosartorya fischeri NRRL 181] gi|119407362|gb|EAW17311.1| aldo/keto reductase [Neosartorya fischeri NRRL 181]
  misc_feature (8)..(343): NCBI GI: 70996859 Blast Desc: aldo-keto reductase (AKR13) [Aspergillus fumigatus Af293] gi|66850820|gb|EAL91146.1| aldo-keto reductase (AKR13), [Aspergillus fumigatus Af293] gi|159127085|gb|EDP52201.1| A1163]
  misc_feature (10)..(342): NCBI GI: 242798005 Blast Desc: aldo-keto reductase (AKR13), [Talaromyces stipitatus ATCC 10500] gi|218716424|gb|EED15845.1| aldo-keto reductase (AKR13), [Talaromyces stipitatus ATCC 10500]
  misc_feature (7)..(343): NCBI GI: 212533389 Blast Desc: aldo-keto reductase (AKR13), [Penicillium marneffei ATCC 18224] gi|210072215|gb|EEA26304.1| aldo-keto reductase (AKR13), [Penicillium marneffei ATCC 18224]
  misc_feature (3)..(343): NCBI GI: 242812857 Blast Desc: aldo/keto reductase, [Talaromyces stipitatus ATCC 10500] gi|218714384|gb|EED13807.1| aldo/keto reductase, [Talaromyces stipitatus ATCC 10500]
  misc_feature (3)..(343): NCBI GI: 212544578 Blast Desc: aldo/keto reductase, [Penicillium marneffei ATCC 18224] gi|210065412|gb|EEA19506.1| aldo/keto reductase, [Penicillium marneffei ATCC 18224]
  misc_feature (7)..(343): NCBI GI: 242821974 Blast Desc: aldo/keto reductase, [Talaromyces stipitatus ATCC 10500] gi|218712711|gb|EED12136.1| aldo/keto reductase, [Talaromyces stipitatus ATCC 10500]
  misc_feature (4)..(325): NCBI GI: 39963222 Blast Desc: MGG_09715 [Magnaporthe grisea 70-15] gi|145015504|gb|EDK00041.1| MGG_09715 [Magnaporthe grisea 70-15]
  misc_feature (1)..(336): NCBI GI: 171681118 Blast Desc: protein product [Podospora anserina] gi|170940517|emb|CAP65745.1| protein product [Podospora anserina]
  misc_feature (13)..(325): SWISSPROT Homolog: EC 1.1.1.65 Pyridoxine 4-dehydrogenase
MATQATVRRLGKNGPNVAALGFGMIALSSGHYGTLPSNEESLEVLSRAHELGYTFWDSSDLYGSNEELIGEWVKKTGKRDEVFIATKFGFVKGSKTYEVNSSAAYCKQCCAESLARLKVDFIDLYYLHSPNPNTPIEETMRALKELQDEGKIKHIGLSSISSSSLRRAYKIAPVAACQIDYSVFMRDVEGLTGDNLIATCRELGIAIVAAMPLGRGMITSSFSNNETSDDAQDIRSKAMPRFQEANREHNAKIIASFKGFADKKGCTVSQLALAWLLKQGNDIIPIPGTKRVKYVEENWAATGIALTDEEESEIRAFVERNEVAGKVMPPGMEDYYYRDTKEEQ

SEQ ID NO: 2453 - DNA, 1779 bp, Muscodor strobelii
  misc_feature: SGI cDNA ID NO. 560448
  misc_feature: Encodes the peptide sequence at SEQ ID NO 2454
atgaagactggagtctccaggaaggagtcccgaaggccgaaaatcaggtcaaagtctgggtgcaatacatgcaaaatacgcaaagttaaatgcgacgaagcataccctgcatgtaacagatgcgtctcttcagggcgaagttgtgatggttatggcatttggggaggtggggttcagtccttcaaaacgagtagccaccttgggggcaatgggtctcgtgctgttgttgcgattccgcaactcacacgtctatcttctctcgtgggtagtacactggaaaaggagtactttgactggttccaacatcggacattggcgaagatccctggtagagctgggactgcagacgacttctggtgtacgctgctcttacaggcctgtttcaacgaacgagctattttcaatgccgttcttgctctaagttctgtccatcgaagtggctgcctgcgtaatgcgcaaaaagagccacatgatacccaatctgacaaaggagagcttttcgctctgcaccattacctaagagccattgcggacctacaaccgtgcttctcagcgaaggatcgagcgtcattccgagtaacacttattacgtgtgttatcttcttcgcagcagattgtatgcgctcacatttcgttaccgcccagaatcatgtccgcggtggtttgaaactcttgacggatatgcagctagcctttgccgactcgttggagacaagtccgcctgacaatctcacacatcctggaattaaccacaatccaagtgaaatttggacaatggagatgttctcacgtttatatgttcaagctgaggttttatgcccggcctttgaccccctacatattcccctgcctgttcccgacctaagtctagacttgacacatttcacctcactcagaattgcgtggctcgaaatcgaccggcttttctgtcgtgtgtttgaactgaactataaagctcgatgtaacactacagatccttcgtcgttgcacacacctgctgcgcttgaggcgactcaccaggctcttcttgcaagtctagagcgatggtctaagatatacgaagcatcaagagagacactaggtaaacgaaccattggacagcgcaagatcatcctggttctatcaatgtatcatacgatggccacgatcatggcgcatactgccttgcatccaggagacgaagcgatatttgattcacacacgagctcgttccttttcatcatggagcagatgacttgccttttgttgtttccccaagacacagatgagtggacgcatagtatgcctttcataagaagtaagcgtccgacaagcaatcaattcgatattgcacggtccatggtcgatgttggttgcattgctcaagtttactacactgcaatcaaatgtcgaaaccacagcatcaggctccgagctgtcgcttatcttgaagctatgtgccatcgagaggggttatgggatgctaagatcacgtctatcattgcaaggaaagtgatggaactagaggagcagggttactacagcacgtttgaagcccaagatacatttcaaacaaaagcacagtctctgacattgccactcctccaagccgaccccagctttatgtcactgcccgttctacctgaatcaaaacgtttacgagacgtcgaaattgtgtattctggtgcgccgctggataatgtcatgctgttctgtcaaggcaagcatggcggaagcgtccaaagagtttgcattggagaatacgatgtcacttcaaacaaatgggcagatatggcatga

SEQ ID NO: 2454 - protein, 592 aa, Muscodor strobelii
  misc_feature: SGI Peptide ID NO. 560448
  misc_feature (19)..(58): Pfam Id: PF00172 Pfam Desc: Fungal Zn(2)-Cys(6) binuclear cluster domain
  misc_feature (19)..(51): Pfam Id: PF00172 Pfam Desc: Fungal Zn(2)-Cys(6) binuclear cluster domain
  misc_feature (14)..(587): NCBI GI: 119476592 Blast Desc: C6 zinc finger domain protein [Neosartorya fischeri NRRL 181] gi|119407363|gb|EAW17312.1| C6 zinc finger domain protein [Neosartorya fischeri NRRL 181]
  misc_feature (14)..(589): NCBI GI: 212533391 Blast Desc: conserved [Penicillium marneffei ATCC 18224] gi|210072216|gb|EEA26305.1| conserved [Penicillium marneffei ATCC 18224]
  misc_feature (14)..(592): NCBI GI: 242798010 Blast Desc: conserved [Talaromyces stipitatus ATCC 10500] gi|218716425|gb|EED15846.1| conserved [Talaromyces stipitatus ATCC 10500]
  misc_feature (93)..(587): NCBI GI: 70996861 Blast Desc: conserved [Aspergillus fumigatus Af293] gi|66850821|gb|EAL91147.1| conserved [Aspergillus fumigatus Af293] gi|159127084|gb|EDP52200.1| conserved [Aspergillus A1163]
  misc_feature (2)..(590): NCBI GI: 242821979 Blast Desc: conserved [Talaromyces stipitatus ATCC 10500] gi|218712712|gb|EED12137.1| conserved [Talaromyces stipitatus ATCC 10500]
  misc_feature (18)..(503): NCBI GI: 256723710 Blast Desc: NECHADRAFT_3658 [Nectria haematococca mpVI 77-13-4]
  misc_feature (22)..(591): NCBI GI: 261354220 Blast Desc: C6 zinc finger domain-containing protein [Verticillium albo-atrum VaMs.102]
  misc_feature (6)..(551): NCBI GI: 145242388 Blast Desc: An09g04980 [Aspergillus niger] gi|134078359|emb|CAK40351.1| protein product [Aspergillus niger]
  misc_feature (11)..(551): NCBI GI: 256728964 Blast Desc: NECHADRAFT_80151 [Nectria haematococca mpVI 77-13-4]
  misc_feature (259)..(590): NCBI GI: 256729146 Blast Desc: NECHADRAFT_80102 [Nectria haematococca mpVI 77-13-4]
MKTGVSRKESRRPKIRSKSGCNTCKIRKVKCDEAYPACNRCVSSGRSCDGYGIWGGGVQSFKTSSHLGGNGSRAVVAIPQLTRLSSLVGSTLEKEYFDWFQHRTLAKIPGRAGTADDFWCTLLLQACFNERAIFNAVLALSSVHRSGCLRNAQKEPHDTQSDKGELFALHHYLRAIADLQPCFSAKDRASFRVTLITCVIFFAADCMRSHFVTAQNHVRGGLKLLTDMQLAFADSLETSPPDNLTHPGINHNPSEIWTMEMFSRLYVQAEVLCPAFDPLHIPLPVPDLSLDLTHFTSLRIAWLEIDRLFCRVFELNYKARCNTTDPSSLHTPAALEATHQALLASLERWSKIYEASRETLGKRTIGQRKIILVLSMYHTMATIMAHTALHPGDEAIFDSHTSSFLFIMEQMTCLLLFPQDTDEWTHSMPFIRSKRPTSNQFDIARSMVDVGCIAQVYYTAIKCRNHSIRLRAVAYLEAMCHREGLWDAKITSIIARKVMELEEQGYYSTFEAQDTFQTKAQSLTLPLLQADPSFMSLPVLPESKRLRDVEIVYSGAPLDNVMLFCQGKHGGSVQRVCIGEYDVTSNKWADMA

SEQ ID NO: 2455 - DNA, 3103 bp, Muscodor strobelii
  misc_feature: SGI EST ID NO. CUFF.6183.0
  misc_feature: Variant of the nucleotide sequence at SEQ ID NO 2453
cttgtatctaactaggtattgtcagcgcagttggatcaatggcgcagggagtttggatacccaatcagattgagaaattgccgaggacaccaatagaatatccatgtcccccacaatttgccgcgccgcattggcaacgacaaactgcaacacccatcaccgcagctcatcactcgcctgccgtccattgccagtgattgattgatacgtatagctccggcaacactgacattttctctcggtgtttcatgcacaccgtgtccgcgcattctcaagcgccaatatgaagactggagtctccaggaaggagtcccgaaggccgaaaatcaggtcaaagtctgggtgcaatacatgcaaaatacgcaaagttaaatgcgacgaagcataccctgcatgtaacagatgcgtctcttcagggcgaagttgtgatggttatggcatttggggaggtggggttcagtccttcaaaacgagtagccaccttgggggcaatgggtctcgtgctgttgttgcgattccgcaactcacacgtctatcttctctcgtgggtagtacactggaaaaggagtactttgactggttccaacatcggacattggcgaagatccctggtagagctgggactgcagacgacttctggtgtacgctgctcttacaggcctgtttcaacgaacgagctattttcaatgccgttcttgctctaagttctgtccatcgaagtggctgcctgcgtaatgcgcaaaaagagccacatgatacccaatctgacaaaggagagcttttcgctctgcaccattacctaagagccattgcggacctacaaccgtgcttctcagcgaaggatcgagcgtcattccgagtaacacttattacgtgtgttatcttcttcgcagcagattgtatgcgctcacatttcgttaccgcccagaatcatgtccgcggtggtttgaaactcttgacggatatgcagctagcctttgccgactcgttggagacaagtccgcctgacaatctcacacatcctggaattaaccacaatccaagtgaaatttggacaatggagatgttctcacgtttatatgttcaagctgaggttttatgcccggcctttgaccccctacatattcccctgcctgttcccgacctaagtctagacttgacacatttcacctcactcagaattgcgtggctcgaaatcgaccggcttttctgtcgtgtgtttgaactgaactataaagctcgatgtaacactacagatccttcgtcgttgcacacacctgctgcgcttgaggcgactcaccaggctcttcttgcaagtctagagcgatggtctaagatatacgaagcatcaagagagacactaggtaaacgaaccattggacagcgcaagatcatcctggttctatcaatgtatcatacgatggccacgatcatggcgcatactgccttgcatccaggagacgaagcgatatttgattcacacacgagctcgttccttttcatcatggagcagatgacttgccttttgttgtttccccaagacacagatgagtggacgcatagtatgcctttcataagaagtaagcgtccgacaagcaatcaattcgatattgcacggtccatggtcgatgttggttgcattgctcaagtttactacactgcaatcaaatgtcgaaaccacagcatcaggctccgagctgtcgcttatcttgaagctatgtgccatcgagaggggttatgggatgctaagatcacgtctatcattgcaaggaaagtgatggaactagaggagcagggttactacagcacgtttgaagcccaagatacatttcaaacaaaagcacagtctctgacattgccactcctccaagccgaccccagctttatgtcactgcccgttctacctgaatcaaaacgtttacgagacgtcgaaattgtgtattctggtgcgccgctggataatgtcatgctgttctgtcaaggcaagcatggcggaagcgtccaaagagtttgcattggagaatacgatgtcacttcaaacaaatgggcagatatggcatgaatgcaggtgatggacctgactttcctttattgtttgctacactgagctatcaatccataggagttgaatgcagctatggctttaaagtaggaaaaggatttgcgggcataattaacccttatagcgaacctagtgagccaattcctagacgttcctcataggcgcaagtaaagcgctctcgtactcaccgcccaagtggatgacatgagttccttgattccgactagctggcgtctctacccgctgctcatcaacgaatcgcggattggaatcggcgcccaactcaagaaattcgacgtcggagcctggggcgaacgtggtgccatatgaaggaattcttatgcgtgccactccatacttgaagacgtcgagagtggttggaatgacgggtgcaggtcgtattgttaatacgatttgctcgcctcgatgaaaccgaagagctgtaggccacaggccaatctgaacaggcactatttgccccgggtttaacaactcctcgtgatggtgagtatgatggggttcaagctccgttgagagttcgtgttccagtgcgcgatgagacactcgtaagcagccagtaacggaatttatctttggagtgtcttctacgccgggtatcgtgaatttattgccatctttgtcgcatttctcgatggaaaccgagagctccatatcatttgaaccgattgcttcgacccacaagaggagattcatgtacccaatcaactctacatctcgcgcgaaagtgtatgagaatgtaagagatgggtcgccagttccacagtcatacgaaactgcagcggttacgctgggacgatttttcgaaagcgtgccatcgggatggaggcagaacttctcagtcgcgagtcccggtacgggccatgcttcctccggccgatcaacagagtcgtcgtgtccaggatcaagcaccgcgatccgaactcgcggagtctgcttccactcattgtcgatgccctttagatagaaatcaaagaactttcgcaagtcttcgacatactccgacttatagtaatcagtcca

SEQ ID NO: 2456 - DNA, 1887 bp, Muscodor strobelii
  misc_feature: SGI cDNA ID NO. 560449
  misc_feature: Encodes the peptide sequence at SEQ ID NO 2457
atgacgaagacgagggtccatcgtaatgtcactgaagccatggactctgtacctggcacgctccgtatttatgggaacagttcgtatgctgttccacatcgtcgtcaacgtccttctactgcagctcgcgctcgatatcccggattcaagagcgagacagtgacccttcgtgccggcaccgttcgacgcgttggggcaaagccactgccatgcgacatcgtttttgaacgagactttcctgtcaaacttcgcgatggtatcacgatatatacggatatttttcgtcctgtcggagttgataaagttccatcgatagtcgcctggagcccttatggcaaacagattggcggggcctggttagatgacgtccctgatcgagctggagtaccacttgatgcagtctctgagctccagaaatttgagggacctgatcccgcacactgggttaatcaaggatatgctgttttgaatcctgattcgcgcggtgcgtatgcttcagaaggaaatatgacgttcttcggacgccagcttgcggaggatgggttcgatttcatcgaatggactgctcgccaaaactggagctgtggaaaggtcgcaatgtctggcaactcatggctcgcgatttcccaatggttcattgcagctgaggaaccaccgcacttgactgcaattgcaccctgggaaggctttacagacatgtttcgtgcaatgacaaatagaggtggcattccatcgccgaatttcacggaggtgatcataacaacgaccatggccggagaaagctacgtggaagatgtggcgcaaatgagtatccatcagcagactatgaatgagtactggcaagacaagagagcgaaactggagcgcatccgaataccggcgtacgttgtgtcaagttacactaatcccatccacacccaagggactttcgatgggttccgatctatcgcttcgcaggagaagtggctgagagtacataacgagtttgaatggactgattactataagtcggagtatgtcgaagacttgcgaaagttctttgatttctatctaaagggcatcgacaatgagtggaagcagactccgcgagttcggatcgcggtgcttgatcctggacacgacgactctgttgatcggccggaggaagcatggcccgtaccgggactcgcgactgagaagttctgcctccatcccgatggcacgctttcgaaaaatcgtcccagcgtaaccgctgcagtttcgtatgactgtggaactggcgacccatctcttacattctcatacactttcgcgcgagatgtagagttgattgggtacatgaatctcctcttgtgggtcgaagcaatcggttcaaatgatatggagctctcggtttccatcgagaaatgcgacaaagatggcaataaattcacgatacccggcgtagaagacactccaaagataaattccgttactggctgcttacgagtgtctcatcgcgcactggaacacgaactctcaacggagcttgaaccccatcatactcaccatcacgaggagttgttaaacccggggcaaatagtgcctgttcagattggcctgtggcctacagctcttcggtttcatcgaggcgagcaaatcgtattaacaatacgacctgcacccgtcattccaaccactctcgacgtcttcaagtatggagtggcacgcataagaattccttcatatggcaccacgttcgccccaggctccgacgtcgaatttcttgagttgggcgccgattccaatccgcgattcgttgatgagcagcgggtagagacgccagctagtcggaatcaaggaactcatgtcatccacttgggcggtgagtacgagagcgctttacttgcgcctatgaggaacgtctag

SEQ ID NO: 2457 - protein, 628 aa, Muscodor strobelii
  misc_feature: SGI Peptide ID NO. 560449
  misc_feature (85)..(335): Pfam Id: PF02129 Pfam Desc: X-Pro dipeptidyl-peptidase (S15 family)
  misc_feature (344)..(622): Pfam Id: PF08530 Pfam Desc: X-Pro dipeptidyl-peptidase C-terminal non-catalytic domain
  misc_feature (85)..(251): Pfam Id: PF02129 Pfam Desc: X-Pro dipeptidyl-peptidase (S15 family)
  misc_feature (344)..(544): Pfam Id: PF08530 Pfam Desc: X-Pro dipeptidyl-peptidase C-terminal non-catalytic domain
  misc_feature (20)..(625): NCBI GI: 189461375 Blast Desc: BACCOP_02030 [Bacteroides coprocola DSM 17136] gi|189431904|gb|EDV00889.1| BACCOP_02030 [Bacteroides coprocola DSM 17136]
  misc_feature (21)..(375): NCBI GI: 110768874 Blast Desc: , partial [Apis mellifera]
  misc_feature (53)..(624): NCBI GI: 222147973 Blast Desc: acylase and diesterase protein [Agrobacterium vitis S4] gi|221734961|gb|ACM35924.1| acylase and diesterase protein [Agrobacterium vitis S4]
  misc_feature (67)..(626): NCBI GI: 284087892 Blast Desc: NAEGRDRAFT_58783 [Naegleria gruberi]
  misc_feature (67)..(626): NCBI GI: 227523937 Blast Desc: S15 family peptidase [Lactobacillus hilgardii ATCC 8290] gi|227088957|gb|EEI24269.1| S15 family peptidase [Lactobacillus hilgardii ATCC 8290]
  misc_feature (43)..(551): NCBI GI: 115402655 Blast Desc: [Aspergillus terreus NIH2624] gi|114189250|gb|EAU30950.1| [Aspergillus terreus NIH2624]
  misc_feature (49)..(544): NCBI GI: 226223119 Blast Desc: acylase [Listeria monocytogenes Clip81459] gi|225875581|emb|CAS04284.1| acylase [Listeria monocytogenes Clip80459]
  misc_feature (49)..(625): NCBI GI: 116492807 Blast Desc: acyl esterase [Pediococcus pentosaceus ATCC 25745] gi|116102957|gb|ABJ68100.1| acyl esterase [Pediococcus pentosaceus ATCC 25745]
  misc_feature (49)..(544): NCBI GI: 47094719 Blast Desc: hydrolase, CocE/NonD family [Listeria monocytogenes str. 1/2a F6854] gi|254900281|ref|ZP_05260205.1| CocE/NonD family hydrolase [Listeria monocytogenes J0161] CocE/NonD family J2818]
  misc_feature (49)..(544): NCBI GI: 47093118 Blast Desc: hydrolase, CocE/NonD family [Listeria monocytogenes str. 4b H7858] gi|47018491|gb|EAL09248.1| hydrolase, CocE/NonD family [Listeria monocytogenes str. 4b H7858]
MTKTRVHRNVTEAMDSVPGTLRIYGNSSYAVPHRRQRPSTAARARYPGFKSETVTLRAGTVRRVGAKPLPCDIVFERDFPVKLRDGITIYTDIFRPVGVDKVPSIVAWSPYGKQIGGAWLDDVPDRAGVPLDAVSELQKFEGPDPAHWVNQGYAVLNPDSRGAYASEGNMTFFGRQLAEDGFDFIEWTARQNWSCGKVAMSGNSWLAISQWFIAAEEPPHLTAIAPWEGFTDMFRAMTNRGGIPSPNFTEVIITTTMAGESYVEDVAQMSIHQQTMNEYWQDKRAKLERIRIPAYVVSSYTNPIHTQGTFDGFRSIASQEKWLRVHNEFEWTDYYKSEYVEDLRKFFDFYLKGIDNEWKQTPRVRIAVLDPGHDDSVDRPEEAWPVPGLATEKFCLHPDGTLSKNRPSVTAAVSYDCGTGDPSLTFSYTFARDVELIGYMNLLLWVEAIGSNDMELSVSIEKCDKDGNKFTIPGVEDTPKINSVTGCLRVSHRALEHELSTELEPHHTHHHEELLNPGQIVPVQIGLWPTALRFHRGEQIVLTIRPAPVIPTTLDVFKYGVARIRIPSYGTTFAPGSDVEFLELGADSNPRFVDEQRVETPASRNQGTHVIHLGGEYESALLAPMRNV

SEQ ID NO: 2458 - DNA, 552 bp, Muscodor strobelii
  misc_feature: SGI cDNA ID NO. 560450
  misc_feature: Elevated expression when VOC is produced
  misc_feature: Encodes the peptide sequence at SEQ ID NO 2459
atgcagttctactcatatttgtcgaaggcagcactcctgctccttgccctcgccctgcctcaagaagtcaatgcaggaggctgctacaacacgggacctgtctgcggtactctttgtgggaaagtggtcaataactccaagtggccgcttcgatacgcagagctcggaagtcatgacggagccggtgttgccgggaactgcgacgtctataactggaatggtggcagcggtagtgttggctacagtgagaagattgtccagtgcacccaagtcactctcggtgtcggcggccatgccgggggtagcggtcttgatgttgatggtgtcacatttgccgataggcgctggcgtatcatctgggagagcggcaagagttacgacttcgcacctggtatggtcgggttccggagtgtcgagtcaagtgtacttgcgacattgatattcttgggaaatcatcctgtgttggacagtgaggcagtcggtgctttagcatctttcaaattaggagaagagggacaagaaaggagtgtcaaatgtgaggtcaagacgtga

SEQ ID NO: 2459 - protein, 183 aa, Muscodor strobelii
  misc_feature: SGI Peptide ID NO. 560450
  misc_feature: Useful for introducing or modulating the production of volatile compounds
MQFYSYLSKAALLLLALALPQEVNAGGCYNTGPVCGTLCGKVVNNSKWPLRYAELGSHDGAGVAGNCDVYNWNGGSGSVGYSEKIVQCTQVTLGVGGHAGGSGLDVDGVTFADRRWRIIWESGKSYDFAPGMVGFRSVESSVLATLIFLGNHPVLDSEAVGALASFKLGEEGQERSVKCEVKT

SEQ ID NO: 2460 - DNA, 1017 bp, Muscodor strobelii
  misc_feature: SGI cDNA ID NO. 560451
  misc_feature: Elevated expression when VOC is produced
  misc_feature: Encodes the peptide sequence at SEQ ID NO 2461
atggagaacccctcggtgtttctttacggaccgcacaaggcgaaaatagaaaacagaccagtccctaaactaaattcgacacacgatgtgatcgtcaggatcgcttatgttggtgtttgcggaagtcatgtccatttttgggatcacggcggcggcgagacgcccgtgacagagcctctagtgatgggtcatgaagcgtcgggcatcgtgcatgccgttggtccagacgtcactaacttgaagcccggcgaccgcgtagctcgagcctggagtgccctgtcgcagcttaaaccaaaagatatttcgtatcatggtactcttacaaagttcttttcaacttcttctgacttctgctacaaaataccggatacaatgtctctccaagaggcagtgttaacagagccactggctgtaggcgttcatgctgcaaacctggctggcattcggccagggcacagggtggttgtgtttggtgccggaacagtcggagtgctgtgcgcagctgtcgcgaaagcgtttggcgcggagatcgtattgtctgtagacattctcaaaaagaagattgcgttcgcgaagacttacatagggggagatgtcggtcgcactgcactagtcgatgctacactcacgccggaggaaaccgcagggagacttccaacagactatgaatcaggagaacgcgttgacgcggtgatagaagcatccggggccgaagcttccgtaaccaccggtatacatgtattacggcgagcaggaatgtacgttcaggttggcttcgggaagagaaagatacagttccggattgtcgatatttgtgagaaagagattgtcgttaaagggtctttacgatatagcgcagtcgactttgagactgcgattagtttggcacggaaggggttcgtgaccttacagcccctgatttccaaggagtttccttttgagcaggcaacaagtgcctgcggtgcaactgcaaaaggtgaagggatcaagaacctcatccaggtgtctgcgacttag

SEQ ID NO: 2461 - protein, 338 aa, Muscodor strobelii
  misc_feature: SGI Peptide ID NO. 560451
  misc_feature (27)..(121): Pfam Id: PF08240 Pfam Desc: Alcohol dehydrogenase GroES-like domain
  misc_feature (150)..(298): Pfam Id: PF00107 Pfam Desc: Zinc-binding dehydrogenase
  misc_feature (1)..(337): NCBI GI: 119484940 Blast Desc: alcohol dehydrogenase [Neosartorya fischeri NRRL 181] gi|119410268|gb|EAW20215.1| alcohol dehydrogenase [Neosartorya fischeri NRRL 181]
  misc_feature (5)..(334): NCBI GI: 256720799 Blast Desc: NECHADRAFT_96600 [Nectria haematococca mpVI 77-13-4]
  misc_feature (2)..(334): NCBI GI: 169780978 Blast Desc: [Aspergillus oryzae RIB40] gi|83773693|dbj|BAE63820.1| protein product [Aspergillus oryzae]
  misc_feature (1)..(336): NCBI GI: 255931157 Blast Desc: Pc12g02470 [Penicillium chrysogenum Wisconsin 54-1255] gi|211581754|emb|CAP79874.1| Pc12g02470 [Penicillium chrysogenum Wisconsin 54-1255]
  misc_feature (2)..(333): NCBI GI: 238915530 Blast Desc: xylitol dehydrogenase [Talaromyces emersonii]
  misc_feature (1)..(334): NCBI GI: 169621919 Blast Desc: SNOG_14172 [Phaeosphaeria nodorum SN15] gi|111057289|gb|EAT78409.1| SNOG_14172 [Phaeosphaeria nodorum SN15]
  misc_feature (1)..(334): NCBI GI: 169616438 Blast Desc: SNOG_11390 [Phaeosphaeria nodorum SN15] gi|160703183|gb|EAT81098.2| SNOG_11390 [Phaeosphaeria nodorum SN15]
  misc_feature (2)..(333): NCBI GI: 119177592 Blast Desc: CIMG_07715 [Coccidioides immitis RS]
  misc_feature (2)..(333): NCBI GI: 255954865 Blast Desc: Pc21g11540 [Penicillium chrysogenum Wisconsin 54-1255] gi|211589896|emb|CAP96051.1| Pc21g11540 [Penicillium chrysogenum Wisconsin 54-1255]
  misc_feature (2)..(333): NCBI GI: 240107625 Blast Desc: sorbitol dehydrogenase, [Coccidioides posadasii C735 delta SOWgp]
  misc_feature (2)..(334): SWISSPROT Homolog: EC 1.1.1.14 L-iditol 2-dehydrogenase
  misc_feature: Useful for introducing or modulating the production of volatile compounds
MENPSVFLYGPHKAKIENRPVPKLNSTHDVIVRIAYVGVCGSHVHFWDHGGGETPVTEPLVMGHEASGIVHAVGPDVTNLKPGDRVARAWSALSQLKPKDISYHGTLTKFFSTSSDFCYKIPDTMSLQEAVLTEPLAVGVHAANLAGIRPGHRVVVFGAGTVGVLCAAVAKAFGAEIVLSVDILKKKIAFAKTYIGGDVGRTALVDATLTPEETAGRLPTDYESGERVDAVIEASGAEASVTTGIHVLRRAGMYVQVGFGKRKIQFRIVDICEKEIVVKGSLRYSAVDFETAISLARKGFVTLQPLISKEFPFEQATSACGATAKGEGIKNLIQVSAT

SEQ ID NO: 2462 - DNA, 3714 bp, Muscodor strobelii
  misc_feature: SGI EST ID NO. CUFF.6337.0
  misc_feature: Variant of the nucleotide sequence at SEQ ID NO 2460
ccaatatggagaacccctcggtgtttctttacggaccgcacaaggcgaaaatagaaaacagaccagtccctaaactaaattcgacacacgatgtgatcgtcaggatcgcttatgttggtgtttgcggaagtcatgtccatttttgggatcacggcggcggcgagacgcccgtgacagagcctctagtgatgggtcatgaagcgtcgggcatcgtgcatgccgttggtccagacgtcactaacttgaagcccggcgaccgcgtagctcgagcctggagtgccctgtcgtaagtgtcggaagtgcaagatggggagatacaatctctgtcctagaatcgctttcgctgccgcgccgccgtcaaagcctaggcagcttaaaccaaaagatatttcgtatcatggtactcttacaaagttcttttcaacttcttctgacttctgctacaaaataccggatacaatgtctctccaagaggcagtgttaacagagccactggctgtaggcgttcatgctgcaaacctggctggcattcggccagggcacagggtggttgtgtttggtgccggaacagtcggagtgctgtgcgcagctgtcgcgaaagcgtttggcgcggagatcgtattgtctgtagacattctcaaaaagaagattgcgttcgcgaagacttacatagggggagatgtcggtcgcactgcactagtcgatgctacactcacgccggaggaaaccgcagggagacttccaacagactatgaatcaggagaacgcgttgacgcggtgatagaagcatccggggccgaagcttccgtaaccaccggtatacatgtattacggcgagcaggaatgtacgttcaggttggcttcgggaagagaaagatacagttccggattgtcgatatttgtgagaaagagattgtcgttaaagggtctttacgatatagcgcagtcgactttgagactgcgattagtttggcacggaaggggttcgtgaccttacagcccctgatttccaaggagtttccttttgagcaggcaacaagtgcctgcggtgcaactgcaaaaggtgaagggatcaagaacctcatccaggtgtctgcgacttagtatgactaagtctggtccggaagacacgttagtgggtgattccgtcatgcaaactccaatggataggtcttgatgggtgatatctcactgctctcgcctgccaatctttctgcgaggagtgaagctgtgctcattcaccgtcgtcacaaaagctctctctacagccggtaacgccaagatttcaaagaacttcgcatgataatcttgaagcacatcataggcgagacgtatcaccacgtggcagccctatgtctaaaccttgtctctgcagaaatcaccgccttgataatcatttgtctctggcttgtcaaagatttgcacgtgactagaaagtttttgaattcgtatttacatttgcgttgaggagttggccggtcaacgtccccacccctggcgacttgacaatctcatgaaattcatattctcttgttggcccattaggcgttttcatatggaaaaggattgtagaatagatctcttttgatttagtgtggcaaacgacttgaattggacacaaaattgatgcgatctggaaatgcgttcaaccatcacggcatttagaagctgaattacaggcatctcaacggtagtcaccaaatccttcagccatacccaataccaccaaattgacgtcgcagaacaactgaaagcacagctctccacaatgaaactctagaattcattaaaaatggatcgtgtaactagagtcggggttctgtcgtctcccacatttctccatcaatcacatcgcgagcttccagaacctctcggcgcgatgatgagacggaaccccaccaatcccctctacgaaccccacgcaagcactcacgacggttcggagtagtttgtagatggcgtgtaaaccgtgttctttggagcggatgaactcttagattctcatatgtaaataccttcatttgcgctctttagttgctctcggcatttctcccgtctttccgttgggatttggagtggtctgattattccgtatatactgcatcatagtcctttctatattcgactcagtcgccaagcaattctgttcttcgacctatatgcataattagaagccaagaccaaaactgaaatcaagatgcctgaaatcaaaattacgggctggaagacgagggacgttcggtttccgacgtcattagacaagaccggctccgatgctatgaatgcagccggagactactcatcggcatactgcatcttagagaccgactcagagtataccggccatggcatgacattcaccataggccgcggcaatgacgtagtatgcgccgcaataaatcatctcggggaccgccttctcggtcgaacactctcttctcttgtagaagattggggtaaaacatggcgctacatggtgaacgactctcagttgcgctggatcggccccgaaaagggcgttattcacctcgcgctcggcgccgtcgtgaacgcaatctgggacctctgggctaaggttctcgggaaacctgtctggcagattgtgtgtgagatgtcacccgaggagttcgtccgctgtatcgatttccgatacatcaccgacgcgattacgccagaggaagccattgctcttctcaagtcatcacaagaaggaaaagcgaaacgcttcgaagaagcgctccagtcccgcgccgtgcccgcttatactacaagtgcgggctggttaggttacggagaagacaagatgaaggccttactcaacgagaccctatctcaggggtacaagcactttaagcttaaggtcggcggatccgtggaagaggatcgtcgtcgtctaacaatcgcgcgcgaagtgatcggctacgacaagggtaacatcctgatggtcgatgcaaaccagatctggtccgtgccggaggcaatcacatacatgaaccaactagctgacttcaagccatggttcattgaggaacctacctctccagatgacatccttggtcataaggcaatccgcgaagcactgaaacccctgggaattggtgttgcaactggagaaatgtgtcagaatcgggtaattttcaagcagcttctcatggctggatcgatagacgtctgtcaaattgacgcgtgccgtatgggcggagtgaatgaggtcctagctgtcttgcttatggcaaagaaattcggagtacccatcgtgccgcattctggcggtgttggtctacctgagtatacgcagcatctgagtaccattgactatgtttccgtcagtggaaccctctcggtgctagagtatgtcgatcatttgcatgagcatttcctccacccttcggctgtcaaggatggctattaccagacgcctatgagtccagggtacagcgtggaaatgaagcctgagagtatggaccagtactcgtatcctggggagaaaggcgtcagttggtggcagagtgaggaggcgaagcctattcttgagggcgttaagatctagattgatgtatatattcatatatagtataatgattagacgattgtatgcctaggctggcatttgcgttttgactagaaggctcgaagtgtagtgagcacaacttaaactgctttctcttgccgccagtcgctaaaattcacggatgcctgtgacataggttcgct

SEQ ID NO: 2463 - DNA, 1353 bp, Muscodor strobelii
  misc_feature: SGI cDNA ID NO. 560452
  misc_feature: Encodes the peptide sequence at SEQ ID NO 2464
atgcctgaaatcaaaattacgggctggaagacgagggacgttcggtttccgacgtcattagacaagaccggctccgatgctatgaatgcagccggagactactcatcggcatactgcatcttagagaccgactcagagtataccggccatggcatgacattcaccataggccgcggcaatgacgtagtatgcgccgcaataaatcatctcggggaccgccttctcggtcgaacactctcttctcttgtagaagattggggtaaaacatggcgctacatggtgaacgactctcagttgcgctggatcggccccgaaaagggcgttattcacctcgcgctcggcgccgtcgtgaacgcaatctgggacctctgggctaaggttctcgggaaacctgtctggcagattgtgtgtgagatgtcacccgaggagttcgtccgctgtatcgatttccgatacatcaccgacgcgattacgccagaggaagccattgctcttctcaagtcatcacaagaaggaaaagcgaaacgcttcgaagaagcgctccagtcccgcgccgtgcccgcttatactacaagtgcgggctggttaggttacggagaagacaagatgaaggccttactcaacgagaccctatctcaggggtacaagcactttaagcttaaggtcggcggatccgtggaagaggatcgtcgtcgtctaacaatcgcgcgcgaagtgatcggctacgacaagggtaacatcctgatggtcgatgcaaaccagatctggtccgtgccggaggcaatcacatacatgaaccaactagctgacttcaagccatggttcattgaggaacctacctctccagatgacatccttggtcataaggcaatccgcgaagcactgaaacccctgggaattggtgttgcaactggagaaatgtgtcagaatcgggtaattttcaagcagcttctcatggctggatcgatagacgtctgtcaaattgacgcgtgccgtatgggcggagtgaatgaggtcctagctgtcttgcttatggcaaagaaattcggagtacccatcgtgccgcattctggcggtgttggtctacctgagtatacgcagcatctgagtaccattgactatgtttccgtcagtggaaccctctcggtgctagagtatgtcgatcatttgcatgagcatttcctccacccttcggctgtcaaggatggctattaccagacgcctatgagtccagggtacagcgtggaaatgaagcctgagagtatggaccagtactcgtatcctggggagaaaggcgtcagttggtggcagagtgaggaggcgaagcctattcttgagggcgttaagatctag

SEQ ID NO: 2464 - protein, 450 aa, Muscodor strobelii
  misc_feature: SGI Peptide ID NO. 560452
  misc_feature (200)..(297): Pfam Id: PF01188 Pfam Desc: Mandelate racemase / muconate lactonizing enzyme, C-terminal domain
  misc_feature (3)..(450): NCBI GI: 261359650 Blast Desc: L-galactonate dehydratase [Verticillium albo-atrum VaMs.102]
  misc_feature (1)..(450): NCBI GI: 154308516 Blast Desc: conserved [Botryotinia fuckeliana B05.10] gi|150852859|gb|EDN28051.1| conserved [Botryotinia fuckeliana B05.10]
  misc_feature (1)..(450): NCBI GI: 256727158 Blast Desc: [Nectria haematococca mpVI 77-13-4]
  misc_feature (1)..(450): NCBI GI: 156036432 Blast Desc: conserved [Sclerotinia sclerotiorum 1980] gi|154698310|gb|EDN98048.1| conserved [Sclerotinia sclerotiorum 1980]
  misc_feature (1)..(450): NCBI GI: 76886462 Blast Desc: L-galactonate dehydratase [Hypocrea jecorina]
  misc_feature (1)..(450): NCBI GI: 116202475 Blast Desc: conserved [Chaetomium globosum CBS 148.51] gi|88177640|gb|EAQ85108.1| conserved [Chaetomium globosum CBS 148.51]
  misc_feature (3)..(450): NCBI GI: 164424530 Blast Desc: NCU07064 [Neurospora crassa OR74A] gi|157070553|gb|EAA31093.2| NCU07064 [Neurospora crassa OR74A]
  misc_feature (4)..(450): NCBI GI: 145252668 Blast Desc: An16g05390 [Aspergillus niger] gi|134083401|emb|CAK46879.1| protein product [Aspergillus niger]
  misc_feature (4)..(450): NCBI GI: 189210483 Blast Desc: L-galactonate dehydratase [Pyrenophora tritici-repentis Pt-1C-BFP] gi|187977666|gb|EDU44292.1| L-galactonate dehydratase [Pyrenophora tritici-repentis
  misc_feature (4)..(450): NCBI GI: 169620796 Blast Desc: SNOG_13604 [Phaeosphaeria nodorum SN15] gi|111057931|gb|EAT79051.1| SNOG_13604 [Phaeosphaeria nodorum SN15]
  misc_feature (38)..(422): SWISSPROT Homolog: EC 4.2.1.6 Galactonate dehydratase
MPEIKITGWKTRDVRFPTSLDKTGSDAMNAAGDYSSAYCILETDSEYTGHGMTFTIGRGNDVVCAAINHLGDRLLGRTLSSLVEDWGKTWRYMVNDSQLRWIGPEKGVIHLALGAVVNAIWDLWAKVLGKPVWQIVCEMSPEEFVRCIDFRYITDAITPEEAIALLKSSQEGKAKRFEEALQSRAVPAYTTSAGWLGYGEDKMKALLNETLSQGYKHFKLKVGGSVEEDRRRLTIAREVIGYDKGNILMVDANQIWSVPEAITYMNQLADFKPWFIEEPTSPDDILGHKAIREALKPLGIGVATGEMCQNRVIFKQLLMAGSIDVCQIDACRMGGVNEVLAVLLMAKKFGVPIVPHSGGVGLPEYTQHLSTIDYVSVSGTLSVLEYVDHLHEHFLHPSAVKDGYYQTPMSPGYSVEMKPESMDQYSYPGEKGVSWWQSEEAKPILEGVKI

SEQ ID NO: 2465 - DNA, 3714 bp, Muscodor strobelii; identical to SEQ ID NO: 2462
  misc_feature: SGI EST ID NO. CUFF.6337.0
  misc_feature: Variant of the nucleotide sequence at SEQ ID NO 2463

SEQ ID NO: 2466 - DNA, 1830 bp, Muscodor strobelii
  misc_feature: SGI cDNA ID NO. 560453
  misc_feature: Reduced expression when VOC is produced
  misc_feature: Encodes the peptide sequence at SEQ ID NO 2467
atggcagacgcgaatgcccctccgttcgaccctccctcgcctccagaaattccgtccctcaagctccttactcgccatgaccagccctcgctaacgaccacatcctccttctcttccttgcatgaaatgccgcgcttgagaaaactacacatgctcgtagccgccaatggcccacgagatgccgcctacgcccaagccatagccgtgcgcctgctcaaagacactcagatcgagacccgcgctctcgtcgacgacgtgccccagcgactgacccacgaaatcatggtcatggagaaccgcagtctgtccactgctgtcatagatgccgatcagagaaccaaagacgccatagaagccgcccgtcagaatgccttcggcctcgtcgagtgggctgatgttctcgtactcgcgcccatcgatgccgaccacctcgcaaaaatgatgctaggcgttgctgatacgacattgctcgaggtccttcgctcctgggatgtatccaagaagatcttcctagtgcctggcatgtcaatgcagcagtggaacaaccccatgaccaagaagcagctcagcaagataaaaagaaaatggaattggatcaaagtcatgtcgccgatactatggcactacgaagggaaaaactacagcaaccgtgtggtcacgtgggacggcttcagcgagttaatgggcataataaagaaccaagccgagctcatgtgtctcggtcacgacgtcgaggtcgcggcgaagaaagccatgcgcaccagtagcccaacgcgcgtggtcaacaccctgcctcccgagatctggagccaggtctgcgaatttgtgggtgattgggagacggcaatggcactcaacgtatacacgacgctccccaaaccagcagactggagacgaacaccgaatcctaacgatcccaacgatgtctacatgtacgaactcgagtggttgatcctcacatgtccagaccaaaacatcatctgccggaaactatccgaagcaccaaaggggttccgctacatatcgtctctagctgtaaaacttatgctcaaattctcactggtagaggtcttgcgatacctagagacacacatgacgaaagtattctgggcctcgttctccgcgaagttcttcccgaataaggcatcgggtgtgtacgcacggctggacattctaaactggtggttcaactcgccgacgtttctgaagaaggaatatgatgcgcaggctttagataatgcgtcacgcatgggctttgtgcatgtgttggattggtggctgcagtctaggttgccgctcaaatttacggagtctgcgctggagtttgcgtcgaaagagggacatttactggtcctggagtggtggaaagaggctgcgagtatcgatcatagtatctctctcaaacccgggcgaagtcttctcgcagcggcacaacatggacagacggccgttctaagatggtgggagacttcgggcattcccgtagggtatagtgaaggggtctgcaaacttgccagcgcgcaggggcagacggcggtgctggatacttggtttcaacttaaaggggagaaaataagtttcgatagcacattattagtggcgccgacgaaacagggtcatgttagtgtcctggagtggtggaaacagtatgcgaggggggagcaaccgggtgataataagacgcatagggtcgagtataagacttgtgatattgaggaggcgctcgaggatgcgattggcgatcctagaccggttaggaggtggtgggcgcagaatggattggatttggatttggggaatagtgagtggatgaagattaggcggttatga

SEQ ID NO: 2467 - protein, 609 aa, Muscodor strobelii
  misc_feature: SGI Peptide ID NO. 560453
  misc_feature (12)..(609): NCBI GI: 116202327 Blast Desc: CHGG_09048 [Chaetomium globosum CBS 148.51] gi|88177566|gb|EAQ85034.1| CHGG_09048 [Chaetomium globosum CBS 148.51]
  misc_feature (36)..(609): NCBI GI: 39979233 Blast Desc: conserved [Neurospora crassa]
  misc_feature (36)..(600): NCBI GI: 164426713 Blast Desc: NCU04042 [Neurospora crassa OR74A] gi|157071445|gb|EAA28421.2| conserved [Neurospora crassa OR74A]
  misc_feature (35)..(609): NCBI GI: 46134579 Blast Desc: FG09298.1 [Gibberella zeae PH-1]
  misc_feature (4)..(609): NCBI GI: 171682196 Blast Desc: protein product [Podospora anserina] gi|170941057|emb|CAP66707.1| protein product [Podospora anserina]
  misc_feature (29)..(609): NCBI GI: 156060379 Blast Desc: SS1G_02328 [Sclerotinia sclerotiorum 1980] gi|154699736|gb|EDN99474.1| SS1G_02328 [Sclerotinia sclerotiorum 1980]
  misc_feature (43)..(609): NCBI GI: 256727138 Blast Desc: [Nectria haematococca mpVI 77-13-4]
  misc_feature (40)..(609): NCBI GI: 261359334 Blast Desc: phosphopantothenoylcysteine decarboxylase [Verticillium albo-atrum VaMs.102]
  misc_feature (32)..(609): NCBI GI: 39974417 Blast Desc: MGG_00645 [Magnaporthe grisea 70-15] gi|145018441|gb|EDK02720.1| MGG_00645 [Magnaporthe grisea 70-15]
  misc_feature (29)..(450): NCBI GI: 154312019 Blast Desc: BC1G_06043 [Botryotinia fuckeliana B05.10] gi|150850693|gb|EDN25886.1| BC1G_06043 [Botryotinia fuckeliana B05.10]
  misc_feature: Useful for introducing or modulating the production of volatile compounds
MADANAPPFDPPSPPEIPSLKLLTRHDQPSLTTTSSFSSLHEMPRLRKLHMLVAANGPRDAAYAQAIAVRLLKDTQIETRALVDDVPQRLTHEIMVMENRSLSTAVIDADQRTKDAIEAARQNAFGLVEWADVLVLAPIDADHLAKMMLGVADTTLLEVLRSWDVSKKIFLVPGMSMQQWNNPMTKKQLSKIKRKWNWIKVMSPILWHYEGKNYSNRVVTWDGFSELMGIIKNQAELMCLGHDVEVAAKKAMRTSSPTRVVNTLPPEIWSQVCEFVGDWETAMALNVYTTLPKPADWRRTPNPNDPNDVYMYELEWLILTCPDQNIICRKLSEAPKGFRYISSLAVKLMLKFSLVEVLRYLETHMTKVFWASFSAKFFPNKASGVYARLDILNWWFNSPTFLKKEYDAQALDNASRMGFVHVLDWWLQSRLPLKFTESALEFASKEGHLLVLEWWKEAASIDHSISLKPGRSLLAAAQHGQTAVLRWWETSGIPVGYSEGVCKLASAQGQTAVLDTWFQLKGEKISFDSTLLVAPTKQGHVSVLEWWKQYARGEQPGDNKTHRVEYKTCDIEEALEDAIGDPRPVRRWWAQNGLDLDLGNSEWMKIRRL

SEQ ID NO: 2468 - DNA, 2709 bp, Muscodor strobelii
  misc_feature: SGI EST ID NO. CUFF.6211.0
  misc_feature: Variant of the nucleotide sequence at SEQ ID NO 2466
ccgactcctgggccgccatgcgccgtcaagacatcgtcacatttacctaattgaaaaccgaaagatgatgctatgatccgtcacatttcctctggggccgagtctctttgccattgtgtcacttgctcttaccactcgactttaggacataccattgtctgctttgtctcacaatcaagcgcattgtattgcggacttactactctgctgtggcttatcgtcgcaagataactttatactggcatccaattcctcgggtggcggggcattcatcaccacccttaagcttcgcccctccacgcttcgttcgtcgcgtatcacgatagctccgaatattaggtgatgactccgcatgggaactcgttctcgagtttctgcggtgatatcgtattaaagtagtgcgatccaatcaatccaattccagattcaagatggcagacgcgaatgcccctccgttcgaccctccctcgcctccagaaattccgtccctcaagctccttactcgccatgaccagccctcgctaacgaccacatcctccttctcttccttgcatgaaatgccgcgcttgagaaaactacacatgctcgtagccgccaatggcccacgagatgccgcctacgcccaagccatagccgtgcgcctgctcaaagacactcagatcgagacccgcgctctcgtcgacgacgtgccccagcgactgacccacgaaatcatggtcatggagaaccgcagtctgtccactgctgtcatagatgccgatcagagaaccaaagacgccatagaagccgcccgtcagaatgccttcggcctcgtcgagtgggctgatgttctcgtactcgcgcccatcgatgccgaccacctcgcaaaaatgatgctaggcgttgctgatacgacattgctcgaggtccttcgctcctgggatgtatccaagaagatcttcctagtgcctggcatgtcaatgcagcagtggaacaaccccatgaccaagaagcagctcagcaagataaaaagaaaatggaattggatcaaagtcatgtcgccgatactatggcactacgaagggaaaaactacagcaaccgtgtggtcacgtgggacggcttcagcgagttaatgggcataataaagaaccaagccgagctcatgtgtctcggtcacgacgtcgaggtcgcggcgaagaaagccatgcgcaccagtagcccaacgcgcgtggtcaacaccctgcctcccgagatctggagccaggtctgcgaatttgtgggtgattgggagacggcaatggcactcaacgtatacacgacgctccccaaaccagcagactggagacgaacaccgaatcctaacgatcccaacgatgtctacatgtacgaactcgagtggttgatcctcacatgtccagaccaaaacatcatctgccggaaactatccgaagcaccaaaggggttccgctacatatcgtctctagctgtaaaacttatgctcaaattctcactggtagaggtcttgcgatacctagagacacacatgacgaaagtattctgggcctcgttctccgcgaagttcttcccgaataaggcatcgggtgtgtacgcacggctggacattctaaactggtggttcaactcgccgacgtttctgaagaaggaatatgatgcgcaggctttagataatgcgtcacgcatgggctttgtgcatgtgttggattggtggctgcagtctaggttgccgctcaaatttacggagtctgcgctggagtttgcgtcgaaagagggacatttactggtcctggagtggtggaaagaggctgcgagtatcgatcatagtatctctctcaaacccgggcgaagtcttctcgcagcggcacaacatggacagacggccgttctaagatggtgggagacttcgggcattcccgtagggtatagtgaaggggtctgcaaacttgccagcgcgcaggggcagacggcggtgctggatacttggtttcaacttaaaggggagaaaataagtttcgatagcacattattagtggcgccgacgaaacagggtcatgttagtgtcctggagtggtggaaacagtatgcgaggggggagcaaccgggtgataataagacgcatagggtcgagtataagacttgtgatattgaggaggcgctcgaggatgcgattggcgatcctagaccggttaggaggtggtgggcgcagaatggattggatttggatttggggaatagtgagtggatgaagattaggcggttatgatgggggttggattgtgtatgtttagatagtgaggtaacgggttaatgagaggagtgggaatgatgttgtatgagtatgagctgcgcgtatttgtgactgacattgtgaatattttgacgatgacacgttggcctatactatgagggtcgaaacctgaagctacaggtctcggttttcattgatgaacaacttgattaaagctctcttaataacaagcttaagcactgcatttacataaatgtgccacaggctgcattgtatcagatatatgccaattactcatttctccagccacctgttgacgttctgaatgtgaggctctagctgataaagtcctatgcctcaattcagtgcgtgaggtggcgtttgggctgggcattccgggaggaatccgcattttgcaccgccttaaacagagaaaaagcacaaccaagtcacgtacatgcac

SEQ ID NO: 2469 - DNA, 984 bp, Muscodor strobelii
  misc_feature: SGI cDNA ID NO. 560454
  misc_feature: Reduced expression when VOC is produced
  misc_feature: Encodes the peptide sequence at SEQ ID NO 2470
atggcactcaacgtatacacgacgctccccaaaccagcagactggagacgaacaccgaatcctaacgatcccaacgatgtctacatgtacgaactcgagtggttgatcctcacatgtccagaccaaaacatcatctgccggaaactatccgaagcaccaaaggggttccgctacatatcgtctctagctgtaaaacttatgctcaaattctcactggtagaggtcttgcgatacctagagacacacatgacgaaagtattctgggcctcgttctccgcgaagttcttcccgaataaggcatcgggtgtgtacgcacggctggacattctaaactggtggttcaactcgccgacgtttctgaagaaggaatatgatgcgcaggctttagataatgcgtcacgcatgggctttgtgcatgtgttggattggtggctgcagtctaggttgccgctcaaatttacggagtctgcgctggagtttgcgtcgaaagagggacatttactggtcctggagtggtggaaagaggctgcgagtatcgatcatagtatctctctcaaacccgggcgaagtcttctcgcagcggcacaacatggacagacggccgttctaagatggtgggagacttcgggcattcccgtagggtatagtgaaggggtctgcaaacttgccagcgcgcaggggcagacggcggtgctggatacttggtttcaacttaaaggggagaaaataagtttcgatagcacattattagtggcgccgacgaaacagggtcatgttagtgtcctggagtggtggaaacagtatgcgaggggggagcaaccgggtgataataagacgcatagggtcgagtataagacttgtgatattgaggaggcgctcgaggatgcgattggcgatcctagaccggttaggaggtggtgggcgcagaatggattggatttggatttggggaatagtgagtggatgaagattaggcggttatga

SEQ ID NO: 2470 - protein, 327 aa, Muscodor strobelii
  misc_feature: SGI Peptide ID NO. 560454
  misc_feature (2)..(327): NCBI GI: 116202327 Blast Desc: CHGG_09048 [Chaetomium globosum CBS 148.51] gi|88177566|gb|EAQ85034.1| CHGG_09048 [Chaetomium globosum CBS 148.51]
  misc_feature (2)..(327): NCBI GI: 39979233 Blast Desc: conserved [Neurospora crassa]
  misc_feature (2)..(327): NCBI GI: 156060379 Blast Desc: SS1G_02328 [Sclerotinia sclerotiorum 1980] gi|154699736|gb|EDN99474.1| SS1G_02328 [Sclerotinia sclerotiorum 1980]
  misc_feature (2)..(327): NCBI GI: 171682196 Blast Desc: protein product [Podospora anserina] gi|170941057|emb|CAP66707.1| protein product [Podospora anserina]
  misc_feature (2)..(318): NCBI GI: 164426713 Blast Desc: NCU04042 [Neurospora crassa OR74A] gi|157071445|gb|EAA28421.2| conserved [Neurospora crassa OR74A]
  misc_feature (2)..(327): NCBI GI: 46134579 Blast Desc: FG09298.1 [Gibberella zeae PH-1]
  misc_feature (2)..(327): NCBI GI: 261359334 Blast Desc: phosphopantothenoylcysteine decarboxylase [Verticillium albo-atrum VaMs.102]
  misc_feature (2)..(327): NCBI GI: 39974417 Blast Desc: MGG_00645 [Magnaporthe grisea 70-15] gi|145018441|gb|EDK02720.1| MGG_00645 [Magnaporthe grisea 70-15]
  misc_feature (2)..(327): NCBI GI: 256727138 Blast Desc: [Nectria haematococca mpVI 77-13-4]
  misc_feature (2)..(327): NCBI GI: 169618613 Blast Desc: SNOG_12499 [Phaeosphaeria nodorum SN15] gi|111059192|gb|EAT80312.1| SNOG_12499 [Phaeosphaeria nodorum SN15]
  misc_feature: Useful for introducing or modulating the production of volatile compounds
MALNVYTTLPKPADWRRTPNPNDPNDVYMYELEWLILTCPDQNIICRKLSEAPKGFRYISSLAVKLMLKFSLVEVLRYLETHMTKVFWASFSAKFFPNKASGVYARLDILNWWFNSPTFLKKEYDAQALDNASRMGFVHVLDWWLQSRLPLKFTESALEFASKEGHLLVLEWWKEAASIDHSISLKPGRSLLAAAQHGQTAVLRWWETSGIPVGYSEGVCKLASAQGQTAVLDTWFQLKGEKISFDSTLLVAPTKQGHVSVLEWWKQYARGEQPGDNKTHRVEYKTCDIEEALEDAIGDPRPVRRWWAQNGLDLDLGNSEWMKIRRL

SEQ ID NO: 2471 - DNA, 2709 bp, Muscodor strobelii; identical to SEQ ID NO: 2468
  misc_feature: SGI EST ID NO. CUFF.6211.0
  misc_feature: Variant of the nucleotide sequence at SEQ ID NO 2469

SEQ ID NO: 2472 - DNA, 1149 bp, Muscodor strobelii
  misc_feature: SGI cDNA ID NO. 560455
  misc_feature: Reduced expression when VOC is produced
  misc_feature: Encodes the peptide sequence at SEQ ID NO 2473
atgggcataataaagaaccaagccgagctcatgtgtctcggtcacgacgtcgaggtcgcggcgaagaaagccatgcgcaccagtagcccaacgcgcgtggtcaacaccctgcctcccgagatctggagccaggtctgcgaatttgtgggtgattgggagacggcaatggcactcaacgtatacacgacgctccccaaaccagcagactggagacgaacaccgaatcctaacgatcccaacgatgtctacatgtacgaactcgagtggttgatcctcacatgtccagaccaaaacatcatctgccggaaactatccgaagcaccaaaggggttccgctacatatcgtctctagctgtaaaacttatgctcaaattctcactggtagaggtcttgcgatacctagagacacacatgacgaaagtattctgggcctcgttctccgcgaagttcttcccgaataaggcatcgggtgtgtacgcacggctggacattctaaactggtggttcaactcgccgacgtttctgaagaaggaatatgatgcgcaggctttagataatgcgtcacgcatgggctttgtgcatgtgttggattggtggctgcagtctaggttgccgctcaaatttacggagtctgcgctggagtttgcgtcgaaagagggacatttactggtcctggagtggtggaaagaggctgcgagtatcgatcatagtatctctctcaaacccgggcgaagtcttctcgcagcggcacaacatggacagacggccgttctaagatggtgggagacttcgggcattcccgtagggtatagtgaaggggtctgcaaacttgccagcgcgcaggggcagacggcggtgctggatacttggtttcaacttaaaggggagaaaataagtttcgatagcacattattagtggcgccgacgaaacagggtcatgttagtgtcctggagtggtggaaacagtatgcgaggggggagcaaccgggtgataataagacgcatagggtcgagtataagacttgtgatattgaggaggcgctcgaggatgcgattggcgatcctagaccggttaggaggtggtgggcgcagaatggattggatttggatttggggaatagtgagtggatgaagattaggcggttatga

SEQ ID NO: 2473 - protein, 382 aa, Muscodor strobelii
  misc_feature: SGI Peptide ID NO. 560455
  misc_feature (1)..(382): NCBI GI: 116202327 Blast Desc: CHGG_09048 [Chaetomium globosum CBS 148.51] gi|88177566|gb|EAQ85034.1| CHGG_09048 [Chaetomium globosum CBS 148.51]
  misc_feature (1)..(382): NCBI GI: 39979233 Blast Desc: conserved [Neurospora crassa]
  misc_feature (1)..(382): NCBI GI: 156060379 Blast Desc: SS1G_02328 [Sclerotinia sclerotiorum 1980] gi|154699736|gb|EDN99474.1| SS1G_02328 [Sclerotinia sclerotiorum 1980]
  misc_feature (1)..(382): NCBI GI: 171682196 Blast Desc: protein product [Podospora anserina] gi|170941057|emb|CAP66707.1| protein product [Podospora anserina]
  misc_feature (1)..(373): NCBI GI: 164426713 Blast Desc: NCU04042 [Neurospora crassa OR74A] gi|157071445|gb|EAA28421.2| conserved [Neurospora crassa OR74A]
  misc_feature (1)..(382): NCBI GI: 46134579 Blast Desc: FG09298.1 [Gibberella zeae PH-1]
  misc_feature (1)..(382): NCBI GI: 256727138 Blast Desc: [Nectria haematococca mpVI 77-13-4]
  misc_feature (1)..(382): NCBI GI: 261359334 Blast Desc: phosphopantothenoylcysteine decarboxylase [Verticillium albo-atrum VaMs.102]
  misc_feature (1)..(382): NCBI GI: 39974417 Blast Desc: MGG_00645 [Magnaporthe grisea 70-15] gi|145018441|gb|EDK02720.1| MGG_00645 [Magnaporthe grisea 70-15]
  misc_feature (4)..(382): NCBI GI: 169618613 Blast Desc: SNOG_12499 [Phaeosphaeria nodorum SN15] gi|111059192|gb|EAT80312.1| SNOG_12499 [Phaeosphaeria nodorum SN15]
  misc_feature: Useful for introducing or modulating the production of volatile compounds
MGIIKNQAELMCLGHDVEVAAKKAMRTSSPTRVVNTLPPEIWSQVCEFVGDWETAMALNVYTTLPKPADWRRTPNPNDPNDVYMYELEWLILTCPDQNIICRKLSEAPKGFRYISSLAVKLMLKFSLVEVLRYLETHMTKVFWASFSAKFFPNKASGVYARLDILNWWFNSPTFLKKEYDAQALDNASRMGFVHVLDWWLQSRLPLKFTESALEFASKEGHLLVLEWWKEAASIDHSISLKPGRSLLAAAQHGQTAVLRWWETSGIPVGYSEGVCKLASAQGQTAVLDTWFQLKGEKISFDSTLLVAPTKQGHVSVLEWWKQYARGEQPGDNKTHRVEYKTCDIEEALEDAIGDPRPVRRWWAQNGLDLDLGNSEWMKIRRL

SEQ ID NO: 2474 - DNA, 2709 bp, Muscodor strobelii; identical to SEQ ID NO: 2468
  misc_feature: SGI EST ID NO. CUFF.6211.0
  misc_feature: Variant of the nucleotide sequence at SEQ ID NO 2472

SEQ ID NO: 2475 - DNA, 1356 bp, Muscodor strobelii
  misc_feature: SGI cDNA ID NO. 560456
  misc_feature: Encodes the peptide sequence at SEQ ID NO 2476
atgcagcgcgcccatgccccctccccgctcctgtctctgccacctcctatcccaggagccggagcctcttcagccactgccgctcccgcctacgctcccgtagctgcgagctcttctcgcgcccacccattcgagcctcctgcctcctttcaggatactcttgctgagaccaaacgcgcgctcccgcaagacaccaagggcgaatcttccggccagaaagccgacgactcgagcgagcctccgcctgcatattccgaaggctacagcccgctcctctccttttcatacctcatggccgccgccgggggtgcctcgagtattattactcaagtccagcaggggggaccgcccatcaatgccattggcgatgtcggtgccgatgagaccatcacaatggacctgaggggcacacgcttcgttctctccagagacgagctgctgacattgcccgaatttgtcctcctctccctattcccgaatggactcttcccagaaggccatatgggtggcttctccgacggcgatgccgtgcaagtcgatgtcagtaccactcaaaccaacaacacaccggacaatcccatcactcaagttgcccaggccgctgcaagcgttggcggttctttaccgcccagcgccaccagcggctccctgtctcgcgcctctaccatccgttcccaactttccaatataaatattcatctcactgacctctcctctcagtatgaccctgcatctctacaatacatgttggaattcttccgcaacgttgcgcagtccatacctaacgaagcctcacccaatgcttcccccgacggaggtgttgcccctattgactcgctagccggtcggggtgaggatggtagcaagcgggctggcattattgttttgagagaagatctcgatttctacgccatcccacctcggagggacattggccaagccgagatgatcgaagtcaagcgtgctgcgtccagggcgctcctgaaacaagacggcatcttttcaggattgaaacggagtgatgagcctggaacgacagaggcacatctcattgaaatgttgacagctggcggcttcaatcatgacgaccagtggggtcaccgggcgggggaacccaacaaggcagtagtatgcagtctggcgctggcgcggctccgtagcgacatccgtggtaacgacatgggcagcaacgcagtcgggatggcgcagaagcttcttctcttctggcgcaagccggcgcgacgatgctggtgggaaggcgttgagctggacaacgtggagggagtcgaggggcctctcaaggtgtggattcgaagagtgtggactctggagatgagcgtgattggattacgatag

SEQ ID NO: 2476 - protein, 451 aa, Muscodor strobelii
  misc_feature: SGI Peptide ID NO. 560456
  misc_feature (18)..(451): NCBI GI: 46134267 Blast Desc: FG09273.1 [Gibberella zeae PH-1]
  misc_feature (98)..(451): NCBI GI: 169608099 Blast Desc: SNOG_20076 [Phaeosphaeria nodorum SN15] gi|160701562|gb|EDP89765.1| SNOG_20076 [Phaeosphaeria nodorum SN15]
  misc_feature (98)..(451): NCBI GI: 40882311 Blast Desc: related to growth regulation protein WHI2 [Neurospora crassa]
  misc_feature (53)..(451): NCBI GI: 67528230 Blast Desc: AN4321.2 [Aspergillus nidulans FGSC A4] gi|40741292|gb|EAA60482.1| AN4321.2 [Aspergillus nidulans FGSC A4]
  misc_feature (23)..(451): NCBI GI: 258568416 Blast Desc: conserved [Uncinocarpus reesii 1704] gi|237906398|gb|EEP80799.1| conserved [Uncinocarpus reesii 1704]
  misc_feature (64)..(451): NCBI GI: 255949642 Blast Desc: Pc22g16750 [Penicillium chrysogenum Wisconsin 54-1255] gi|211592605|emb|CAP98963.1| Pc22g16750 [Penicillium chrysogenum Wisconsin 54-1255]
  misc_feature (98)..(451): NCBI GI: 171682318 Blast Desc: protein product [Podospora anserina] gi|170941118|emb|CAP66768.1| protein product [Podospora anserina]
  misc_feature (20)..(451): NCBI GI: 242765819 Blast Desc: dipeptidyl peptidase, [Talaromyces stipitatus ATCC 10500] gi|218724247|gb|EED23664.1| dipeptidyl peptidase, [Talaromyces stipitatus ATCC 10500]
  misc_feature (25)..(451): NCBI GI: 212528658 Blast Desc: dipeptidyl peptidase, [Penicillium marneffei ATCC 18224] gi|210073884|gb|EEA27971.1| dipeptidyl peptidase, [Penicillium marneffei ATCC 18224]
  misc_feature (25)..(451): NCBI GI: 212528656 Blast Desc: dipeptidyl peptidase, [Penicillium marneffei ATCC 18224] gi|210073883|gb|EEA27970.1| dipeptidyl peptidase, [Penicillium marneffei ATCC 18224]
MQRAHAPSPLLSLPPPIPGAGASSATAAPAYAPVAASSSRAHPFEPPASFQDTLAETKRALPQDTKGESSGQKADDSSEPPPAYSEGYSPLLSFSYLMAAAGGASSIITQVQQGGPPINAIGDVGADETITMDLRGTRFVLSRDELLTLPEFVLLSLFPNGLFPEGHMGGFSDGDAVQVDVSTTQTNNTPDNPITQVAQAAASVGGSLPPSATSGSLSRASTIRSQLSNINIHLTDLSSQYDPASLQYMLEFFRNVAQSIPNEASPNASPDGGVAPIDSLAGRGEDGSKRAGIIVLREDLDFYAIPPRRDIGQAEMIEVKRAASRALLKQDGIFSGLKRSDEPGTTEAHLIEMLTAGGFNHDDQWGHRAGEPNKAVVCSLALARLRSDIRGNDMGSNAVGMAQKLLLFWRKPARRCWWEGVELDNVEGVEGPLKVWIRRVWTLEMSVIGLR

SEQ ID NO: 2477 - DNA, 2446 bp, Muscodor strobelii
  misc_feature: SGI EST ID NO. CUFF.7360.0
  misc_feature: Variant of the nucleotide sequence at SEQ ID NO 2475
cccgaccgagctacctcgactcaatgttgacttcagtgtgatctccgccttggaagagacgaggcaagtcaagtcctgtacaacttgcatcaacaaaacctgtcagcttaacattgttcatctcaatcattgactctttcgatgcgaacttccgttttgacgagaatccgaatttgactcgcatgatatgacatcttagactcaggacaggcgattccaatcaatgcagcgcgcccatgccccgtcacaggtctaattaaccaccccccacaccgcagctctcgtcccgtcgcctgcaatataaccacctgcactaccagtgacaaccaccggcggctccaactgccatcacaccctgaccggccctgatcaaagcacgaccacgccttgcgcatcaaccgtcgccacgttgtccgactcacaggaagatagtcacggagagtccgtgtccgctgggctcccgccgactactcccattgattacgcgaacatcgacttcgacgatcaagatatagacgggattgacgacgaggacaacaattgtgcacgttcgcctccaccgcaatatccataccctgcctccgaggcatcgggctcgacctctttctcacgccctgagccgcctcccttttcttcgctctacgcatatcctcccgccgaacatctcgccaacgaccatttcaagctccccgctcctgtctctgccacctcctatcccaggagccggagcctcttcagccactgccgctcccgcctacgctcccgtagctgcgagctcttctcgcgcccacccattcgagcctcctgcctcctttcaggatactcttgctgagaccaaacgcgcgctcccgcaagacaccaagggcgaatcttccggccagaaagccgacgactcgagcgagcctccgcctgcatattccgaaggctacagcccgctcctctccttttcatacctcatggccgccgccgggggtgcctcgagtattattactcaagtccagcaggggggaccgcccatcaatgccattggcgatgtcggtgccgatgagaccatcacaatggacctgaggggcacacgcttcgttctctccagagacgagctgctgacattgcccgaatttgtcctcctctccctattcccgaatggactcttcccagaaggccatatgggtggcttctccgacggcgatgccgtgcaagtcgattatgaccctgcatctctacaatacatgttggaattcttccgcaacgttgcgcagtccatacctaacgaagcctcacccaatgcttcccccgacggaggtgttgcccctattgactcgctagccggtcggggtgaggatggtagcaagcgggctggcattattgttttgagagaagatctcgatttctacgccatcccacctcggagggacattggccaagccgagatgatcgaagtcaagcgtgctgcgtccagggcgctcctgaaacaagacggcatcttttcaggattgaaacggagtgatgagcctggaacgacagaggcacatctcattgaaatgttgacagctggcggcttcaatcatgacgaccagtggggtcaccgggcgggggaacccaacaaggcagtagtatgcagtctggcgctggcgcggctccgtagcgacatccgtggtaacgacatgggcagcaacgcagtcgggatggcgcagaagcttcttctcttctggcgcaagccggcgcgacgatgctggtgggaaggcgttgagctggacaacgtggagggagtcgaggggcctctcaaggtgtggattcgaagagtgtggactctggagatgagcgtgattggattacgataggcggcaacggcatcacaagcaatcaagacgggcgttggaaggtgaaagaaatatgtttctgctttgtttttgaacagcacattaattccccagcatatgacgagccagcagtaggggaggatcatgcatgatagtcttggaagaagtgaattcggctgaaacatcgatagccagctttgcttatatcgcgtcactttgcaacggatagcatatgttgtgtagcaatcgagaatttgatatttgaggccttcagtgtgcggtctgtgaagtgctcaaaacagctcaacagaggtcagctctttgcccagtctttgcatatctcatacatattggcaaacgtatcggtatcgtgatctaatgaaaaggggaatgatggggttcgatttatgcattctcagccagacactactctgggctaagtgccacgctccgagatactagtgtcagcgggagatttgaagtacagtctactctaatgcatacaggaaaggctctcggaaaggggttgcattgcaataaaactcggcgactccctatcacatactttccagatggagccaggcttgcaaagattggacgttttatgaaatcaacttggacagttt

SEQ ID NO: 2478 - DNA, 1437 bp, Muscodor strobelii
  misc_feature: SGI cDNA ID NO. 560457
  misc_feature: Encodes the peptide sequence at SEQ ID NO 2479
atgcccctgacaaccaccggcggctccaactgccatcacaccctgaccggccctgatcaaagcacgaccacgccttgcgcatcaaccgtcgccacgttgtccgactcacaggaagatagtcacggagagtccgtgtccgctgggctcccgccgactactcccattgattacgcgaacatcgacttcgacgatcaagatatagacgggattgacgacgaggacaacaattgtgcacgttcgcctccaccgcaatatccataccctgcctccgaggcatcgggctcgacctctttctcacgccctgagccgcctcccttttcttcgctctacgcatatcctcccgccgaacatctcgccaacgaccatttcaagctccccgctcctgtctctgccacctcctatcccaggagccggagcctcttcagccactgccgctcccgcctacgctcccacaccaagggcgaatcttccggccagaaagccgacgactcgagcgagcctccgcctgcatattccgaaggctacagcccgctcctctccttttcatacctcatggccgccgccgggggtgcctcgagtattattactcaagtccagcaggggggaccgcccatcaatgccattggcgatgtcggtgccgatgagaccatcacaatggacctgaggggcacacgcttcgttctctccagagacgagctgctgacattgcccgaatttgtcctcctctccctattcccgaatggactcttcccagaaggccatatgggtggcttctccgacggcgatgccgtgcaagtcgattatgaccctgcatctctacaatacatgttggaattcttccgcaacgttgcgcagtccatacctaacgaagcctcacccaatgcttcccccgacggaggtgttgcccctattgactcgctagccggtcggggtgaggatggtagcaagcgggctggcattattgttttgagagaagatctcgatttctacgccatcccacctcggagggacattggccaagccgagatgatcgaagtcaagcgtgctgcgtccagggcgctcctgaaacaagacggcatcttttcaggattgaaacggagtgatgagcctggaacgacagaggcacatctcattgaaatgttgacagctggcggcttcaatcatgacgaccagtggggtcaccgggcgggggaacccaacaaggcagtagtatgcagtctggcgctggcgcggctccgtagcgacatccgtggtaacgacatgggcagcaacgcagtcgggatggcgcagaagcttcttctcttctggcgcaagccggcgcgacgatgctggtgggaaggcgttgagctggacaacgtggagggagtcgaggggcctctcaaggtgtggattcgaagagtgtggactctggagatgagcgtgattggattacgatag

SEQ ID NO: 2479 - protein, 478 aa, Muscodor strobelii
  misc_feature: SGI Peptide ID NO. 560457
  misc_feature (79)..(478): NCBI GI: 145613898 Blast Desc: conserved [Magnaporthe grisea 70-15] gi|145020910|gb|EDK05039.1| conserved [Magnaporthe grisea 70-15]
  misc_feature (76)..(478): NCBI GI: 46134267 Blast Desc: FG09273.1 [Gibberella zeae PH-1]
  misc_feature (79)..(478): NCBI GI: 256727149 Blast Desc: NECHADRAFT_91342 [Nectria haematococca mpVI 77-13-4]
  misc_feature (50)..(478): NCBI GI: 116202281 Blast Desc: conserved [Chaetomium globosum CBS 148.51] gi|88177543|gb|EAQ85011.1| conserved [Chaetomium globosum CBS 148.51]
  misc_feature (137)..(478): NCBI GI: 154323476 Blast Desc: BC1G_00137 [Botryotinia fuckeliana B05.10] gi|150842366|gb|EDN17559.1| BC1G_00137 [Botryotinia fuckeliana B05.10]
  misc_feature (185)..(478): NCBI GI: 40882311 Blast Desc: related to growth regulation protein WHI2 [Neurospora crassa]
  misc_feature (144)..(478): NCBI GI: 226293664 Blast Desc: peroxin 20 [Paracoccidioides brasiliensis Pb18]
  misc_feature (144)..(478): NCBI GI: 225678830 Blast Desc: phosphatase activator [Paracoccidioides brasiliensis Pb03]
  misc_feature (126)..(478): NCBI GI: 238838792 Blast Desc: growth regulation protein [Microsporum canis CBS 113480]
  misc_feature (185)..(478): NCBI GI: 171682318 Blast Desc: protein product [Podospora anserina] gi|170941118|emb|CAP66768.1| protein product [Podospora anserina]
MPLTTTGGSNCHHTLTGPDQSTTTPCASTVATLSDSQEDSHGESVSAGLPPTTPIDYANIDFDDQDIDGIDDEDNNCARSPPPQYPYPASEASGSTSFSRPEPPPFSSLYAYPPAEHLANDHFKLPAPVSATSYPRSRSLFSHCRSRLRSHTKGESSGQKADDSSEPPPAYSEGYSPLLSFSYLMAAAGGASSIITQVQQGGPPINAIGDVGADETITMDLRGTRFVLSRDELLTLPEFVLLSLFPNGLFPEGHMGGFSDGDAVQVDYDPASLQYMLEFFRNVAQSIPNEASPNASPDGGVAPIDSLAGRGEDGSKRAGIIVLREDLDFYAIPPRRDIGQAEMIEVKRAASRALLKQDGIFSGLKRSDEPGTTEAHLIEMLTAGGFNHDDQWGHRAGEPNKAVVCSLALARLRSDIRGNDMGSNAVGMAQKLLLFWRKPARRCWWEGVELDNVEGVEGPLKVWIRRVWTLEMSVIGLR

SEQ ID NO: 2480 - DNA, 2446 bp, Muscodor strobelii; identical to SEQ ID NO: 2477
  misc_feature: SGI EST ID NO. CUFF.7360.0
  misc_feature: Variant of the nucleotide sequence at SEQ ID NO 2478

SEQ ID NO: 2481 - DNA, 1152 bp, Muscodor strobelii
  misc_feature: SGI cDNA ID NO. 560458
  misc_feature: Encodes the peptide sequence at SEQ ID NO 2482
atggagtggtccgacctcaacatatgcttcaagctctacatcctgacagccgccttcatcgatgtatggtttctctactcgcaatatgacatactcaaaattattgcctcatttctcctcccctcctacgagctcccgtcaatcgccatgccatcatacaaagtcattctgctcgatttctacggcctcgtatccgccgtgtggtatttctctctagacgttagcaaaggctttgagtcactctacttaatacaacagtggctggcaaacattcctgctcgcggactttatcgatggcgcttgatttgcatgcgatacgcattattgttcatgaagataaagacgccttggtacatgctcaagtactattcttcgaaggctcgagagtctctcagtcaacgaacgaaaggtaaaaagtctaaagacgtgactgaaaaaaagaagacgactaatccccgaccagagctcgagagggcaaagcttaaaagggataggaatcgccttgcattgcagagaggcttttataacccgcgtctgcgtccttcacttgggataagagatgcggttgatacctctctacagactattatcgtgagtgcattgttttttaatgcttacagggcattgagattatgtgttcagggagcgaatgtggatgctgtggtcgtgggcatgggcatgggaagttttctgtgtgccgttgggttgatgatgggcggccagatgctgtcgtactacttttcaaaggttgtagcattctttggtgaaacgtttccgtccttgttttggcgggttgtagcgcttttcagggcgatcaagatgccttggtttgtcaggtggtactgttcgatcttttgggaattttatggtaagctgcttccgtcttggatttggaaggttgcagtgtgttttgttcgaccgtttctgtggatgaagtcacgacagaaaaagactgaggctctacctcaggttgagaaaccaaaaggcatgacgctgttttcgaacgtcgtatcgtttttcagtcaactgtttcagcgtaaagagtcccaacaagaagagagtcaacctcaaccagatcctcgatcagagcctcaatcagagcctcaactagaggttgagaagccaaagcgcccacgaactcgcaaagcgtag

SEQ ID NO: 2482 - protein, 383 aa, Muscodor strobelii
  misc_feature: SGI Peptide ID NO. 560458
MEWSDLNICFKLYILTAAFIDVWFLYSQYDILKIIASFLLPSYELPSIAMPSYKVILLDFYGLVSAVWYFSLDVSKGFESLYLIQQWLANIPARGLYRWRLICMRYALLFMKIKTPWYMLKYYSSKARESLSQRTKGKKSKDVTEKKKTTNPRPELERAKLKRDRNRLALQRGFYNPRLRPSLGIRDAVDTSLQTIIVSALFFNAYRALRLCVQGANVDAVVVGMGMGSFLCAVGLMMGGQMLSYYFSKVVAFFGETFPSLFWRVVALFRAIKMPWFVRWYCSIFWEFYGKLLPSWIWKVAVCFVRPFLWMKSRQKKTEALPQVEKPKGMTLFSNVVSFFSQLFQRKESQQEESQPQPDPRSEPQSEPQLEVEKPKRPRTRKA

SEQ ID NO: 2483 - DNA, 909 bp, Muscodor strobelii
  misc_feature: SGI cDNA ID NO. 560459
  misc_feature: Encodes the peptide sequence at SEQ ID NO 2484
atggcgcaggtgatatcaaattccggccatgatgacatgattcacgatgctgtcctcgactactatggtagacggcttgccacatgctcatccgacaagacaatcaagatattcgagatcgagggagagtctcaacggctgatcgagacgctcaagggacacgagggtgcagtctggtgtgtctcctgggcacaccccaagtatggaaacatcctcgcatcggcgggctacgatggcaaggtcttcatctggcgcgagcagtccaaccaatggcagaagatcttcgacttcgccctccacaaagcctctgtcaacatggtctcatggtcgccccacgaatcgggctgccttctcgcttgcgcctcctccgacggctctgtctccgtcatcgagttcaaagacaacaacttctccaacgtcatcttccccgcccacggccttggtgtcaactcggtctcttgggctcccgcaaccacacccggcagcatcgtctcctcctccgctcccggccccggcgctcttggccagcgacgctttgtcactggtggctgtgacaatgtcctgaagctctggacgtatgaccaggcatcgcagagctacacacaagagcgggagccactcacgggccacacagactgggtacgtgatgtagcatggagcccaacggtactgcagaagagctacatcgcgtcagcttcacaagacaagacagtgcgtatctggactagtgataatgccagccaaggacagtggtcgtgcaaggttctgaactttgatgctgtcgtctggcgggtcagctggagcctgagcggaaacgtgttggctgttagcggcggtgacaacaaagtttctctatggaaggagaatttgaggggcgagtgggaatgcgtcaaaaccatggaagagtaa

SEQ ID NO: 2484 - protein, 302 aa, Muscodor strobelii
  misc_feature: SGI Peptide ID NO. 560459
  misc_feature (45)..(85): Pfam Id: PF00400 Pfam Desc: WD domain, G-beta repeat
  misc_feature (201)..(242): Pfam Id: PF00400 Pfam Desc: WD domain, G-beta repeat
  misc_feature (136)..(192): Pfam Id: PF00400 Pfam Desc: WD domain, G-beta repeat
  misc_feature (91)..(131): Pfam Id: PF00400 Pfam Desc: WD domain, G-beta repeat
  misc_feature (1)..(39): Pfam Id: PF00400 Pfam Desc: WD domain, G-beta repeat
  misc_feature (262)..(287): Pfam Id: PF00400 Pfam Desc: WD domain, G-beta repeat
  misc_feature (2)..(302): NCBI GI: 171682324 Blast Desc: protein product [Podospora anserina] gi|170941121|emb|CAP66771.1| protein product [Podospora anserina]
  misc_feature (2)..(302): NCBI GI: 46134263 Blast Desc: FG09271.1 [Gibberella zeae PH-1]
  misc_feature (2)..(302): NCBI GI: 261359681 Blast Desc: transport protein sec-13 [Verticillium albo-atrum VaMs.102]
  misc_feature (2)..(302): NCBI GI: 256727732 Blast Desc: [Nectria haematococca mpVI 77-13-4]
  misc_feature (2)..(302): NCBI GI: 164426726 Blast Desc: protein transport protein SEC13 [Neurospora crassa OR74A] gi|166209892|sp|Q7RZF5.2|SEC13_NEUCR RecName: Full=Protein transport protein sec-13 gi|157071450|gb|EAA28442.2| protein
  misc_feature (13)..(302): NCBI GI: 116202287 Blast Desc: conserved [Chaetomium globosum CBS 148.51] gi|121778747|sp|Q2GSM6.1|SEC13_CHAGB RecName: Full=Protein transport protein SEC13 gi|88177546|gb|EAQ85014.1| conserved CBS
  misc_feature (1)..(302): NCBI GI: 156036122 Blast Desc: SS1G_12747 [Sclerotinia sclerotiorum 1980] gi|154698155|gb|EDN97893.1| SS1G_12747 [Sclerotinia sclerotiorum 1980]
  misc_feature (1)..(302): NCBI GI: 154314265 Blast Desc: BC1G_05226 [Botryotinia fuckeliana B05.10] gi|150848871|gb|EDN24064.1| BC1G_05226 [Botryotinia fuckeliana B05.10]
  misc_feature (1)..(302): NCBI GI: 242765797 Blast Desc: nuclear pore complex subunit (SEC13), [Talaromyces stipitatus ATCC 10500] gi|218724242|gb|EED23659.1| nuclear pore complex subunit (SEC13), [Talaromyces stipitatus ATCC 10500]
  misc_feature (2)..(302): NCBI GI: 238492042 Blast Desc: nuclear pore complex subunit (SEC13), [Aspergillus flavus NRRL3357] gi|220697671|gb|EED54012.1| nuclear pore complex subunit (SEC13), [Aspergillus flavus NRRL3357]
  misc_feature (9)..(287): SWISSPROT Homolog: EC 2.7.11.1 Non-specific serine/threonine protein kinase
MAQVISNSGHDDMIHDAVLDYYGRRLATCSSDKTIKIFEIEGESQRLIETLKGHEGAVWCVSWAHPKYGNILASAGYDGKVFIWREQSNQWQKIFDFALHKASVNMVSWSPHESGCLLACASSDGSVSVIEFKDNNFSNVIFPAHGLGVNSVSWAPATTPGSIVSSSAPGPGALGQRRFVTGGCDNVLKLWTYDQASQSYTQEREPLTGHTDWVRDVAWSPTVLQKSYIASASQDKTVRIWTSDNASQGQWSCKVLNFDAVVWRVSWSLSGNVLAVSGGDNKVSLWKENLRGEWECVKTMEE

SEQ ID NO: 2485 - DNA, 1481 bp, Muscodor strobelii
  misc_feature: SGI EST ID NO. CUFF.7436.1
  misc_feature: Variant of the nucleotide sequence at SEQ ID NO 2483
ggaaggtgggctgtctgaaggttcacttcacagcttgctgggtgctgtggtggagctctaaggtggaaagcgacaggcgccttacaacacagggcgagcccattgattggaaggggccaagtcgacatttccaaagggacaagttacgcctacctaggtgactgcctgccgttcaagacaacaacaatctcgtccctcgtcactctagtccttctcgttctgcttttccagttgacctgctcatcccaacgcatatcgtgtttttctgcgcgaatcttggcccaaaatggcgcaggtgatatcaaattccggccatgatgacatgattcacgatgctgtcctcgactactatggtagacggcttgccacatgctcatccgacaagacaatcaagatattcgagatcgagggagagtctcaacggctgatcgagacgctcaagggacacgagggtgcagtctggtgtgtctcctgggcacaccccaagtatggaaacatcctcgcatcggcgggctacgatggcaaggtcttcatctggcgcgagcagtccaaccaatggcagaagatcttcgacttcgccctccacaaagcctctgtcaacatggtctcatggtcgccccacgaatcgggctgccttctcgcttgcgcctcctccgacggctctgtctccgtcatcgagttcaaagacaacaacttctccaacgtcatcttccccgcccacggccttggtgtcaactcggtctcttgggctcccgcaaccacacccggcagcatcgtctcctcctccgctcccggccccggcgctcttggccagcgacgctttgtcactggtggctgtgacaatgtcctgaagctctggacgtatgaccaggcatcgcagagctacacacaagagcgggagccactcacgggccacacagactgggtacgtgatgtagcatggagcccaacggtactgcagaagagctacatcgcgtcagcttcacaagacaagacagtgcgtatctggactagtgataatgccagccaaggacagtggtcgtgcaaggttctgaactttgatgctgtcgtctggcgggtcagctggagcctgagcggaaacgtgttggctgttagcggcggtgacaacaaagtttctctatggaaggagaatttgaggggcgagtgggaatgcgtcaaaaccatggaagagtaaatgtttgacgaagatttggacgtccccaaaactattataccttgctagatgttcaatccggtattgttctggttgagagaggtcctggaaagcaggatagacgaggaagagagcaggtaacgaggattgtggccgttcgcaagattatgacggccttcacaaccaaaagtatgagactttgcgattgacatggcaggcgcaaaggataatagacacgataatgagctacgttgattggggtatcgactactgtttgcatgatcaattgtgacgtgatactagtcct

SEQ ID NO: 2486 - DNA, 978 bp, Muscodor strobelii
  misc_feature: SGI cDNA ID NO. 560460
  misc_feature: Reduced expression when VOC is produced
  misc_feature: Encodes the peptide sequence at SEQ ID NO 2487
atggagcctgtctgcggcccatcgaatgtcttcaagggcttggcccgccatcttgagcaggatcgctcgcaccagcaggatagattcgtgagaggctctcagccgggaccccagaacttccgcactactccgcccacaaataatgcagctgcaggacaatttgcttcttttcaacagcaaaatgcatctctcacacaattcccagcagcagttcaatatcccgttttgtctccgtcacctcaggatcattcaccaggtccaaatacgttttcgccacaacaaattcagtcacctggacttactagcaatagttgggttaatgactttcaacagatgagggtatctggagagccggctaggactgcgggtggacagcatgcccagctaccaactaaccagccaggcatgcttggctccttgagcccgtcctggtctcatcctgcatttcaaggcgggttttcatcatttcagccttcgtttgggtttcagccaaatatggcgcaaaataccattcctcagtctcagagccaggaggcacgaaatcagatgactcagtttgataaagagtttgacgatatcatgaacgattggatggctcagaacgctccagcgacggagactaaagccgagactagtgatcaaacccagctcgaagatacgctgactatgagccttaatgcagcttcagccgagcctgtaatccaggatgcaatggaaaacgatagaagcgaatcaccagaggccaacacggaactgtctcgggctgcgcaacaacttgtcgagtccgttgccgataatgaatcggacaagttcaaaaactcagagtttctagctctaatgcgccgtatagcatcgcaacaactcacagtgcaaggcaatgatcttgtagagacatcgcgtcctcctagcacggaggctccagctatgaaatccccagctgcgaccgatcagccacggcctgaactcatgttttcgtga

SEQ ID NO: 2487 - protein, 325 aa, Muscodor strobelii
  misc_feature: SGI Peptide ID NO. 560460
  misc_feature (2)..(322): NCBI GI: 116202289 Blast Desc: CHGG_09029 [Chaetomium globosum CBS 148.51] gi|88177547|gb|EAQ85015.1| CHGG_09029 [Chaetomium globosum CBS 148.51]
  misc_feature (4)..(301): NCBI GI: 145256461 Blast Desc: An04g00370 [Aspergillus niger] gi|134058301|emb|CAK38492.1| protein product [Aspergillus niger]
  misc_feature (4)..(300): NCBI GI: 115400805 Blast Desc: conserved [Aspergillus terreus NIH2624] gi|114191657|gb|EAU33357.1| conserved [Aspergillus terreus NIH2624]
  misc_feature (4)..(300): NCBI GI: 255943613 Blast Desc: peroxin-20 Pex20-Penicillium chrysogenum [Penicillium chrysogenum Wisconsin 54-1255] gi|111609741|gb|ABH11425.1| peroxin 20 [Penicillium chrysogenum] gi|211587309|emb|CAP85339.1|
  misc_feature (4)..(301): NCBI GI: 121706480 Blast Desc: conserved [Aspergillus clavatus NRRL 1] gi|119399650|gb|EAW10076.1| conserved [Aspergillus clavatus NRRL 1]
  misc_feature (4)..(298): NCBI GI: 171682326 Blast Desc: protein product [Podospora anserina] gi|170941122|emb|CAP66772.1| protein product [Podospora anserina]
  misc_feature (4)..(299): NCBI GI: 146323699 Blast Desc: conserved [Aspergillus fumigatus Af293] gi|129557580|gb|EAL90176.2| conserved [Aspergillus fumigatus Af293] gi|159124873|gb|EDP49990.1| conserved [Aspergillus A1163]
  misc_feature (4)..(298): NCBI GI: 156036124 Blast Desc: SS1G_12748 [Sclerotinia sclerotiorum 1980] gi|154698156|gb|EDN97894.1| SS1G_12748 [Sclerotinia sclerotiorum 1980]
  misc_feature (4)..(297): NCBI GI: 154314267 Blast Desc: BC1G_05227 [Botryotinia fuckeliana B05.10] gi|150848872|gb|EDN24065.1| BC1G_05227 [Botryotinia fuckeliana B05.10]
  misc_feature (4)..(301): NCBI GI: 261197035 Blast Desc: peroxin 20 [Ajellomyces dermatitidis SLH14081] gi|239595550|gb|EEQ78131.1| peroxin 20 [Ajellomyces dermatitidis SLH14081] gi|239606543|gb|EEQ83530.1| peroxin 20 [Ajellomyces
  misc_feature: Useful for introducing or modulating the production of volatile compounds
MEPVCGPSNVFKGLARHLEQDRSHQQDRFVRGSQPGPQNFRTTPPTNNAAAGQFASFQQQNASLTQFPAAVQYPVLSPSPQDHSPGPNTFSPQQIQSPGLTSNSWVNDFQQMRVSGEPARTAGGQHAQLPTNQPGMLGSLSPSWSHPAFQGGFSSFQPSFGFQPNMAQNTIPQSQSQEARNQMTQFDKEFDDIMNDWMAQNAPATETKAETSDQTQLEDTLTMSLNAASAEPVIQDAMENDRSESPEANTELSRAAQQLVESVADNESDKFKNSEFLALMRRIASQQLTVQGNDLVETSRPPSTEAPAMKSPAATDQPRPELMFS

SEQ ID NO: 2488 - DNA, 2114 bp, Muscodor strobelii
  misc_feature: SGI EST ID NO. CUFF.7449.0
  misc_feature: Variant of the nucleotide sequence at SEQ ID NO 2486
agaaaatccagatactttcttttctcctgtagcttcttcgtgtacgatatttatttacgactagttcccctaccattcctacagtgaagactgggtgcatcaaggaagccccaagaaagacattggcctacattacacattttgccttcagtcttggatcatccgcgggagaggtcacaacattcacgctttgacttttacctgcccatcacgaaagagacctcatacttgcgctggttcagaatcatctgtgttgcagtcatattactcatcgcctttatacatcttgatcaataatcgccggaaattacgcctgcgatcgttggcgttagacactttgagccggttcaatactcaggagtcggaccacttgaaccatcggcttcttgcccaagtcagactgcacaatggagcctgtctgcggcccatcgaatgtcttcaagggcttggcccgccatcttgagcaggatcgctcgcaccagcaggatagattcgtgagaggctctcagccgggaccccagaacttccgcactactccgcccacaaataatgcagctgcaggacaatttgcttcttttcaacagcaaaatgcatctctcacacaattcccagcagcagttcaatatcccgttttgtctccgtcacctcaggatcattcaccaggtccaaatacgttttcgccacaacaaattcagtcacctggacttactagcaatagttgggttaatgactttcaacagatgagggtatctggagagccggctaggactgcgggtggacagcatgcccagctaccaactaaccagccaggcatgcttggctccttgagcccgtcctggtctcatcctgcatttcaaggcgggttttcatcatttcagccttcgtttgggtttcagccaaatatggcgcaaaataccattcctcagtctcagagccaggaggcacgaaatcagatgaatgaaccacttttttctctcgataatcaagctcagtttgataaagagtttgacgatatcatgaacgattggatggctcagaacgctccagcgacggagactaaagccgagactagtgatcaaacccagctcgaagatacgctgactatgagccttaatgcagcttcagccgagcctgtaatccaggatgcaatggaaaacgatagaagcgaatcaccagaggccaacacggaactgtctcgggctgcgcaacaacttgtcgagtccgttgccgataatgaatcggacaagttcaaaaactcagagtttctagctctaatgcgccgtatagcatcgcaacaactcacagtgcaaggcaatgatcttgtagagacatcgcgtcctcctagcacggaggctccagctatgaaatccccagctgcgaccgatcagccacggcctgaactcatgttttcgtgaaacaggtacctattggttcaatctagcacaaagtgccactacttgagcctcgattgaagtcaaaaaattgtctagctcacgacaagctctctgtttgatcgatcgtactggagctctttcgcccgtagagagaaagcatcagctgtctactggaaagtggtcattgggacgcattgttgcaggaggggggagagggcccagggtggagctcgagataagccgtgcgtatgcggatgtcgaagggacatgagcgcgtgaggcaccgcatcaggtcgggcagtctacgtgcgaggatgtaaagcacgatctggtaggcatgactgggactctgacacctgtatgatataagcctcgtatcactgttagtgctacaagagcctcatcgacaaagcagcgttctatgttcatgatcttgcttcatgatgataaatgacatatcgtccgagcatgataccactcgtgggaagtgacggcgtcctcggacatggaggcatgagcaaaatgcacagaagtagcataaacagaatcagagagcgctatcaaagcgctaagcaagatgaaatagatgtataggtagaaggctcgactgagaggcgaggtacttatcagttctaacgtactatgtataaggtattatgtacggcgcatatgcacatgcagtccgattacgataacataagctttaggaatttaatcgcg

SEQ ID NO: 2489 - DNA, 3504 bp, Muscodor strobelii
  misc_feature: SGI cDNA ID NO. 560461
  misc_feature: Elevated expression when VOC is produced
  misc_feature: Encodes the peptide sequence at SEQ ID NO 2490
atggcaacatcgagagaaactaccacgttccgtcttcgtcgctgtccagctaacgcaaccgcaaaaacatgccaagaatggcttagtctagctttcctcgatattcagcctgaggagattcgagttctgtctttggctaccaatttagatccatgggagcgtccgcgtactaaagtcgcaactcttatgttcttgaccactcccgccttagtcttggaacaagagtcgaaaaatgaatggatcttaccgatagacggccttacagaaactcttatcctagacacgcatttcctcgggctgaccctcttgaacgatgtcgatgaggcggcgcatgaatacgatgtgattgctatttccggccttgccagccatccattcgggtcttggcaagtcaaaggtgggaacaggagcttcatgtggattcgcgatgctctaccgcgagctatgcccgagattagagctatcttgtacggctatgattcgagacttctggaaagcaaatccttccaatcgattgaagacttagctacctcattcatcaatcatatcaaagcaaatggatggcattttgtcacttctaggcctctgatattcctcgcccatagcctaggtggtatcgtattgaaagcatctttctcgatgatggctagcggcgatgatcatggtctgtcaatcttaaatcgttttcgtggcggtatctttttcggtgtaccgagcctcgggatgaccatctcgcatcttcttgcaatggttgagggtcaagtcaatgaacaaatgatcagcgacctagcaacgacatcagagtatttaagaacactcgacgaacagttctccggcatagtactaacaaggtatatgaatcttcgttgggcatatgagacgaagacctccccaaccagacatgaagatgggagctattcgcggtcagggcctgaagagattctagttaccaaagactcagcgacccgaaggctacatcatctccgcacaccagcaacatttccaataaacgaaaatcattcggatatggtcaagttccggcaatacgatcctaactttcagattgtcctcggtaagctacgcgatatttgcggatatggaagcaacaaagggacggagatcgatcgcagaggaaacagaaatagtgatggtcacacattaaatcactcactagggagatcagacgcgtatgaaatggaatcaattcaggtggattggatcctgaatgaccggctgcgagccactgttatcaacgagcttttcaagtcgctcgaaataccaggtcgcgacagtcgtcttgattccattgacgacaagtttaaccatacctttgagtggatattcgatgaagggtctacgctgactaaatggttgaaagacgaatccggcatattctggatacatggaaagccaggatcgggaaaatcaaccttgatgaaattcatcttccaaagttctcgaacatgggaattgttgcacaagttttcttcagaggctttacaggtcaaagcagcatttttcttccatgacagaggggtcctgatgcaaaggtcgtttgagggcctattgagaagtattctgcaccagatcatcagcagcagtgaccgcctgccaataatgcttgctcagaaattacgcaacgaacggggaggacgcacaatcatgcctgaggactggtctatcagcgaacttgagagctccatacgctattttattcgacaggatgaagtaaaattagagctcttttttgtgttcgacgcgctcgatgagtttgacgggcagccggattttgtttgccaaactctgaaagagatgatgaacgcgatggtcaattctcccaacaaattgaagattttgttttccagtcgattttgggatatttttcacgggcaattcaaaggcgtacagtcacttcagctccaagatcacacaaagggcgacattcttgaatattgtctcggctttgttgacgctcagggtgacgatatctcagtagctctaaacgccatcacttccgcaataatcgacagagccaatggcgtattcctatgggtcaagttagtgctgcacgagcttatcgcggaggccgcgagaggcaaacaagcacacgagctcttggaaattctaaacaccattccagacgacttgcgagactactacgccaggatcattgagcgcattccagagaagtataggtgggaagcgtatgtcatctttcaaattttgactagcggtcgagacgtcttttcactgtctcacttgctcgacatcattgcctgttcccaagcaaaaacgtatacagaggcccggcaaaatttggcaatgccagagcgttctctcattacttcaaagtggaaagagcagaatgcgcctaccattgctcaagagaaacaactgaacaggaccctgactaagctcttttcgcgagcctcgtgggccatcaacatcacaagacgtcagttcgagttctcttataagaaagaacagcaaaaaggcaagatcacgacgataacaggcggattagtcgaattcactccggtcaggctttcgacctccaagatagcagacgcagcgcagctggctcaccaaactgttcgagaatttgcaagagatgataaattcaagaggcgtatccttggcagccgatccaggcagacgttcgagaatggacatacatttcttgccaaatacgccctcgccagcggtgaccttcttagaagtgccccgttcttcttctccaacgaaaggacgaccagcaacagccttcagcatttcatagacagcgtgccaaaggacgtctttcttagatttgacaaggaggatttgaggacacgcgcaaagcgccgtacaactaagccatcgccgataaacggcccgctcgcatttgctgttcacaataatcttcaattatacctcgaggactgctttcagcggaactcgagcgtgtttcgagaaacgaaggagaagctgttgtctgttccgccaaattcataccttatgcagacacatactaccactattgagcatcatcaagccagtatcgccatcatgaaatatctattgacacatggttacacaataagacagagcccagaagcttttaaattgatagtggccgatctactagaagatatcgttaatgataagcacacattcgacatcgatcaaaaatttttggaggcgatacttacaatactgatatcctatggccaaccagcggatacaatcattgacgttcctgatagacagatttgcccaaatcctgcaaggaattgcgtgcaagctattcacattgccacgtcagctgatctcatagactgtatcctgaagaaaggagtcgacatcaacataacggacggatcaggcaatcgacctctagatcacgccctcaccctttgggacgacgaccgacagtctcgccaaacactactcatacttagtgagggtgatgatatgaccgggaatctctgggtcggtgtcattgttgacatacccagtgcctag

SEQ ID NO: 2490 - protein, 1167 aa, Muscodor strobelii
  misc_feature: SGI Peptide ID NO. 560461
  misc_feature (1)..(1127): NCBI GI: 116198787 Blast Desc: CHGG_07549 [Chaetomium globosum CBS 148.51] gi|88178828|gb|EAQ86296.1| CHGG_07549 [Chaetomium globosum CBS 148.51]
  misc_feature (8)..(532): NCBI GI: 116191799 Blast Desc: CHGG_05617 [Chaetomium globosum CBS 148.51] gi|88181530|gb|EAQ88998.1| CHGG_05617 [Chaetomium globosum CBS 148.51]
  misc_feature (9)..(532): NCBI GI: 116201887 Blast Desc: CHGG_08828 [Chaetomium globosum CBS 148.51] gi|88177346|gb|EAQ84814.1| CHGG_08828 [Chaetomium globosum CBS 148.51]
  misc_feature (8)..(393): NCBI GI: 145231014 Blast Desc: An01g13700 [Aspergillus niger] gi|134055898|emb|CAK37376.1| protein product [Aspergillus niger]
  misc_feature (412)..(756): NCBI GI: 154293653 Blast Desc: BC1G_14084 [Botryotinia fuckeliana B05.10] gi|150845240|gb|EDN20433.1| BC1G_14084 [Botryotinia fuckeliana B05.10]
  misc_feature (99)..(755): NCBI GI: 261355193 Blast Desc: SERAC1 [Verticillium albo-atrum VaMs.102]
  misc_feature (392)..(751): NCBI GI: 46111055 Blast Desc: FG02409.1 [Gibberella zeae PH-1]
  misc_feature (94)..(772): NCBI GI: 119175449 Blast Desc: CIMG_09574 [Coccidioides immitis RS]
  misc_feature (420)..(732): NCBI GI: 169616506 Blast Desc: SNOG_11426 [Phaeosphaeria nodorum SN15] gi|160703200|gb|EAT81134.2| SNOG_11426 [Phaeosphaeria nodorum SN15]
  misc_feature (419)..(752): NCBI GI: 256725921 Blast Desc: NECHADRAFT_82115 [Nectria haematococca mpVI 77-13-4]
  misc_feature: Useful for introducing or modulating the production of volatile compounds
MATSRETTTFRLRRCPANATAKTCQEWLSLAFLDIQPEEIRVLSLATNLDPWERPRTKVATLMFLTTPALVLEQESKNEWILPIDGLTETLILDTHFLGLTLLNDVDEAAHEYDVIAISGLASHPFGSWQVKGGNRSFMWIRDALPRAMPEIRAILYGYDSRLLESKSFQSIEDLATSFINHIKANGWHFVTSRPLIFLAHSLGGIVLKASFSMMASGDDHGLSILNRFRGGIFFGVPSLGMTISHLLAMVEGQVNEQMISDLATTSEYLRTLDEQFSGIVLTRYMNLRWAYETKTSPTRHEDGSYSRSGPEEILVTKDSATRRLHHLRTPATFPINENHSDMVKFRQYDPNFQIVLGKLRDICGYGSNKGTEIDRRGNRNSDGHTLNHSLGRSDAYEMESIQVDWILNDRLRATVINELFKSLEIPGRDSRLDSIDDKFNHTFEWIFDEGSTLTKWLKDESGIFWIHGKPGSGKSTLMKFIFQSSRTWELLHKFSSEALQVKAAFFFHDRGVLMQRSFEGLLRSILHQIISSSDRLPIMLAQKLRNERGGRTIMPEDWSISELESSIRYFIRQDEVKLELFFVFDALDEFDGQPDFVCQTLKEMMNAMVNSPNKLKILFSSRFWDIFHGQFKGVQSLQLQDHTKGDILEYCLGFVDAQGDDISVALNAITSAIIDRANGVFLWVKLVLHELIAEAARGKQAHELLEILNTIPDDLRDYYARIIERIPEKYRWEAYVIFQILTSGRDVFSLSHLLDIIACSQAKTYTEARQNLAMPERSLITSKWKEQNAPTIAQEKQLNRTLTKLFSRASWAINITRRQFEFSYKKEQQKGKITTITGGLVEFTPVRLSTSKIADAAQLAHQTVREFARDDKFKRRILGSRSRQTFENGHTFLAKYALASGDLLRSAPFFFSNERTTSNSLQHFIDSVPKDVFLRFDKEDLRTRAKRRTTKPSPINGPLAFAVHNNLQLYLEDCFQRNSSVFRETKEKLLSVPPNSYLMQTHTTTIEHHQASIAIMKYLLTHGYTIRQSPEAFKLIVADLLEDIVNDKHTFDIDQKFLEAILTILISYGQPADTIIDVPDRQICPNPARNCVQAIHIATSADLIDCILKKGVDINITDGSGNRPLDHALTLWDDDRQSRQTLLILSEGDDMTGNLWVGVIVDIPSA

SEQ ID NO: 2491 - DNA, 899 bp, Muscodor strobelii
  misc_feature: SGI EST ID NO. CUFF.7452.0
  misc_feature: Variant of the nucleotide sequence at SEQ ID NO 2489
tgtccccattgatcatctcaacccctcaaaatattaacaactgtcgggtggtcgtgttgagctcatataggtgcaagcgcccaacggcgatccccgcaaatctctatatccgccaactccttgaacacttacgatgccttttcagtctttgaagcgcacgctttattgattagagatggttgtgaaactttatagttgtcacctgagtcgtgtctgactgtcggcaacgggccgtcatggcaacatcgagagaaactaccacgttccgtcttcgtcgctgtccagctaacgcaaccgcaaaaacatgccaagaatggcttagtctagctttcctcgatattcagcctgaggagattcgagttctgtctttggctaccaatttagatccatgggagcgtccgcgtactaaagtcgcaactcttatgttcttgaccactcccgccttagtcttggaacaagagtcgaaaaatgaatggatcttaccgatagacggccttacagaaactcttatcctagacacgcatttcctcgggctgaccctcttgaacgatgtcgatgaggcggcgcatgaatacgatgtgattgctatttccggccttgccagccatccattcgggtcttggcaagtcaaaggtgggaacaggagcttcatgtggattcgcgatgctctaccgcgagctatgcccgagattagagctatcttgtacggctatgattcgagacttctggaaagcaaatccttccaatcgattgaagacttagctacctcattcatcaatcatatcaaagcaaatggatggcattttgtcacttctaggcctctgatattcctcgcccatagcctaggtggtagtaagtaagccctaggatcgagtctagacttcatattttaccgttcg

SEQ ID NO: 2492 - DNA, 1101 bp, Muscodor strobelii
  misc_feature: SGI cDNA ID NO. 560462
  misc_feature: Encodes the peptide sequence at SEQ ID NO 2493
atgtctggagacgaaatcatagaagacctgcccctccttcccgcagatgttaccgcacaatggctagggtccaaacttgggcattcgatcaaatctattgagaatacgcacaccatctgggggacggccagcaagttattctacaccattgactatgaggacgaagccaacgatggcagcgatcgaccaaaacatgtttgtatcaagggcgtcttcgatccaaagatgatagcagctcagccttggacggtcagtctagcgcagcgagaggctgagttcttctctaaattggctccaaacatcaagaacatgatctatccacggggatggtgggcgagcaaaggagagaagcagggcattgctattatgaacgatctcacgaaggaaggatgcacgttcgccgctgaagtcgcatcatttcctgtcgagaaggtgatgaacggagttgagcaattggcgggtctacatgctcagtattggggccaaagccagaaagaacatccgtggatctggaacaactacgatccaggcatgaagttcatgtgttctgcctgggacgacgtcgtgcgtcaaccagggcggacaaagctgcctgagtatctgatgaatgggaaacgatgtaacgaggcattagatcgctattacgctgagcgcaatcctcgcttccgtacgcttctccacggcgacacgcacatcggcaacatttacttcaccgccaaaggggagataggatttctagattggtcagcatttcacttcggatcttgtttccacgatatcgtatatcacatgacggcgatgttaaacatcgaagatcgacgtgctcatgaaatggagattctcgaccactatcttgaagccttgcatcgacttggagggccaaaattagatcgtcacagtgatcctgaggttatgatcgaataccgtcgctctttcatgacgaatgtgatctggcttatctgccctgacggtctacagtctaaggagcgtgttgcgatgttgtgcgagaggactgtggctacttatgatgatcataaagtcatcgatttgctcctggacccgcccaagttttcaaatgctgcaaccgccgccgcaacatga

SEQ ID NO: 2493 - protein, 366 aa, Muscodor strobelii
  misc_feature: SGI Peptide ID NO. 560462
  misc_feature (38)..(293): Pfam Id: PF02958 Pfam Desc: Domain of function (DUF227)
  misc_feature (3)..(359): NCBI GI: 46115600 Blast Desc: FG03642.1 [Gibberella zeae PH-1]
  misc_feature (8)..(356): NCBI GI: 256726985 Blast Desc: [Nectria haematococca mpVI 77-13-4]
  misc_feature (10)..(351): NCBI GI: 46126831 Blast Desc: FG07793.1 [Gibberella zeae PH-1]
  misc_feature (7)..(350): NCBI GI: 46117314 Blast Desc: FG04499.1 [Gibberella zeae PH-1]
  misc_feature (8)..(351): NCBI GI: 256733834 Blast Desc: NECHADRAFT_36810 [Nectria haematococca mpVI 77-13-4]
  misc_feature (8)..(203): NCBI GI: 164422673 Blast Desc: NCU09776 [Neurospora crassa OR74A] gi|157069773|gb|EAA29124.2| conserved [Neurospora crassa OR74A]
  misc_feature (10)..(357): NCBI GI: 116199033 Blast Desc: CHGG_07672 [Chaetomium globosum CBS 148.51] gi|88178951|gb|EAQ86419.1| CHGG_07672 [Chaetomium globosum CBS 148.51]
  misc_feature (10)..(351): NCBI GI: 46111069 Blast Desc: FG02416.1 [Gibberella zeae PH-1]
  misc_feature (8)..(352): NCBI GI: 256730199 Blast Desc: NECHADRAFT_45402 [Nectria haematococca mpVI 77-13-4]
  misc_feature (10)..(351): NCBI GI: 256722660 Blast Desc: NECHADRAFT_16945 [Nectria haematococca mpVI 77-13-4]
MSGDEIIEDLPLLPADVTAQWLGSKLGHSIKSIENTHTIWGTASKLFYTIDYEDEANDGSDRPKHVCIKGVFDPKMIAAQPWTVSLAQREAEFFSKLAPNIKNMIYPRGWWASKGEKQGIAIMNDLTKEGCTFAAEVASFPVEKVMNGVEQLAGLHAQYWGQSQKEHPWIWNNYDPGMKFMCSAWDDVVRQPGRTKLPEYLMNGKRCNEALDRYYAERNPRFRTLLHGDTHIGNIYFTAKGEIGFLDWSAFHFGSCFHDIVYHMTAMLNIEDRRAHEMEILDHYLEALHRLGGPKLDRHSDPEVMIEYRRSFMTNVIWLICPDGLQSKERVAMLCERTVATYDDHKVIDLLLDPPKFSNAATAAAT

SEQ ID NO: 2494 - DNA, 1533 bp, Muscodor strobelii
  misc_feature: SGI cDNA ID NO. 560463
  misc_feature: Elevated expression when VOC is produced
  misc_feature: Encodes the peptide sequence at SEQ ID NO 2495
atgatggacaatataattgccgatatgagaacggggcaagccgaaatagaaacctcgaagccggaatcaaacacggaaccggaagcgggatcggatcaatgccgcaacgctccagatgccgacgaagaaaatccccctttcttcgctctgagccgctccaaaaagaccgtcgtagcgcttcaagcagctgtagccggcagcttctcgacgctggcaagctacatctactatcccgcgctggtcccactagcgaacgagctacgtgtgtcgctagctctgatcaacctgactctgacttcttatctactggtagcggccgtggcgccggcgttgatgggagatgccgccgaccggttcgggcgacggcccgtctacggcctcatgttcgtattttttcttggtgctaatgtgggaattgcagtccagcagtcctatcccgctttgctagtcctgcgcatggtgcagagtgctggaacttcgggtctcatttccgttgcgtacggcgtgatagcggacattacgacgcggaaagaccgaggcggctactgtgccatgttcgatcttttaatccagttcgccctaagccttggtccagtgatcgggggtgctatcactcagcagctgggctggcgctgggtattttggtttctcaccatcctgagcggctcgcattttctaatcatggtcttcttccttccggaaacaaaccataccattaatgaagagtctacagctaggctacagggagtgtacaggagcattgtcacactcactcggaacgtcgggatcaccgaggacgccattcggtcccaaaagctcagcggccgttttccaaacccctttgcctctttacgtattctcggcgacaaggaatcgctcgcagccatcatgttgtattctatcacttatgcagttaaaatggcactacaggcgtcactcggagctcagtgtgttgagatatatcatttaaattatctggctgccggtctgatttatcttccttcaggcattggtggcctactcgctgcctatctcaccgggcgttatctcgatagaacgtacaaggcgaatcgtgccagggcgtctagtatagacgatggcttggagggtgacagcttaggaatatccatagagcatacgagattgaaagggatatatgtcctaatcggcgctagtaccgcggagactgtaggatatggattagtcctcatgacaagggcgcacatatctgtcatgatcgttttacagtttctgttcggattgagtacctcagggatatttacaatgtcagcaacactcttgactgatctcaacgaacgccagtcggctacggcccagggtgcctgtagcttgatccggtgtttgggtgcagcggcagccatagcagccttacagcctctagctggtaaagtcgggctaggtctatgctttgccgtatacgccatactgcttgctctagaaatacccactgtctggcttattcggagatatggcgcaaaatggagatgtgctagacttgcgcggtcattgtaa

SEQ ID NO: 2495 - protein, 510 aa, Muscodor strobelii
  misc_feature: SGI Peptide ID NO. 560463
  misc_feature (62)..(461): Pfam Id: PF07690 Pfam Desc: Major Facilitator Superfamily
  misc_feature (3)..(500): NCBI GI: 256720826 Blast Desc: NECHADRAFT_50131 [Nectria haematococca mpVI 77-13-4]
  misc_feature (47)..(506): NCBI GI: 85114992 Blast Desc: NCU00875 [Neurospora crassa OR74A] gi|28926585|gb|EAA35555.1| [Neurospora crassa OR74A]
  misc_feature (16)..(429): NCBI GI: 240108759 Blast Desc: Major Facilitator Superfamily protein [Coccidioides posadasii C735 delta SOWgp]
  misc_feature (55)..(339): NCBI GI: 116205175 Blast Desc: CHGG_10471 [Chaetomium globosum CBS 148.51] gi|88176599|gb|EAQ84067.1| CHGG_10471 [Chaetomium globosum CBS 148.51]
  misc_feature (42)..(407): NCBI GI: 171689656 Blast Desc: protein product [Podospora anserina] gi|170944790|emb|CAP70901.1| protein product [Podospora anserina]
  misc_feature (20)..(502): NCBI GI: 115398660 Blast Desc: conserved [Aspergillus terreus NIH2624] gi|114191802|gb|EAU33502.1| conserved [Aspergillus terreus NIH2624]
  misc_feature (31)..(482): NCBI GI: 46138129 Blast Desc: FG10579.1 [Gibberella zeae PH-1]
  misc_feature (25)..(506): NCBI GI: 255947864 Blast Desc: Pc22g06710 [Penicillium chrysogenum Wisconsin 54-1255] gi|211591716|emb|CAP97959.1| Pc22g06710 [Penicillium chrysogenum Wisconsin 54-1255]
  misc_feature (20)..(510): NCBI GI: 171676988 Blast Desc: protein product [Podospora anserina] gi|170936561|emb|CAP61221.1| protein product [Podospora anserina]
  misc_feature (18)..(509): NCBI GI: 39944284 Blast Desc: MGG_04153 [Magnaporthe grisea 70-15] gi|145014887|gb|EDJ99455.1| MGG_04153 [Magnaporthe grisea 70-15]
  misc_feature: Useful for introducing or modulating the production of volatile compounds
MMDNIIADMRTGQAEIETSKPESNTEPEAGSDQCRNAPDADEENPPFFALSRSKKTVVALQAAVAGSFSTLASYIYYPALVPLANELRVSLALINLTLTSYLLVAAVAPALMGDAADRFGRRPVYGLMFVFFLGANVGIAVQQSYPALLVLRMVQSAGTSGLISVAYGVIADITTRKDRGGYCAMFDLLIQFALSLGPVIGGAITQQLGWRWVFWFLTILSGSHFLIMVFFLPETNHTINEESTARLQGVYRSIVTLTRNVGITEDAIRSQKLSGRFPNPFASLRILGDKESLAAIMLYSITYAVKMALQASLGAQCVEIYHLNYLAAGLIYLPSGIGGLLAAYLTGRYLDRTYKANRARASSIDDGLEGDSLGISIEHTRLKGIYVLIGASTAETVGYGLVLMTRAHISVMIVLQFLFGLSTSGIFTMSATLLTDLNERQSATAQGACSLIRCLGAAAAIAALQPLAGKVGLGLCFAVYAILLALEIPTVWLIRRYGAKWRCARLARSL

SEQ ID NO: 2496 - DNA, 2130 bp, Muscodor strobelii
  misc_feature: SGI EST ID NO. CUFF.7488.0
  misc_feature: Variant of the nucleotide sequence at SEQ ID NO 2494
acccaatacatagaatccagttcgccctaagccttggtccagtgatcgggggtgctatcactcagcagctgggctggcgctgggtattttggtttctcaccatcctgagcggctcgcattttctaatcatggtcttcttccttccggaaacaaaccataccattaatgaagagtctacagctaggctacagggagtgtacaggagcattgtcacactcactcggaacgtcgggatcaccgaggacgccattcggtcccaaaagctcagcggccgttttccaaacccctttgcctctttacgtattctcggcgacaaggaatcgctcgcagccatcatgttgtattctatcacttatgcagttaaaatggcactacaggcgtcactcggagctcagtgtgttgagatatatcatttaaattatctggctgccggtctgatttatcttccttcaggcattggtggcctactcgctgcctatctcaccgggcgttatctcgatagaacgtacaaggcgaatcgtgccagggcgtctagtatagacgatggcttggagggtgacagcttaggaatatccatagagcatacgagattgaaagggatatatgtcctaatcggcgctagtaccgcggagactgtaggatatggattagtcctcatgacaagggcgcacatatctgtcatgatcgttttacagtttctgttcggattgagtacctcagggatatttacaatgtcagcaacactcttgactgatctcaacgaacgccagtcggctacggcccagggtgcctgtagcttgatccggtgtttgggtgcagcggcagccatagcagccttacagcctctagctggtaaagtcgggctaggtctatgctttgccgtatacgccatactgcttgctctagaaatacccactgtctggcttattcggagatatggcgcaaaatggagatgtgctagacttgcgcggtcattgtaaccatgttgtttcgatcttgtccaacacttcttcaataacaatgttcctagttgtgccttacgcataaggataatcctttgtatatcgaattggactgtcggtggtccagatactaaaagattattaatgtagatggacgacagctgtgatgtccctcattctagttgttcaggacaaaagtaatctcgaaacacatcacacattagatcaatttgctgtgtccgggcgaccctaccacgaggtaagccttgatgggcgtttaaaagttgtcggcgatttagacgtcggtgctttcatttcgttgaaccgcatcccgttcttcacgataacaagtctgctatcgatacagaataccacatcttcgtctactgtgattgcgggccgagacttgtgatactcgggctgaacgcttgacatgaattcgttcggcactagaaagtgctgcgtataagtatctttcagcaggcccttgtaatcgacgctcgacagccaatggtcgtggtccacgaatacaaatcgttctggcttatttggagcgctcgtcccgacgaagcatgcggagtccgccaaatgattcccgcggatcagcttccgtactgcaccctgaggtgcgtcagtgcccaaatcaaacataagcatggtcgacagggatcccgagcgtgtgtcttggtgcatgtccagcactaattttcgtgtcccttgatggaacgtcatgccaataccgattaccgtttcaacttcactttcttcgagcttgtattccagctccaacgtagaccccgatactggagatgggaagctcgtgaccgaatatatgttcagtatatgatcgttgagtagtaggaactcctcattgtgcccctcagcggaactggcaacccattgccaaccatgtcgaggagtgtcgaattcgagggtcccgatcaatgtgctattatttatagcgtatagcatatcatattgcgaggtgctcaccattaaatggtcgccatgctggccaaagcagagttgcttcactggttcccttgatcgtgtctgccataccaacgaagaccgggtggagtttatctggactggatcatatttccagacaaggaccaggccgttgctatcgctggatgctatcagactgctgctgctgccgctcgta

SEQ ID NO: 2497 - DNA, 4809 bp, Muscodor strobelii
  misc_feature: SGI cDNA ID NO. 560464
  misc_feature: Encodes the peptide sequence at SEQ ID NO 2498
atgtcgggcactggtcccaatcccgagaaaccgggccccacaaatgcatcaggtaacaacaacctctccgttgtggttgaccgccgtgcctcgaccgcgacgtccgcctttccctactctgagtcgagcacactgctgcgcaccgcgacggccactgataagagcgagggtcgtgtctcctcactgaagaagaggttccccagcgcctggaatgacaagcaacatgacaaaccgagtaacaccgatgcgcacggtcccgtgggactgagactcctccatgcgtccccagagccgctgctggatctaattttcgtgcatggacttcgaggtgggtcgatcaagacctggagaaagggagacgatgctcgtttcttctggccgcagtactggctccccgcagaacccggattccgccacgtcaatattcatagttttggctacgattccgactgggccagtacgaaacccagtgtgctcaatgtccacgatttcggccagtcgcttcttgaagagatgaggaactctccgcacttgggcgggaaaggcagcgacgcatatatcctgtccagagatgtccaagacctgaagcatcgcatacagtgcattttcttcctcgccacccctcataagggttcagattttgcggccactttgaatagaatattgacggtatccggtgtgctatcatctcgtgactacattagagatcttacgactggctccacctcggcccagttgatcaacgaagagttttggaagtgcgcacgggatttgaatatcttctccttctatgaaacacttcgaactcgtatggggctgtcgtcaggcttgattgttgagaaagaatcggccactctgggtcttggcttcattaacgagcgggttcagtacattggcgccgatcatcgacatatctgcaaattcgacagtcctgatgatcccaattatatcacgctgttgaacgcgctctccggcgccgtcaaaaatctcttactcaatcagcaaaacgcgaatgaagaaaagaaagatcagcaaattagtacgctgaaggtgtacctgagcatcactgaccggcctttagaaagctgtagcaaggtggaaggctcatgtcagtggatctacggtcgcgacgagttccgaggctggcgagatgctactagcggtggtcacagggattccgacattgacgctccgaacaagaagccttcagtgatctgggtacatgctagccctggaaccgggaaaacggtgctcgccgctcacgttacgtccgagctacaagaggacaatcttgaatgcgcttattacttcttccatgctggaagtaaggcttcgcgttctctctctgactgtctaagatccattgcctatcagatggccgtctcaaatactgcagtgcgcgagagactggtgcagctatgtcaagacggttcggggtttgaccttgatgatgatcgaacaatttggtcaaaactcttcgacaagggcataatgcaggttgcatcttatacaccgcagtactggattattgatgcacttgacgagtgcagcaagtacagggagtttctgaacatgatcaagcttaagcaaccggctttccctctacggatctttattacgactcgcaatattcctaacctatcgaaccttcatagacccttggaagcatcaatgacgttggctcctttggaagtaccagcggaaagcacgaagtatgatataaagtgctatatagaaagccgtttagatgaactaccctgcgacgaggattcagatcggcatgagctcctccacaacgtcttggaacgatcaaaaggatcttttctatgggtgagattggtgctggacgagctagagcaggtgtactcatcggctagtattctacgggttctggagggaatccccgaaggaatggtgccctattacaaaaggactgtcaatgctatggaagagaataagagagaaaagcacatctctaaggccgtgctgctctggacagttgcgagttctcgccaaataaccattgctgagctctcaaatgctttaaaactggacatcaaagaggatttaccgagcgcaaggactgcagtcagcggcctttgtggtcagctcgtgacaattgacaaggataccgacaaagttcacgttgtccatccgacagttcgcgagttcttgctatctgaagacgctgccgattttcgaatttcgaggttacacgctcacgaaaggattgctttggcatgtttgcaattgctgtgcggtcgcgagatgcagcctccgagaggtcagaggactgcaacgcaacagcaatccgcaccttctcctctacttgactatgccatcacacatttttcggatcatatatatggtgcgtcatcagagaatgacgggctactacgtgctatcgatcggttcttcaaaacgaacgtcttatcgtggattgagaaggtcacgtcaaagggcgatgtacactgcttattacggacatctaaaaatctaaaggcatacctggaccgcagggccaaatactactctccactcaatacgcaagtgagaaatatcagtgcttgggctgttgatttaggccggttaacatctaagtttggggttgtgcttctactcaaacctacttcaatatttcatcatattcctccaatctgcccgacagagtcagcaattcacgcacaatttggcaaacgacgggatggcttgaccttagtaggtgctgttgactctacttgggacgactgtgctgcgtcggtcagttttgtagacggcaggcctgtggcagccaactgtggcgagagcttgatagccgtcggcatggcgtcgggcgccatccacttatacaatcatcatagctgtcagaagatgggtgttctgcgtactaagtggccgatcgatattgtgcacttcatagataaaattgttgcaatatgcacagtcaagagtcttgtgctgcaagatgtcgagggcaacgtactttgggagacgcggctaagatcacgctgtattcttctgacttcatttggacgctccatatatgctgtcacccaaagcggccgtttcctgcaatggaacatagcatcagggacgctcgaagaggatagacaatacgaatatcgaaaccacgacgtagagacagcctacaatcgagttgtagacagagcaccgtctttcgcgtcattgtctccggacatggaggtgctggccttgggttatcgtggtggcacggtatgcctctgggatgttccgtccgacaattttataggctgggctacagatgaagaggacaagcttccggctaagatgctattcaatcctaatcccgatattgccctgctgttagttatttataccaaccataagctcgcgcttttcgatagctggtcaggaagtcttgttcattccatagatacacctaacgaagctggagtactggcagcctctgcttctcctgacggccggacgctggtcacctgcgacgcgctgatgaacatgcggatttgggacttcgaatccttgtcccttttataccacttggagtcgccgtccgcctccttcaaagtcctgagctttacgtctgacggatcgacgattgttgacgtcactgactctggcatgcgcatatggtcaccagccgctttggtccgcaagactatggaagaagatgccagtattagtgacgatgcggctcatctacctgtcgatatgggccgccatgagataacgagtgtgcctatcatcacttcgctctgtgctcatcccacgcttcccttagtgttcaccggtaacgtccgaggacaagtttgcgcctttagcactaagaccgggtcacaggttgctgtactccacacgcacccgtatgaggagagggtaacgaggttggttacgagcggcagcagcagcagtctgatagcatccagcgatagcaacggcctggtccttgtctggaaatatgatccagtccagataaactccacccggtcttcgttggtatggcagacacgatcaagggaaccagtgaagcaactctgctttggccagcatggcgaccatttaatggtgagcacctcgcaatatgatatgctatacgctataaataatagcacattgatcgggaccctcgaattcgacactcctcgacatggttggcaatgggttgccagttccgctgaggggcacaatgaggagttcctactactcaacgatcatatactgaacatatattcggtcacgagcttcccatctccagtatcggggtctacgttggagctggaatacaagctcgaagaaagtgaagttgaaacggtaatcggtattggcatgacgttccatcaagggacacgaaaattagtgctggacatgcaccaagacacacgctcgggatccctgtcgaccatgcttatgtttgatttgggcactgacgcacctcagggtgcagtacggaagctgatccgcgggaatcatttggcggactccgcatgcttcgtcgggacgagcgctccaaataagccagaacgatttgtattcgtggaccacgaccattggctgtcgagcgtcgattacaagggcctgctgaaagatacttatacgcagcactttctagtgccgaacgaattcatgtcaagcgttcagcccgagtatcacaagtctcggcccgcaatcacagtagacgaagatgtggtattctgtatcgatagcagacttgttatcgtgaagaacgggatgcggttcaacgaaatgaaagcaccgacgtctaaatcgccgacaacttttaaacgcccatcaaggcttacctcgtggtag

SEQ ID NO: 2498 - protein, 1602 aa, Muscodor strobelii
  misc_feature: SGI Peptide ID NO. 560464
  misc_feature (48)..(1369): NCBI GI: 46135873 Blast Desc: FG09452.1 [Gibberella zeae PH-1]
  misc_feature (68)..(1581): NCBI GI: 159127877 Blast Desc: AFUB_041630 [Aspergillus fumigatus A1163]
  misc_feature (68)..(1581): NCBI GI: 146323333 Blast Desc: NACHT and WD domain protein [Aspergillus fumigatus Af293] gi|129558342|gb|EAL92825.2| NACHT and WD domain protein [Aspergillus fumigatus Af293]
  misc_feature (82)..(1592): NCBI GI: 171679241 Blast Desc: protein product [Podospora anserina] gi|170939246|emb|CAP64474.1| protein product [Podospora anserina]
  misc_feature (85)..(1581): NCBI GI: 256733681 Blast Desc: NECHADRAFT_36093 [Nectria haematococca mpVI 77-13-4]
  misc_feature (82)..(1595): NCBI GI: 119176152 Blast Desc: CIMG_09821 [Coccidioides immitis RS]
  misc_feature (63)..(1372): NCBI GI: 258563436 Blast Desc: [Uncinocarpus reesii 1704] gi|237907970|gb|EEP82371.1| [Uncinocarpus reesii 1704]
  misc_feature (98)..(1577): NCBI GI: 261358157 Blast Desc: SERAC1 [Verticillium albo-atrum VaMs.102]
  misc_feature (185)..(1344): NCBI GI: 154320544 Blast Desc: BC1G_01744 [Botryotinia fuckeliana B05.10] gi|150853433|gb|EDN28625.1| BC1G_01744 [Botryotinia fuckeliana B05.10]
  misc_feature (83)..(1579): NCBI GI: 255937083 Blast Desc: Pc13g11510 [Penicillium chrysogenum Wisconsin 54-1255] gi|211584188|emb|CAP92220.1| Pc13g11510 [Penicillium chrysogenum Wisconsin 54-1255]
MSGTGPNPEKPGPTNASGNNNLSVVVDRRASTATSAFPYSESSTLLRTATATDKSEGRVSSLKKRFPSAWNDKQHDKPSNTDAHGPVGLRLLHASPEPLLDLIFVHGLRGGSIKTWRKGDDARFFWPQYWLPAEPGFRHVNIHSFGYDSDWASTKPSVLNVHDFGQSLLEEMRNSPHLGGKGSDAYILSRDVQDLKHRIQCIFFLATPHKGSDFAATLNRILTVSGVLSSRDYIRDLTTGSTSAQLINEEFWKCARDLNIFSFYETLRTRMGLSSGLIVEKESATLGLGFINERVQYIGADHRHICKFDSPDDPNYITLLNALSGAVKNLLLNQQNANEEKKDQQISTLKVYLSITDRPLESCSKVEGSCQWIYGRDEFRGWRDATSGGHRDSDIDAPNKKPSVIWVHASPGTGKTVLAAHVTSELQEDNLECAYYFFHAGSKASRSLSDCLRSIAYQMAVSNTAVRERLVQLCQDGSGFDLDDDRTIWSKLFDKGIMQVASYTPQYWIIDALDECSKYREFLNMIKLKQPAFPLRIFITTRNIPNLSNLHRPLEASMTLAPLEVPAESTKYDIKCYIESRLDELPCDEDSDRHELLHNVLERSKGSFLWVRLVLDELEQVYSSASILRVLEGIPEGMVPYYKRTVNAMEENKREKHISKAVLLWTVASSRQITIAELSNALKLDIKEDLPSARTAVSGLCGQLVTIDKDTDKVHVVHPTVREFLLSEDAADFRISRLHAHERIALACLQLLCGREMQPPRGQRTATQQQSAPSPLLDYAITHFSDHIYGASSENDGLLRAIDRFFKTNVLSWIEKVTSKGDVHCLLRTSKNLKAYLDRRAKYYSPLNTQVRNISAWAVDLGRLTSKFGVVLLLKPTSIFHHIPPICPTESAIHAQFGKRRDGLTLVGAVDSTWDDCAASVSFVDGRPVAANCGESLIAVGMASGAIHLYNHHSCQKMGVLRTKWPIDIVHFIDKIVAICTVKSLVLQDVEGNVLWETRLRSRCILLTSFGRSIYAVTQSGRFLQWNIASGTLEEDRQYEYRNHDVETAYNRVVDRAPSFASLSPDMEVLALGYRGGTVCLWDVPSDNFIGWATDEEDKLPAKMLFNPNPDIALLLVIYTNHKLALFDSWSGSLVHSIDTPNEAGVLAASASPDGRTLVTCDALMNMRIWDFESLSLLYHLESPSASFKVLSFTSDGSTIVDVTDSGMRIWSPAALVRKTMEEDASISDDAAHLPVDMGRHEITSVPIITSLCAHPTLPLVFTGNVRGQVCAFSTKTGSQVAVLHTHPYEERVTRLVTSGSSSSLIASSDSNGLVLVWKYDPVQINSTRSSLVWQTRSREPVKQLCFGQHGDHLMVSTSQYDMLYAINNSTLIGTLEFDTPRHGWQWVASSAEGHNEEFLLLNDHILNIYSVTSFPSPVSGSTLELEYKLEESEVETVIGIGMTFHQGTRKLVLDMHQDTRSGSLSTMLMFDLGTDAPQGAVRKLIRGNHLADSACFVGTSAPNKPERFVFVDHDHWLSSVDYKGLLKDTYTQHFLVPNEFMSSVQPEYHKSRPAITVDEDVVFCIDSRLVIVKNGMRFNEMKAPTSKSPTTFKRPSRLTSW

SEQ ID NO: 2499 - DNA, 1104 bp, Muscodor strobelii
  misc_feature: SGI cDNA ID NO. 560465
  misc_feature: Encodes the peptide sequence at SEQ ID NO 2500
atgattgacgagacaaatctagatccggccgtgttggcagctcttccagcgggtcaagttatctccgtcgttaggcacgggaaaacgaattggtcgactggatataaggtcgaggttgacgtagatggagaagaacaggagttcttcctcaaggtactcgaccgcccacgaagcgatgagatggctaagggcgagttcgagtcacagaaggcgttaatggaacttattccagacaatatagttcctccattaacgtggcagagattcgagaacgaaccggaaaaggcattctatctcactcattttcgctacttgcatgaacagctgcctacgacttctcagctcttacccatcgttaagaaaattcaccaggccagctcttctcctacaggcaaatttggctttcacgtcacgaccttctggggaccaccgcctatggataacacatggacagatagctgggaagagtacttcacccgcaagttccgcgacgcgctggactatggacaaataccacatggcaaggacgaggaactatgcgctctaggccatgagttcattaagaaagtgatcccacggctcttacgtcctctgcagtccggagggaggaacatcaaacccaccctgtgccatggtgatctctgggatgccaatatccagctagacgcgagtaccgggaatccaattctcttcgacccatgctgtttctatgggcatcatgagatggactttcaaagcatgagagcggctcgcaataccctaggtagggagtttgtgaatgcatacaaagaacaggttggtgcttcggagcctcaagaggactttgacgaccggaatgctctatactgcatgcgagccgacctggaaacggtaggtatgtggccgcagtggcgcccattactagatcacgttaaggacgaaatgcgacggttgctcgcgaagcatcccaatggcatcaatgggttctccgatggactgtctgagaacttaggtggaagcaatataaagaacatggatcaagtaaaacccgataccttcgtaccggtggcacacaatattgaagtacaatatatcgccccatgtctatgtatgttggcagcgtag

SEQ ID NO: 2500 - protein, 367 aa, Muscodor strobelii
  misc_feature: SGI Peptide ID NO. 560465
  misc_feature (5)..(282): NCBI GI: 255946231 Blast Desc: Pc20g14050 [Penicillium chrysogenum Wisconsin 54-1255] gi|211588618|emb|CAP86734.1| Pc20g14050 [Penicillium chrysogenum Wisconsin 54-1255]
  misc_feature (15)..(296): NCBI GI: 238503680 Blast Desc: conserved [Aspergillus flavus NRRL3357] gi|220690543|gb|EED46892.1| conserved [Aspergillus flavus NRRL3357]
  misc_feature (4)..(282): NCBI GI: 145256231 Blast Desc: An10g00710 [Aspergillus niger CBS 513.88] gi|134078637|emb|CAK40510.1| protein product [Aspergillus niger]
  misc_feature (12)..(282): NCBI GI: 115385086 Blast Desc: conserved [Aspergillus terreus NIH2624] gi|114196782|gb|EAU38482.1| conserved [Aspergillus terreus NIH2624]
  misc_feature (7)..(295): NCBI GI: 258563734 Blast Desc: [Uncinocarpus reesii 1704] gi|237908119|gb|EEP82520.1| [Uncinocarpus reesii 1704]
  misc_feature (6)..(316): NCBI GI: 145605954 Blast Desc: MGG_11859 [Magnaporthe grisea 70-15] gi|145013692|gb|EDJ98333.1| MGG_11859 [Magnaporthe grisea 70-15]
  misc_feature (5)..(245): NCBI GI: 256734177 Blast Desc: [Nectria haematococca mpVI 77-13-4]
  misc_feature (61)..(327): NCBI GI: 116182814 Blast Desc: CHGG_02035 [Chaetomium globosum CBS 148.51] gi|88186332|gb|EAQ93800.1| CHGG_02035 [Chaetomium globosum CBS 148.51]
  misc_feature (5)..(245): NCBI GI: 46135869 Blast Desc: FG09450.1 [Gibberella zeae PH-1]
  misc_feature (3)..(285): NCBI GI: 85114984 Blast Desc: NCU00873 [Neurospora crassa OR74A] gi|28926583|gb|EAA35553.1| conserved [Neurospora crassa OR74A]
MIDETNLDPAVLAALPAGQVISVVRHGKTNWSTGYKVEVDVDGEEQEFFLKVLDRPRSDEMAKGEFESQKALMELIPDNIVPPLTWQRFENEPEKAFYLTHFRYLHEQLPTTSQLLPIVKKIHQASSSPTGKFGFHVTTFWGPPPMDNTWTDSWEEYFTRKFRDALDYGQIPHGKDEELCALGHEFIKKVIPRLLRPLQSGGRNIKPTLCHGDLWDANIQLDASTGNPILFDPCCFYGHHEMDFQSMRAARNTLGREFVNAYKEQVGASEPQEDFDDRNALYCMRADLETVGMWPQWRPLLDHVKDEMRRLLAKHPNGINGFSDGLSENLGGSNIKNMDQVKPDTFVPVAHNIEVQYIAPCLCMLAA

SEQ ID NO: 2501 - DNA, 1641 bp, Muscodor strobelii
  misc_feature: SGI cDNA ID NO. 560466
  misc_feature: Encodes the peptide sequence at SEQ ID NO 2502
atgcgttccatcagcaagaggcggccaaactggcaggacgcaacaaacattcatgctaagccaggactttgtcagaccaacgcagataaaccctccctgacacaccacccccaccgactgttgtgcgccctcgctcctcaacactctactggtcagcgccagcctctccggacccagcagaagttcccagttgagccaattctcacaggcccaacgacactcgctgtgccccgttcggttcgccagtgttgcgcctgcattctgcctgcaactaacctgcagctcatcagcacgagagcgcgctgcctgcagacttgcgcccgtggtgacccagtctcacttaccccaaccgccaccattcagtccccaaagatcaaccaaatccccactcccaccatcaactcagatcttcctccccaggacgacctgaactttgacgaagctctcagctttccgagttcccactccgcaaacatacccgcgacagactttccagtcttcaccacggattccaaccagtcaccatggcttccctccagttccccgagccatacggcaccatccagccaatcgccctttcaacaggactttctgttgttcgatccccctcagcccgtgaaaccgaccgctagccgcaacgcatcgcctgcctcagcagcagcagcaaactttggatctcgcaataccagcacaccctcagcccgccgtgattcgagcctgtctcccgctctccagaatcagcgtgtccagcagatcatccaagcaacaggccctcagttttctccttcggctttgaccaaccagttcaactctcccgcgcaaaaccagtcgcctcagcaacagttttacgcatctcgacccgctccattgcagacacgttctcgtccgcctgttccgcttttctcagacagtcttggcaaccaacagaccgcatccaacatggatttgcaagacgctcttgaggacttcaacttcgggagtggagctcccacggcgttctcgccggccatttccagctacgacgtcaacgcgaggtcgactgcgagctccacgcacctaggaactgtctctcccgacgatctgtttttggccgactctttcacgtctgcgcccaactcgactgctctcaccgatctgactacaccgtctgatttcggtgactacgagctgtcgccgtttgccgccaacgctgatgtctctgacacttggttttctctctttccagatgcggttcagcccactcacgctgcaccaagccagtcacctcaggcatcagacggtcttcagctcggtggaacagagtctcgccatgcgtcaggctctggcctctcaccgtcgtctccaccaaatctgcccaaggcttccacaggtgccggtgtcgcacgcaggccccgcaagcagttgaaggagatcatcattgatgatcccaatgacactgtttctgtgaagcgagcacgaaacactttggcggcgcggaaatcccgtgaccgcaaagctcaagtgctcgaagacctcgaggcgagcaagacggccctcgcggctgagaaccagaccttgaacgccaaggttcaggccttacaggcagagatcgagcattggaaatcagtcgcggccactcttcagcggtcgagcggtgtctga

SEQ ID NO: 2502 - protein, 546 aa, Muscodor strobelii
  misc_feature: SGI Peptide ID NO. 560466
  misc_feature (475)..(538): Pfam Id: PF00170 Pfam Desc: bZIP transcription factor
  misc_feature (476)..(529): Pfam Id: PF07716 Pfam Desc: Basic region leucine zipper
  misc_feature (481)..(529): Pfam Id: PF07716 Pfam Desc: Basic region leucine zipper
  misc_feature (119)..(537): NCBI GI: 256727722 Blast Desc: NECHADRAFT_33921 [Nectria haematococca mpVI 77-13-4]
  misc_feature (125)..(540): NCBI GI: 171682250 Blast Desc: protein product [Podospora anserina] gi|170941084|emb|CAP66734.1| protein product [Podospora anserina]
  misc_feature (142)..(537): NCBI GI: 46134293 Blast Desc: FG09286.1 [Gibberella zeae PH-1]
  misc_feature (295)..(537): NCBI GI: 261359683 Blast Desc: cross-pathway control protein [Verticillium albo-atrum VaMs.102]
  misc_feature (320)..(537): NCBI GI: 116202315 Blast Desc: CHGG_09042 [Chaetomium globosum CBS 148.51] gi|88177560|gb|EAQ85028.1| CHGG_09042 [Chaetomium globosum CBS 148.51]
  misc_feature (321)..(537): NCBI GI: 215541009 Blast Desc: cross-pathway control 1 [Gibberella fujikuroi]
  misc_feature (319)..(537): NCBI GI: 145611186 Blast Desc: MGG_00602 [Magnaporthe grisea 70-15] gi|145018493|gb|EDK02772.1| MGG_00602 [Magnaporthe grisea 70-15]
  misc_feature (312)..(537): NCBI GI: 85086270 Blast Desc: cross-pathway control protein 1 [Neurospora crassa OR74A] gi|1352190|sp|P11115.2|CPC1_NEUCR RecName: Full=Cross-pathway control protein 1 gi|168793|gb|AAA33577.1| 1 1
  misc_feature (312)..(537): NCBI GI: 154314227 Blast Desc: BC1G_05207 [Botryotinia fuckeliana B05.10] gi|150848852|gb|EDN24045.1| BC1G_05207 [Botryotinia fuckeliana B05.10]
  misc_feature (314)..(539): NCBI GI: 4033378 Blast Desc: CPC1_CRYPA RecName: Full=Cross-pathway control protein 1 gi|2078287|gb|AAC16255.1| cross-pathway control protein 1 [Cryphonectria parasitica]
MRSISKRRPNWQDATNIHAKPGLCQTNADKPSLTHHPHRLLCALAPQHSTGQRQPLRTQQKFPVEPILTGPTTLAVPRSVRQCCACILPATNLQLISTRARCLQTCARGDPVSLTPTATIQSPKINQIPTPTINSDLPPQDDLNFDEALSFPSSHSANIPATDFPVFTTDSNQSPWLPSSSPSHTAPSSQSPFQQDFLLFDPPQPVKPTASRNASPASAAAANFGSRNTSTPSARRDSSLSPALQNQRVQQIIQATGPQFSPSALTNQFNSPAQNQSPQQQFYASRPAPLQTRSRPPVPLFSDSLGNQQTASNMDLQDALEDFNFGSGAPTAFSPAISSYDVNARSTASSTHLGTVSPDDLFLADSFTSAPNSTALTDLTTPSDFGDYELSPFAANADVSDTWFSLFPDAVQPTHAAPSQSPQASDGLQLGGTESRHASGSGLSPSSPPNLPKASTGAGVARRPRKQLKEIIIDDPNDTVSVKRARNTLAARKSRDRKAQVLEDLEASKTALAAENQTLNAKVQALQAEIEHWKSVAATLQRSSGV

SEQ ID NO: 2503 - DNA, 6549 bp, Muscodor strobelii
  misc_feature: SGI EST ID NO. CUFF.11148.0
  misc_feature: Variant of the nucleotide sequence at SEQ ID NO 2501
gaaaataccgcaatggcaatgtgacatatccgagtgaggcatcgtctgcgaggaacttcctactcggtgaggggaccgggaattccaggtggtattctcggatgccttccgatgcctactccatgtcacggggatccgcaaatgcgaaatacggggtatggagaagagaaagcgatgatgttggacctgtagtcgatagtggcgaatgtgtaaatgagtaatattaaacaacatgtgaagaatggagctagtgtagtataactgagcctcagaatagtggcggattactgctgatggcaacatgaataccttcgatctactgttcaatttgaagaagacattgccaaaaacggcaagtttagtgacttattatgccaattttcgatttcacatacaacagtcggccaagtcaatgagagcgattcaacccgatcaagcacattgacagtctgtccggttcaatacttgatcgtcactagaaatatctcggagtacgtcggagcaagacggtcttacgtccggagacatgggtacaagacacgcatgcgccctttcgtcgattatcgcacccacgcaaagccacaaactcgtcaaactaggaacgaatcacacggcttgcgcggaacggttgaaactagaagcagaatagtcatggcggcaggggggagtgggtgagacgcgcacgatagacacgagggatcgcagtgtcgggatctactatgactcacaaaactcaattgcgcaccggaaaatgaattggtcgatctgattgatccaaatttcctactcacttgcaggaatggataatttcaaaagacaagcctagtgttcctcgacctcggaaacgtgagaccgaactggggattctccatagtgaaggattgcgcgaattcgacgaacccagttcgatctttggtgaccgaactgaactactgccggtggattatgagatacgtacgcatatgtatgcacatgtgcgcaatcgtcaggtatagacgaatcactgccttgcgctggaggcagcagccaaatctcatcttcgtcgtagaatttctgcgaagatgcttacgaaacgtgtcctcgactgctaattgacgacgtgttctacttgcgttgacgtcccatcgcaggcctacttgtgtgttggtcgtgttggcgaccatcagaaatcgcagttggattgataattcgacgagagatctacacagccacgcgcaatcttggtccaatcaagggttgagcgtaatactttttagtcgcgaaacatctccaaaagataaaagcagtcagcacttgctgattaatgcgcaactgacattgctaaacgatcaaatatcccctttgaaaatgaataccgcaattcgaacattacaagaactggtttgctctgagggatgaaattcgtcgcatcagaatgtgagtaactcaaaataaaagctagagacacatcgactgtgccttgaagtcaacccaaaagcccaacggtattttgtcgctactgcgacttcctaattcagctgcccgagacgagccaatcaaacgaaatgccggcaagaaagcactaacagatgcatcccacttcgctcatcacgagccctttagctcgaaaggttctagctagtaggctgtacttacatggacggagttgattgttgagattgttacatcgttatttgtcttcgggatactaccagtcacaatctgctgtaatagtgtaatctgtacggtggctatgtaagcatatgtgttctttcgggttcggagttgatattgctgtgtggggtgtcggggtaaaatcccattttgaagcctgttattttagaccggcaaaccgggtgcgcatcgataattcgattgagggccaggggtttgcacaaggtccaattcacgggcgggtttggcgggttcaaggtatattgagatgcaagagcgacagagagtacacatgagcctcatcgagtcgagacgtacgcataccgttcgagggacgacatatgtcttctagcaagcacggtcacatgtattcgctccttaaaatataagaaatagcaggtgtagtgctcgaattcattcctggaagtagaacatcgtgagatcgcagcttccaggtagaataattacgggaagcgtgtgcaggtgagctagtctgcatagagcaaaggcaggtatgagtcacagcggcttggcaagcgcggacggagggcacgggccaagccgatgtatcctactatgcgttccatcagcaagaggcggccaaactggcaggacgcaacaaacattcatgctaagccaggactttgtcagaccaacgcagataaaccctccctgacacaccacccccaccgactgttgtgcgccctcgctcctcaacactctactggtcagcgccagcctctccggacccagcagaagttcccagttgagccaattctcacaggcccaacgacactcgctgtgccccgttcggttcgccagtgttgcgcctgcattctgcctgcaactaacctgcagctcatcagcacgagagcgcgctgcctgcagacttgcgcccgtggtgacccagtctcactgtatgccccttcgtgtgccctgctcgtgaatgcgccattctcgccaaaagtgcccacagaatcccaccaacgcccacccaggagcagcgccaggcccgctaaagccgcccctagtcagcgacccagcgcagtgcccccccccgtccctgccctctgctgtgggagagacgagagagagacagaccgcgcactcggcagaaagttgttgcctggaaaaaaatactaaagccttgtccgtcccgcgcacccactccctcctctcttcttctctttccttcttcaaccccaaaatttcacccgcacacctacataagaacagcattcaggatattcaagatgcgctagactcgtgtctccccttgcccttcttccggtcctagtaccccaaccgccaccattcagtccccaaagatcaaccaaatccccactcccaccatcaactcagatcttcctccccaggacgacctgaactttgacgaagctctcagctttccgagttcccactccgcaaacatacccgcgacagactttccagtcttcaccacggattccaaccagtcaccatggcttccctccagttccccgagccatacggcaccatccagccaatcgccctttcaacaggactttctgttgttcgatccccctcagcccgtgaaaccgaccgctagccgcaacgcatcgcctgcctcagcagcagcagcaaactttggatctcgcaataccagcacaccctcagcccgccgtgattcgagcctgtctcccgctctccagaatcagcgtgtccagcagatcatccaagcaacaggccctcagttttctccttcggctttgaccaaccagttcaactctcccgcgcaaaaccagtcgcctcagcaacagttttacgcatctcgacccgctccattgcagacacgttctcgtccgcctgttccgcttttctcagacagtcttggcaaccaacagaccgcatccaacatggatttgcaagacgctcttgaggacttcaacttcgggagtggagctcccacggcgttctcgccggccatttccagctacgacgtcaacgcgaggtcgactgcgagctccacgcacctaggaactgtctctcccgacgatctgtttttggccgactctttcacgtctgcgcccaactcgactgctctcaccgatctgactacaccgtctgatttcggtgactacgagctgtcgccgtttgccgccaacgctgatgtctctgacacttggttttctctctttccagatgcggttcagcccactcacgctgcaccaagccagtcacctcaggcatcagacggtcttcagctcggtggaacagagtctcgccatgcgtcaggctctggcctctcaccgtcgtctccaccaaatctgcccaaggcttccacaggtgccggtgtcgcacgcaggccccgcaagcagttgaaggagatcatcattgatgatcccaatgacactgtttctgtgaagcgagcacgaaacactttggcggcgcggaaatcccgtgaccgcaaagctcaagtgctcgaagacctcgaggcgagcaagacggccctcgcggctgagaaccagaccttgaacgccaaggttcaggccttacaggcagagatcgagcattggaaatcagtcgcggccactcttcagcggtcgagcggtgtctgagagttgatggggagggttatttcataaatacggatgcctgctattttcaggaactggaggggcaggccatcgcggtctcgccgcctcattcaaaggaggcatgggcaacagtctaaggcctattggcgccttgggactatgacgcctttcgccgaggataatcaggattctcccgtgtcgttttatatttgatatctcacagcgcccgccattcgggtcagcgttccaaaagtacggaggagtggaatttcttgtttcctaggtctcttaaggacgtcgatcttgggtttgaatcgacatctcagcggcgggaggtttcctacgtatcagttctctgaataatatactatcttcgatcttgaatgtctgtgttgttggtgaagtgatctcggagttagcaatgtgttccagtacccagctcacctgaaatattgtacaatcggctggagaggtaattgcgccgatgattcgattcgcgcttgccgtcattctccagcatagtgctgtgtaccgtgatcaagcggccatgagattgggtagttcaagggtccatttgtaggtgacctgaggtaggcggcatggtgtccaatgcggtggatagacttcccggtctcgacaggtggtgaattcaacaatgtatctaaagttgatttgactgcaatacgaccatgtcatcaataagcagacagcatgaatggcgatggattaaatatagcgcaacaaaggaggtgataatgaagcagtgcatgatgaatatctccaccgaatattctagcttcgcatgttgtgaaagaggattaaaaactagtagatcgtcagaaagaaaatgaaggtctttgatattttatatatcaccccaagaaccggtagacccggtcgagtatgagtgataccggtgggctaggtgaggtatccgtgccagtgtggagaccgcttggtgtcatcggacgactcacctcgtctgcctggtgaaccttacgccacctttgtcttacgatttcgcggaattggtaggttgagggttaggtggctagtgtttggtgtaatggggtgattgcgagagtttgtggtatgattcattttatgttgtgatgttgcgctttttgtaggttggttgtttggttgtttgggtggtgatgggtcacacggtgttgctgggcggagtcataggtcgagtcatagtgtcacggttcgcaagctatgttgatataacgtgtcttcttgaaagagaattttttttgtatcacgagttcggtcggaagttttgaactgaacatagtatttttctttgctctgatattggaacacttgccactatactattctttttactcgatgcaacatcagcatcgggcaaaaatgaatttgtgatacacgagacgacgtttcgcgaacgatgagtttggacctcgccgtataaagagatcatagtgtctgccgagctgatgtagttgggagtaacatcacgatggaacgtcagggcggacgaggttctggatgtttcggatgtggtctggagtcggcgatcgtccccgactcacctctcacgataccgcaatactcttctgattgaattcagcatttattaagttaaggtatcaatgcgctcaagtttctgttataacaaactcacccaacgctgccagagatgcatatgggtagtcttcaaaagtcacacatgggtagttactcattcgcgatagcgcaggctctaatattgcaccttaccatcggccaagcggagtaaaactcaggtgaaccaaagatgcgatgcgaagcgtggtataaatccttcgttgatacacgctgagaccgcaatcatgaccataaacagctgaagtgaatgtgcggcgcagctcaatgtagcatccaaaccctccttgacatccctacaacgcgacattgacatctcgacgctgtttgaaaatggacatagatagcctataaatattgatagacgagagtcggcgatgtcttgatctctccagtcattcgctacgaaatggctaggtggtcgtggtacccatattcgtcattcccgaagctgctaatataacagcaattaggatctcgacatgcatgtttaacatatactttgagttgatgataatattcgagtagtatatgacgatggttttctgcaggcgctttgtgctcttgttgctgaccactatcattgcgttcagccgcatgggaatcgctaccaactccgtcgaatttcttgcgcctgaagagaatgaagaagtcgtggagcggtctacatacatcatcaagtgggatccaaaggggtccactggga

SEQ ID NO: 2504 - DNA, 1626 bp, Muscodor strobelii
  misc_feature: SGI cDNA ID NO. 560467
  misc_feature: Reduced expression when VOC is produced
  misc_feature: Encodes the peptide sequence at SEQ ID NO 2505
atgcgttccatcagcaagaggcggccaaactggcaggacgcaacaaacattcatgctaagccaggactttgtcagaccaacgcagataaaccctccctgacacaccacccccaccgactgttgtgcgccctcgctcctcaacactctactggtcagcgccagcctctccggacccagcagaagttcccagttgagccaattctcacaggcccaacgacactcgctgtgccccgttcgactcgtgtctccccttgcccttcttccggtcctagtaccccaaccgccaccattcagtccccaaagatcaaccaaatccccactcccaccatcaactcagatcttcctccccaggacgacctgaactttgacgaagctctcagctttccgagttcccactccgcaaacatacccgcgacagactttccagtcttcaccacggattccaaccagtcaccatggcttccctccagttccccgagccatacggcaccatccagccaatcgccctttcaacaggactttctgttgttcgatccccctcagcccgtgaaaccgaccgctagccgcaacgcatcgcctgcctcagcagcagcagcaaactttggatctcgcaataccagcacaccctcagcccgccgtgattcgagcctgtctcccgctctccagaatcagcgtgtccagcagatcatccaagcaacaggccctcagttttctccttcggctttgaccaaccagttcaactctcccgcgcaaaaccagtcgcctcagcaacagttttacgcatctcgacccgctccattgcagacacgttctcgtccgcctgttccgcttttctcagacagtcttggcaaccaacagaccgcatccaacatggatttgcaaggtatatctcctacgtcaatgtctcccaatcaggacaaacgcttacccacaatagacgctcttgaggacttcaacttcgggagtggagctcccacggcgttctcgccggccatttccagctacgacgtcaacgcgaggtcgactgcgagctccacgcacctaggaactgtctctcccgacgatctgtttttggccgactctttcacgtctgcgcccaactcgactgctctcaccgatctgactacaccgtctgatttcggtgactacgagctgtcgccgtttgccgccaacgctgatgtctctgacacttggttttctctctttccagatgcggttcagcccactcacgctgcaccaagccagtcacctcaggcatcagacggtcttcagctcggtggaacagagtctcgccatgcgtcaggctctggcctctcaccgtcgtctccaccaaatctgcccaaggcttccacaggtgccggtgtcgcacgcaggccccgcaagcagttgaaggagatcatcattgatgatcccaatgacactgtttctgtgaagcgagcacgaaacactttggcggcgcggaaatcccgtgaccgcaaagctcaagtgctcgaagacctcgaggcgagcaagacggccctcgcggctgagaaccagaccttgaacgccaaggttcaggccttacaggcagagatcgagcattggaaatcagtcgcggccactcttcagcggtcgagcggtgtctga

SEQ ID NO: 2505 - protein, 541 aa, Muscodor strobelii
  misc_feature: SGI Peptide ID NO. 560467
  misc_feature (470)..(533): Pfam Id: PF00170 Pfam Desc: bZIP transcription factor
  misc_feature (471)..(524): Pfam Id: PF07716 Pfam Desc: Basic region leucine zipper
  misc_feature (476)..(524): Pfam Id: PF07716 Pfam Desc: Basic region leucine zipper
  misc_feature (90)..(532): NCBI GI: 256727722 Blast Desc: NECHADRAFT_33921 [Nectria haematococca mpVI 77-13-4]
  misc_feature (82)..(535): NCBI GI: 171682250 Blast Desc: protein product [Podospora anserina] gi|170941084|emb|CAP66734.1| protein product [Podospora anserina]
  misc_feature (119)..(532): NCBI GI: 46134293 Blast Desc: FG09286.1 [Gibberella zeae PH-1]
  misc_feature (315)..(532): NCBI GI: 116202315 Blast Desc: CHGG_09042 [Chaetomium globosum CBS 148.51] gi|88177560|gb|EAQ85028.1| CHGG_09042 [Chaetomium globosum CBS 148.51]
  misc_feature (316)..(532): NCBI GI: 215541009 Blast Desc: cross-pathway control 1 [Gibberella fujikuroi]
  misc_feature (272)..(532): NCBI GI: 261359683 Blast Desc: cross-pathway control protein [Verticillium albo-atrum VaMs.102]
  misc_feature (314)..(532): NCBI GI: 145611186 Blast Desc: MGG_00602 [Magnaporthe grisea 70-15] gi|145018493|gb|EDK02772.1| MGG_00602 [Magnaporthe grisea 70-15]
  misc_feature (312)..(532): NCBI GI: 85086270 Blast Desc: cross-pathway control protein 1 [Neurospora crassa OR74A] gi|1352190|sp|P11115.2|CPC1_NEUCR RecName: Full=Cross-pathway control protein 1 gi|168793|gb|AAA33577.1| 1 1
  misc_feature (313)..(532): NCBI GI: 154314227 Blast Desc: BC1G_05207 [Botryotinia fuckeliana B05.10] gi|150848852|gb|EDN24045.1| BC1G_05207 [Botryotinia fuckeliana B05.10]
  misc_feature (315)..(534): NCBI GI: 4033378 Blast Desc: CPC1_CRYPA RecName: Full=Cross-pathway control protein 1 gi|2078287|gb|AAC16255.1| cross-pathway control protein 1 [Cryphonectria parasitica]
  misc_feature: Useful for introducing or modulating the production of volatile compounds
MRSISKRRPNWQDATNIHAKPGLCQTNADKPSLTHHPHRLLCALAPQHSTGQRQPLRTQQKFPVEPILTGPTTLAVPRSTRVSPCPSSGPSTPTATIQSPKINQIPTPTINSDLPPQDDLNFDEALSFPSSHSANIPATDFPVFTTDSNQSPWLPSSSPSHTAPSSQSPFQQDFLLFDPPQPVKPTASRNASPASAAAANFGSRNTSTPSARRDSSLSPALQNQRVQQIIQATGPQFSPSALTNQFNSPAQNQSPQQQFYASRPAPLQTRSRPPVPLFSDSLGNQQTASNMDLQGISPTSMSPNQDKRLPTIDALEDFNFGSGAPTAFSPAISSYDVNARSTASSTHLGTVSPDDLFLADSFTSAPNSTALTDLTTPSDFGDYELSPFAANADVSDTWFSLFPDAVQPTHAAPSQSPQASDGLQLGGTESRHASGSGLSPSSPPNLPKASTGAGVARRPRKQLKEIIIDDPNDTVSVKRARNTLAARKSRDRKAQVLEDLEASKTALAAENQTLNAKVQALQAEIEHWKSVAATLQRSSGV

SEQ ID NO: 2506 - DNA, 909 bp, Muscodor strobelii
  misc_feature: SGI cDNA ID NO. 560468
  misc_feature: Encodes the peptide sequence at SEQ ID NO 2507
atgggtcgggcaaaaaagcacaaggcacctttcgagaagagcagggaggaaaagttccccaacgcccaccttgaccccccgccgcctcctgagaaaaggaagataccgcgactacgcctgccgaagctacttcctgagggtatcgagggaggcttcagatgggaaacgagaggagtaactgatcgtgagctcgcttacgacggtggggtcttcagatcctaccgaaagttgctgatgttcaacaaagaaagaaaaatagcacagtacttttgccatactctcagaattcccaacaaagacagtgtcacagtctgtctcacggatatcttcctcgaggcagcccgccggatccaccaagtatgggacttttcgcccgcccgattcttccacatgattgccagagacgaggcgtgggccgagaaggttgggctccatatcttttggcgcttcatcaaggccctgatatttgggcggaatttgtataaggcttttgtcgatctggacgaccaaaagcgatggtgtaagaacgagcttgccttcgccgtggacgaattcgtccaagccttcgacaaaacatgtaaagcgcccacattcagagagggcgacgattgggaatcgttctctcagcacgacatatctgctcggaagaagagagagcagtacatggcgggcacagacccatacgaagagggcgacaacgacgtcgcagaggtgaagattccccaggtttgggaatgggaccactttgagtacaaatacattcgtgagcacccggaggatgaagacgatgaagacgatgaagatctcggatatgatgagatcttgtacgaccagaatggcgagttcatcgattgggctgcctgggccgacgacggctacacgtttgactataattcaggagattcctga

SEQ ID NO: 2507 - protein, 302 aa, Muscodor strobelii
  misc_feature: SGI Peptide ID NO. 560468
MGRAKKHKAPFEKSREEKFPNAHLDPPPPPEKRKIPRLRLPKLLPEGIEGGFRWETRGVTDRELAYDGGVFRSYRKLLMFNKERKIAQYFCHTLRIPNKDSVTVCLTDIFLEAARRIHQVWDFSPARFFHMIARDEAWAEKVGLHIFWRFIKALIFGRNLYKAFVDLDDQKRWCKNELAFAVDEFVQAFDKTCKAPTFREGDDWESFSQHDISARKKREQYMAGTDPYEEGDNDVAEVKIPQVWEWDHFEYKYIREHPEDEDDEDDEDLGYDEILYDQNGEFIDWAAWADDGYTFDYNSGDS

SEQ ID NO: 2508 - DNA, 984 bp, Muscodor strobelii
  misc_feature: SGI cDNA ID NO. 560469
  misc_feature: Encodes the peptide sequence at SEQ ID NO 2509
atgacgcgcagcaggccacataaacggtggtactccaagaaggcgcagccgttaccacctcctccacctcccccgcctcccttcaaatcctctactgctgattttccgaccaacttgagagacatcgtcccaaatggcgttaaaggtggcttccgttgggaaacccggggccgagtcgcccactccgctgaaggtcaccctgagggcaagattttccgtatctaccgacatctcttggacttcccaggtaatgaaaagattctacgatacctcgtcgaggcgcttggtaccacgaacccagaccatgtggctggctctctcgccgaattgttcgacattgccacgaatatgatacacaagaccatgtattccaagccaggcgtgttcttcagaggtattttagagaagaaggaatggacacgcgacatccacaatgggcatttctgccgctttgtgacatctttggtcttcggccgaaacctctacaaggatttggttcgcgagttggatcaaagactctgcaacaactcattagcgacagccatagatcgcttcgtcgatgctttcaagggccactaccgtatacccttgttactgtgcgaggaacaatggaactcgttctactcagagaagagctgtaaccatgcccagcagaagtattaccaatacttcaagggtacacagtcatggaccgaggggttgtcagactgtaaaatctctgaagagccggtttctgatgagcactatacctattacgaatcgcattgcgccgcaggaaacaccgtacagcagccagcgcccccagcgtcccaactcgaggctgtaaagaatgagactgatcacgatcacgagagtcaggagctcggtcaccagttcgtgagtgattatgatttccaggcagaaacgccgctccacttcgacgaaggcgcggacgacgtcaagacgatcaaactctgcgccgagatagaccagtccagagcataa

SEQ ID NO: 2509 - protein, 327 aa, Muscodor strobelii
  misc_feature: SGI Peptide ID NO. 560469
MTRSRPHKRWYSKKAQPLPPPPPPPPPFKSSTADFPTNLRDIVPNGVKGGFRWETRGRVAHSAEGHPEGKIFRIYRHLLDFPGNEKILRYLVEALGTTNPDHVAGSLAELFDIATNMIHKTMYSKPGVFFRGILEKKEWTRDIHNGHFCRFVTSLVFGRNLYKDLVRELDQRLCNNSLATAIDRFVDAFKGHYRIPLLLCEEQWNSFYSEKSCNHAQQKYYQYFKGTQSWTEGLSDCKISEEPVSDEHYTYYESHCAAGNTVQQPAPPASQLEAVKNETDHDHESQELGHQFVSDYDFQAETPLHFDEGADDVKTIKLCAEIDQSRA

SEQ ID NO: 2510 - DNA, 2265 bp, Muscodor strobelii
  misc_feature: SGI cDNA ID NO. 560470
  misc_feature: Encodes the peptide sequence at SEQ ID NO 2511
atggaagccgacatcagagctgcacttcccgatatcgacccagtcgtctccgagtactcggtaggctatctcagacatgcgtctacggcatggatcggtgacgatgaagcggcggatctatcgccattagcagaagctgccgcggccgtcaccgagcttctcttgtcagcatcaggcaacgttgacagcactactcaacaggacaaaatccgtgcattggtagcgaaatgggtggaaaaatacgaggaagcaaacggcacgaatggagagcggagaggtccctcagccgtgaagcgtctcgatcaggctttccaagtcagctcacagcgcaatatgtcttcgactttagcagtcgccaccggcagtgtcgatctcgagtctgctaatacgcgcaaagtcgaatccaaggtggatcgcaaaaagcttgaaaaagcggagaggaagattgcagccaaacaaagcaagaagcagttcaagaatgtcgagtacgaagcctcgaggctcctcaatcaacccgaagatgcccagtcgtatgaagagttctacatggcagttaacccacttcaactcggtattggtggtggtgcagcaaaaacaaaggacattaagattgagaatgccgacgtcagtatcggtggcacacgtatcttagtcgatacagatctgacgcttgcttatggtcatcggtatggtttggtcggaaacaatggtgtcggtaaatctactttgcttcgcgcactatcgagaagagagcttcctatcccgactcatatctccattctacatgtggaacaagaaattaccggagatgacacaagtgctttgcaagcagttctggacgctgacgtatggcggaaagttttgattcgagaacaatctgaaatcacggaacgactcgcgcaaatcgaatcgcagcgatcatccatggcggacacgtcagcggatgcagcaaagttagatcgcgacagagaagcacttgaccagaaactcggcgacattcaggccaagcttgcagagatggagtcagacaaagccgaatcaagagcggccagcattctggcaggtcttgggttttcccccgagagacagcaatttgctaccaagacattctccggtggttggcgcatgcgtttggctttggccagagctctattttgcgagcccgatctgctacttctcgacgagccgtcgaacatgttggacgttccctcaatcacattcttatccaactacctacaaacatatcccagtacgatactcgtagtcagtcacgacagagctttcttgaacgaggtggcgactgacatcatccaccaacactcggagcgcctagattattatagaggtgcaaactttgagtctttctacgcaactaaagaagagcgcaagaaaacggccaagaaagagtacgaaaataacgtggctgcccgtgctcatttgcaggctttcattgacaagttccgttacaatgctggtaaagctgctgaggcacaatctcgtatcaagaagttagagcgcatgcccgtgcttcaaccacccgaggcagaatacagcgtcaagttcagatttcctgatgtagaaaagctttcgcctcctatcgtccaaatgtctggtgtcacatttggctacactccagacaagatccttctaaagaacgtcgatctcgacgttcaactagattcacgcatcggtattgttgggcccaacggtgctggcaaaacaacgatcttgaaactgctcattggcaaattatcaagcactcaaggcataatatcacagcactcacgtctacgcatcggattttttgcgcaacatcacgtggacgctcttgacttgaccatgagcgctgtcagcttcatggctaagaactacccgggccgttccgacgaggaataccgtcgtcagcttggttcgttcggcatcacaggcacgacgggtttacagaagatggaagtgctttctggaggccagaaatcgcgtgtcgcttttgcgtgtcttgcactgacccagccgcacattcttgttctagatgaaccgtctaaccatcttgacattgaggccatggatgccctttccgaggctttgaatgagtttcaaggtggtgtgctaatggtttcccacgatgttactatgctgcagactgtctgtaaaagcctatgggtttgcgaaaatgggacggtctggaaatttcctggtgatgtccagcaatataagaagaggattgcggcgttggctgaccaggctggcgtggtaaaggcgcactag

SEQ ID NO: 2511 - protein, 754 aa, Muscodor strobelii
  misc_feature: SGI Peptide ID NO. 560470
  misc_feature (560)..(725): Pfam Id: PF00005 Pfam Desc: ABC transporter
  misc_feature (227)..(442): Pfam Id: PF00005 Pfam Desc: ABC transporter
  misc_feature (334)..(438): Pfam Id: PF00005 Pfam Desc: ABC transporter
  misc_feature (1)..(754): NCBI GI: 145611184 Blast Desc: conserved [Magnaporthe grisea 70-15] gi|145018492|gb|EDK02771.1| conserved [Magnaporthe grisea 70-15]
  misc_feature (1)..(754): NCBI GI: 116202311 Blast Desc: conserved [Chaetomium globosum CBS 148.51] gi|88177558|gb|EAQ85026.1| conserved [Chaetomium globosum CBS 148.51]
  misc_feature (1)..(754): NCBI GI: 85086274 Blast Desc: protein GCN20 [Neurospora crassa OR74A] gi|28918760|gb|EAA28430.1| protein GCN20 [Neurospora crassa OR74A] gi|39979249|emb|CAE85618.1| positive effector protein
  misc_feature (1)..(754): NCBI GI: 46136025 Blast Desc: FG09528.1 [Gibberella zeae PH-1]
  misc_feature (1)..(754): NCBI GI: 261359644 Blast Desc: GCN20 [Verticillium albo-atrum VaMs.102]
  misc_feature (1)..(752): NCBI GI: 171682254 Blast Desc: protein product [Podospora anserina] gi|170941086|emb|CAP66736.1| protein product [Podospora anserina]
  misc_feature (1)..(754): NCBI GI: 256727127 Blast Desc: [Nectria haematococca mpVI 77-13-4]
  misc_feature (1)..(754): NCBI GI: 156057839 Blast Desc: SS1G_04651 [Sclerotinia sclerotiorum 1980] gi|154702436|gb|EDO02175.1| SS1G_04651 [Sclerotinia sclerotiorum 1980]
  misc_feature (1)..(754): NCBI GI: 154323448 Blast Desc: BC1G_00123 [Botryotinia fuckeliana B05.10] gi|150842352|gb|EDN17545.1| BC1G_00123 [Botryotinia fuckeliana B05.10]
  misc_feature (1)..(754): NCBI GI: 226281492 Blast Desc: translation initiation regulator (Gcn20) [Paracoccidioides brasiliensis Pb01]
MEADIRAALPDIDPVVSEYSVGYLRHASTAWIGDDEAADLSPLAEAAAAVTELLLSASGNVDSTTQQDKIRALVAKWVEKYEEANGTNGERRGPSAVKRLDQAFQVSSQRNMSSTLAVATGSVDLESANTRKVESKVDRKKLEKAERKIAAKQSKKQFKNVEYEASRLLNQPEDAQSYEEFYMAVNPLQLGIGGGAAKTKDIKIENADVSIGGTRILVDTDLTLAYGHRYGLVGNNGVGKSTLLRALSRRELPIPTHISILHVEQEITGDDTSALQAVLDADVWRKVLIREQSEITERLAQIESQRSSMADTSADAAKLDRDREALDQKLGDIQAKLAEMESDKAESRAASILAGLGFSPERQQFATKTFSGGWRMRLALARALFCEPDLLLLDEPSNMLDVPSITFLSNYLQTYPSTILVVSHDRAFLNEVATDIIHQHSERLDYYRGANFESFYATKEERKKTAKKEYENNVAARAHLQAFIDKFRYNAGKAAEAQSRIKKLERMPVLQPPEAEYSVKFRFPDVEKLSPPIVQMSGVTFGYTPDKILLKNVDLDVQLDSRIGIVGPNGAGKTTILKLLIGKLSSTQGIISQHSRLRIGFFAQHHVDALDLTMSAVSFMAKNYPGRSDEEYRRQLGSFGITGTTGLQKMEVLSGGQKSRVAFACLALTQPHILVLDEPSNHLDIEAMDALSEALNEFQGGVLMVSHDVTMLQTVCKSLWVCENGTVWKFPGDVQQYKKRIAALADQAGVVKAH

SEQ ID NO: 2512 - DNA, 3465 bp, Muscodor strobelii
  misc_feature: SGI EST ID NO. CUFF.6248.0
  misc_feature: Variant of the nucleotide sequence at SEQ ID NO 2510
gaaaaactggagggaaattttgcagggaaacaacaagaacaacatctcaacggcgatcgggaacttgatccccgtattgccacaaaatctccgcttccgaaaatccaaacagccgcgccaagatggaagccgacatcagagctgcacttcccgatatcgacccagtcgtctccgagtactcggtaggctatctcagacatgcgtctacggcatggatcggtgacgatgaagcggcggatctatcgccattagcagaagctgccgcggccgtcaccgagcttctcttgtcagcatcaggcaacgttgacagcactactcaacaggacaaaatccgtgcattggtagcgaaatgggtggaaaaatacgaggaagcaaacggcacgaatggagagcggagaggtccctcagccgtgaagcgtctcgatcaggctttccaagtcagctcacagcgcaatatgtcttcgactttagcagtcgccaccggcagtgtcgatctcgagtctgctaatacgcgcaaagtcgaatccaaggtggatcgcaaaaagcttgaaaaagcggagaggaagattgcagccaaacaaagcaagaagcagttcaagaatgtcgagtacgaagcctcgaggctcctcaatcaacccgaagatgcccagtcgtatgaagagttctacatggcagttaacccacttcaactcggtattggtggtggtgcagcaaaaacaaaggacattaagattgagaatgccgacgtcagtatcggtggcacacgtatcttagtcgatacagatctgacgcttgcttatggtcatcggtatggtttggtcggaaacaatggtgtcggtaaatctactttgcttcgcgcactatcgagaagagagcttcctatcccgactcatatctccattctacatgtggaacaagaaattaccggagatgacacaagtgctttgcaagcagttctggacgctgacgtatggcggaaagttttgattcgagaacaatctgaaatcacggaacgactcgcgcaaatcgaatcgcagcgatcatccatggcggacacgtcagcggatgcagcaaagttagatcgcgacagagaagcacttgaccagaaactcggcgacattcaggccaagcttgcagagatggagtcagacaaagccgaatcaagagcggccagcattctggcaggtcttgggttttcccccgagagacagcaatttgctaccaagacattctccggtggttggcgcatgcgtttggctttggccagagctctattttgcgagcccgatctgctacttctcgacgagccgtcgaacatgttggacgttccctcaatcacattcttatccaactacctacaaacatatcccagtacgatactcgtagtcagtcacgacagagctttcttgaacgaggtggcgactgacatcatccaccaacactcggagcgcctagattattatagaggtgcaaactttgagtctttctacgcaactaaagaagagcgcaagaaaacggccaagaaagagtacgaaaataacgtggctgcccgtgctcatttgcaggctttcattgacaagttccgttacaatgctggtaaagctgctgaggcacaatctcgtatcaagaagttagagcgcatgcccgtgcttcaaccacccgaggcagaatacagcgtcaagttcagatttcctgatgtagaaaagctttcgcctcctatcgtccaaatgtctggtgtcacatttggctacactccagacaagatccttctaaagaacgtcgatctcgacgttcaactagattcacgcatcggtattgttgggcccaacggtgctggcaaaacaacgatcttgaaactgctcattggcaaattatcaagcactcaaggcataatatcacagcactcacgtctacgcatcggattttttgcgcaacatcacgtggacgctcttgacttgaccatgagcgctgtcagcttcatggctaagaactacccgggccgttccgacgaggaataccgtcgtcagcttggttcgttcggcatcacaggcacgacgggtttacagaagatggaagtgctttctggaggccagaaatcgcgtgtcgcttttgcgtgtcttgcactgacccagccgcacattcttgttctagatgaaccgtctaaccatcttgacattgaggccatggatgccctttccgaggctttgaatgagtttcaaggtggtgtgctaatggtttcccacgatgttactatgctgcagactgtctgtaaaagcctatgggtttgcgaaaatgggacggtctggaaatttcctggtgatgtccagcaatataagaagaggattgcggcgttggctgaccaggctggcgtggtaaaggcgcactagaaccaccgataagtattgccactgttcatcaataatccatctacgatattgactcccatactgccaaaatatgacatgacgtctctcatttaagaaattcaaaattagcaaagtctccatgagctgcagtccattaccacagatgctgcatcctacaatttggcatcctggatcttatctagtattggcgctgacttgcagttatgtcttgctgcatcatgttttgtcaacctgagttggacgttacattgcccatcattcaccaatggattatctcgttgattcatgactccaatttttattgagacggcagacgactgaacaaggatttgcctagtcagtacttttcaaagtactggccattctgtgatttacaacgtgaagactatgtctagctttccggtatcccgttcaaacaccgtagtatagcgaatattcaggctattgggttctgatcccactgagataaccaaaaggccctccgccatgctcatcgttgacacattctttgaatgtaatatcacagggacgaagtgtgctgagtggacatgaatttttctaggagcctcatttagtcatcaaattagaatttgctcgtgacctgtgctacggggagagccaacaaaatagtagccaggttgtacccaggcctcgctcaattgtcgcattatagagacgatagataccgtggcatcgccatttacacaaggatacaacgcagcctaaaaacactatcagaacacgcacggatatcatcatcaaacgaggggggcatttttttttaaccaatatgggagattaaaggctcgcaccccgcgcctgtaggctcagctgattgcctcaatggaatttattgaataggttccgaataaacagattattcggatgtcattcctcggccactcccaaaatcatcaaacccctcccccgccatgtgccccgccatctgacttgcgtacctcagttttacgtccattctgggggtgctctaggcagaatcgaccccatgttggtacagtgaagtgtggcaagcagactcttcgttttgtgcctagttgcctaggggaagcagctgcct

SEQ ID NO: 2513 - DNA, 390 bp, Muscodor strobelii
  misc_feature: SGI cDNA ID NO. 560471
  misc_feature: Encodes the peptide sequence at SEQ ID NO 2514
atgactgggaaaccctctctatgcgcgacgacagtgcccagaaagcagagacagcagtacatgtccggtacggacccctatgaagaaggcgacaacgatgtcgaaatgatacagatcaaccaatactgggagtgggaccacttcgagtgcaagtacgtatctcaacagtcagagaatgaagaggacgacgagccagactatgatgaaacgttgtatgatgaaagtggcgagctgattgattgggctgcttgggccgacaacggctacacagaacttctgaagggggtcatattcagggttggctacccagagaagctcatactcgtggataaggtagacttcagtactggtctgccgggcttggcttatgaagagaaacgcgaccgctga

SEQ ID NO: 2514 - protein, 129 aa, Muscodor strobelii
  misc_feature: SGI Peptide ID NO. 560471
MTGKPSLCATTVPRKQRQQYMSGTDPYEEGDNDVEMIQINQYWEWDHFECKYVSQQSENEEDDEPDYDETLYDESGELIDWAAWADNGYTELLKGVIFRVGYPEKLILVDKVDFSTGLPGLAYEEKRDR

SEQ ID NO: 2515 - DNA, 1986 bp, Muscodor strobelii
  misc_feature: SGI cDNA ID NO. 560472
  misc_feature: Encodes the peptide sequence at SEQ ID NO 2516
atggcaacgcaaagctcagggtctggaggaagtgatggggcaggagtagcgacgccgacgacatcggcggtgtcagtgttaccgacgagtcccctgttttcggctgcttctatgatgggcctttcgtctataaacttcacgagcaggacacctctggcaacaccacctctggcaaccccacctttgacggcagcgccgtccatgtcgcctcaaggtttagcgggccatgacatccgcggagagtccatctacggaacgggcgtcgaatcaaccaccaccttcgaagcgggcgaatacaaccgcgtgcgggggaccgatgactacgccatcgagtctctagcctcgtccatcctcggggacacgcacgagacgacctccgacacgtactatgtcggcgaccaacaaggcataggctacatcctagacatcgtaggcgagccgggcgccgtgcgatcacaacacttcggactgccgtacatggtagcaacgcagaacctgacggccgaggacgtcgcctatctgcggtccaagagcgtcttctccgtcccgagccagcacgtatctgaggctctgctagtcgcatacttccaccatgtgcatcccctattgcctgtcgtcgacgcggctgccgtcctgagctcgttgaagcacggtggaccggcatccatcaatctcctcctactctggagcatgttctccgttgcggctaattttgtcgaccaatcagtcatacgacaggcgggctacaagacgcgtaaggaaatgaagagatccatgtttatgcgtgcaaagtgcctctacgacaatggctgtgaaaaagaccgcatgaccatcatccagtccgtcagcctgctggcgttctggtactcggacctctccgagcacaccgagtcctggcactggatgggcatcgccatcggcctctcgcagaccctcggcctccaccgagacccggaccgcggcggccagcagtacaacgcccgcctctcggaccgccagcggcagctctggcgccgcatatggtggagctgcttcttccgggaccgctggctgtcgctcaacatgggccggcccatgcgcatcaacacccgcgactgcgaccagcccatcccatgcgccgaggacctgaccagcgagttcctcgagctgccgcgcgccttggtcgctaagtacatgccctctgagctcgagcagctcgccgatcgctgggttgtgctcctgcacactagcaagatcctcggcgccatcttgctcgagaactacacgcccaactatttgcttccttcacgcgactgggtcgaggctgtcgaagccaagatctcgaactgttccgagaaggtgaatgcggctcacttgcctccttcgggtatcgtcagtcccgtcctggctttctactcttatcacatccgcctgcatctcaatgctgccttcatcgccctctggagaccctttctcaattcgaggacgggcgcgaccaccccgacagacgagagctgggcggcgctcgtgcatcagaaggtacgcactgcagcagccgataccaacgctgtcctcgacaagattattggtgagcagcttgttggattgattgggccttcgacgattcccctcctggtgcccgcaatgtacagccacctactggactccaaatccacagaccccctaatccgacagtcgagcctgcataagctagatcttttcatcatcgtcctcaagaaagtgcaggacgtgtacacttctgctaccttcatccgtggcctattcctatcggctattgagaagatgagcaactcttcttctgatgtcaattccatcgctgcatcaccggtgtttgcgggagactcactggcaggaggaggatcaggaggcggcggactcctgcctgatggattttggcagttcgaagaccgcatgtctgacttttgggacttgaacggaaggactttcagcggtcctgctacggtcgcggatggagatgggagttga

SEQ ID NO: 2516 - protein, 661 aa, Muscodor strobelii
  misc_feature: SGI Peptide ID NO. 560472
  misc_feature (275)..(377): Pfam Id: PF04082 Pfam Desc: Fungal specific transcription factor domain
  misc_feature (90)..(595): NCBI GI: 242820330 Blast Desc: C6 transcription factor, [Talaromyces stipitatus ATCC 10500] gi|218713953|gb|EED13377.1| C6 transcription factor, [Talaromyces stipitatus ATCC 10500]
  misc_feature (113)..(595): NCBI GI: 255943550 Blast Desc: Pc19g00550 [Penicillium chrysogenum Wisconsin 54-1255] gi|211587277|emb|CAP79471.1| Pc19g00550 [Penicillium chrysogenum Wisconsin 54-1255]
  misc_feature (98)..(593): NCBI GI: 255953651 Blast Desc: Pc21g05320 [Penicillium chrysogenum Wisconsin 54-1255] gi|211589289|emb|CAP95429.1| Pc21g05320 [Penicillium chrysogenum Wisconsin 54-1255]
  misc_feature (131)..(600): NCBI GI: 70997812 Blast Desc: C6 transcription factor [Aspergillus fumigatus Af293] gi|66851274|gb|EAL91600.1| C6 transcription factor, [Aspergillus fumigatus Af293]
  misc_feature (131)..(600): NCBI GI: 159126629 Blast Desc: C6 transcription factor, [Aspergillus fumigatus A1163]
  misc_feature (98)..(600): NCBI GI: 119479319 Blast Desc: fungal specific transcription factor, [Neosartorya fischeri NRRL 181] gi|119407842|gb|EAW17791.1| fungal specific transcription factor, [Neosartorya fischeri NRRL 181]
  misc_feature (132)..(595): NCBI GI: 115449447 Blast Desc: conserved [Aspergillus terreus NIH2624] gi|114187558|gb|EAU29258.1| conserved [Aspergillus terreus NIH2624]
  misc_feature (100)..(593): NCBI GI: 145240825 Blast Desc: An08g09490 [Aspergillus niger] gi|134077583|emb|CAK96727.1| protein product [Aspergillus niger]
  misc_feature (115)..(599): NCBI GI: 119474209 Blast Desc: fungal specific transcription factor, [Neosartorya fischeri NRRL 181] gi|119407133|gb|EAW17083.1| fungal specific transcription factor, [Neosartorya fischeri NRRL 181]
  misc_feature (132)..(599): NCBI GI: 259488616 Blast Desc: TPA: Zn(II)2Cys6 transcription factor (Eurofung) [Aspergillus nidulans FGSC A4]
MATQSSGSGGSDGAGVATPTTSAVSVLPTSPLFSAASMMGLSSINFTSRTPLATPPLATPPLTAAPSMSPQGLAGHDIRGESIYGTGVESTTTFEAGEYNRVRGTDDYAIESLASSILGDTHETTSDTYYVGDQQGIGYILDIVGEPGAVRSQHFGLPYMVATQNLTAEDVAYLRSKSVFSVPSQHVSEALLVAYFHHVHPLLPVVDAAAVLSSLKHGGPASINLLLLWSMFSVAANFVDQSVIRQAGYKTRKEMKRSMFMRAKCLYDNGCEKDRMTIIQSVSLLAFWYSDLSEHTESWHWMGIAIGLSQTLGLHRDPDRGGQQYNARLSDRQRQLWRRIWWSCFFRDRWLSLNMGRPMRINTRDCDQPIPCAEDLTSEFLELPRALVAKYMPSELEQLADRWVVLLHTSKILGAILLENYTPNYLLPSRDWVEAVEAKISNCSEKVNAAHLPPSGIVSPVLAFYSYHIRLHLNAAFIALWRPFLNSRTGATTPTDESWAALVHQKVRTAAADTNAVLDKIIGEQLVGLIGPSTIPLLVPAMYSHLLDSKSTDPLIRQSSLHKLDLFIIVLKKVQDVYTSATFIRGLFLSAIEKMSNSSSDVNSIAASPVFAGDSLAGGGSGGGGLLPDGFWQFEDRMSDFWDLNGRTFSGPATVADGDGS

SEQ ID NO: 2517 - DNA, 2515 bp, Muscodor strobelii
  misc_feature: SGI EST ID NO. CUFF.6262.1
  misc_feature: Variant of the nucleotide sequence at SEQ ID NO 2515
cggagaccatgtgccgtcttggccgtttccctcgaccttttgcactgccgtcttagccggttccctcgaccctttgcacgctcgtctcccggaagggccacgagtccactcggtgtgtgcctcgcggcatgatggacacgacccgccgatcgttgtctcctgacccgtccaacgtatcctatattcggaagcgagccccgaccgcgtgcggtgtatgtcggcagcgcaaagtaaaatgcgatgttgccgcagtcgggatcccgtgcatgaactgtgtcagggacggtcatacgtgtgaggtctacggccgaaagagacgcgctatcaaccaatcgcactccatctcacaccccgtctcgtccacagacgagatggcaacgcaaagctcagggtctggaggaagtgatggggcaggagtagcgacgccgacgacatcggcggtgtcagtgttaccgacgagtcccctgttttcggctgcttctatgatgggcctttcgtctataaacttcacgagcaggacacctctggcaacaccacctctggcaaccccacctttgacggcagcgccgtccatgtcgcctcaaggtttagcgggccatgacatccgcggagagtccatctacggaacgggcgtcgaatcaaccaccaccttcgaagcgggcgaatacaaccgcgtgcgggggaccgatgactacgccatcgagtctctagcctcgtccatcctcggggacacgcacgagacgacctccgacacgtactatgtcggcgaccaacaaggcataggctacatcctagacatcgtaggcgagccgggcgccgtgcgatcacaacacttcggactgccgtacatggtagcaacgcagaacctgacggccgaggacgtcgcctatctgcggtccaagagcgtcttctccgtcccgagccagcacgtatctgaggctctgctagtcgcatacttccaccatgtgcatcccctattgcctgtcgtcgacgcggctgccgtcctgagctcgttgaagcacggtggaccggcatccatcaatctcctcctactctggagcatgttctccgttgcggctaattttgtcgaccaatcagtcatacgacaggcgggctacaagacgcgtaaggaaatgaagagatccatgtttatgcgtgcaaagtgcctctacgacaatggctgtgaaaaagaccgcatgaccatcatccagtccgtcagcctgctggcgttctggtactcggacctctccgagcacaccgagtcctggcactggatgggcatcgccatcggcctctcgcagaccctcggcctccaccgagacccggaccgcggcggccagcagtacaacgcccgcctctcggaccgccagcggcagctctggcgccgcatatggtggagctgcttcttccgggaccgctggctgtcgctcaacatgggccggcccatgcgcatcaacacccgcgactgcgaccagcccatcccatgcgccgaggacctgaccagcgagttcctcgagctgccgcgcgccttggtcgctaagtacatgccctctgagctcgagcagctcgccgatcgctgggttgtgctcctgcacactagcaagatcctcggcgccatcttgctcgagaactacacgcccaactatttgcttccttcacgcgactgggtcgaggctgtcgaagccaagatctcgaactgttccgagaaggtgaatgcggctcacttgcctccttcgggtatcgtcagtcccgtcctggctttctactcttatcacatccgcctgcatctcaatgctgccttcatcgccctctggagaccctttctcaattcgaggacgggcgcgaccaccccgacagacgagagctgggcggcgctcgtgcatcagaaggtacgcactgcagcagccgataccaacgctgtcctcgacaagattattggtgagcagcttgttggattgattgggccttcgacgattcccctcctggtgcccgcaatgtacagccacctactggactccaaatccacagaccccctaatccgacagtcgagcctgcataagctagatcttttcatcatcgtcctcaagaaagtgcaggacgtgtacacttctgctaccttcatccgtggcctattcctatcggctattgagaagatgagcaactcttcttctgatgtcaattccatcgctgcatcaccggtgtttgcgggagactcactggcaggaggaggatcaggaggcggcggactcctgcctgatggattttggcagttcgaagaccgcatgtctgacttttgggacttgaacggaaggactttcagcggtcctgctacggtcgcggatggagatgggagttgactccctaaccgtaacccgaagagacaaatgactaagggaggatcgtgtgacttagtgtgaggatgataatatatgttgattaatatagttaattaaaatcacgacatagacatctattgtattgtttcactggtctaaggtgttgtcgatagtgggcg

SEQ ID NO: 2518 - DNA, 7452 bp, Muscodor strobelii
  misc_feature: SGI cDNA ID NO. 560473
  misc_feature: Encodes the peptide sequence at SEQ ID NO 2519
atggctccttatatgtatagcgaacctactagtggtcaaaactctagccggggctcgactgtcggaactcctgccactcaggatgaggccacagaacagcattacaccggctctgagccaatcgccatcgtcggaatggcatgtcggttcccgggcacatcagacacgcccgacgacttctggcagatgctggttgaccagcgatcaggctactcggagcccccggccagccgcttcaacgtctccggtttccactccaccaaggcgaacacgggctcgctgggtccgaagggcggatacttcatctccgaggacatctacaatttcgacccgcccttctttggcattacccagaccgaggccaccgtcatggacccgcagcagcggaagctgctcgaatgtgtctatgaggccctcgagtccgccggcgtcccgctcgacgtcgtctcgggcaagaacatcggcacctacgtcggtaacttcaccatcgactacggcatgatggctctgcgggacatggactaccccaagccctactccatgactggtcacggaaacaccattttgagtaaccgtgtcagctacgtcttcaacctctgcggacctagtttcaccatcgacacggcctgctcgtcttccatgtacgccactcacttggcgtgccgtgcgctatccactggcgagatcgacggtgccgtagtcggaggcaccaacctcatcctcgatgctgccgttcagatggccgtcgacaagatgggtgtcctttcccacacttctacttgccacacctttgacgcttcggccgacggctatggcagagccgagggtatcggagccctgtacctcaagcgtctctcagacgccctgcgagacggagacccgatccgggcggtcatccggggaacggccgccaacgccaacggcaagacgagcggtatcactcagcctagcgccatcggccaggaggccgtcatacggaaggcgtacgccttcgccggtgacctcaaccccgacgagacgtcctacttcgagtgccacggcaccggaacccccgtcggtgaccccatcgagctcaacggcatcaccaacgtgttcttgcgcgacagcaagcgcgacgcgctgctcgtcggcgccgttaagaccaacgtcggccacgccgaagccgccagcgccatggccagtatcatgaaggtcgtcatcgccatggaaaagggcaccatccccgccagcatcggcgtcaagaactacaaccccaagatcaacttctccggcggccgtctgcaggtcgtcaaggaaaccatcgcctggcccaagggctacgatgtcagacgagcgagtgtcaactccttcggatacggaggagccaacgcccactgtatccttgagtcttccgagtcgtacatgccaggcttcaagtcttttaagaagcgcggcgagctcgagtcgtcggccgccccatcggtcccggccgaaggcaagggcaagggcacgaccgaggtccaggagcggacccaattcctcctgcccttctcggcccaggacttccccagtctcaaggccaacgtggagcgtcaccgcgacgttgcttcgcagtacgacatgctcgacatggctttcaccctgggcgcgcgccagtccaagttcttcaaccgcggctacgccatcgcctcggccgattctatcgaggaggacctcgacccggagaacttgacgttcggcaagcgcggagacggctccaagattgccttcatcttcactggccagggtgctcaggctgcccagatgggcatggagctgatggagaacatccccagctacctggccagcatccgcgagatggacgacatcctgcagagcctgggcgaggacgcgcctgactggctgctcgaggaggtgctgctcgaacccaaggccacgagctcgatcgacaaggtccatttctctcagcccatctgcacggctgtccaggttgctctcgtcaagctcctccgcgagtggggtatcacccaccttgcttgcgtcggccactcgtctggtgagatcgcggctacctacgccgccggcctcatcactgacaaacaggccatcctggccgcatacttccgtggtgtcgctgtcgacaagctgacccagcagggtaccatgttggcggttggcctcggcgccgagaatgcgaccccctacctcgaggagggtgtgcgcatcgcctgctacaactcgccccagagcgtcaccctcagtggtgaccaggaagcagctgcccgcgtccaggccaagctcgaggccgacggcatcttcgtccgcgccctcaagacgagtggtcgtgcctaccactcgcaccacatgaaggacgtcggcgccatctacgaggaatgcgccaaccgtggctttgcccgcctcagcgcccttgacttcccctcccacgacaagcaggctgctctgccgctcttcgtctcctccgtcacgggcgagcctaagctcaggaacttccagcccggccccaagtactggcgagacaacctcgaatctccagtcatgttcacccaggccgtgacgcgcatgaccgagctcgaaggcctcggcgtcaaccacattatcgagatcggcccccactcggccttagccggccccatccgccagatccgcgacaagctcggtctcaacactcgtgagctcgaatactcggccacgctttctcgtggcgagaactcggtgacccgtctcctcgaccttgccggtgctctgttcatcaagggctaccccgtcgacatgaagcgcgtcaactcgatggaggacatcgacttgcgtggccgcatcactccccgctgcggcttgcccatcgtcgatctgccccggtacagctggaactacagcgccggtgccctgcgcgccaagcaccggatcaacatgtcctttcagaaccgcgtgttccctcgccacgatctcctcggtaccctcctccccggtaccattcgcgatcaggcgcagtggcgcaatatgctcgacattcacgacctgccgtggctcgagcagcacaggctcggtacccagcccgtcttgcccgctacgggctacatcggcatcgccgtcgaggccgcccgccagttcttccacggcaaggtcgagatgaagggtcccttcaagtacttcatccctcgcctctcgatcacggcggccctgaacttgcccccgagtggaacccccatcgaggtcatgacgagcgtgcgcttccagaccatctccaacgctgtctcgtcttccaactgcgtcgagttcaccatcgagtccgtcctcgacggccactggaccaagcactgtgtcggtctcatcggtcgacacgccatcgaagaatgtgaagcgcccctatttgacgagttcaaggtccaggaaccgcgtagctcgcacacctggtaccgtggatttgccaacatcggcctcaactacggtcctcccttcaacggtttgaacaacatccgcaccgacccctggaccaacgagtgtgtcgccgataccaagctcctgcccgccgacattcccgtcgatgactctagcgccaaccgatccttcatccctgtcgactgggaggaagtctccatctacgcctacgagggcactgacatgcccacccctgtcgacgtagacggacagatcctcgcaaccggtcactttagcagtctgcgtgctttgtggggctctttccagctcaacgcgccggatggaagacctctgttcgtcgccaagaaggtcaactctatcacctacgccgaggacctgaacaagaacaacacgtccgaccgacacccctacctccgcgtcacgtggaagcctgatgtcggcatgatcgagtcaggtgctgctctgccagctgctgccaccgagatgggacacgacctttcggctcgtgagaaggccctagtggcaagatgggctactgacctggtcaaggcagccaaggcatccaagaatcagagcgagtctgtcctcgagtttatcaagaccctcacctccatgaacatcccgaccgatgacaaggacgcagccctcgtctcggctgatctcggcgacgccaatctcgacgagagcttttatcgcttcgaagccatctacacgagcctcatgatggctctcgccgacgagcagggcaccgtctctgagacttcgaacggagaggattcattgattcagacgctcgacatcgtcgctcacaagttcccaggtatgaacatcctgcaggtcgtcaactcctcgggtgatctcgcccgcaagttaccccagctactacagggagactcgtctcttaagcgatacctttcgttcacctacctcgcttcctctgacgctctcgtccaagccgcgaccgagattagtgaggtgtggcgtgacgtttctgtcgaagagagcctgctcttcgccgagaccaactcagagaccgccaagtacgacctcatcattctctctgacgtctcgtcctctggtatccggggcgctgatgtcctgggatcagtcatgccgaagctcgctgagggtggtcgacttctgatccacagcggaggtctcgtcaagagttacggaccccttctcgatctgttctccaaggagctctcgtcgccctcttccgcgtccgacctgaagtcggactgggttaaaaagctgagccaggctgagatcaagactcaggtcagcgatcaatcgatatctggcttcactctgctctctgagcctactccggagactaagcctcaccaagagctcgtcgttctgttcagagacagcaacgacgctggtcttgctgagttctccagatctctcaagacgggctacagcgtccagacgatgtccctcacgtccaagaccttcgagccggtggccgacgccgtctacatctccatcgtcgagctcgaatccaacatgttcaacggcagcacaaagatgaacgcgaccgagctgtcgaacctgcagctcctcgccgactcgaccaaggccatattctggttaacgtctggtgacttgctcggcaaggtcatcagccccgacgccgccatcgtgcagggactcggacgtacactgcagacagaacacattcagctgcagttcatcaccgtcgatctcgaccactcttcgcccatcctggccgcgcagcagacctctcgtattctctcgcgcttctgggaggcggcgggcgaattcgacagggagtacatcgtcaaggacgacgtcttccatatcagccgtctggcacaggacgccaacctcgacaaggagtacagcgctctgattggcaacgaagcttccgaggccacctacgatgcgctcacccccatccgtctcgacatcgaaaagatcggtctcatcgacacactgcacttcaaggccgacgaccgctcgcgcgtgctcgaggcggacgaggcagaggtcgaggtcaaggctacgggtatcaacatgaaggagtacgctaccttccgcggtagcttccactcggagtccctcagtcacgagggcgcgggtatcgtccgccgcgtcggatccggtgtgacgggtatcaaagtcggtgacaaggtgtgctggatgggcaagggcctgttcggcaacatcgagcgcttcaaggctatgcatctccaccccatcaaggacacggacaacctgtccttcgacgagatagccggtgttcccctcgtctttgccacggccgtctacggactgctctacctcggtcgcctgaagaagggcgagaaggtgctcatccactcggccgccggtggtgtcggtctcgctgccatccagatcgccatgatgatcggtgccgagatctacgtgacggtcggtaccgcagcgaagagacagtttttgaccgagtctttcgggatcgaggactcgcacatcttcaactcgagggacacttcatttgccgcgggcatcatggcggcgaccaagggtcacggtatcgatgtcgcgctcaacagtctggtgcgcgagatgctcgccgcctcatggagcgtcatggcgaacaatggtcgccacgtcgagattggccggaccgacatcatggagtttggtctcttggacttgaacgtcttcaagcgcaacacgactttcagcgcgtttgactttggagtcgttgctgatgagcatcctcaaatcgtctgcgatgtgatgaaggacgtcatgaagtacctccgcgcaggtcacatccgcccgctcgagcccacagctgtcttcccggccacgcgcatctcagaggcctttgccgagttcgccaacccgcaccgagtaggaaaggtggtcgtgtccttcgacggtgccagctcgagccagctaaccgtccgccgcgaggccgagggcgccatccgattccgccccgacggcacttacctcctcatcggttgtatgggaggacttggccgttgcctcgcccgtttcatggccgagcgcggcgcgcgcaacttcactttcatcaaccgcagcggtgccgacaagcccgaggccgcatcgctcatcgcttctctcgagggccgtggctgcaccgtgcacatggtccggggcgacgtggcgtccaaggaggtcgtcgaccgcgccgtctccgtcgccggcgtgcctgtgtatggaatggtgcagggagcgatggcgctggaggacaagctcttcagcaagctggacctggccggctggaactacccgatcgaccccaaagtccagggtacgtggaacctgcacgagagcctgactgctggcaaccacccgcttgacttcttcgtcatgctctcctccatctcggccatgaccggtgcccccacgcagagcaactactgcgccgccaacaccttcctcgacttctttgcccgttatcgggccaacctcggcctgcccgccaccaccgtaggtctcagcatggttctcgaggtcggtttcgtgtcgcagaaccagtcgatcgaggtcggcatctcacgatctggcatccacggtatcaccgagcgcgacttcctgctgctcatggagcaggccatgaagcccggccgagtgggcgactggcgccttgacgacggtgcaagaaacttcttagtgtcgggtctcgaacccgccaagctagcggccgacctcgacgtcaacgccttcaagttctggctccagccgcatgtgggacctctcttgacagcgatccaccgccgcagcgagggttccggcggcagggccggctcgggcggcaagggtgtcctcgagctggatgacgtcgtggctgccacggtcgacaagtttgcaaagacgttcatgatcccagccgacgacgtcgatccttcgcggccactcgtcgcatacggcatggacagcatgattggcaccgccctgcgaaactgggccttctcatcctttggcgtcgacatcccttcctcggactttatgggacctgtcctatcagcccagtctctggcggagaagatctttgtgggccgctcctga

SEQ ID NO: 2519 - protein, 2483 aa, Muscodor strobelii
  misc_feature: SGI Peptide ID NO. 560473
  misc_feature (582)..(922): Pfam Id: PF00698 Pfam Desc: Acyl transferase domain
  misc_feature (1800)..(1875): Pfam Id: PF08240 Pfam Desc: Alcohol dehydrogenase GroES-like domain
  misc_feature (2121)..(2287): Pfam Id: PF00106 Pfam Desc: short chain dehydrogenase
  misc_feature (1908)..(2060): Pfam Id: PF00107 Pfam Desc: Zinc-binding dehydrogenase
  misc_feature (39)..(288): Pfam Id: PF00109 Pfam Desc: Beta-ketoacyl synthase, N-terminal domain
  misc_feature (296)..(414): Pfam Id: PF02801 Pfam Desc: Beta-ketoacyl synthase, C-terminal domain
  misc_feature (2121)..(2300): Pfam Id: PF08659 Pfam Desc: KR domain
  misc_feature (582)..(786): Pfam Id: PF00698 Pfam Desc: Acyl transferase domain
  misc_feature (1831)..(1856): Pfam Id: PF08240 Pfam Desc: Alcohol dehydrogenase GroES-like domain
  misc_feature (1908)..(2037): Pfam Id: PF00107 Pfam Desc: Zinc-binding dehydrogenase
  misc_feature (47)..(1283): NCBI GI: 156045928 Blast Desc: SS1G_09240 [Sclerotinia sclerotiorum 1980] gi|154693636|gb|EDN93374.1| SS1G_09240 [Sclerotinia sclerotiorum 1980]
  misc_feature (39)..(2478): NCBI GI: 171681658 Blast Desc: protein product [Podospora anserina] gi|170940788|emb|CAP66437.1| protein product [Podospora anserina]
  misc_feature (42)..(2476): NCBI GI: 242773383 Blast Desc: polyketide synthase, [Talaromyces stipitatus ATCC 10500] gi|218721848|gb|EED21266.1| polyketide synthase, [Talaromyces stipitatus ATCC 10500]
  misc_feature (228)..(1285): NCBI GI: 169616200 Blast Desc: SNOG_11272 [Phaeosphaeria nodorum SN15] gi|160703132|gb|EAT80980.2| SNOG_11272 [Phaeosphaeria nodorum SN15]
  misc_feature (1397)..(2479): NCBI GI: 169616200 Blast Desc: SNOG_11272 [Phaeosphaeria nodorum SN15] gi|160703132|gb|EAT80980.2| SNOG_11272 [Phaeosphaeria nodorum SN15]
  misc_feature (36)..(2475): NCBI GI: 40806925 Blast Desc: polyketide synthase [Gibberella moniliformis]
  misc_feature (6)..(2465): NCBI GI: 46109816 Blast Desc: FG01790.1 [Gibberella zeae PH-1]
  misc_feature (39)..(2309): NCBI GI: 171691444 Blast Desc: protein product [Podospora anserina] gi|170945670|emb|CAP71783.1| protein product [Podospora anserina]
  misc_feature (39)..(2459): NCBI GI: 256721596 Blast Desc: NECHADRAFT_123123 [Nectria haematococca mpVI 77-13-4]
  misc_feature (10)..(2465): NCBI GI: 119490156 Blast Desc: polyketide synthase, [Neosartorya fischeri NRRL 181] gi|119411151|gb|EAW21094.1| polyketide synthase, [Neosartorya fischeri NRRL 181]
  misc_feature: Useful for fungicidal and/or biocontrol applications
MAPYMYSEPTSGQNSSRGSTVGTPATQDEATEQHYTGSEPIAIVGMACRFPGTSDTPDDFWQMLVDQRSGYSEPPASRFNVSGFHSTKANTGSLGPKGGYFISEDIYNFDPPFFGITQTEATVMDPQQRKLLECVYEALESAGVPLDVVSGKNIGTYVGNFTIDYGMMALRDMDYPKPYSMTGHGNTILSNRVSYVFNLCGPSFTIDTACSSSMYATHLACRALSTGEIDGAVVGGTNLILDAAVQMAVDKMGVLSHTSTCHTFDASADGYGRAEGIGALYLKRLSDALRDGDPIRAVIRGTAANANGKTSGITQPSAIGQEAVIRKAYAFAGDLNPDETSYFECHGTGTPVGDPIELNGITNVFLRDSKRDALLVGAVKTNVGHAEAASAMASIMKVVIAMEKGTIPASIGVKNYNPKINFSGGRLQVVKETIAWPKGYDVRRASVNSFGYGGANAHCILESSESYMPGFKSFKKRGELESSAAPSVPAEGKGKGTTEVQERTQFLLPFSAQDFPSLKANVERHRDVASQYDMLDMAFTLGARQSKFFNRGYAIASADSIEEDLDPENLTFGKRGDGSKIAFIFTGQGAQAAQMGMELMENIPSYLASIREMDDILQSLGEDAPDWLLEEVLLEPKATSSIDKVHFSQPICTAVQVALVKLLREWGITHLACVGHSSGEIAATYAAGLITDKQAILAAYFRGVAVDKLTQQGTMLAVGLGAENATPYLEEGVRIACYNSPQSVTLSGDQEAAARVQAKLEADGIFVRALKTSGRAYHSHHMKDVGAIYEECANRGFARLSALDFPSHDKQAALPLFVSSVTGEPKLRNFQPGPKYWRDNLESPVMFTQAVTRMTELEGLGVNHIIEIGPHSALAGPIRQIRDKLGLNTRELEYSATLSRGENSVTRLLDLAGALFIKGYPVDMKRVNSMEDIDLRGRITPRCGLPIVDLPRYSWNYSAGALRAKHRINMSFQNRVFPRHDLLGTLLPGTIRDQAQWRNMLDIHDLPWLEQHRLGTQPVLPATGYIGIAVEAARQFFHGKVEMKGPFKYFIPRLSITAALNLPPSGTPIEVMTSVRFQTISNAVSSSNCVEFTIESVLDGHWTKHCVGLIGRHAIEECEAPLFDEFKVQEPRSSHTWYRGFANIGLNYGPPFNGLNNIRTDPWTNECVADTKLLPADIPVDDSSANRSFIPVDWEEVSIYAYEGTDMPTPVDVDGQILATGHFSSLRALWGSFQLNAPDGRPLFVAKKVNSITYAEDLNKNNTSDRHPYLRVTWKPDVGMIESGAALPAAATEMGHDLSAREKALVARWATDLVKAAKASKNQSESVLEFIKTLTSMNIPTDDKDAALVSADLGDANLDESFYRFEAIYTSLMMALADEQGTVSETSNGEDSLIQTLDIVAHKFPGMNILQVVNSSGDLARKLPQLLQGDSSLKRYLSFTYLASSDALVQAATEISEVWRDVSVEESLLFAETNSETAKYDLIILSDVSSSGIRGADVLGSVMPKLAEGGRLLIHSGGLVKSYGPLLDLFSKELSSPSSASDLKSDWVKKLSQAEIKTQVSDQSISGFTLLSEPTPETKPHQELVVLFRDSNDAGLAEFSRSLKTGYSVQTMSLTSKTFEPVADAVYISIVELESNMFNGSTKMNATELSNLQLLADSTKAIFWLTSGDLLGKVISPDAAIVQGLGRTLQTEHIQLQFITVDLDHSSPILAAQQTSRILSRFWEAAGEFDREYIVKDDVFHISRLAQDANLDKEYSALIGNEASEATYDALTPIRLDIEKIGLIDTLHFKADDRSRVLEADEAEVEVKATGINMKEYATFRGSFHSESLSHEGAGIVRRVGSGVTGIKVGDKVCWMGKGLFGNIERFKAMHLHPIKDTDNLSFDEIAGVPLVFATAVYGLLYLGRLKKGEKVLIHSAAGGVGLAAIQIAMMIGAEIYVTVGTAAKRQFLTESFGIEDSHIFNSRDTSFAAGIMAATKGHGIDVALNSLVREMLAASWSVMANNGRHVEIGRTDIMEFGLLDLNVFKRNTTFSAFDFGVVADEHPQIVCDVMKDVMKYLRAGHIRPLEPTAVFPATRISEAFAEFANPHRVGKVVVSFDGASSSQLTVRREAEGAIRFRPDGTYLLIGCMGGLGRCLARFMAERGARNFTFINRSGADKPEAASLIASLEGRGCTVHMVRGDVASKEVVDRAVSVAGVPVYGMVQGAMALEDKLFSKLDLAGWNYPIDPKVQGTWNLHESLTAGNHPLDFFVMLSSISAMTGAPTQSNYCAANTFLDFFARYRANLGLPATTVGLSMVLEVGFVSQNQSIEVGISRSGIHGITERDFLLLMEQAMKPGRVGDWRLDDGARNFLVSGLEPAKLAADLDVNAFKFWLQPHVGPLLTAIHRRSEGSGGRAGSGGKGVLELDDVVAATVDKFAKTFMIPADDVDPSRPLVAYGMDSMIGTALRNWAFSSFGVDIPSSDFMGPVLSAQSLAEKIFVGRS

SEQ ID NO: 2520 - DNA, 4914 bp, Muscodor strobelii
  misc_feature: SGI EST ID NO. CUFF.6277.1
  misc_feature: Variant of the nucleotide sequence at SEQ ID NO 2518
taggaacgttaggtattaaacggtttagtgcctaaaattgcatgggttggcattaaaccggcattttacgaaaggtgccggcattttaccagccctaatcttgatccacatccgccctgccggtctcttgctccagattacccaatccaggtcgcatcacgtaatcgcccggccaggtccacacgatctgaagccacaaccacgccgtcgaacccccgtcgagtctcaccacagtgagtgtagtcagcaacttctccaggaacagagccgacgcgtgggacttctggaccctgatgggcgataggccatgctatcgtcggtatgggtattcggttccacggctcggagcctctcgtacggtagtatgggcggcacggggcgcgatcgcggctgcgggaacaccaccgggtgtgctgtagtccggcaatagcatggcattcaggcttgagacacggcctgggagaaagagaaggaaggaaggggaggagtaccgagatgttgtttaaaggcactcgtgttcgcagcgtcttctcgaggaatatcagttaaagattagagacatcaactcaggaggcagagccagcgccacgaccaacatcttagtcgctagaatatacacttcatctcacgataccttcatcttcacttcaaatggctccttatatgtatagcgaacctactagtggtcaaaactctagccggggctcgactgtcggaactcctgccactcaggatgaggccacagaacagcattacaccggctctgagccaatcgccatcgtcggaatgggtgagtatccctcctcgactcgagatgagcataacagaaactgacatatcgcagcatgtcggttcccgggcacatcagacacgcccgacgacttctggcagatgctggttgaccagcgatcaggctactcggagcccccggccagccgcttcaacgtctccggtttccactccaccaaggcgaacacgggctcgctgggtccgaagggcggatacttcatctccgaggacatctacaatttcgacccgcccttctttggcattacccagaccgaggccaccgtcatggacccgcagcagcggaagctgctcgaatgtgtctatgaggccctcgagtccgccggcgtcccgctcgacgtcgtctcgggcaagaacatcggcacctacgtcggtaacttcaccatcgactacggcatgatggctctgcgggacatggactaccccaagccctactccatgactggtcacggaaacaccattttgagtaaccgtgtcagctacgtcttcaacctctgcggacctagtttcaccatcgacacggcctgctcgtcttccatgtacgccactcacttggcgtgccgtgcgctatccactggcgagatcgacggtgccgtagtcggaggcaccaacctcatcctcgatgctgccgttcagatggccgtcgacaagatgggtgtcctttcccacacttctacttgccacacctttgacgcttcggccgacggctatggcagagccgagggtatcggagccctgtacctcaagcgtctctcagacgccctgcgagacggagacccgatccgggcggtcatccggggaacggccgccaacgccaacggcaagacgagcggtatcactcagcctagcgccatcggccaggaggccgtcatacggaaggcgtacgccttcgccggtgacctcaaccccgacgagacgtcctacttcgagtgccacggcaccggaacccccgtcggtgaccccatcgagctcaacggcatcaccaacgtgttcttgcgcgacagcaagcgcgacgcgctgctcgtcggcgccgttaagaccaacgtcggccacgccgaagccgccagcgccatggccagtatcatgaaggtcgtcatcgccatggaaaagggcaccatccccgccagcatcggcgtcaagaactacaaccccaagatcaacttctccggcggccgtctgcaggtcgtcaaggaaaccatcgcctggcccaagggctacgatgtcagacgagcgagtgtcaactccttcggatacggaggagccaacgcccactgtatccttgagtcttccgagtcgtacatgccaggcttcaagtcttttaagaagcgcggcgagctcgagtcgtcggccgccccatcggtcccggccgaaggcaagggcaagggcacgaccgaggtccaggagcggacccaattcctcctgcccttctcggcccaggacttccccagtctcaaggccaacgtggagcgtcaccgcgacgttgcttcgcagtacgacatgctcgacatggctttcaccctgggcgcgcgccagtccaagttcttcaaccgcggctacgccatcgcctcggccgattctatcgaggaggacctcgacccggagaacttgacgttcggcaagcgcggagacggctccaagattgccttcatcttcactggccagggtgctcaggctgcccagatgggcatggagctgatggagaacatccccagctacctggccagcatccgcgagatggacgacatcctgcagagcctgggcgaggacgcgcctgactggctgctcgaggaggtgctgctcgaacccaaggccacgagctcgatcgacaaggtccatttctctcagcccatctgcacggctgtccaggttgctctcgtcaagctcctccgcgagtggggtatcacccaccttgcttgcgtcggccactcgtctggtgagatcgcggctacctacgccgccggcctcatcactgacaaacaggccatcctggccgcatacttccgtggtgtcgctgtcgacaagctgacccagcagggtaccatgttggcggttggcctcggcgccgagaatgcgaccccctacctcgaggagggtgtgcgcatcgcctgctacaactcgccccagagcgtcaccctcagtggtgaccaggaagcagctgcccgcgtccaggccaagctcgaggccgacggcatcttcgtccgcgccctcaagacgagtggtcgtgcctaccactcgcaccacatgaaggacgtcggcgccatctacgaggaatgcgccaaccgtggctttgcccgcctcagcgcccttgacttcccctcccacgacaagcaggctgctctgccgctcttcgtctcctccgtcacgggcgagcctaagctcaggaacttccagcccggccccaagtactggcgagacaacctcgaatctccagtcatgttcacccaggccgtgacgcgcatgaccgagctcgaaggcctcggcgtcaaccacattatcgagatcggcccccactcggccttagccggccccatccgccagatccgcgacaagctcggtctcaacactcgtgagctcgaatactcggccacgctttctcgtggcgagaactcggtgacccgtctcctcgaccttgccggtgctctgttcatcaagggctaccccgtcgacatgaagcgcgtcaactcgatggaggacatcgacttgcgtggccgcatcactccccgctgcggcttgcccatcgtcgatctgccccggtacagctggaactacagcgccggtgccctgcgcgccaagcaccggatcaacatgtcctttcagaaccgcgtgttccctcgccacgatctcctcggtaccctcctccccggtaccattcgcgatcaggcgcagtggcgcaatatgctcgacattcacgacctgccgtggctcgagcagcacaggctcggtacccagcccgtcttgcccgctacgggctacatcggcatcgccgtcgaggccgcccgccagttcttccacggcaaggtcgagatgaagggtcccttcaagtacttcatccctcgcctctcgatcacggcggccctgaacttgcccccgagtggaacccccatcgaggtcatgacgagcgtgcgcttccagaccatctccaacgctgtctcgtcttccaactgcgtcgagttcaccatcgagtccgtcctcgacggccactggaccaagcactgtgtcggtctcatcggtcgacacgccatcgaagaatgtgaagcgcccctatttgacgagttcaaggtccaggaaccgcgtagctcgcacacctggtaccgtggatttgccaacatcggcctcaactacggtcctcccttcaacggtttgaacaacatccgcaccgacccctggaccaacgagtgtgtcgccgataccaagctcctgcccgccgacattcccgtcgatgactctaggtacatccgtccaccctggtgccatggacacttgtctccaagcgatcctgatcgccgcgcacaacggctcgctcaagagcgccaaccgatccttcatccctgtcgactgggaggaagtctccatctacgcctacgagggcactgacatgcccacccctgtcgacgtagacggacagatcctcgcaaccggtcactttagcagtctgcgtgctttgtggggctctttccagctcaacgcgccggatggaagacctctgttcgtcgccaagaaggtcaactctatcacctacgccgaggacctgaacaagaacaacacgtccgaccgacacccctacctccgcgtcacgtggaagcctgatgtcggcatgatcgagtcaggtgctgctctgccagctgctgccaccgagatgggacacgacctttcggctcgtgagaaggccctagtggcaagatgggctactgacctggtcaaggcagccaaggcatccaagaatcagagcgagtctgtcctcgagtttatcaagaccctcacctccatgaacatcccgaccgatgacaaggacgcagccctcgtctcggctgatctcggcgacgccaatctcgacgagagcttttatcgcttcgaagccatctacacgagcctcatgatggctctcgc

SEQ ID NO: 2521 - DNA, 942 bp, Muscodor strobelii
  misc_feature: SGI cDNA ID NO. 560474
  misc_feature: Encodes the peptide sequence at SEQ ID NO 2522
atgccacatatcctatgttcggcttatttactcggcgcaactcattcgcaattgacgaagatttatgacgtggaatcggaagggcttgagccatggcagtcgtctccgtctgagatctccgatgtgaggtggcgcgagttcttgggacagaaaaattatcagcgtgcctacgttgacttttttgaggactcgttagcgactgatcatgattatgactggaagaaagtcgttgaggagtacatgttccgcggggaggagccacttgcgaactgtctcattggtggcctcggccatcctctcattcatctaggttatgcctatgagatgaacaacaaggagatcgcgatggaagcgctgggtctcacggctgtgcagtataacttcttacataagtatacggatgacccgtcatacaccaaaccatccgcaaattcagtatcagatccgtcgcaactactcacgaaaatggcgtccgatgagcggctcacaagcttattcaagagacctggattcgataacttccaagcgcttttcgataagcatgaggatcttgtgatagagtattggaacgcatggactctagaagaccccaagaagcagtttcagcagtctcaagaggctgcagtgtcgctactagtcgccactatccgtccaggcactcgtgcttacaacttcttcgtcgttcatcttcttaccatgagccatgctgtcagaatcctattgccggtcatacctaccgagtttcatataccattagttcgccagtggtggctactaacggtcgctgtgtatatgattcatctatgtcctcagattgatcaggacgttattccgaaagccggcacgaaacaatggagttatgtggaggataaggcgctaaatggacctcatgcaacggacgcacatttcgtgaaagctgtgcgcgatgaaggaagctgctag

SEQ ID NO: 2522 - protein, 313 aa, Muscodor strobelii
  misc_feature: SGI Peptide ID NO. 560474
  misc_feature (1)..(308): NCBI GI: 39945450 Blast Desc: MGG_04707 [Magnaporthe grisea 70-15] gi|108673279|gb|ABF93455.1| MGS207 protein [Magnaporthe grisea] gi|145021386|gb|EDK05515.1| MGG_04707 [Magnaporthe grisea 70-15]
  misc_feature (1)..(308): NCBI GI: 116192427 Blast Desc: CHGG_05931 [Chaetomium globosum CBS 148.51] gi|88181844|gb|EAQ89312.1| CHGG_05931 [Chaetomium globosum CBS 148.51]
  misc_feature (3)..(308): NCBI GI: 261357378 Blast Desc: MGS207 protein [Verticillium albo-atrum VaMs.102]
  misc_feature (1)..(308): NCBI GI: 156052589 Blast Desc: SS1G_06461 [Sclerotinia sclerotiorum 1980] gi|154704240|gb|EDO03979.1| SS1G_06461 [Sclerotinia sclerotiorum 1980]
  misc_feature (1)..(308): NCBI GI: 171684763 Blast Desc: protein product [Podospora anserina] gi|170942342|emb|CAP67994.1| protein product [Podospora anserina]
  misc_feature (1)..(308): NCBI GI: 154313211 Blast Desc: BC1G_05607 [Botryotinia fuckeliana B05.10] gi|150849692|gb|EDN24885.1| BC1G_05607 [Botryotinia fuckeliana B05.10]
  misc_feature (1)..(308): NCBI GI: 164428397 Blast Desc: NCU00518 [Neurospora crassa OR74A] gi|157072131|gb|EAA35086.2| conserved [Neurospora crassa OR74A]
  misc_feature (2)..(308): NCBI GI: 256734475 Blast Desc: NECHADRAFT_65600 [Nectria haematococca mpVI 77-13-4]
  misc_feature (3)..(308): NCBI GI: 46108178 Blast Desc: FG00971.1 [Gibberella zeae PH-1]
  misc_feature (2)..(308): NCBI GI: 121705102 Blast Desc: conserved [Aspergillus clavatus NRRL 1] gi|119398960|gb|EAW09388.1| conserved [Aspergillus clavatus NRRL 1]
MPHILCSAYLLGATHSQLTKIYDVESEGLEPWQSSPSEISDVRWREFLGQKNYQRAYVDFFEDSLATDHDYDWKKVVEEYMFRGEEPLANCLIGGLGHPLIHLGYAYEMNNKEIAMEALGLTAVQYNFLHKYTDDPSYTKPSANSVSDPSQLLTKMASDERLTSLFKRPGFDNFQALFDKHEDLVIEYWNAWTLEDPKKQFQQSQEAAVSLLVATIRPGTRAYNFFVVHLLTMSHAVRILLPVIPTEFHIPLVRQWWLLTVAVYMIHLCPQIDQDVIPKAGTKQWSYVEDKALNGPHATDAHFVKAVRDEGSC

SEQ ID NO: 2523 - DNA, 1560 bp, Muscodor strobelii
  misc_feature: SGI cDNA ID NO. 560475
  misc_feature: Encodes the peptide sequence at SEQ ID NO 2524
atggttgctcgtatcctcatcgaggactgggtcctgtctgtgtcgcccgaccctttacaacaagacgttgccaaaagcttcgacaacaccgacaccgacaccgacaacgctgcttcccggctagacattgacactcgaagccgaaagcgtcgacgaactgatcgcggggaagcgacgagggactcattcattgaaccctacaacggcccccccatcatgcccaagacacccccttcaaccatcggtacatcgatgccactccaatcgcgcaagcggcctctcgacaacatggataccgccagtgccgacacgaatgcggaggaggacgcagaaatggacgcaagtgccgacgccgacgtaatcaacactacccccaagccaccgtcacgcagcaagcaagcgcgatatgacaacaagataagatctcaaccgatcaagaccattttgggcctgaaatcccttgagcgccccgtgaactacgtctcgctcgaggaccaccccactcctcacattcccctcgacatcgaacaactacacagcaaagtgatagaaggggcagctcacgtaggcatcttgccgaacgcattgcgtgaagagatttgcaaggaattgccgaatcgtgtatttgagcacaacttcaacccagcttccacgtgcacaagtaaagaatcagcatccatgtactatgcccgcgtctctgagattcatcgagccgccgtgtcttcggagaggctgcggcgtaatgagcccggttggaacaaccacgtgcatacggaccttctcaagcttgtttttgggtgccagctcccaacgcaaagcgagttgcagcaacaacgtgtaacaacacgcgccgaggctgtgatgtcagcaactatcgctggcaattccctgccacttattcaggacgatcaccaacgtgctttggcatgctctatctcgctgaacagttcaaacagggatagcatcgccgagagcatggatgacgtagaccccattgagcaggtccacagccgtagtggcagtaagaaggtagactacgtcgtagttgtggatatcgccgaagatgagcccctatactcagtggctcgcagagccagctttacagcagcaggcaagcttcatgtcaatcaaactgagtatccaccgatcgagatgagtcctattgccctatctattgaaacgaaagccatctcgactgctgaggcttgtgtgcagctcggcatttggactgcagcttggtaccagcgtatgtattcactacgaaaagaaattgattcagaacgaatcgctctgtggtcagcgtgtggcaaaggttcggtttcgcttgtctcggtccctcttatcatagtggagcgccacaagtggttgttatattttgcttgcgataccgacttgggcacctccatcgccatcctaggtcccatagttctcggtgacacgagcagtctgatcggcacatttgcgatcgctacatgcttatcatatatcaaagattggatcgaaaatactttctacgaaagattgaagtcgtggttcagggtttcaggggcacctttgtga

SEQ ID NO: 2524 - protein, 519 aa, Muscodor strobelii
  misc_feature: SGI Peptide ID NO. 560475
  misc_feature (144)..(504): NCBI GI: 116194203 Blast Desc: CHGG_06819 [Chaetomium globosum CBS 148.51] gi|88182732|gb|EAQ90200.1| CHGG_06819 [Chaetomium globosum CBS 148.51]
  misc_feature (129)..(511): NCBI GI: 116194328 Blast Desc: CHGG_03762 [Chaetomium globosum CBS 148.51] gi|88179675|gb|EAQ87143.1| CHGG_03762 [Chaetomium globosum CBS 148.51]
  misc_feature (142)..(516): NCBI GI: 256721214 Blast Desc: NECHADRAFT_82331 [Nectria haematococca mpVI 77-13-4]
  misc_feature (229)..(491): NCBI GI: 116197324 Blast Desc: CHGG_05260 [Chaetomium globosum CBS 148.51] gi|88181173|gb|EAQ88641.1| CHGG_05260 [Chaetomium globosum CBS 148.51]
  misc_feature (73)..(512): NCBI GI: 149209015 Blast Desc: MGCH7_ch7g3 [Magnaporthe grisea 70-15] gi|86195958|gb|EAQ70596.1| MGCH7_ch7g3 [Magnaporthe grisea 70-15]
  misc_feature (144)..(504): NCBI GI: 256719922 Blast Desc: NECHADRAFT_4538 [Nectria haematococca mpVI 77-13-4]
  misc_feature (375)..(512): NCBI GI: 256722137 Blast Desc: NECHADRAFT_55546 [Nectria haematococca mpVI 77-13-4]
  misc_feature (377)..(508): NCBI GI: 39963832 Blast Desc: [Magnaporthe grisea 70-15] gi|145015428|gb|EDJ99964.1| [Magnaporthe grisea 70-15]
  misc_feature (202)..(462): NCBI GI: 145607495 Blast Desc: [Magnaporthe grisea 70-15] gi|145015029|gb|EDJ99597.1| [Magnaporthe grisea 70-15]
  misc_feature (380)..(504): NCBI GI: 256722133 Blast Desc: NECHADRAFT_9732 [Nectria haematococca mpVI 77-13-4]
MVARILIEDWVLSVSPDPLQQDVAKSFDNTDTDTDNAASRLDIDTRSRKRRRTDRGEATRDSFIEPYNGPPIMPKTPPSTIGTSMPLQSRKRPLDNMDTASADTNAEEDAEMDASADADVINTTPKPPSRSKQARYDNKIRSQPIKTILGLKSLERPVNYVSLEDHPTPHIPLDIEQLHSKVIEGAAHVGILPNALREEICKELPNRVFEHNFNPASTCTSKESASMYYARVSEIHRAAVSSERLRRNEPGWNNHVHTDLLKLVFGCQLPTQSELQQQRVTTRAEAVMSATIAGNSLPLIQDDHQRALACSISLNSSNRDSIAESMDDVDPIEQVHSRSGSKKVDYVVVVDIAEDEPLYSVARRASFTAAGKLHVNQTEYPPIEMSPIALSIETKAISTAEACVQLGIWTAAWYQRMYSLRKEIDSERIALWSACGKGSVSLVSVPLIIVERHKWLLYFACDTDLGTSIAILGPIVLGDTSSLIGTFAIATCLSYIKDWIENTFYERLKSWFRVSGAPL

SEQ ID NO: 2525 - DNA, 2406 bp, Muscodor strobelii
  misc_feature: SGI EST ID NO. CUFF.6469.1
  misc_feature: Variant of the nucleotide sequence at SEQ ID NO 2523
ccgtctctcgctatcccttctgcaaacgtccgtcaactccagctctcagcgctcattcttccattctcaccacgcctcatggttgctcgtatcctcatcgaggactgggtcctgtctgtgtcgcccgaccctttacaacaagacgttgccaaaagcttcgacaacaccgacaccgacaccgacaacgctgcttcccggctagacattgacactcgaagccgaaagcgtcgacgaactgatcgcggggaagcgacgagggactcattcattgaaccctacaacggcccccccatcatgcccaagacacccccttcaaccatcggtacatcgatgccactccaatcgcgcaagcggcctctcgacaacatggataccgccagtgccgacacgaatgcggaggaggacgcagaaatggacgcaagtgccgacgccgacgtaatcaacactacccccaagccaccgtcacgcagcaagcaagcgcgatatgacaacaagataagatctcaaccgatcaagaccattttgggcctgaaatcccttgagcgccccgtgaactacgtctcgctcgaggaccaccccactcctcacattcccctcgacatcgaacaactacacagcaaagtgatagaaggggcagctcacgtaggcatcttgccgaacgcattgcgtgaagagatttgcaaggaattgccgaatcgtgtatttgagcacaacttcaacccagcttccacgtgcacaagtaaagaatcagcatccatgtactatgcccgcgtctctgagattcatcgagccgccgtgtcttcggagaggctgcggcgtaatgagcccggttggaacaaccacgtgcatacggaccttctcaagcttgtttttgggtgccagctcccaacgcaaagcgagttgcagcaacaacgtgtaacaacacgcgccgaggctgtgatgtcagcaactatcgctggcaattccctgccacttattcaggacgatcaccaacgtgctttggcatgctctatctcgctgaacagttcaaacagggatagcatcgccgagagcatggatgacgtagaccccattgagcaggtccacagccgtagtggcagtaagaaggtagactacgtcgtagttgtggatatcgccgaagatgagcccctatactcagtggctcgcagagccagctttacagcagcaggcaagcttcatgtcaatcaaactgagtatccaccgatcgagatgagtcctattgccctatctattgaaacgaaagccatctcgactgctgaggcttgtgtgcagctcggcatttggactgcagcttggtaccagcgtatgtattcactacgaaaagaaattgattcagaacgaatcgctctgtggtcagcgtgtggcaaaggttcggtttcgcttgtctcggtccctcttatcatagtggagcgccacaagtggttgttatattttgcttgcgataccgacttgggcacctccatcgccatcctaggtcccatagttctcggtgacacgagcagtctgatcggcacatttgcgatcgctacatgcttatcatatatcaaagattggatcgaaaatactttctacgaaagattgaagtcgtggttcagggtttcaggggcacctttgtgagatgctcggacaccatttggggctttcactatctcgtgcgcattcatacccctagggaggttctagtaatgtagcaattgtactgtaatatggtatcgactatccccattttttgaagcttgccaccctctgatgtctcctaacaatctcctaatgctacacacggcgtatcgactcgccgtcacatgagatccgatggctgattatatccgatgatctttatcaacaacgagcagactccttcccggttcagtcatgatagacagtcgccattctttgtcaaaagcatgcggttgcggccagcccagaggcgagatcttgtagcagctcaatttcatctcaagagtctcgctgttaggttcgtcgctgaaaacgttgcaactttctagatgccagcgaaacgctggttacgcacgaaggaagcgcgaaatgacacctgatgagtcacatcttacggacgtgctcgtgataccattggctccggattcctatcccatgacgcgctacagggatgagtcacttcttcatcattaactacagggtacgggcgtctacgagtatcgggcccacgtacgtattcttacttcatgcgtaaaaggaaaaggaagaaaatagaatcaggccgcttcatacaggaccagcgaagtgggtagtaataaattactttgcgtgtcacgactctagacgaccccctcttcgattcgttgctgggatggtggtgtgagtcacacatgaatcacgtacgtatagttcgaaaactgaatggac

SEQ ID NO: 2526 - DNA, 3192 bp, Muscodor strobelii
  misc_feature: SGI cDNA ID NO. 560476
  misc_feature: Elevated expression when VOC is produced
  misc_feature: Encodes the peptide sequence at SEQ ID NO 2527
atgaacacatcaacaagccacaagaggcgattgtatggcggaagtgatgaaagctcgacgccagctgcttcaccgaagcgacagaaatggggacctatcaacgatcactcgagaatcacggacaagagcgagcgacttgctctcacagcatccgattatgatgttggttggctttgcgcccttcccctcgagctagcggcgagccgcgcgatgctagatgtaatacacgacagcttgcctcaagggcaagaggataccaatacatatactcttggcagcataggaagaaagaacatagtcattacgtgcttgccagccgaaggaatgggacttaataatgctgcaattgtagcgagccatatgcgttgcacctttcctgcactccattttttcttgatggttggaattggcggcggcgcaccatccatggaaaacgatattcgtcttggagacgttgtcgtttctaccaacgttgtccagtgggattttggcaaaattgtccatgatggtcgaacacaatcgacatcgttcccgcgtcagccttcacaagcactcatgagtgtcgtctcgactttgcgagcacgtcatgagaccgaatcttcacagatccaaacatttctgaccgagatgatagaacgatttcctgccatggcaaagtatgcagataagtcagaattgaaagacatgctattcgactgcgcctacgaacacgatgctactttacgacactgtgacgattgtgaccagtccaggttgatagagcgtacgatcagagacagtgccgagccgacaattcattatggtgtcatcgcatctggcaatcgcgtaatcaagcatggaacctcgagagatcaactagcacgagagttcaatgcgatctgcttcgagatggaagcggctgctctgatggacaccctccaatgcctggtgatacgtggaatttgtgattattccgacagccataaaaacaaaaagtggcaaccatatgcagccgcagttgcagcagcctacgcaagagagttgattatggtagtgccagctaatatttcgaagtcgacggattttgtagcacaagatggagtgcttcaatatctggaccgaaagtcgttgacagattctttgtcgtttgaaagcatcgaagcgcgccagacaagcataagacctgcccttaagaaaacgtgtagatggcttttgagtcaccccgaatttttgcgttggttggacccagcgtgctacattgagcaccatggctttctgtggatatatggaaagcctggtgcaggaaaatccacaatcatgaagttcattcatgcaacatacactggaatcaagacgattactaccgtatcgttcttcttccacgcccggggcagcgaactggagaagtctactgaaggaatgtatcgatctttgctttgtcagttgcttcagaaaatagaagatctcgacaaaatatttgacaatcccgtactattgcgacaaattcgagccgagtgcgacataatctgggacatggaaactctcaaagattttttttctcgcgcgatagataggctcggtgaccaacaagtaatgtgctttgtcgatgcattggatgagtgcagcgagtcccaggttcgggacatgatcagctttttcgaagatctcggagattctgcgattgaatcaggcacgaaattttacatttgcttctccagccggcactacccgaccatcagcattgaaaccagcagaacgctagtactagaggatcaatcgggtcacaaagaagatcttgagcaatacgtgaaaatgaagcttaaggctggaacgaagtcttatgaggtggagaagttgattcttgaaaaatcagcaggcgttttcttatgggttgtcttggttattgaaattctcaacaaggaattcgaacgtggcagactctttgcagtgaaaagacggctcaacgagattcctgccgaattaagcaaacttttcaaggacatcttactacgagatacggaaaatacgtctgatcttctgttgtgtattcagtggatattgtttgcaaacagaccgttgaggccggaagaattctacttcgctgtggtgtccggtctcgaccctgaccctgatactttgaaagaatggaactctgaggatatggaatatgttgtccgatttatctcaagctcttctaaaggtcttgctgaaagtacaaagacgaaacctcggacagtccaatttatacatgagtccgtgcgcgatttcttcataaacgatgacggcttaaatcaactatggtcctgcctggggaacgattttcataatctcagccacgaccgactgaaaaagtgttgctataactatcttcaggctaccttgccatacagtctggtaatcagtaggcggcactctagtgcagacgcagactacatcgcagccccaacaatacgggaggaagtggtgaaaaaatcgccgttcttggaatatgcggttcaaaatgttctctactatgctgacacagcttcaatgactcaatgtcaagaagaattcattgcatcttttgattacaagtcgtggatagaagccgataatatctttgcgaagtataacacacaccgatacaaaggaaatgttactttcgtgtatatactagcagaaaagggttacgctaatcttatcaaactattaccgcccggattatatgggactcctgtgattggagagagatacccgtatcctctacaagctgcgatggcaaatgatcaaaaggatgctgttctagcaatcttacaacgtagccatcttgcattacctggcataaatgtgccattcactcatggcacgcatacggtgatgtcgccaattacctgggcggtagagcacggatctggaaatattgtcaggcttttgatcaatcgtggaggattacttcatgaggatgctgcgggaggacgcgtcctgttatctcgggccattgtgcgtggctcaacaggcatcattcaggctcttctcgatggaggagtagacgtcaactactcaggatctatgcaaccaccactacttcaagctataagtggaggatcacgtgcagtagtgaatcttctgctcgatagaggagcagatgcgaattgtcaaaacccggagccattacgtgaagctgtctgtttgcaatcattcaatagtaatacttttgcccgacagagaagctag

SEQ ID NO: 2527 - protein, 1063 aa, Muscodor strobelii
  misc_feature: SGI Peptide ID NO. 560476
  misc_feature (25)..(1038): NCBI GI: 119473587 Blast Desc: Pfs, NACHT and Ankyrin domain protein [Neosartorya fischeri NRRL 181] gi|119406822|gb|EAW16772.1| Pfs, NACHT and Ankyrin domain protein [Neosartorya fischeri NRRL 181]
  misc_feature (17)..(1060): NCBI GI: 171689444 Blast Desc: protein product [Podospora anserina] gi|170944684|emb|CAP70795.1| protein product [Podospora anserina]
  misc_feature (53)..(968): NCBI GI: 115390334 Blast Desc: conserved [Aspergillus terreus NIH2624] gi|114195068|gb|EAU36768.1| conserved [Aspergillus terreus NIH2624]
  misc_feature (8)..(890): NCBI GI: 145254107 Blast Desc: An18g00540 [Aspergillus niger] gi|134084101|emb|CAK43130.1| protein product [Aspergillus niger]
  misc_feature (53)..(1037): NCBI GI: 115433911 Blast Desc: conserved [Aspergillus terreus NIH2624] gi|114189944|gb|EAU31644.1| conserved [Aspergillus terreus NIH2624]
  misc_feature (48)..(1037): NCBI GI: 212545444 Blast Desc: Pfs, NACHT and Ankyrin domain protein [Penicillium marneffei ATCC 18224] gi|210065845|gb|EEA19939.1| Pfs, NACHT and Ankyrin domain protein [Penicillium marneffei ATCC 18224]
  misc_feature (119)..(1047): NCBI GI: 70990006 Blast Desc: Pfs, NACHT and Ankyrin domain protein [Aspergillus fumigatus Af293] gi|66847484|gb|EAL87814.1| Pfs, NACHT and Ankyrin domain protein [Aspergillus fumigatus Af293]
  misc_feature (52)..(1039): NCBI GI: 169774533 Blast Desc: [Aspergillus oryzae RIB40] gi|83769597|dbj|BAE59732.1| protein product [Aspergillus oryzae]
  misc_feature (52)..(1039): NCBI GI: 238496907 Blast Desc: Pfs, NACHT and Ankyrin domain protein [Aspergillus flavus NRRL3357] gi|220694569|gb|EED50913.1| Pfs, NACHT and Ankyrin domain protein [Aspergillus flavus NRRL3357]
  misc_feature (65)..(1040): NCBI GI: 46116276 Blast Desc: FG03980.1 [Gibberella zeae PH-1]
  misc_feature: Useful for introducing or modulating the production of volatile compounds
MNTSTSHKRRLYGGSDESSTPAASPKRQKWGPINDHSRITDKSERLALTASDYDVGWLCALPLELAASRAMLDVIHDSLPQGQEDTNTYTLGSIGRKNIVITCLPAEGMGLNNAAIVASHMRCTFPALHFFLMVGIGGGAPSMENDIRLGDVVVSTNVVQWDFGKIVHDGRTQSTSFPRQPSQALMSVVSTLRARHETESSQIQTFLTEMIERFPAMAKYADKSELKDMLFDCAYEHDATLRHCDDCDQSRLIERTIRDSAEPTIHYGVIASGNRVIKHGTSRDQLAREFNAICFEMEAAALMDTLQCLVIRGICDYSDSHKNKKWQPYAAAVAAAYARELIMVVPANISKSTDFVAQDGVLQYLDRKSLTDSLSFESIEARQTSIRPALKKTCRWLLSHPEFLRWLDPACYIEHHGFLWIYGKPGAGKSTIMKFIHATYTGIKTITTVSFFFHARGSELEKSTEGMYRSLLCQLLQKIEDLDKIFDNPVLLRQIRAECDIIWDMETLKDFFSRAIDRLGDQQVMCFVDALDECSESQVRDMISFFEDLGDSAIESGTKFYICFSSRHYPTISIETSRTLVLEDQSGHKEDLEQYVKMKLKAGTKSYEVEKLILEKSAGVFLWVVLVIEILNKEFERGRLFAVKRRLNEIPAELSKLFKDILLRDTENTSDLLLCIQWILFANRPLRPEEFYFAVVSGLDPDPDTLKEWNSEDMEYVVRFISSSSKGLAESTKTKPRTVQFIHESVRDFFINDDGLNQLWSCLGNDFHNLSHDRLKKCCYNYLQATLPYSLVISRRHSSADADYIAAPTIREEVVKKSPFLEYAVQNVLYYADTASMTQCQEEFIASFDYKSWIEADNIFAKYNTHRYKGNVTFVYILAEKGYANLIKLLPPGLYGTPVIGERYPYPLQAAMANDQKDAVLAILQRSHLALPGINVPFTHGTHTVMSPITWAVEHGSGNIVRLLINRGGLLHEDAAGGRVLLSRAIVRGSTGIIQALLDGGVDVNYSGSMQPPLLQAISGGSRAVVNLLLDRGADANCQNPEPLREAVCLQSFNSNTFARQRS

SEQ ID NO: 2528 - DNA, 2936 bp, Muscodor strobelii
  misc_feature: SGI EST ID NO. CUFF.6286.0
  misc_feature: Variant of the nucleotide sequence at SEQ ID NO 2526
accagaccgccaagattccctcaatcatccgggttcctgctgctcacgaaaagctttacttcaattccacgagatgagagatgaacacatcaacaagccacaagaggcgattgtatggcggaagtgatgaaagctcgacgccagctgcttcaccgaagcgacagaaatggggacctatcaacgatcactcgagaatcacggacaagagcgagcgacttgctctcacagcatccgattatgatgttggttggctttgcgcccttcccctcgagctagcggcgagccgcgcgatgctagatgtaatacacgacagcttgcctcaagggcaagaggataccaatacatatactcttggcagcataggaagaaagaacatagtcattacgtgcttgccagccgaaggaatgggacttaataatgctgcaattgtagcgagccatatgcgttgcacctttcctgcactccattttttcttgatggttggaattggcggcggcgcaccatccatggaaaacgatattcgtcttggagacgttgtcgtttctaccaacgttgtccagtgggattttggcaaaattgtccatgatggtcgaacacaatcgacatcgttcccgcgtcagccttcacaagcactcatgagtgtcgtctcgactttgcgagcacgtcatgagaccgaatcttcacagatccaaacatttctgaccgagatgatagaacgatttcctgccatggcaaagtatgcagataagtcagaattgaaagacatgctattcgactgcgcctacgaacacgatgctactttacgacactgtgacgattgtgaccagtccaggttgatagagcgtacgatcagagacagtgccgagccgacaattcattatggtgtcatcgcatctggcaatcgcgtaatcaagcatggaacctcgagagatcaactagcacgagagttcaatgcgatctgcttcgagatggaagcggctgctctgatggacaccctccaatgcctggtgatacgtggaatttgtgattattccgacagccataaaaacaaaaagtggcaaccatatgcagccgcagttgcagcagcctacgcaagagagttgattatggtagtgccagctaatatttcgaagtcgacggattttgtagcacaagatggagtgcttcaatatctggaccgaaagtcgttgacagattctttgtcgtttgaaagcatcgaagcgcgccagacaagcataagacctgcccttaagaaaacgtgtagatggcttttgagtcaccccgaatttttgcgttggttggacccagcgtgctacattgagcaccatggctttctgtggatatatggaaagcctggtgcaggaaaatccacaatcatgaagttcattcatgcaacatacactggaatcaagacgattactaccgtatcgttcttcttccacgcccggggcagcgaactggagaagtctactgaaggaatgtatcgatctttgctttgtcagttgcttcagaaaatagaagatctcgacaaaatatttgacaatcccgtactattgcgacaaattcgagccgagtgcgacataatctgggacatggaaactctcaaagattttttttctcgcgcgatagataggctcggtgaccaacaagtaatgtgctttgtcgatgcattggatgagtgcagcgagtcccaggttcgggacatgatcagctttttcgaagatctcggagattctgcgattgaatcaggcacgaaattttacatttgcttctccagccggcactacccgaccatcagcattgaaaccagcagaacgctagtactagaggatcaatcgggtcacaaagaagatcttgagcaatacgtgaaaatgaagcttaaggctggaacgaagtcttatgaggtggagaagttgattcttgaaaaatcagcaggcgttttcttatgggttgtcttggttattgaaattctcaacaaggaattcgaacgtggcagactctttgcagtgaaaagacggctcaacgagattcctgccgaattaagcaaacttttcaaggacatcttactacgagatacggaaaatacgtctgatcttctgttgtgtattcagtggatattgtttgcaaacagaccgttgaggccggaagaattctacttcgctgtggtgtccggtctcgaccctgaccctgatactttgaaagaatggaactctgaggatatggaatatgttgtccgatttatctcaagctcttctaaaggtcttgctgaaagtacaaagacgaaacctcggacagtccaatttatacatgagtccgtgcgcgatttcttcataaacgatgacggcttaaatcaactatggtcctgcctggggaacgattttcataatctcagccacgaccgactgaaaaagtgttgctataactatcttcaggctaccttgccatacagtctggtaatcagtaggcggcactctagtgcagacgcagactacatcgcagccccaacaatacgggaggaagtggtgaaaaaatcgccgttcttggaatatgcggttcaaaatgttctctactatgctgacacagcttcaatgactcaatgtcaagaagaattcattgcatcttttgattacaagtcgtggatagaagccgataatatctttgcgaagtataacacacaccgatacaaaggaaatgttactttcgtgtatatactagcagaaaagggttacgctaatcttatcaaactattaccgcccggattatatgggactcctgtgattggagagagatacccgtatcctctacaagctgcgatggcaaatgatcaaaaggatgctgttctagcaatcttacaacgtagccatcttgcattacctggcataaatgtgccattcactcatggcacgcatacggtgatgtcgccaattacctgggcg

SEQ ID NO: 2529 - DNA, 543 bp, Muscodor strobelii
  misc_feature: SGI cDNA ID NO. 560477
  misc_feature: Encodes the peptide sequence at SEQ ID NO 2530
atgtccctgagatcgaacattcccgcgaagatccgagaaccactcatttcttccatgatgactatcccagaaactctagcaacgacaaatccagtagccgaggagcaagaaacgctttcccaggtcctcttctatgttaggggcatatacaacattctcaaggaccaccaccggctcaagaagagcaaattcgaaaccatgtattggcgagagcattataagcttaaagacgcacttacatctaatcaaaagctcgccctagaactagagcattatcagggccggatcaagggcgagacaaaggggactcatatcatcgcggcagccgaggttccttcgaatgttgctggccctacacctgttcccaaagaccatcatacggatacttgcatagaaaacacatcttatatgcaaggcgtcgaggataacgtggatcaacttcagctgcccccaaaaggcgtatcgccaccacgccagcgtagctcgctgagtaaaccgaatggtgtgtcaaagaaaaacaaaggaacaaacgagaaaagatga

SEQ ID NO: 2530 - protein, 180 aa, Muscodor strobelii
  misc_feature: SGI Peptide ID NO. 560477
MSLRSNIPAKIREPLISSMMTIPETLATTNPVAEEQETLSQVLFYVRGIYNILKDHHRLKKSKFETMYWREHYKLKDALTSNQKLALELEHYQGRIKGETKGTHIIAAAEVPSNVAGPTPVPKDHHTDTCIENTSYMQGVEDNVDQLQLPPKGVSPPRQRSSLSKPNGVSKKNKGTNEKR

SEQ ID NO: 2531 - DNA, 182 bp, Muscodor strobelii
  misc_feature: SGI EST ID NO. CUFF.6307.0
  misc_feature: Variant of the nucleotide sequence at SEQ ID NO 2529
gaggttccttcgaatgttgctggccctacacctgttcccaaagaccatcatacggatacttgcatagaaaacacatcttatatgcaaggcgtcgaggataacgtggatcaacttcagctgcccccaaaaggcgtatcgccaccacgccagcgtagctcgctgagtaaaccgaatggtgtgtc

SEQ ID NO: 2532 - DNA, 771 bp, Muscodor strobelii
  misc_feature: SGI cDNA ID NO. 560478
  misc_feature: Elevated expression when VOC is produced
  misc_feature: Encodes the peptide sequence at SEQ ID NO 2533
atgtgctttgtggtctcgcgtctgattagtggtgactcgacagttgcaattaagctggatgatgataccgactccccaacgacaacactaactgccgacgaaggcatgcttgtgtctggaaacttctatggagattactattatcgtcgactagatgccgccgacgaagaggtgactacgggcaagttaaccgatcacccacttgtcggtgatacgcaagacgtgctaataagtgatgccgagaacggagagatacttcaaagactatctggccatagggatttcggattcgcctgcgactggtcgtctgacggttggaccatggcaacagctagccaagacaagagcatcaagatctgggatgcccggaagtggacgaacagcaaaggcgaaagcacctgcgttactatgcttcgaacggagatgactggggctcgtagtcttcgattctcgcctctaggcggcggaaggcgccttctcgtcgcggccgaagaagccgactttgttaatatcattgacgcagaaacattcgattcgaaacaggctatatctgtatttagcgagctagcaggagtatcattcgctagccgtggtgatgtgcttattgctctgttgagtgatccggatcgtggtggtgtcatgactcttgaccgttgtgactggggtacgagatttacgccgagacccggtataaaatctgacactttttcattgtttagtcctgaagagcgtcgtctcggtgctacgatgtatgaggattggtttttttga

SEQ ID NO: 2533 - protein, 256 aa, Muscodor strobelii
  misc_feature: SGI Peptide ID NO. 560478
  misc_feature (83)..(121): Pfam Id: PF00400 Pfam Desc: WD domain, G-beta repeat
  misc_feature (9)..(222): NCBI GI: 171687927 Blast Desc: protein product [Podospora anserina] gi|170943925|emb|CAP69577.1| protein product [Podospora anserina]
  misc_feature (68)..(222): NCBI GI: 116180320 Blast Desc: CHGG_00788 [Chaetomium globosum CBS 148.51] gi|88185085|gb|EAQ92553.1| CHGG_00788 [Chaetomium globosum CBS 148.51]
  misc_feature (68)..(222): NCBI GI: 256734352 Blast Desc: NECHADRAFT_103068 [Nectria haematococca mpVI 77-13-4]
  misc_feature (68)..(222): NCBI GI: 46108734 Blast Desc: FG01249.1 [Gibberella zeae PH-1]
  misc_feature (68)..(224): NCBI GI: 261357446 Blast Desc: WD repeat-containing protein [Verticillium albo-atrum VaMs.102]
  misc_feature (9)..(219): NCBI GI: 85111631 Blast Desc: NCU09325 [Neurospora crassa OR74A] gi|28925788|gb|EAA34793.1| NCU09325 [Neurospora crassa OR74A]
  misc_feature (68)..(223): NCBI GI: 154301195 Blast Desc: BC1G_10570 [Botryotinia fuckeliana B05.10] gi|150856318|gb|EDN31510.1| BC1G_10570 [Botryotinia fuckeliana B05.10]
  misc_feature (37)..(223): NCBI GI: 156057049 Blast Desc: SS1G_04255 [Sclerotinia sclerotiorum 1980] gi|154702041|gb|EDO01780.1| SS1G_04255 [Sclerotinia sclerotiorum 1980]
  misc_feature (9)..(219): NCBI GI: 39965597 Blast Desc: MGG_09961 [Magnaporthe grisea 70-15] gi|145013130|gb|EDJ97771.1| MGG_09961 [Magnaporthe grisea 70-15]
  misc_feature (44)..(224): NCBI GI: 169602505 Blast Desc: SNOG_04254 [Phaeosphaeria nodorum SN15] gi|160706185|gb|EAT88014.2| SNOG_04254 [Phaeosphaeria nodorum SN15]
  misc_feature: Useful for introducing or modulating the production of volatile compounds
MCFVVSRLISGDSTVAIKLDDDTDSPTTTLTADEGMLVSGNFYGDYYYRRLDAADEEVTTGKLTDHPLVGDTQDVLISDAENGEILQRLSGHRDFGFACDWSSDGWTMATASQDKSIKIWDARKWTNSKGESTCVTMLRTEMTGARSLRFSPLGGGRRLLVAAEEADFVNIIDAETFDSKQAISVFSELAGVSFASRGDVLIALLSDPDRGGVMTLDRCDWGTRFTPRPGIKSDTFSLFSPEERRLGATMYEDWFF

SEQ ID NO: 2534 - DNA, 552 bp, Muscodor strobelii
  misc_feature: SGI cDNA ID NO. 560479
  misc_feature: Encodes the peptide sequence at SEQ ID NO 2535
atgatgaggcttgatctcttagcattcgccacggcagcgacgttgctgccgcaggtctctgcgttgttggcatttcccggcgccgaaggctttggtcgcaacgctaagggcggtcgggctgggagtgtttatcatgtgacgaacttggcggactccggcaccggttccttccgtgatgcggtatcggcgtctgatcgtattgtcgtctttgatgtaggcggaactatcaacatcactgatcgagtcgttgtctcgccccgagtctacatcgctgggcagactgctccagggggcggtatcaccgtgtatggcaatgggatgtcatggtcaaacgcacatgactctattgtgcggtacttacgtgtaagaatgggcaaaggtggtgactctggtaaggacggcatcacgattgcggatggcgacaacatgatatttgatcacgtatctgcgacctggggccgtgatgaaaccttcagcattaacggagaagtgaacaacgtaacgattcaaaacacaatcatcggccagggtctcgaaacactgcgtgcatga

SEQ ID NO: 2535 - protein, 183 aa, Muscodor strobelii
  misc_feature: SGI Peptide ID NO. 560479
  misc_feature (2)..(180): NCBI GI: 159130233 Blast Desc: conserved [Aspergillus fumigatus A1163]
  misc_feature (2)..(180): NCBI GI: 70992931 Blast Desc: conserved [Aspergillus fumigatus Af293] gi|66848947|gb|EAL89276.1| conserved [Aspergillus fumigatus Af293]
  misc_feature (2)..(180): NCBI GI: 115398107 Blast Desc: conserved [Aspergillus terreus NIH2624] gi|114192836|gb|EAU34536.1| conserved [Aspergillus terreus NIH2624]
  misc_feature (2)..(180): NCBI GI: 238502337 Blast Desc: conserved [Aspergillus flavus NRRL3357] gi|220691212|gb|EED47560.1| conserved [Aspergillus flavus NRRL3357]
  misc_feature (2)..(180): NCBI GI: 255936275 Blast Desc: Pc13g07340 [Penicillium chrysogenum Wisconsin 54-1255] gi|211583784|emb|CAP91803.1| Pc13g07340 [Penicillium chrysogenum Wisconsin 54-1255]
  misc_feature (20)..(180): NCBI GI: 67538326 Blast Desc: AN5333.2 [Aspergillus nidulans FGSC A4] gi|40743303|gb|EAA62493.1| AN5333.2 [Aspergillus nidulans FGSC A4] gi|259485226|tpe|CBF82085.1| TPA: pectate lyase (Eurofung)
  misc_feature (2)..(180): NCBI GI: 119473327 Blast Desc: NFIA_060270 [Neosartorya fischeri NRRL 181] gi|119406720|gb|EAW16671.1| conserved [Neosartorya fischeri NRRL 181]
  misc_feature (2)..(180): NCBI GI: 169775697 Blast Desc: [Aspergillus oryzae RIB40] gi|83771050|dbj|BAE61182.1| protein product [Aspergillus oryzae]
  misc_feature (24)..(180): NCBI GI: 169618908 Blast Desc: SNOG_12646 [Phaeosphaeria nodorum SN15] gi|111058824|gb|EAT79944.1| SNOG_12646 [Phaeosphaeria nodorum SN15]
  misc_feature (7)..(180): NCBI GI: 189210425 Blast Desc: pectate lyase [Pyrenophora tritici-repentis Pt-1C-BFP] gi|187977637|gb|EDU44263.1| pectate lyase [Pyrenophora tritici-repentis Pt-1C-BFP]
MMRLDLLAFATAATLLPQVSALLAFPGAEGFGRNAKGGRAGSVYHVTNLADSGTGSFRDAVSASDRIVVFDVGGTINITDRVVVSPRVYIAGQTAPGGGITVYGNGMSWSNAHDSIVRYLRVRMGKGGDSGKDGITIADGDNMIFDHVSATWGRDETFSINGEVNNVTIQNTIIGQGLETLRA

SEQ ID NO: 2536 - DNA, 1012 bp, Muscodor strobelii
  misc_feature: SGI EST ID NO. CUFF.6342.0
  misc_feature: Variant of the nucleotide sequence at SEQ ID NO 2534
gagtgggacttaaggacgtactgatttgagagtcacccgattttttcctctttggtattattattttcataatggtattgccagcaaaaagtaccggggaaacgtcgaaacgcccagctcctgaccccaccagtttgtcggaatgcaattctccatttccccaaacagcgtatgtctccggatgtgcatcgttagttttcccatcaacccgttgtgtgcatggaattggcaaagtcgaggaaaccaagcaaagcactacgaaataaaatcaaaactccaacgtgcccgtggtctattcggcttgcaacatgaagtccgtcttacccattgctttccgaacagcacatctattagagatcattaccacggtttgaagcgtgttacaaatcgccctattatcaagtatgatgaggcttgatctcttagcattcgccacggcagcgacgttgctgccgcaggtctctgcgttgttggcatttcccggcgccgaaggctttggtcgcaacgctaagggcggtcgggctgggagtgtttatcatgtgacgaacttggcggactccggcaccggttccttccgtgatgcggtatcggcgtctgatcgtattgtcgtctttgatgtaggcggaactatcaacatcactgatcgagtcgttgtctcgccccgagtctacatcgctgggcagactgctccagggggcggtatcaccgtgtatggcaatgggatgtcatggtcaaacgcacatgactctattgtgcggtacttacgtgtaagaatgggcaaaggtggtgactctggtaaggacggcatcacgattgcggatggcgacaacatgatatttgatcacgtatctgcgacctggggccgtgatgaaaccttcagcattaacggagaagtgaacaacgtaacgattcaaaacacaatcatcggccagggtctcgaaacactgcgtgcatgaaataaacgcgttccggcatttttttcgttatcctatagaataaaagcgaagcaagg

SEQ ID NO: 2537 - DNA, 1041 bp, Muscodor strobelii
  misc_feature: SGI cDNA ID NO. 560480
  misc_feature: Encodes the peptide sequence at SEQ ID NO 2538
atgacatccctcgctccctctggccccgctggcggtttccgcctcgtcgagataggcgggcctggttacaatgagaaatactctaaggcatacctacgcactgtcgtcgctgatgccaaaaagaaccccatagatccttctacgctgaacatcccggcgtctggcagtgtcgaattccgagcggacgggcatatcgatgctatccactggatccacggtgttatgcaaccactgaagaagggtcagaaagtcgccaagctcatatcatacccagatgcctctactaatggaggtattgggctggcgacattccgtatcgatggtgaaggatatagcaatctgtggaatacgcctgatttcctatctcgatctttcgcggcgaagacgccggggaagtttgacgcccccgacattgaatcactcggggcgtacgtcgcgctacgggaggcctggaagcaagtccaaaacttcaagaaactcgcgactcagagttctaaacagtctccttggattgttgtagctgttgatagcttatctgctatccagtactatcaaagattgtaccatggacagacgcagactcctctcaagatgtgtggtggtcgcctctatctgcccagagctttgattcacggagatagatccgatagagctgcaaatcaagaagcccgcaagaagcataagcacgaagttagggcttcgagagagaataagacgaagtacagaagacaggaggaagttaccgagaccgaggaagagctttcagagtctgggtcggacgatgatatggatgaccagctcgcgataggacaagggaagaagcattggtccggggagaggaaaacagacgacaagcgcgttggcaatgatctggaccagcttcgggaaaaacgcaagagacttgagcaggagctggacagacttgatgagactatgaagagacgtgagcaagacttggaacgacttgatgagtctatagagagccgcgagcaggaggcaaaggacgccgacatcgctgaagaactctacaggaactattga

SEQ ID NO: 2538 - protein, 346 aa, Muscodor strobelii
  misc_feature: SGI Peptide ID NO. 560480
MTSLAPSGPAGGFRLVEIGGPGYNEKYSKAYLRTVVADAKKNPIDPSTLNIPASGSVEFRADGHIDAIHWIHGVMQPLKKGQKVAKLISYPDASTNGGIGLATFRIDGEGYSNLWNTPDFLSRSFAAKTPGKFDAPDIESLGAYVALREAWKQVQNFKKLATQSSKQSPWIVVAVDSLSAIQYYQRLYHGQTQTPLKMCGGRLYLPRALIHGDRSDRAANQEARKKHKHEVRASRENKTKYRRQEEVTETEEELSESGSDDDMDDQLAIGQGKKHWSGERKTDDKRVGNDLDQLREKRKRLEQELDRLDETMKRREQDLERLDESIESREQEAKDADIAEELYRNY

SEQ ID NO: 2539 - DNA, 1113 bp, Muscodor strobelii
  misc_feature: SGI cDNA ID NO. 560481
  misc_feature: Encodes the peptide sequence at SEQ ID NO 2540
atgtcgaacttgttcaagccgatggcactgggcactgtcaagctcggaaatcgagtcgtgatggccccattatcgaggtaccgctgtgatgataatggagtcccacttccaatggtaaaggagtattatgagcagagagcagcggtgcctggcaccatgatgatcacggaagcgacactcatatccagacgggcggtctgggcaaccaatgtccctggcatattcaccgaagatcaaataacggcttggagggatattgtggacgccgtccacgcaaaagagtgtctcatcttctgccagctctggcatctcggtcgagcagggtctcccgagttccacgataagctagggacgagattcatgtccgccagtgctgtgccaatcgacgagaaaagtcctgtgcctgaagagatgacagaagaggatgtgtgggagacgattcaagattatgccactgcagccaggaatgccatggctgctggctttgatggtgtcgaaattcatggcgccaacggatacctcgttgatcaattccttcaggatatttccaatcgccggaccgacgcctggggcggtagcgtcgagaaacgcgccaaattcgcactagaagtaacgaaagcagttgtgggcgcagtcggatcagaaaggactgcaatacgcttaagccctttcagtgactatggaggcatgcttatggaggacccttatccccagtttgagtacctagtgaggcaattgaaggacttgaatctagcataccttcatcttatcgaagctcgagtctcaggaaatgccgactcagagcgcggggaccgccatactgtcggcttcctcatcgaactatggaacaatcaaagccccgttctacttgctggagggttcaacacagacctcgctcgccaaactgttgacgaaaaatggagagaattcgatattggaattgtcttcggcagatatttcacctcgaaccccgatctcgtttttaaagtgaaagaatcaatcgagttcgctccgtacgaccgatccgtgttctatactcctaaactggccagaggatatatagactatccatacagcgtgcagttcatggcccaggcagcaccgttcgcttaa

SEQ ID NO: 2540 - protein, 370 aa, Muscodor strobelii
  misc_feature: SGI Peptide ID NO. 560481
  misc_feature (3)..(337): Pfam Id: PF00724 Pfam Desc: NADH:flavin oxidoreductase / NADH oxidase family
  misc_feature (2)..(365): NCBI GI: 156063746 Blast Desc: SS1G_01991 [Sclerotinia sclerotiorum 1980] gi|154697325|gb|EDN97063.1| SS1G_01991 [Sclerotinia sclerotiorum 1980]
  misc_feature (2)..(365): NCBI GI: 154318608 Blast Desc: NADPH dehydrogenase [Botryotinia fuckeliana B05.10] gi|150857823|gb|EDN33015.1| NADPH dehydrogenase [Botryotinia fuckeliana B05.10]
  misc_feature (1)..(364): NCBI GI: 119480023 Blast Desc: NADH:flavin oxidoreductase/NADH oxidase family protein [Neosartorya fischeri NRRL 181] gi|119408194|gb|EAW18143.1| NADH:flavin oxidoreductase/NADH oxidase family protein fischeri
  misc_feature (1)..(364): NCBI GI: 70989377 Blast Desc: NADH:flavin oxidoreductase/NADH oxidase family protein [Aspergillus fumigatus Af293] gi|66847169|gb|EAL87500.1| NADH:flavin oxidoreductase/NADH oxidase family protein fumigatus
  misc_feature (2)..(359): NCBI GI: 169598728 Blast Desc: SNOG_02169 [Phaeosphaeria nodorum SN15] gi|111069261|gb|EAT90381.1| SNOG_02169 [Phaeosphaeria nodorum SN15]
  misc_feature (2)..(367): NCBI GI: 256728348 Blast Desc: NECHADRAFT_54107 [Nectria haematococca mpVI 77-13-4]
  misc_feature (2)..(364): NCBI GI: 212544734 Blast Desc: N-ethylmaleimide reductase, [Penicillium marneffei ATCC 18224] gi|210065490|gb|EEA19584.1| N-ethylmaleimide reductase, [Penicillium marneffei ATCC 18224]
  misc_feature (1)..(362): NCBI GI: 255943375 Blast Desc: Pc18g06290 [Penicillium chrysogenum Wisconsin 54-1255] gi|211587189|emb|CAP94853.1| Pc18g06290 [Penicillium chrysogenum Wisconsin 54-1255]
  misc_feature (1)..(364): NCBI GI: 121710322 Blast Desc: NADH:flavin oxidoreductase/NADH oxidase family protein [Aspergillus clavatus NRRL 1] gi|119400927|gb|EAW11351.1| NADH:flavin oxidoreductase/NADH oxidase family protein clavatus
  misc_feature (2)..(362): NCBI GI: 169767956 Blast Desc: [Aspergillus oryzae RIB40] gi|83766304|dbj|BAE56447.1| protein product [Aspergillus oryzae]
  misc_feature (4)..(358): SWISSPROT Homolog: EC 1.3.1.42 12-oxophytodienoate reductase
MSNLFKPMALGTVKLGNRVVMAPLSRYRCDDNGVPLPMVKEYYEQRAAVPGTMMITEATLISRRAVWATNVPGIFTEDQITAWRDIVDAVHAKECLIFCQLWHLGRAGSPEFHDKLGTRFMSASAVPIDEKSPVPEEMTEEDVWETIQDYATAARNAMAAGFDGVEIHGANGYLVDQFLQDISNRRTDAWGGSVEKRAKFALEVTKAVVGAVGSERTAIRLSPFSDYGGMLMEDPYPQFEYLVRQLKDLNLAYLHLIEARVSGNADSERGDRHTVGFLIELWNNQSPVLLAGGFNTDLARQTVDEKWREFDIGIVFGRYFTSNPDLVFKVKESIEFAPYDRSVFYTPKLARGYIDYPYSVQFMAQAAPFA

SEQ ID NO: 2541 - DNA, 999 bp, Muscodor strobelii
  misc_feature: SGI cDNA ID NO. 560482
  misc_feature: Encodes the peptide sequence at SEQ ID NO 2542
atggcacctgccgtgctactcatcggcaacctagtccacgcgacagaggaatggaaagccctaggttcaaaatacacgctccttgagcttcgacaatactcacgacagaagttcctcgaaaattgcagaaatgggacatatgactcagtcgtaggctgtttccgcaactcacatgagaaattcgacgccgaaatcttagacgcactgcccaagaactggaaattcatcgcgcatcatggcgctgggtacgataccatcgatatagacgcctgcacgcgtcgaaaggtcgctgtttcacatacgccgtatgctgtcgacgatgcgacggctgatacggggttgtttcttttgcttggggcgctgagattggcacatatgtcaactacatccctacgtgcaggcaaatggctaggaaatacacccaaaggccacgaccccaaaggcaaaaccctagggatcctaggcatgggcggcatcggccgcgcaatggcacatcgcgcccgcgccttcgggatgaacatcatatatcacaacagacggcgactagacgcctcattagaacaaggcgcgacatacgtctccttcgacgaactcctcgccacatctgatgttctatccctgaacctcgctctcaatgcctctacacggcatataatcggcgcctccgagctagcgaagctcaagaaaggtgctgtgatcgtgaacacagctcgtggggcgctgatcgatgaggccgcgcttgtgaatgcactcgagtctggacatgtgtcggcggttggtcttgatgtttatgagaacgagccggagatacatccgaggctgatcaaaaacgagagagcgtttttgctaccgcatgttgggacacatactgttgagacgcggtatgagatggagatgctcgcgctaaggaatcttgaggcggctgtcgacgagggtacgatgcttacgcttgttgcagaacagaaggggttggattgggcgccgaaggctaagctttag

SEQ ID NO: 2542 - protein, 332 aa, Muscodor strobelii
  misc_feature: SGI Peptide ID NO. 560482
  misc_feature (5)..(319): Pfam Id: PF00389 Pfam Desc: D-isomer specific 2-hydroxyacid dehydrogenase, catalytic domain
  misc_feature (114)..(287): Pfam Id: PF02826 Pfam Desc: D-isomer specific 2-hydroxyacid dehydrogenase, NAD binding domain
  misc_feature (52)..(319): Pfam Id: PF00389 Pfam Desc: D-isomer specific 2-hydroxyacid dehydrogenase, catalytic domain
  misc_feature (3)..(322): NCBI GI: 145242118 Blast Desc: An09g03890 [Aspergillus niger] gi|134078250|emb|CAK96831.1| protein product [Aspergillus niger]
  misc_feature (3)..(322): NCBI GI: 115492197 Blast Desc: ATEG_00640 [Aspergillus terreus NIH2624] gi|114197586|gb|EAU39286.1| ATEG_00640 [Aspergillus terreus NIH2624]
  misc_feature (3)..(324): NCBI GI: 70996110 Blast Desc: hydroxyisocaproate dehydrogenase [Aspergillus fumigatus Af293] gi|44890036|emb|CAF32154.1| NAD-dependant D-isomer specific 2-hydroxyacid dehydrogenase, [Aspergillus
  misc_feature (4)..(322): NCBI GI: 242773684 Blast Desc: hydroxyisocaproate dehydrogenase, [Talaromyces stipitatus ATCC 10500] gi|218721908|gb|EED21326.1| hydroxyisocaproate dehydrogenase, [Talaromyces stipitatus ATCC
  misc_feature (3)..(324): NCBI GI: 119495044 Blast Desc: hydroxyisocaproate dehydrogenase, [Neosartorya fischeri NRRL 181] gi|119412479|gb|EAW22420.1| hydroxyisocaproate dehydrogenase, [Neosartorya fischeri NRRL 181]
  misc_feature (4)..(322): NCBI GI: 212531671 Blast Desc: hydroxyisocaproate dehydrogenase, [Penicillium marneffei ATCC 18224] gi|210071356|gb|EEA25445.1| hydroxyisocaproate dehydrogenase, [Penicillium marneffei ATCC
  misc_feature (3)..(322): NCBI GI: 67516987 Blast Desc: AN0775.2 [Aspergillus nidulans FGSC A4] gi|40746261|gb|EAA65417.1| AN0775.2 [Aspergillus nidulans FGSC A4] gi|259488945|tpe|CBF88808.1| TPA: hydroxyisocaproate nidulans
  misc_feature (3)..(324): NCBI GI: 169783106 Blast Desc: [Aspergillus oryzae RIB40] gi|238492851|ref|XP_002377662.1| hydroxyisocaproate dehydrogenase, [Aspergillus flavus NRRL3357] protein product
  misc_feature (3)..(322): NCBI GI: 121701111 Blast Desc: hydroxyisocaproate dehydrogenase, [Aspergillus clavatus NRRL 1] gi|119396963|gb|EAW07394.1| hydroxyisocaproate dehydrogenase, [Aspergillus clavatus NRRL 1]
  misc_feature (4)..(322): NCBI GI: 255941656 Blast Desc: Pc16g12980 [Penicillium chrysogenum Wisconsin 54-1255] gi|211586220|emb|CAP93968.1| Pc16g12980 [Penicillium chrysogenum Wisconsin 54-1255]
  misc_feature (59)..(307): SWISSPROT Homolog: EC 1.1.1.26 Glyoxylate reductase
MAPAVLLIGNLVHATEEWKALGSKYTLLELRQYSRQKFLENCRNGTYDSVVGCFRNSHEKFDAEILDALPKNWKFIAHHGAGYDTIDIDACTRRKVAVSHTPYAVDDATADTGLFLLLGALRLAHMSTTSLRAGKWLGNTPKGHDPKGKTLGILGMGGIGRAMAHRARAFGMNIIYHNRRRLDASLEQGATYVSFDELLATSDVLSLNLALNASTRHIIGASELAKLKKGAVIVNTARGALIDEAALVNALESGHVSAVGLDVYENEPEIHPRLIKNERAFLLPHVGTHTVETRYEMEMLALRNLEAAVDEGTMLTLVAEQKGLDWAPKAKL

SEQ ID NO: 2543 - DNA, 4383 bp, Muscodor strobelii
  misc_feature: SGI EST ID NO. CUFF.6467.0
  misc_feature: Variant of the nucleotide sequence at SEQ ID NO 2541
ttcttgtcgccaaaattcacggtcgccttctcgcgattcttcaacgcccacgaggtccctgcttcaacactcgcacactcccacccaatcatcgccaccccaccaattgcccttacgttttgcatctctggtgcgctgaatgtgaatgcgcaatccgtgactatggcgaaatccaaggccaacatcggctcactggccaagatggcctcgcaggtgcgccaggagaagaagggcggcgtcgcgaaacccccaccaggcgccaaagctcgcgaatcccagaccgctctgaagagtgcgactgccagaaaggacaagtacaacatcagcagcagcagcagtactagcgacagcgacagttcgagcgacgacaacagcgacgacgacgccaagctgaaggccgcccgcaactcgttcctcgccaagcagaccgtcgcgaagaaggagtcaaaccccaagaagaccaatggcctcaaggccgcaacgcccgccaaatctgccgcgaccactagcccccccacctcggcgcagaagcccaaggactctgccacctctgactccagctcaacatccgattctagctcagactccgactccgaatcagactctgcgcctcccaagaaatctatcacgaagcctgtgactactgccgccacgaccaacgacaacaagaccaacgctcccaaagagaacgatagctctagctctagctctggcgacagtgacagttcgagcgaccgcgacggcgacgcgcccaacatcaagccagtagccaccgcgggcgcaaaggctaataccaaaccgaaacccgtcaatggtagacccgagtcgacctcaagttccagcgaagatagtgacagcggtagcgagagcgacgacgagggcgacggtggcaatgcggtggccaagacgaacggcgtagtctctgcagcgggctcaggatcgcagttgtaagtcactttgctgtaaaccttcatctcactttatgcgccatgctgatgccacccgtagaccgtaccccttttccaagcataatccagacttcatgctccgcccagcttccacctccaatccaggcaaggaagtttccgacttcctcagcaataccagtctggagggcaagcaggtctggtattttaccgcgcccgcctcattgcctatcacagttctacgagatatggagctcgatcttgcgaaagcgatgcaaggtggctctttaatcagttacaagggcgatgactatggtttggatctggactctgctaccacaaatgagcagatccagctgctcattccttctcgcggtggcaatgagtataaacgagtaaatcgcaaaatcgattccaatgctcacctccgactcagcgcaaagttcggaccagatggtgaagtacacgctactgccaaccaaggcttcatcccaattccacggcccatccgagcacagccggagggcttgaaaattcgcttttccccgattggcgttccgactgcgccaatatcacttgattctataactccaggcatccccagctcccagtccaagactcaggcatccaaacatacatctgtttccagctcagagtctgacagtgactcaaacagcgactcagatacagagatggcagggatggcttcaacgaccactgccgccggcctcactaggaatgcaaagatctcgacaccagggcaaacaaacggtttaaagcgaaagctttcgagcgatattgaacagacctccactatcaccaagccagtcagcaacagcaagaatgccaaaagactgaaggcgggaagcactgccacgccccctaaggcggattccttaaaatcaaaggacaagaaaaaagacaaaacgccaaaatcctcaacgcccgtgacatactcttcctcctcaaagcgaactccaatccctctgccctcctatccaggcatgcctggaatgagacgataattgtgcatttgactacggatgggcttccgcatacccaataattttgtcctctgcgatcggcacttgggaagcttttaggctgcttatgccggaatccagacggttcaatcaatcttttccgttttgcatcaagagacttctatctctcaccgggcgttgggtgtttagggcattgggcggtaaaatcgttggatgcaaagataccaaggttgaaaaaagcaagttcattcctacgtgaaacaagggagctagtcaaccatggaaatacgagtccctcgtggccaagtacatagctggaccagtaggcgtgactagaaggcattagcaatcatgagctttaagaatcttaacgagcttgcatgactctatatacctaatcaatttctgcgttgtcatcactgcattaggggtttgaacagtcatgtgcctgtcacgatgcacagcaatttgtattgcggccagcaatcaccttaggcgatgttgatattggggatcaacacagtttgcatatcttcgcaatcttaacacagactcagcgcattatgatgagggaattgacatccaaacctcggtggtgttacagtctgtaatcgttcattcgctcaacgggctcgggacagtgctagccgacggtgacttgctctatattatagttaagtactgaatcgatcggctttgttgccgagagatcgactacaatccgcgtggacccattatatgtcgttgaataaaacccaccaccggtaacgatgcgggcaatacaagtccgattggcgcccggtcgtcttgcgacttcaaacgtcacacacatcaaactcatatcaatgcttaggcatttcgagccactcatcacaaattccgaatttgaaatacagaatactactcgtgtcaaatatcaaagtttgcacttaaaatggcacctgccgtgctactcatcggcaacctagtccacgcgacagaggaatggaaagccctaggttcaaaatacacgctccttgagcttcgacaatactcacgacagaagttcctcgaaaattgcagaaatgggacatatgactcagtcgtaggctgtttccgcaactcacatgagaaattcgacgccgaaatcttagacgcactgcccaagaactggaaattcatcgcgcatcatggcgctgggtacgataccatcgatatagacgcctgcacgcgtcgaaaggtcgctgtttcacatacgccgtatgctgtcgacgatgcgacggctgatacggggttgtttcttttgcttggggcgctgagattggcacatatgtcaactacatccctacgtgcaggcaaatggctaggaaatacacccaaaggccacgaccccaaaggcaaaaccctagggatcctaggcatgggcggcatcggccgcgcaatggcacatcgcgcccgcgccttcgggatgaacatcatatatcacaacagacggcgactagacgcctcattagaacaaggcgcgacatacgtctccttcgacgaactcctcgccacatctgatgttctatccctgaacctcgctctcaatgcctctacacggcatataatcggcgcctccgagctagcgaagctcaagaaaggtgctgtgatcgtgaacacagctcgtggggcgctgatcgatgaggccgcgcttgtgaatgcactcgagtctggacatgtgtcggcggttggtcttgatgtttatgagaacgagccggagatacatccgaggctgatcaaaaacgagagagcgtttttgctaccgcatgttgggacacatactgttgagacgcggtatgagatggagatgctcgcgctaaggaatcttgaggcggctgtcgacgagggtacgatgcttacgcttgttgcagaacagaaggggttggattgggcgccgaaggctaagctttagaagtgtgcatagactcgatcttggcaatgatgattaattgtggtatgatctcataaccagtgtttgacaattagagttgcccaataaccaagtcataagcgcagtcccacccagtcgcacagcttattcagtctctaaatgcaaccgtcccataagtcggatgtcgcaaaaggattatgtgttctcctgcagaccacgagtagatcagcattgttcttataatccaatagctttgctcgcctcgtctgatgtaaatgtatagatctcgataggggcactagctgatacgtttcttagtagccagcgttttagaggcataaatataaggcataaataacactgtctaacgtgtaaattaatagctagattggtcttgtaattatgctcagctctgagacgaaaggcctacgttattcaagtctagctctattctgttgttgagtgctttaggcatcgtttagatctgatgtggcaggtggctagcccctccacccaaagccccataacttcgacttttgcg

SEQ ID NO: 2544 - DNA, 1734 bp, Muscodor strobelii
  misc_feature: SGI cDNA ID NO. 560483
  misc_feature: Encodes the peptide sequence at SEQ ID NO 2545
atggcctcgcaggtgcgccaggagaagaagggcggcgtcgcgaaacccccaccaggcgccaaagctcgcgaatcccagaccgctctgaagagtgcgactgccagaaaggacaagtacaacatcagcagcagcagcagtactagcgacagcgacagttcgagcgacgacaacagcgacgacgacgccaagctgaaggccgcccgcaactcgttcctcgccaagcagaccgtcgcgaagaaggagtcaaaccccaagaagaccaatggcctcaaggccgcaacgcccgccaaatctgccgcgaccactagcccccccacctcggcgcagaagcccaaggactctgccacctctgactccagctcaacatccgattctagctcagactccgactccgaatcagactctgcgcctcccaagaaatctatcacgaagcctgtgactactgccgccacgaccaacgacaacaagaccaacgctcccaaagagaacgatagctctagctctagctctggcgacagtgacagttcgagcgaccgcgacggcgacgcgcccaacatcaagccagtagccaccgcgggcgcaaaggctaataccaaaccgaaacccgtcaatggtagacccgagtcgacctcaagttccagcgaagatagtgacagcggtagcgagagcgacgacgagggcgacggtggcaatgcggtggccaagacgaacggcgtagtctctgcagcgggctcaggatcgcagttaccgtaccccttttccaagcataatccagacttcatgctccgcccagcttccacctccaatccaggcaaggaagtttccgacttcctcagcaataccagtctggagggcaagcaggtctggtattttaccgcgcccgcctcattgcctatcacagttctacgagatatggagctcgatcttgcgaaagcgatgcaaggtggctctttaatcagttacaagggcgatgactatggtttggatctggactctgctaccacaaatgagcagatccagctgctcattccttctcgcggtggcaatgagtataaacgaggtaagcatctcacgatgttgctatcggtatatactaacctaacagtaaatcgcaaaatcgattccaatgctcacctccgactcagcgcaaagttcggaccagatggtgaagtacacgctactgccaaccaaggcttcatcccaattccacggcccatccgagcacagccggagggcttgaaaattcgcttttccccgattggcgttccgactgcgccaatatcacttgattctataactccaggcatccccagctcccagtccaagactcaggcatccaaacatacatctgtttccagctcagagtctgacagtgactcaaacagcgactcagatacagagatggcagggatggcttcaacgaccactgccgccggcctcactaggaatgcaaagatctcgacaccagggcaaacaaacggtttaaagcgaaagctttcgagcgatattgaacagacctccactatcaccaagccagtcagcaacagcaagaatgccaaaagactgaaggcgggaagcactgccacgccccctaaggcggattccttaaaatcaaaggacaagaaaaaagacaaaacgccaaaatcctcaacgcccgtgacatactcttcctcctcaaagcgaactccaatccctctgccctcctatccaggcatgcctggaatgagacgataa

SEQ ID NO: 2545 - protein, 577 aa, Muscodor strobelii
  misc_feature: SGI Peptide ID NO. 560483
  misc_feature (258)..(422): NCBI GI: 256734609 Blast Desc: NECHADRAFT_98869 [Nectria haematococca mpVI 77-13-4]
  misc_feature (258)..(422): NCBI GI: 46105422 Blast Desc: FG00339.1 [Gibberella zeae PH-1]
  misc_feature (260)..(438): NCBI GI: 39942444 Blast Desc: MGG_03302 [Magnaporthe grisea 70-15] gi|145015694|gb|EDK00184.1| MGG_03302 [Magnaporthe grisea 70-15]
  misc_feature (275)..(426): NCBI GI: 156039357 Blast Desc: SS1G_11815 [Sclerotinia sclerotiorum 1980] gi|154697552|gb|EDN97290.1| SS1G_11815 [Sclerotinia sclerotiorum 1980]
  misc_feature (239)..(430): NCBI GI: 240105064 Blast Desc: CPC735_046270 [Coccidioides posadasii C735 delta SOWgp]
  misc_feature (277)..(510): NCBI GI: 154309863 Blast Desc: BC1G_06852 [Botryotinia fuckeliana B05.10] gi|150851640|gb|EDN26833.1| BC1G_06852 [Botryotinia fuckeliana B05.10]
  misc_feature (196)..(421): NCBI GI: 119195019 Blast Desc: CIMG_01884 [Coccidioides immitis RS]
MASQVRQEKKGGVAKPPPGAKARESQTALKSATARKDKYNISSSSSTSDSDSSSDDNSDDDAKLKAARNSFLAKQTVAKKESNPKKTNGLKAATPAKSAATTSPPTSAQKPKDSATSDSSSTSDSSSDSDSESDSAPPKKSITKPVTTAATTNDNKTNAPKENDSSSSSSGDSDSSSDRDGDAPNIKPVATAGAKANTKPKPVNGRPESTSSSSEDSDSGSESDDEGDGGNAVAKTNGVVSAAGSGSQLPYPFSKHNPDFMLRPASTSNPGKEVSDFLSNTSLEGKQVWYFTAPASLPITVLRDMELDLAKAMQGGSLISYKGDDYGLDLDSATTNEQIQLLIPSRGGNEYKRGKHLTMLLSVYTNLTVNRKIDSNAHLRLSAKFGPDGEVHATANQGFIPIPRPIRAQPEGLKIRFSPIGVPTAPISLDSITPGIPSSQSKTQASKHTSVSSSESDSDSNSDSDTEMAGMASTTTAAGLTRNAKISTPGQTNGLKRKLSSDIEQTSTITKPVSNSKNAKRLKAGSTATPPKADSLKSKDKKKDKTPKSSTPVTYSSSSKRTPIPLPSYPGMPGMRR

SEQ ID NO: 2546 - DNA, 4322 bp, Muscodor strobelii
  misc_feature: SGI EST ID NO. CUFF.6467.1
  misc_feature: Variant of the nucleotide sequence at SEQ ID NO 2544
ttcttgtcgccaaaattcacggtcgccttctcgcgattcttcaacgcccacgaggtccctgcttcaacactcgcacactcccacccaatcatcgccaccccaccaattgcccttacgttttgcatctctggtgcgctgaatgtgaatgcgcaatccgtgactatggcgaaatccaaggccaacatcggctcactggccaagatggcctcgcaggtgcgccaggagaagaagggcggcgtcgcgaaacccccaccaggcgccaaagctcgcgaatcccagaccgctctgaagagtgcgactgccagaaaggacaagtacaacatcagcagcagcagcagtactagcgacagcgacagttcgagcgacgacaacagcgacgacgacgccaagctgaaggccgcccgcaactcgttcctcgccaagcagaccgtcgcgaagaaggagtcaaaccccaagaagaccaatggcctcaaggccgcaacgcccgccaaatctgccgcgaccactagcccccccacctcggcgcagaagcccaaggactctgccacctctgactccagctcaacatccgattctagctcagactccgactccgaatcagactctgcgcctcccaagaaatctatcacgaagcctgtgactactgccgccacgaccaacgacaacaagaccaacgctcccaaagagaacgatagctctagctctagctctggcgacagtgacagttcgagcgaccgcgacggcgacgcgcccaacatcaagccagtagccaccgcgggcgcaaaggctaataccaaaccgaaacccgtcaatggtagacccgagtcgacctcaagttccagcgaagatagtgacagcggtagcgagagcgacgacgagggcgacggtggcaatgcggtggccaagacgaacggcgtagtctctgcagcgggctcaggatcgcagttaccgtaccccttttccaagcataatccagacttcatgctccgcccagcttccacctccaatccaggcaaggaagtttccgacttcctcagcaataccagtctggagggcaagcaggtctggtattttaccgcgcccgcctcattgcctatcacagttctacgagatatggagctcgatcttgcgaaagcgatgcaaggtggctctttaatcagttacaagggcgatgactatggtttggatctggactctgctaccacaaatgagcagatccagctgctcattccttctcgcggtggcaatgagtataaacgagtaaatcgcaaaatcgattccaatgctcacctccgactcagcgcaaagttcggaccagatggtgaagtacacgctactgccaaccaaggcttcatcccaattccacggcccatccgagcacagccggagggcttgaaaattcgcttttccccgattggcgttccgactgcgccaatatcacttgattctataactccaggcatccccagctcccagtccaagactcaggcatccaaacatacatctgtttccagctcagagtctgacagtgactcaaacagcgactcagatacagagatggcagggatggcttcaacgaccactgccgccggcctcactaggaatgcaaagatctcgacaccagggcaaacaaacggtttaaagcgaaagctttcgagcgatattgaacagacctccactatcaccaagccagtcagcaacagcaagaatgccaaaagactgaaggcgggaagcactgccacgccccctaaggcggattccttaaaatcaaaggacaagaaaaaagacaaaacgccaaaatcctcaacgcccgtgacatactcttcctcctcaaagcgaactccaatccctctgccctcctatccaggcatgcctggaatgagacgataattgtgcatttgactacggatgggcttccgcatacccaataattttgtcctctgcgatcggcacttgggaagcttttaggctgcttatgccggaatccagacggttcaatcaatcttttccgttttgcatcaagagacttctatctctcaccgggcgttgggtgtttagggcattgggcggtaaaatcgttggatgcaaagataccaaggttgaaaaaagcaagttcattcctacgtgaaacaagggagctagtcaaccatggaaatacgagtccctcgtggccaagtacatagctggaccagtaggcgtgactagaaggcattagcaatcatgagctttaagaatcttaacgagcttgcatgactctatatacctaatcaatttctgcgttgtcatcactgcattaggggtttgaacagtcatgtgcctgtcacgatgcacagcaatttgtattgcggccagcaatcaccttaggcgatgttgatattggggatcaacacagtttgcatatcttcgcaatcttaacacagactcagcgcattatgatgagggaattgacatccaaacctcggtggtgttacagtctgtaatcgttcattcgctcaacgggctcgggacagtgctagccgacggtgacttgctctatattatagttaagtactgaatcgatcggctttgttgccgagagatcgactacaatccgcgtggacccattatatgtcgttgaataaaacccaccaccggtaacgatgcgggcaatacaagtccgattggcgcccggtcgtcttgcgacttcaaacgtcacacacatcaaactcatatcaatgcttaggcatttcgagccactcatcacaaattccgaatttgaaatacagaatactactcgtgtcaaatatcaaagtttgcacttaaaatggcacctgccgtgctactcatcggcaacctagtccacgcgacagaggaatggaaagccctaggttcaaaatacacgctccttgagcttcgacaatactcacgacagaagttcctcgaaaattgcagaaatgggacatatgactcagtcgtaggctgtttccgcaactcacatgagaaattcgacgccgaaatcttagacgcactgcccaagaactggaaattcatcgcgcatcatggcgctgggtacgataccatcgatatagacgcctgcacgcgtcgaaaggtcgctgtttcacatacgccgtatgctgtcgacgatgcgacggctgatacggggttgtttcttttgcttggggcgctgagattggcacatatgtcaactacatccctacgtgcaggcaaatggctaggaaatacacccaaaggccacgaccccaaaggcaaaaccctagggatcctaggcatgggcggcatcggccgcgcaatggcacatcgcgcccgcgccttcgggatgaacatcatatatcacaacagacggcgactagacgcctcattagaacaaggcgcgacatacgtctccttcgacgaactcctcgccacatctgatgttctatccctgaacctcgctctcaatgcctctacacggcatataatcggcgcctccgagctagcgaagctcaagaaaggtgctgtgatcgtgaacacagctcgtggggcgctgatcgatgaggccgcgcttgtgaatgcactcgagtctggacatgtgtcggcggttggtcttgatgtttatgagaacgagccggagatacatccgaggctgatcaaaaacgagagagcgtttttgctaccgcatgttgggacacatactgttgagacgcggtatgagatggagatgctcgcgctaaggaatcttgaggcggctgtcgacgagggtacgatgcttacgcttgttgcagaacagaaggggttggattgggcgccgaaggctaagctttagaagtgtgcatagactcgatcttggcaatgatgattaattgtggtatgatctcataaccagtgtttgacaattagagttgcccaataaccaagtcataagcgcagtcccacccagtcgcacagcttattcagtctctaaatgcaaccgtcccataagtcggatgtcgcaaaaggattatgtgttctcctgcagaccacgagtagatcagcattgttcttataatccaatagctttgctcgcctcgtctgatgtaaatgtatagatctcgataggggcactagctgatacgtttcttagtagccagcgttttagaggcataaatataaggcataaataacactgtctaacgtgtaaattaatagctagattggtcttgtaattatgctcagctctgagacgaaaggcctacgttattcaagtctagctctattctgttgttgagtgctttaggcatcgtttagatctgatgtggcaggtggctagcccctccacccaaagccccataacttcgacttttgcg

SEQ ID NO: 2547 - DNA, 837 bp, Muscodor strobelii
  misc_feature: SGI cDNA ID NO. 560484
  misc_feature: Encodes the peptide sequence at SEQ ID NO 2548
atgtcctccagtaaaaggaggaagctgaacgtggaagagtcgaaacagcccatgagtgcttttgctctgcgcaaaaagctgcttgcccagaaggcagctgcggcctcaaccgtctgccatgagacagaggatgcggctgctttcaacgcagcagcagcagcagcggaagatgagactacttcctcttctcacagtcagaaaagaaccaaaaagaatcgagcgtctcgagctactgcagtcgaacatgctgagtcagtcaagacagagagagaatccccgcctcaagtagaagcagaacaaagtcctaagataccggcagcctttccacatgatactggtataggtactcgggactggtcaccattatcgcttagtgatgaagatgaaaggaatgaacaagatgtgtcctctcaacccatcactctttcgacttttcaaccctccaagaagaactcccgccgtaccaaggctggtgtttctgagcttaagctcgaagatggagaccggctcgtggttcttgggagctacggtatacgcctgaagtcaggtcagatatcagtatatggtgccagcctcagtgcttcccctgagatatcctggttccatgctcctcactgctatgctttgcctgtaatacgctgcacagacgatgctatgattgagcttcatgtacatcctgatgctcacagcctgagagccttaggaaaactttcgcccttatttcgcagactctggccggaaatatctcattcatcgggcgtccgtgggactctttccacctccgaagacacgttccaaattgtgagtgctcgttccccttcaaacccgccaaactaa

SEQ ID NO: 2548 - protein, 278 aa, Muscodor strobelii
  misc_feature: SGI Peptide ID NO. 560484
  misc_feature (1)..(269): NCBI GI: 261355041 Blast Desc: GRC3 [Verticillium albo-atrum VaMs.102]
  misc_feature (1)..(245): NCBI GI: 145608194 Blast Desc: MGG_03303 [Magnaporthe grisea 70-15] gi|145015693|gb|EDK00183.1| MGG_03303 [Magnaporthe grisea 70-15]
  misc_feature (143)..(268): NCBI GI: 171679613 Blast Desc: protein product [Podospora anserina] gi|170939432|emb|CAP64660.1| protein product [Podospora anserina]
  misc_feature (143)..(268): NCBI GI: 46105424 Blast Desc: FG00340.1 [Gibberella zeae PH-1] gi|82592895|sp|Q4IR18.1|GRC3_GIBZE RecName: Full=Protein GRC3
  misc_feature (140)..(268): NCBI GI: 256735337 Blast Desc: NECHADRAFT_90213 [Nectria haematococca mpVI 77-13-4]
  misc_feature (18)..(268): NCBI GI: 85092683 Blast Desc: NCU02237 [Neurospora crassa OR74A] gi|28920930|gb|EAA30260.1| [Neurospora crassa OR74A]
  misc_feature (143)..(247): NCBI GI: 116203581 Blast Desc: CHGG_09674 [Chaetomium globosum CBS 148.51] gi|88175802|gb|EAQ83270.1| CHGG_09674 [Chaetomium globosum CBS 148.51]
  misc_feature (6)..(262): NCBI GI: 115398564 Blast Desc: conserved [Aspergillus terreus NIH2624] gi|121737699|sp|Q0CKU1.1|GRC3_ASPTN RecName: Full=Protein grc3 gi|114191754|gb|EAU33454.1| conserved [Aspergillus terreus
  misc_feature (162)..(268): NCBI GI: 156039355 Blast Desc: SS1G_11814 [Sclerotinia sclerotiorum 1980] gi|154697551|gb|EDN97289.1| SS1G_11814 [Sclerotinia sclerotiorum 1980]
  misc_feature (6)..(245): NCBI GI: 225560731 Blast Desc: conserved [Ajellomyces capsulatus G186AR]
MSSSKRRKLNVEESKQPMSAFALRKKLLAQKAAAASTVCHETEDAAAFNAAAAAAEDETTSSSHSQKRTKKNRASRATAVEHAESVKTERESPPQVEAEQSPKIPAAFPHDTGIGTRDWSPLSLSDEDERNEQDVSSQPITLSTFQPSKKNSRRTKAGVSELKLEDGDRLVVLGSYGIRLKSGQISVYGASLSASPEISWFHAPHCYALPVIRCTDDAMIELHVHPDAHSLRALGKLSPLFRRLWPEISHSSGVRGTLSTSEDTFQIVSARSPSNPPN

SEQ ID NO: 2549 - DNA, 2831 bp, Muscodor strobelii
  misc_feature: SGI EST ID NO. CUFF.6356.0
  misc_feature: Variant of the nucleotide sequence at SEQ ID NO 2547
tagaagttgctgttgctccatctgatgctcgacagattggaacgaccacttttggaacccgtggaaatcgtcgtctcgtctgccctggcagtgacctcagtcatcaggtctaattacgtacatgacttgtttgtattgttattggctgttgatcatgtaaccacaaaccatcgaaaactcgttcatctgctttcggtcaaagtcacgtagtgggtcacaatgtcctccagtaaaaggaggaagctgaacgtggaagagtcgaaacagcccatgagtgcttttgctctgcgcaaaaagctgcttgcccagaaggcagctgcggcctcaaccgtctgccatgagacagaggatgcggctgctttcaacgcagcagcagcagcagcggaagatgagactacttcctcttctcacagtcagaaaagaaccaaaaagaatcgagcgtctcgagctactgcagtcgaacatgctgagtcagtcaagacagagagagaatccccgcctcaagtagaagcagaacaaagtcctaagataccggcagcctttccacatgatactggtataggtactcgggactggtcaccattatcgcttagtgatgaagatgaaaggaatgaacaagatgtgtcctctcaacccatcactctttcgacttttcaaccctccaagaagaactcccgccgtaccaaggctggtgtttctgagcttaagctcgaagatggagaccggctcgtggttcttgggagctacggtatacgcctgaagtcaggtcagatatcagtatatggtgccagcctcagtgcttcccctgagatatcctggttccatgctcctcactgctatgctttgcctgtaatacgctgcacagacgatgctatgattgagcttcatgtacatcctgatgctcacagcctgagagccttaggaaaactttcgcccttatttcgcagactctggccggaaatatctcattcatcgggcgtccgtgggactctttccacctccgaagacacgttccaaattctgtgcacatctgaagatggaccaagaaagattgcgcttcaggacctgagatcgccagctgagtggaacaaggaattagcgacattactcagtacaaaaaactcgagaccactatctgccatgattacgggtccgaagtcgtctgggaagtcaacgttcggcaagatccttactaatcgccttctcacttctgcctccaccaactcccacaagcaatcgggggtgaatggagttgcagttcttgaccttgacgcagggcagcccgagtattgcgttgctggccaaatagctcttgttctggttacgaagcctgtcttcagtccatccttttgccgactagagacaatacatgagtcccgtgtagttcgatcccacgctttggctaatgtttcgcctgcctcaaacccggatctttatctggaaatggctgttgatcttatgacccactaccgcaataccttacgtacattacccctggtcatcaatacaccaggctggatacaaggaactggtctcgatcttctcgtttcgttcattgaagtcttgcgccccgccgaggtgatatacatgtcaaacacgggacctgccgaagtcgtgacatccttagaggaagcttgtaggaattctcgtttcacgacacttccatctcaaatgggacaatcgaataccaggtccgctgcccagttgcgctctatgcaaacgatggggtattttcatggcagatctaagcaacagcagagtggagttaagaacgaatccagctggtcccaaactcccattttctccagcgctccgtggcaggtccattaccaaggatcgaatcccggtgtcttcggcatcatgtgttacgacggtcatatacaacccgaatacgttgccgatgcgataagtgggactgttctcgctgctgtcgaacttgagaatgagaaagcttttcaaagggcactcgacacaggcctcaatggagatccacctccaaatgacgaagcggaccaaagctcttgcatggacatagacgggtcgcaatcgacgcgggccaaccctcatccattacatcttatccgtgagcgactcgtaactccaactccggaaggtcttccattcatagacacttcgcaaggcttaactttggatcctcgattttctcgaagcataggcctggtcttactgcgggccattgatacgcgaacggggtgtcttcatctctccacgcctatcgccatggaggaattcaaggaagtagaagaaagagggggacacattgtactcgtaggcggcaagtttgatccaccaacctgggcttatactgaggaacggtacaatcgatccgcgggcgatgaagatgaatctgatttcgtcaaatacaacgacaacagcgccgatgaaccggcaatcagcaatgagacgttcgacggcgtcgaggactccattccgtacatcgaggtgcactccgctcatcaaaaacgtggtgcagggtccaaagcttggagggtcagacgggaccttggccgcttggggaattccactatctagccccggcctacggagtatggtctagtcaattgacaatcggcaacaaagttcgggaacgtaaccctgtcgcattacccagctacgtccatgaccgaattcgtgcccctactcacaaaatgatcggcgccgtatttagtgacgtctgtactcaactatgccccgcatcgagtccttttgtcatgctttctcatgctgagccattcggttagtcattatctaaaagtatatgattcctataacgtagatcaaatgacctaccgcatattaatagtttcggc

SEQ ID NO: 2550 - DNA, 1413 bp, Muscodor strobelii
  misc_feature: SGI cDNA ID NO. 560485
  misc_feature: Encodes the peptide sequence at SEQ ID NO 2551
atgattacgggtccgaagtcgtctgggaagtcaacgttcggcaagatccttactaatcgccttctcacttctgcctccaccaactcccacaagcaatcgggggtgaatggagttgcagttcttgaccttgacgcagggcagcccgagtattgcgttgctggccaaatagctcttgttctggttacgaagcctgtcttcagtccatccttttgccgactagagacaatacatgagtcccgtgtagttcgatcccacgctttggctaatgtttcgcctgcctcaaacccggatctttatctggaaatggctgttgatcttatgacccactaccgcaataccttacgtacattacccctggtcatcaatacaccaggctggatacaaggaactggtctcgatcttctcgtttcgttcattgaagtcttgcgccccgccgaggtgatatacatgtcaaacacgggacctgccgaagtcgtgacatccttagaggaagcttgtaggaattctcgtttcacgacacttccatctcaaatgggacaatcgaataccaggtccgctgcccagttgcgctctatgcaaacgatggggtattttcatggcagatctaagcaacagcagagtggagttaagaacgaatccagctggtcccaaactcccattttctccagcgctccgtggcaggtccattaccaaggatcgaatcccggtgtcttcggcatcatgtgttacgacggtcatatacaacccgaatacgttgccgatgcgataagtgggactgttctcgctgctgtcgaacttgagaatgagaaagcttttcaaagggcactcgacacaggcctcaatggagatccacctccaaatgacgaagcggaccaaagctcttgcatggacatagacgggtcgcaatcgacgcgggccaaccctcatccattacatcttatccgtgagcgactcgtaactccaactccggaaggtcttccattcatagacacttcgcaaggcttaactttggatcctcgattttctcgaagcataggcctggtcttactgcgggccattgatacgcgaacggggtgtcttcatctctccacgcctatcgccatggaggaattcaaggaagtagaagaaagagggggacacattgtactcgtaggcggcaagtttgatccaccaacctgggcttatactgaggaacggtacaatcgatccgcgggcgatgaagatgaatctgatttcgtcaaatacaacgacaacagcgccgatgaaccggcaatcagcaatgagacgttcgacggcgtcgaggactccattccgtacatcgaggtgcactccgctcatcaaaaacgtggtgcagggtccaaagcttggagggtcagacgggaccttggccgcttggggaattccactatctag

SEQ ID NO: 2551 - protein, 470 aa, Muscodor strobelii
  misc_feature: SGI Peptide ID NO. 560485
  misc_feature (1)..(464): NCBI GI: 46105424 Blast Desc: FG00340.1 [Gibberella zeae PH-1] gi|82592895|sp|Q4IR18.1|GRC3_GIBZE RecName: Full=Protein GRC3
  misc_feature (1)..(464): NCBI GI: 256735337 Blast Desc: NECHADRAFT_90213 [Nectria haematococca mpVI 77-13-4]
  misc_feature (1)..(466): NCBI GI: 261355041 Blast Desc: GRC3 [Verticillium albo-atrum VaMs.102]
  misc_feature (1)..(468): NCBI GI: 154309865 Blast Desc: BC1G_06853 [Botryotinia fuckeliana B05.10] gi|150851641|gb|EDN26834.1| BC1G_06853 [Botryotinia fuckeliana B05.10]
  misc_feature (1)..(402): NCBI GI: 156039355 Blast Desc: SS1G_11814 [Sclerotinia sclerotiorum 1980] gi|154697551|gb|EDN97289.1| SS1G_11814 [Sclerotinia sclerotiorum 1980]
  misc_feature (1)..(464): NCBI GI: 85092683 Blast Desc: NCU02237 [Neurospora crassa OR74A] gi|28920930|gb|EAA30260.1| [Neurospora crassa OR74A]
  misc_feature (1)..(464): NCBI GI: 171679613 Blast Desc: protein product [Podospora anserina] gi|170939432|emb|CAP64660.1| protein product [Podospora anserina]
  misc_feature (1)..(460): NCBI GI: 115398564 Blast Desc: conserved [Aspergillus terreus NIH2624] gi|121737699|sp|Q0CKU1.1|GRC3_ASPTN RecName: Full=Protein grc3 gi|114191754|gb|EAU33454.1| conserved [Aspergillus terreus
  misc_feature (1)..(463): NCBI GI: 67536858 Blast Desc: AN4599.2 [Aspergillus nidulans FGSC A4] gi|74595791|sp|Q5B4D1.1|GRC3_EMENI RecName: Full=Protein grc3 gi|40741211|gb|EAA60401.1| AN4599.2 [Aspergillus nidulans FGSC
  misc_feature (1)..(437): NCBI GI: 119195017 Blast Desc: CIMG_01883 [Coccidioides immitis RS]
MITGPKSSGKSTFGKILTNRLLTSASTNSHKQSGVNGVAVLDLDAGQPEYCVAGQIALVLVTKPVFSPSFCRLETIHESRVVRSHALANVSPASNPDLYLEMAVDLMTHYRNTLRTLPLVINTPGWIQGTGLDLLVSFIEVLRPAEVIYMSNTGPAEVVTSLEEACRNSRFTTLPSQMGQSNTRSAAQLRSMQTMGYFHGRSKQQQSGVKNESSWSQTPIFSSAPWQVHYQGSNPGVFGIMCYDGHIQPEYVADAISGTVLAAVELENEKAFQRALDTGLNGDPPPNDEADQSSCMDIDGSQSTRANPHPLHLIRERLVTPTPEGLPFIDTSQGLTLDPRFSRSIGLVLLRAIDTRTGCLHLSTPIAMEEFKEVEERGGHIVLVGGKFDPPTWAYTEERYNRSAGDEDESDFVKYNDNSADEPAISNETFDGVEDSIPYIEVHSAHQKRGAGSKAWRVRRDLGRLGNSTI

SEQ ID NO: 2552 - DNA, 2831 bp, Muscodor strobelii; identical to SEQ ID NO: 2549
  misc_feature: SGI EST ID NO. CUFF.6356.0
  misc_feature: Variant of the nucleotide sequence at SEQ ID NO 2550

SEQ ID NO: 2553 - DNA, 2097 bp, Muscodor strobelii
  misc_feature: SGI cDNA ID NO. 560486
  misc_feature: Encodes the peptide sequence at SEQ ID NO 2554
atggctttctctccgccttccaaagttgacgtgctcatcgtgggcgctggcccagccggtctcatgctcgctctgtggctttcgaggcttggtgtcataactcgaattgtagataagcggaccgacaaagtcttttcaggacaagcagacgggtttcaagcccgcacgctcgagattctagatagcttcggtgtgggcgagagggtatggaaagaagcaaaccaattgatagaggtcagcttctggaatccagacgcggatggccgcatccgacgtagcagtcgcgcaccagataatatcacgggtctctctcgcttcacggaatcagttctgcatcagggtcgcatggaaacattcttccttgatgcaatcgcggcatcgtacccacatcccgggtgcccagatcatgcgatacgcgtcgagcgcaaggtcattcctacttcgctctcagtcgatgaagcgactataaacgatgattatgcatatccgatctcagtcacacttcgtcatctcacggaagaggaggcgacgcctacacagcgcttgagcaatctcgtcgatggtttgtacaggagtaatcttgctgacgacgacattgaatccgtgattgggcaatcaagcacaaggacagatgtgcgggaagagattgtgaaggcaaagtatgtcgctggctgtgatggtgcacattcttggactagaaagacgctaggaaaagacttcgagatgaagggtgaaatgacagattatatctggggcgtccttgacattgtgccactgaccgattttcccgatattcgaaatcgatgcatgattcactctgcgtcgtcgggtagtctaatgatcatccctagagaaaacaaactcgtgcgtctatacattcaactcactgaagtctcagcggatggcggacgggtcgaccgatcgaagatcactccggatgtcattttcaaagcagctcagaaaactattagtccctacaagttggactatcattattgcgattggtggacagcgtatcaaatcggacaacgagtaggagataagttcagtcaccatgaccgtatcttcctagcaggcgatgcggtgcacacgcactccccgaaagccggtcaagggatgaatgtctcgatgcaagatgcatacaatctcggctggaaaatcggactagtgtgcaaaaacattttgaagcgtgatattttatctacttatgagctagagcgcaagcaaattgcaagagaactcattgcgtttgatcacaagttctctaggctgttctccggtcgccccgccaaagatatattagacgagacgggagtatcgatggaagacttcacgaaggctttcaacatgagtcacatgttcacaagcggaataggagttgactactgcaagagttctctcgtcgctaaacctcgcgagcaacaagatctggcaaataatcaagacgatacatcatatgataatgcgtcaaatgatgtacaaagcgatctgtccttagcaagcaactgcaaacctggcatgcgcttcccgtcatttcaggtccttgcgcaaagtgatgctcacccgtggcaacttcatcataagatgccttccgatgggcgcttcagaataatcgtgttttcgggcgatatttcgagctcggcaaagctcaagaccgccaacgaccttggagactcgttacttcatcgtgtcattaaaagattccctcgcatctcattgtctcccggatacaaccctcacggtgcaacgatgaagttcaagaccgacaaagacccttcaatagttgatgttcttttactccacactgccaaacgggaaagtgtcgagattttacgggatctgcacgaggtttatcacccctttgactcgaagctaggatgggattacgacaaggtgtttgctgacgaggagagctatactggtattcatggacatgcgtatgagggatacggggtagatagacacaagggggcattggttgttgtgagacctgacgggtatgttggacttgtcactggtcttgagcgtgtagatcttgtcgagaagtggttcgaaggcgtattgaggggtgttgacacgagtactaagttgtcatga

SEQ ID NO: 2554 - protein, 698 aa, Muscodor strobelii
  misc_feature: SGI Peptide ID NO. 560486
  misc_feature (8)..(418): Pfam Id: PF01494 Pfam Desc: FAD binding domain
  misc_feature (454)..(657): Pfam Id: PF07976 Pfam Desc: Phenol hydroxylase, C-terminal dimerisation domain
  misc_feature (10)..(31): Pfam Id: PF01266 Pfam Desc: FAD dependent oxidoreductase
  misc_feature (10)..(39): Pfam Id: PF00890 Pfam Desc: FAD binding domain
  misc_feature (217)..(418): Pfam Id: PF01494 Pfam Desc: FAD binding domain
  misc_feature (8)..(74): Pfam Id: PF01494 Pfam Desc: FAD binding domain
  misc_feature (9)..(39): Pfam Id: PF03486 Pfam Desc: HI0933-like protein
  misc_feature (10)..(31): Pfam Id: PF05834 Pfam Desc: Lycopene cyclase protein
  misc_feature (454)..(548): Pfam Id: PF07976 Pfam Desc: Phenol hydroxylase, C-terminal dimerisation domain
  misc_feature (593)..(657): Pfam Id: PF07976 Pfam Desc: Phenol hydroxylase, C-terminal dimerisation domain
  misc_feature (10)..(31): Pfam Id: PF07992 Pfam Desc: Pyridine nucleotide-disulphide oxidoreductase
  misc_feature (5)..(689): NCBI GI: 70988883 Blast Desc: FAD monooxygenase [Aspergillus fumigatus Af293] gi|66846924|gb|EAL87255.1| FAD monooxygenase, [Aspergillus fumigatus Af293]
  misc_feature (5)..(689): NCBI GI: 119497919 Blast Desc: FAD binding domain protein [Neosartorya fischeri NRRL 181] gi|119413881|gb|EAW23820.1| FAD binding domain protein [Neosartorya fischeri NRRL 181]
  misc_feature (5)..(689): NCBI GI: 159128707 Blast Desc: FAD monooxygenase, [Aspergillus fumigatus A1163]
  misc_feature (7)..(689): NCBI GI: 85104998 Blast Desc: NCU11294 [Neurospora crassa OR74A] gi|28923431|gb|EAA32615.1| NCU11294 [Neurospora crassa OR74A] gi|40882278|emb|CAF06102.1| phenol 2-monooxygenase [Neurospora
  misc_feature (21)..(690): NCBI GI: 189194177 Blast Desc: phenol 2-monooxygenase [Pyrenophora tritici-repentis Pt-1C-BFP] gi|187978991|gb|EDU45617.1| phenol 2-monooxygenase [Pyrenophora tritici-repentis Pt-1C-BFP]
  misc_feature (9)..(688): NCBI GI: 256724174 Blast Desc: [Nectria haematococca mpVI 77-13-4]
  misc_feature (7)..(689): NCBI GI: 212543007 Blast Desc: FAD monooxygenase, [Penicillium marneffei ATCC 18224] gi|210066565|gb|EEA20658.1| FAD monooxygenase, [Penicillium marneffei ATCC 18224]
  misc_feature (9)..(688): NCBI GI: 46133941 Blast Desc: FG09110.1 [Gibberella zeae PH-1]
  misc_feature (1)..(687): NCBI GI: 154311244 Blast Desc: BC1G_06740 [Botryotinia fuckeliana B05.10] gi|150851144|gb|EDN26337.1| BC1G_06740 [Botryotinia fuckeliana B05.10]
  misc_feature (9)..(689): NCBI GI: 255935841 Blast Desc: Pc13g05120 [Penicillium chrysogenum Wisconsin 54-1255] gi|211583567|emb|CAP91581.1| Pc13g05120 [Penicillium chrysogenum Wisconsin 54-1255]
  misc_feature (7)..(688): SWISSPROT Homolog: EC 1.14.13.7 Phenol 2-monooxygenase
MAFSPPSKVDVLIVGAGPAGLMLALWLSRLGVITRIVDKRTDKVFSGQADGFQARTLEILDSFGVGERVWKEANQLIEVSFWNPDADGRIRRSSRAPDNITGLSRFTESVLHQGRMETFFLDAIAASYPHPGCPDHAIRVERKVIPTSLSVDEATINDDYAYPISVTLRHLTEEEATPTQRLSNLVDGLYRSNLADDDIESVIGQSSTRTDVREEIVKAKYVAGCDGAHSWTRKTLGKDFEMKGEMTDYIWGVLDIVPLTDFPDIRNRCMIHSASSGSLMIIPRENKLVRLYIQLTEVSADGGRVDRSKITPDVIFKAAQKTISPYKLDYHYCDWWTAYQIGQRVGDKFSHHDRIFLAGDAVHTHSPKAGQGMNVSMQDAYNLGWKIGLVCKNILKRDILSTYELERKQIARELIAFDHKFSRLFSGRPAKDILDETGVSMEDFTKAFNMSHMFTSGIGVDYCKSSLVAKPREQQDLANNQDDTSYDNASNDVQSDLSLASNCKPGMRFPSFQVLAQSDAHPWQLHHKMPSDGRFRIIVFSGDISSSAKLKTANDLGDSLLHRVIKRFPRISLSPGYNPHGATMKFKTDKDPSIVDVLLLHTAKRESVEILRDLHEVYHPFDSKLGWDYDKVFADEESYTGIHGHAYEGYGVDRHKGALVVVRPDGYVGLVTGLERVDLVEKWFEGVLRGVDTSTKLS

SEQ ID NO: 2555 - DNA, 1869 bp, Muscodor strobelii
  misc_feature: SGI cDNA ID NO. 560487
  misc_feature: Encodes the peptide sequence at SEQ ID NO 2556
atggcgacaaatatgggtcttcgctccaatcctcaagatgaggtgcgagtgaagtgtgctaagactgcggaacttggcgatatcgccgctactttatcttcacaagagctgattgaatttgtctcgccctcagacttgaaagaaatatgcgctagactgctggaagacgagtttgctagaccgagactgaaggaagaacttcaggcctcagccgataagatagtagctcacaccagacgcgaggcgacgggagagcgagaccgaatcgtaaagacagctcaaaaggctatctgggatctcgagagctatgctcttgagaaacagaagggaacggcagactgcgacgactggccgagagctttgtttcctttctttccacgcattgaatcattgctaggacatggttctcatgctgaaggcccagatcgagcgtgggaggcaataatcaaaatcttgcccttgttggccagccctgtaacgagctccgtgactagccctgctactagtgctccggttagtgaagcacccactgtacaggaagtattggatcttgcgtctgcgatcaatctctccggttcagatgatgcagatgcgcgagcggaggccgaacggctgcaggaacactttgggcatagccatgcctgggagtcagagaaggtcctagggagcggggcatatggcgttgccttgcttctgaaaaggcggaacgcaaaagaccgtcacgctcgtgttgtgttgaaaagggcaatcaatgaggaatcaagagcggacctaacaactgaaatcgctgtactcaaaaggcttcgaggatctcgtcatttctgccagctattagctgactgcgatgatttgacaaattttatttatatggacgatgagcgaacatggtttcaacgtgtacggcattcttttcaagttttgcgccgcaagatttctagaaacccgaacttcagaggcgtattcaaagctctcagtggtcttccgggaccagcgatgttgatagagtacattccaaatgggaatctacaggaactcagggaaaaaattgcgacagcaaatctagaagtcccaaatcgtatacttgtgagcaactcttccagtcaatcctcaggcgtcctggaattttcgcaagtcaagattgtcgacttgcccctgcagtggtccttctatctttgtttgattcgagcttgcgttggacttgcctatccggcagacaagggtggacaggtaaaagctcggcgcctccagaagggcaaattcagagaaagagcagcaatggagcccattccgccggagataacatcgcaagattgggacagtattgttcacggggacatcgccggtagaaatatcgtgattggcgatcggaacgcctctaatcatgtggtggtgcctgagctcgtcacgatcgacttcggcaactcgagtgctccagaagatccgcagtatcctagcaccacgaacttgagaatgtgcgccatggagatgatacggctcatcacaagacgaaccgtgtacagccgcgccgaaaacgagtggcaaggtcacaggacgagagcgacggacatatgtaataatgctcaaggggaactactctttccggacttggatccagaactacggaatctcatagcggcgactttgagaatcaatagagaacatcgacctagtttgcaggagaccctcaaccgtgtagtagctaatcgaagactcgcgtatgattcaccgccgccgttggacgacacagataacttgattaggcatttgctctatgacgtgccccttctaccgcaaaaccaatcccagcaatcggcgtctcccgcgctgtcactttggcatggaccagcaccacctccgcggactccatag

SEQ ID NO: 2556 - protein, 622 aa, Muscodor strobelii
  misc_feature: SGI Peptide ID NO. 560487
MATNMGLRSNPQDEVRVKCAKTAELGDIAATLSSQELIEFVSPSDLKEICARLLEDEFARPRLKEELQASADKIVAHTRREATGERDRIVKTAQKAIWDLESYALEKQKGTADCDDWPRALFPFFPRIESLLGHGSHAEGPDRAWEAIIKILPLLASPVTSSVTSPATSAPVSEAPTVQEVLDLASAINLSGSDDADARAEAERLQEHFGHSHAWESEKVLGSGAYGVALLLKRRNAKDRHARVVLKRAINEESRADLTTEIAVLKRLRGSRHFCQLLADCDDLTNFIYMDDERTWFQRVRHSFQVLRRKISRNPNFRGVFKALSGLPGPAMLIEYIPNGNLQELREKIATANLEVPNRILVSNSSSQSSGVLEFSQVKIVDLPLQWSFYLCLIRACVGLAYPADKGGQVKARRLQKGKFRERAAMEPIPPEITSQDWDSIVHGDIAGRNIVIGDRNASNHVVVPELVTIDFGNSSAPEDPQYPSTTNLRMCAMEMIRLITRRTVYSRAENEWQGHRTRATDICNNAQGELLFPDLDPELRNLIAATLRINREHRPSLQETLNRVVANRRLAYDSPPPLDDTDNLIRHLLYDVPLLPQNQSQQSASPALSLWHGPAPPPRTP

SEQ ID NO: 2557 - DNA, 460 bp, Muscodor strobelii
  misc_feature: SGI EST ID NO. CUFF.6375.0
  misc_feature: Variant of the nucleotide sequence at SEQ ID NO 2555
ttggcgatcggaacgcctctaatcatgtggtggtgcctgagctcgtcacgatcgacttcggcaactcgagtgctccagaagatccgcagtatcctagcaccacgaacttgagaatgtgcgccatggagatgatacggctcatcacaagacgaaccgtgtacagccgcgccgaaaacgagtggcaaggtcacaggacgagagcgacggacatatgtaataatgctcaaggggaactactctttccggacttggatccagaactacggaatctcatagcggcgactttgagaatcaatagagaacatcgacctagtttgcaggagaccctcaaccgtgtagtagctaatcgaagactcgcgtatgattcaccgccgccgttggacgacacagataacttgattaggcatttgctctatgacgtgccccttctaccgcaaaaccaatcccagcaatcggcgtc

SEQ ID NO: 2558 - DNA, 1461 bp, Muscodor strobelii
  misc_feature: SGI cDNA ID NO. 560488
  misc_feature: Encodes the peptide sequence at SEQ ID NO 2559
atgcattccctaaccaatactcttttgttgctattcgggcttgtagcgattgcagcagcttcgccgacccagcaaatcgagaagcgtggtgtctacaaagtagaacgcgtgagaaacccgaacttcgtatcgcgaaatgggccccgggctttatacaaggcattgacgaaatataatatgccagtaccgggacatttgatcagcaagatcgatagccaaaatgcggagcttctttcaaagcgcggggttctcttgaagcgtgagcctagaaggcgcaagggcatgggcagaggtggtcaaggccaaggtggtcaaggtcagggtcaaggtggtcaaggtggccaaggtcaaggtggtcaaggtcaaggtcaaggtggtcaaggtacgaatggtggtggtgccgccggaggtgcgggagctgccggaggcaatgcagcacaacagggcgctaccactgtgaacaagaatgggacaggaattgtagccgccataccgcaaactaatgatgtcgagtacctagcgccagtgaacattggcggacaagtggttaacctcgacttcgacacagggtcttcagatctctgggttttcaacacgcaactcagtgctgctcagtccaccggccacaatctctttgatccccaagcttcgaaaacattccagctcatgaacggtgctcaattcaacatctcgtatggtgatgggtcgggcgctgctggaaatgttgggactgatgttgttaacctcggcggtgccgagttcaaggcacaggctgttgagttggcccaagtagtatccgactcttttgttcaggatacttcgaccgatggattgttgggtcttgcattcagtactatcaatactgttcagccccagccgcaaaaaacgttcttcgacaatgtcatgaaatctcttgcgcagccattattcacagctgatctgaaacacgccacagctggtgcttatgagttcggcaacattgacgcatctaagttcgatggagctctcactttcgtaaacgtcgacaatagcaatgggttttggcagtttccaagcgataaatttgcggtcgatggtggcagcccacagacatccacagcgggtgctcaggccattgccgatactggtactacccttcttctgaccgaccctgccgttgccacagcctattatgcaaaggtacaaggtgccgaggatagccaacaagagggcgggttcgtggtcccttgcaatgctaagctgcccgatctccagctcgcagttggtaactcgatggcaaccgttaagggcacggatctcaacttcgcgcccgttgatgcgaccaacacaacttgcttcggtggactccaaggtacaacttctagcatccaaatctacggcgatatattcttcaagagtaacttcgttgtcttcaatggcggaaataacactcttgggttcgcctctcattcatctgcatga

SEQ ID NO: 2559 - protein, 486 aa, Muscodor strobelii
  misc_feature: SGI Peptide ID NO. 560488
  misc_feature (171)..(483): Pfam Id: PF00026 Pfam Desc: Eukaryotic aspartyl protease
  misc_feature (160)..(483): NCBI GI: 156059234 Blast Desc: aspartyl protease [Sclerotinia sclerotiorum 1980] gi|154701416|gb|EDO01155.1| aspartyl protease [Sclerotinia sclerotiorum 1980]
  misc_feature (160)..(483): NCBI GI: 154317354 Blast Desc: BC1G_03579 [Botryotinia fuckeliana B05.10] gi|150844996|gb|EDN20189.1| BC1G_03579 [Botryotinia fuckeliana B05.10]
  misc_feature (145)..(484): NCBI GI: 39960414 Blast Desc: MGG_09351 [Magnaporthe grisea 70-15] gi|145014299|gb|EDJ98867.1| MGG_09351 [Magnaporthe grisea 70-15]
  misc_feature (161)..(483): NCBI GI: 85092451 Blast Desc: penicillopepsin [Neurospora crassa OR74A] gi|28920806|gb|EAA30165.1| penicillopepsin [Neurospora crassa OR74A]
  misc_feature (160)..(483): NCBI GI: 8515841 Blast Desc: AF271387_1 aspartyl protease [Sclerotinia sclerotiorum]
  misc_feature (133)..(480): NCBI GI: 169611176 Blast Desc: SNOG_08697 [Phaeosphaeria nodorum SN15] gi|111062745|gb|EAT83865.1| SNOG_08697 [Phaeosphaeria nodorum SN15]
  misc_feature (146)..(482): NCBI GI: 212535548 Blast Desc: extracellular aspartic endopeptidase, [Penicillium marneffei ATCC 18224] gi|210070329|gb|EEA24419.1| extracellular aspartic endopeptidase, [Penicillium marneffei ATCC 18224]
  misc_feature (159)..(482): NCBI GI: 54112378 Blast Desc: AF439995_1 pepsin-type protease [Talaromyces emersonii]
  misc_feature (158)..(484): NCBI GI: 255953325 Blast Desc: Pc21g03510 [Penicillium chrysogenum Wisconsin 54-1255] gi|211589126|emb|CAP95248.1| Pc21g03510 [Penicillium chrysogenum Wisconsin 54-1255]
  misc_feature (172)..(480): NCBI GI: 189205927 Blast Desc: aspergillopepsin A precursor [Pyrenophora tritici-repentis Pt-1C-BFP] gi|187975391|gb|EDU42017.1| aspergillopepsin A precursor [Pyrenophora tritici-repentis
  misc_feature (156)..(484): SWISSPROT Homolog: EC 3.4.23.18 Aspergillopepsin I
MHSLTNTLLLLFGLVAIAAASPTQQIEKRGVYKVERVRNPNFVSRNGPRALYKALTKYNMPVPGHLISKIDSQNAELLSKRGVLLKREPRRRKGMGRGGQGQGGQGQGQGGQGGQGQGGQGQGQGGQGTNGGGAAGGAGAAGGNAAQQGATTVNKNGTGIVAAIPQTNDVEYLAPVNIGGQVVNLDFDTGSSDLWVFNTQLSAAQSTGHNLFDPQASKTFQLMNGAQFNISYGDGSGAAGNVGTDVVNLGGAEFKAQAVELAQVVSDSFVQDTSTDGLLGLAFSTINTVQPQPQKTFFDNVMKSLAQPLFTADLKHATAGAYEFGNIDASKFDGALTFVNVDNSNGFWQFPSDKFAVDGGSPQTSTAGAQAIADTGTTLLLTDPAVATAYYAKVQGAEDSQQEGGFVVPCNAKLPDLQLAVGNSMATVKGTDLNFAPVDATNTTCFGGLQGTTSSIQIYGDIFFKSNFVVFNGGNNTLGFASHSSA

SEQ ID NO: 2560 - DNA, 1897 bp, Muscodor strobelii
  misc_feature: SGI EST ID NO. CUFF.6394.0
  misc_feature: Variant of the nucleotide sequence at SEQ ID NO 2558
aagcttttcgtttctagtcttcacatctcagactggtctcttcctcacatttccttattttttctattcttcttggcatcaccgttgccagatttcatttctcgaattcggcatcgtcgacccttttcacattctcttctcctccttcctttgagacagcatctagctacctggcgtagtatctttcttcaatttttaacgtcgttttctggtagttgtagtaacgatgcattccctaaccaatactcttttgttgctattcgggcttgtagcgattgcagcagcttcgccgacccagcaaatcgagaagcgtggtgtctacaaagtagaacgcgtgagaaacccgaacttcgtatcgcgaaatgggccccgggctttatacaaggcattgacgaaatataatatgccagtaccgggacatttgatcagcaagatcgatagccaaaatgcggagcttctttcaaagcgcggggttctcttgaagcgtgagcctagaaggcgcaagggcatgggcagaggtggtcaaggccaaggtggtcaaggtcagggtcaaggtggtcaaggtggccaaggtcaaggtggtcaaggtcaaggtcaaggtggtcaaggtacgaatggtggtggtgccgccggaggtgcgggagctgccggaggcaatgcagcacaacagggcgctaccactgtgaacaagaatgggacaggaattgtagccgccataccgcaaactaatgatgtcgagtacctagcgccagtgaacattggcggacaagtggttaacctcgacttcgacacagggtcttcagatctctgggttttcaacacgcaactcagtgctgctcagtccaccggccacaatctctttgatccccaagcttcgaaaacattccagctcatgaacggtgctcaattcaacatctcgtatggtgatgggtcgggcgctgctggaaatgttgggactgatgttgttaacctcggcggtgccgagttcaaggcacaggctgttgagttggcccaagtagtatccgactcttttgttcaggatacttcgaccgatggattgttgggtcttgcattcagtactatcaatactgttcagccccagccgcaaaaaacgttcttcgacaatgtcatgaaatctcttgcgcagccattattcacagctgatctgaaacacgccacagctggtgcttatgagttcggcaacattgacgcatctaagttcgatggagctctcactttcgtaaacgtcgacaatagcaatgggttttggcagtttccaagcgataaatttgcggtcgatggtggcagcccacagacatccacagcgggtgctcaggccattgccgatactggtactacccttcttctgaccgaccctgccgttgccacagcctattatgcaaaggtacaaggtgccgaggatagccaacaagagggcgggttcgtggtcccttgcaatgctaagctgcccgatctccagctcgcagttggtaactcgatggcaaccgttaagggcacggatctcaacttcgcgcccgttgatgcgaccaacacaacttgcttcggtggactccaaggtacaacttctagcatccaaatctacggcgatatattcttcaagagtaacttcgttgtcttcaatggcggaaataacactcttgggttcgcctctcattcatctgcatgaacgaattaaagagcgagacctcgagccattgtctgcaccgaagcgtgacatgacagcaggatcagcgggtatacaaaaccagacaataggataagacatagatttcaacggaacgtctgactgtacatatctgttatcaatatctgtataaagaatcaatgctgcgaccaattgagtaatgtagtgtttgaatcttgcgatagatgtccc

SEQ ID NO: 2561 - DNA, 1191 bp, Muscodor strobelii
  misc_feature: SGI cDNA ID NO. 560489
  misc_feature: Encodes the peptide sequence at SEQ ID NO 2562
atgagcacgaagggtgcgaagccctcgatgatcgtcctggatgactatctagacatcgccggtcagcattttgagcacataccgagctccgagatttctgtcgatgttctcaatgatgcgctcccgtcatttagcggtgcaacttcattgcagcgacagtcaattgtagaaagacttcggccctatacgatcatctcatcaatgcgcgagcgtactccgttcccagccgagcttctgcgcgcacttccgaatctccgtttcttacttgcaacaggaacccagtttgagacattcgatctagatgcagcgaaggacctgggtattcaagtagtcgctgctcctggccgtggccgcactgatgggaaggttgcgtcgtttgcgggcagacctgttcggccaaaagttgatatccggcgcggcagtggtcacccgacagtaagcgatccaatctgccacacacaacatacatggtctttaattctggctcttgcacgtaatgttgctttcgacgatgcagcaatgaaggacccgacacgcaaggctgcttggcaatcccggctagcggtaggcttgtcaggtgccacactcggtgtcatgggtatggggcggctcggcgctgcagtcgcacggattggtgctctcgcatttgggatgcgtgtaatttgctggagtgcaaacttgacacaagagcgtgcggatgccaaggcaattgaattcggtcttccagctcgaggtggtgatggtacatatccgctcagcgctgatgaaccgacgttcaaagtcgtgagcaaggaagagatgtttcgagagtctgacgttctgagtctacactacgtgcttagcgagcgatcaagaggcattgttggcaaagaagaattggcaattatgaaggcttccgcactacttataaacacgtctagggggccgctcattgacgataatgctctgtacgaaacacttctcaaaggtgcgatccgcggtgcagcacttgatgttttcgacgtggagcctctccccgcctcgagccgctggaggtcaacagaatggggaactgaagagaagagcagtctgattattagccctcatatgggctacgtcgaagagggcatcatgcacacatggtatgaagagacggctgagaatcttgaaaggtggttacgaggcgatgagcttttacatcgattggtataa

SEQ ID NO: 2562 - protein, 396 aa, Muscodor strobelii
  misc_feature: SGI Peptide ID NO. 560489
  misc_feature (27)..(396): Pfam Id: PF00389 Pfam Desc: D-isomer specific 2-hydroxyacid dehydrogenase, catalytic domain
  misc_feature (157)..(364): Pfam Id: PF02826 Pfam Desc: D-isomer specific 2-hydroxyacid dehydrogenase, NAD binding domain
  misc_feature (49)..(396): Pfam Id: PF00389 Pfam Desc: D-isomer specific 2-hydroxyacid dehydrogenase, catalytic domain
  misc_feature (10)..(396): NCBI GI: 189201752 Blast Desc: glycerate dehydrogenase [Pyrenophora tritici-repentis Pt-1C-BFP] gi|187984311|gb|EDU49799.1| glycerate dehydrogenase [Pyrenophora tritici-repentis Pt-1C-BFP]
  misc_feature (10)..(392): NCBI GI: 256727994 Blast Desc: NECHADRAFT_6160 [Nectria haematococca mpVI 77-13-4]
  misc_feature (10)..(393): NCBI GI: 169596534 Blast Desc: SNOG_01032 [Phaeosphaeria nodorum SN15] gi|160701334|gb|EAT92527.2| SNOG_01032 [Phaeosphaeria nodorum SN15]
  misc_feature (9)..(396): NCBI GI: 225559834 Blast Desc: D-isomer specific 2-hydroxyacid dehydrogenase [Ajellomyces capsulatus G186AR]
  misc_feature (12)..(396): NCBI GI: 116182680 Blast Desc: CHGG_01968 [Chaetomium globosum CBS 148.51] gi|88186265|gb|EAQ93733.1| CHGG_01968 [Chaetomium globosum CBS 148.51]
  misc_feature (9)..(395): NCBI GI: 154287430 Blast Desc: conserved [Ajellomyces capsulatus NAm1] gi|150408151|gb|EDN03692.1| conserved [Ajellomyces capsulatus NAm1]
  misc_feature (10)..(395): NCBI GI: 154291436 Blast Desc: BC1G_15179 [Botryotinia fuckeliana B05.10] gi|150846792|gb|EDN21985.1| BC1G_15179 [Botryotinia fuckeliana B05.10]
  misc_feature (12)..(395): NCBI GI: 256734810 Blast Desc: NECHADRAFT_75447 [Nectria haematococca mpVI 77-13-4]
  misc_feature (12)..(391): NCBI GI: 164428663 Blast Desc: NCU11195 [Neurospora crassa OR74A] gi|157072233|gb|EDO65386.1| conserved [Neurospora crassa OR74A]
  misc_feature (10)..(395): NCBI GI: 156054220 Blast Desc: SS1G_05958 [Sclerotinia sclerotiorum 1980] gi|154703738|gb|EDO03477.1| SS1G_05958 [Sclerotinia sclerotiorum 1980]
  misc_feature (47)..(389): SWISSPROT Homolog: EC 1.1.1.95 Phosphoglycerate dehydrogenase
MSTKGAKPSMIVLDDYLDIAGQHFEHIPSSEISVDVLNDALPSFSGATSLQRQSIVERLRPYTIISSMRERTPFPAELLRALPNLRFLLATGTQFETFDLDAAKDLGIQVVAAPGRGRTDGKVASFAGRPVRPKVDIRRGSGHPTVSDPICHTQHTWSLILALARNVAFDDAAMKDPTRKAAWQSRLAVGLSGATLGVMGMGRLGAAVARIGALAFGMRVICWSANLTQERADAKAIEFGLPARGGDGTYPLSADEPTFKVVSKEEMFRESDVLSLHYVLSERSRGIVGKEELAIMKASALLINTSRGPLIDDNALYETLLKGAIRGAALDVFDVEPLPASSRWRSTEWGTEEKSSLIISPHMGYVEEGIMHTWYEETAENLERWLRGDELLHRLV

SEQ ID NO: 2563 - DNA, 3288 bp, Muscodor strobelii
  misc_feature: SGI EST ID NO. CUFF.6580.0
  misc_feature: Variant of the nucleotide sequence at SEQ ID NO 2561
tcaacttcgatttgtctatgccctagttgtgtcgtctgacaaggcctaaactgtcgcaacaaagatggaaacataacatacagctaaatttgaatcacaaagaagcttaatttgtttgtagtggctttcaacatattatctccctaaatatttacgcctaacgatgcaacgaagtcgagcgtacatgattgcgtcgtactaaagctaggaaacacaacccttaatggcaaggctcagcttgaaagtaactcatagagatatatctcgttcgctatgagtacgctccatcaaagcgtggtctgcgatactcacggctcatgcaaggcaggtttgtctggcccagcttagcatttgccgtcatgttgcactcagctttgcccctgctttccatagtagaaaaagacagctggagtttccaatccaccacgtaataccgcgaagctggctccaagttggatgatcaaccaatacatagataacaccatatgcgagacgcgcaatagtgtaggtaacgcccgcgcgattgatgaggtgggtttcgacgccggcgaaagtcgcgaaaccaagggctgcgacgaagagcgtaaagccctcaactgcgttagcagatgcagactctgtgcgtcgcatcatgccaagctgcctttgggtgatttttcccgatttgactgctgcttcgccgtatttgttcagatcttctcttggcgaggcattgtgatcgatgccgtaaaattgtttcatggtccgcgacgataggatcccataagcgtaaaaccactgccaagctaggaaagctggagcgtagttcggaagtgggtggccagcagtcgcccccaagccaagggctgttgctaaagatgccatgatagcccaatttgcactggcgacagcgagtttcaacaaagctaagatgcaacgttttcgttactttccatgacctaatacctgtggccgcgagccttatgtatcgtgcgatcgtacttgcaacggtgcaagcggaaggggcggaatgagctgacaaggagtggccgagaagattcttccgttaccaggctaatcgaacaacaaagcttacatcatcacaatttatcgccaagccaatttactgaaggacacgtctatgtgtagacgaaagcgccttataatttacacctgctcgatatgttcactcaatgtagttcaagacgttcaatgttggcggggctgatttctgcagcggataaatttgcgcgaagtcgccgacgctgtcgtaatctacctatgtatcccgctttgctaggaaatgcggtctaaacccatcgtgtctgtctatatgtcgactaaagaaactcgcccaccctcggagtttggactggaatgtggatatgtcaacctggtaagttcggcgcgcctccgaatcactattctacagcaccgcactcgttactcggatggtccgagactctatgagtaggacagcgcgtacgaccgtgaacacggaacagtgttcgaaagcatctgctcattcaaataaatgaagcacatccagcattatgtacgcccgtttgaattgtctacgtgctacacttcgagcgcgagtttcagttgtgcctccgctttcacgaacatggaagacgcgtatgagcacgaagggtgcgaagccctcgatgatcgtcctggatgactatctagacatcgccggtcagcattttgagcacataccgagctccgagatttctgtcgatgttctcaatgatgcgctcccgtcatttagcggtgcaacttcattgcagcgacagtcaattgtagaaagacttcggccctatacgatcatctcatcaatgcgcgagcgtactccgttcccagccgagcttctgcgcgcacttccgaatctccgtttcttacttgcaacaggaacccagtttgagacattcgatctagatgcagcgaaggacctgggtattcaagtagtcgctgctcctggccgtggccgcactgatgggaaggttgcgtcgtttgcgggcagacctgttcggccaaaagttgatatccggcgcggcagtggtcacccgacaggtatgtgtagaaagaccccgcgacagttttattttaatcgtattcctaaggtatggtactgatttctttatagtaagcgatccaatctgccacgtatgggaaacaagccctttgtcttgaaaacccgcggccccatgaagtcgtgaaaattaactaactcatcacctttccggctaccagacacaacatacatggtctttaattctggctcttgcacgtaatgttgctttcgacgatgcagcaatgaaggacccgacacgcaaggctgcttggcaatcccggctagcggtaggcttgtcaggtgccacactcggtgtcatgggtatggggcggctcggcgctgcagtcgcacggattggtgctctcgcatttgggatgcgtgtaatttgctggagtgcaaacttgacacaagagcgtgcggatgccaaggcaattgaattcggtcttccagctcgaggtggtgatggtacatatccgctcagcgctgatgaaccgacgttcaaagtcgtgagcaaggaagagatgtttcgagagtctgacgttctgagtctacactacgtgcttagcgagcgatcaagaggcattgttggcaaagaagaattggcaattatgaaggcttccgcactacttataaacacgtctagggggccgctcattgacgataatgctctgtacgaaacacttctcaaaggtgcgatccgcggtgcagcacttgatgttttcgacgtggagcctctccccgcctcgagccgctggaggtcaacagaatggggaactgaagagaagagcagtctgattattagccctcatatgggctacgtcgaagagggcatcatgcacacatggtatgaagagacggctgagaatcttgaaaggtggttacgaggcgatgagcttttacatcgattggtataaaagagaaggaaatactctgccacgttccttgcctttacattactttgtcctaacataccccgccccattctagatagtgatcgaatactgaagtctgaatcagaatagtatggcttcctagcgcagtaagagaatacgatctcttatcgggattttgttcattccacattatgtactggtgttgtcttctaggacgatttgccccaagcaggattctgctactcgttatatcagaaccgagcactcgcaatcttctcaatcaacataagtgatacgtagccaatacaattcagcaagtcaagaaaaggccaggtagac

SEQ ID NO: 2564 - DNA, 507 bp, Muscodor strobelii
  misc_feature: SGI cDNA ID NO. 560490
  misc_feature: Reduced expression when VOC is produced
  misc_feature: Encodes the peptide sequence at SEQ ID NO 2565
atggcatctttagcaacagcccttggcttgggggcgactgctggccacccacttccgaactacgctccagctttcctagcttggcagtggttttacgcttatgggatcctatcgtcgcggaccatgaaacaattttacggcatcgatcacaatgcctcgccaagagaagatctgaacaaatacggcgaagcagcagtcaaatcgggaaaaatcacccaaaggcagcttggcatgatgcgacgcacagagtctgcatctgctaacgcagttgagggctttacgctcttcgtcgcagcccttggtttcgcgactttcgccggcgtcgaaacccacctcatcaatcgcgcgggcgttacctacactattgcgcgtctcgcatatggtgttatctatgtattggttgatcatccaacttggagccagcttcgcggtattacgtggtggattggaaactccagctgtctttttctactatggaaagcaggggcaaagctgagtgcaacatga

SEQ ID NO: 2565 - protein, 168 aa, Muscodor strobelii
  misc_feature: SGI Peptide ID NO. 560490
  misc_feature (1)..(167): NCBI GI: 171679181 Blast Desc: protein product [Podospora anserina] gi|170937662|emb|CAP62320.1| protein product [Podospora anserina]
  misc_feature (1)..(166): NCBI GI: 238488307 Blast Desc: conserved [Aspergillus flavus NRRL3357] gi|220697779|gb|EED54119.1| conserved [Aspergillus flavus NRRL3357]
  misc_feature (1)..(145): NCBI GI: 145245194 Blast Desc: An11g09050 [Aspergillus niger] gi|134079561|emb|CAK97037.1| protein product [Aspergillus niger]
  misc_feature (1)..(165): NCBI GI: 255939452 Blast Desc: Pc16g00760 [Penicillium chrysogenum Wisconsin 54-1255] gi|211585118|emb|CAP92746.1| Pc16g00760 [Penicillium chrysogenum Wisconsin 54-1255]
  misc_feature (3)..(165): NCBI GI: 115449827 Blast Desc: conserved [Aspergillus terreus NIH2624] gi|114187655|gb|EAU29355.1| conserved [Aspergillus terreus NIH2624]
  misc_feature (1)..(165): NCBI GI: 169786487 Blast Desc: [Aspergillus oryzae RIB40] gi|238507507|ref|XP_002384955.1| conserved [Aspergillus flavus NRRL3357] gi|83776452|dbj|BAE66571.1| protein product oryzae]
  misc_feature (15)..(126): NCBI GI: 67524197 Blast Desc: AN2556.2 [Aspergillus nidulans FGSC A4] gi|40745505|gb|EAA64661.1| [Aspergillus nidulans FGSC A4] gi|259487989|tpe|CBF87092.1| TPA: conserved [Aspergillus nidulans
  misc_feature (4)..(166): NCBI GI: 154300203 Blast Desc: BC1G_10477 [Botryotinia fuckeliana B05.10] gi|150856766|gb|EDN31958.1| BC1G_10477 [Botryotinia fuckeliana B05.10]
  misc_feature (1)..(99): NCBI GI: 145235803 Blast Desc: An03g06750 [Aspergillus niger] gi|134058239|emb|CAK38431.1| protein product [Aspergillus niger]
  misc_feature (4)..(166): NCBI GI: 156048324 Blast Desc: SS1G_08893 [Sclerotinia sclerotiorum 1980] gi|154693290|gb|EDN93028.1| SS1G_08893 [Sclerotinia sclerotiorum 1980]
  misc_feature: Useful for introducing or modulating the production of volatile compounds
MASLATALGLGATAGHPLPNYAPAFLAWQWFYAYGILSSRTMKQFYGIDHNASPREDLNKYGEAAVKSGKITQRQLGMMRRTESASANAVEGFTLFVAALGFATFAGVETHLINRAGVTYTIARLAYGVIYVLVDHPTWSQLRGITWWIGNSSCLFLLWKAGAKLSAT

SEQ ID NO: 2566 - DNA, 2996 bp, Muscodor strobelii
  misc_feature: SGI EST ID NO. CUFF.6579.1
  misc_feature: Variant of the nucleotide sequence at SEQ ID NO 2564
ggaaaagaagacctccgagactcaccttcgacgtagcccatatgagggctaataatcagactgctcttctcttcagttccccattctgttgacctccagcggctcgaggcggggagaggctccacgtcgaaaacatcaagtgctgcaccgcggatcgcacctttgagaagtgtttcgtacagagcattatcgtcaatgagcggccccctagacgtgtttataagtagtgcggaagccttcataattgccaattcttctttgccaacaatgcctcttgatcgctcgctaagcacgtagtgtagactcagaacgtcagactctcgaaacatctcttccttgctcacgactttgaacgtcggttcatcagcgctgagcggatatgtaccatcaccacctcgagctggaagaccgaattcaattgccttggcatccgcacgctcttgtgtcaagtttgcactccagcaaattacacgcatcccaaatgcgagagcaccaatccgtgcgactgcagcgccgagccgccccatacccatgacaccgagtgtggcacctgacaagcctaccgctagccgggattgccaagcagccttgcgtgtcgggtccttcattgctgcatcgtcgaaagcaacattacgtgcaagagccagaattaaagaccatgtatgttgtgtctggtagccggaaaggtgatgagttagttaattttcacgacttcatggggccgcgggttttcaagacaaagggcttgtttcccatacgtggcagattggatcgcttactataaagaaatcagtaccataccttaggaatacgattaaaataaaactgtcgcggggtctttctacacatacctgtcgggtgaccactgccgcgccggatatcaacttttggccgaacaggtctgcccgcaaacgacgcaaccttcccatcagtgcggccacggccaggagcagcgactacttgaatacccaggtccttcgctgcatctagatcgaatgtctcaaactgggttcctgttgcaagtaagaaacggagattcggaagtgcgcgcagaagctcggctgggaacggagtacgctcgcgcattgatgagatgatcgtatagggccgaagtctttctacaattgactgtcgctgcaatgaagttgcaccgctaaatgacgggagcgcatcattgagaacatcgacagaaatctcggagctcggtatgtgctcaaaatgctgaccggcgatgtctagatagtcatccaggacgatcatcgagggcttcgcacccttcgtgctcatacgcgtcttccatgttcgtgaaagcggaggcacaactgaaactcgcgctcgaagtgtagcacgtagacaattcaaacgggcgtacataatgctggatgtgcttcatttatttgaatgagcagatgctttcgaacactgttccgtgttcacggtcgtacgcgctgtcctactcatagagtctcggaccatccgagtaacgagtgcggtgctgtagaatagtgattcggaggcgcgccgaacttaccaggttgacatatccacattccagtccaaactccgagggtgggcgagtttctttagtcgacatatagacagacacgatgggtttagaccgcatttcctgagttaaataacgcttcaggccgagcaagactttatatcgcagcaataacagacattgtgtctggtggtgtgtcaaaaggtggcctacctagcaaagcgggatacataggtagattacgacagcgtcggcgacttcgcgcaaatttatccgctgcagaaatcagccccgccaacattgaacgtcttgaactacattgagtgaacatatcgagcaggtgtaaattataaggcgctttcgtctacacatagacgtgtccttcagtaaattggcttggcgataaattgtgatgatgtaagctttgttgttcgattagcctggtaacggaagaatcttctcggccactccttgtcagctcattccgccccttccgcttgcaccgttgcaagtacgatcgcacgatacataaggctcgcggccacaggtattaggtcatggaaagtaacgaaaacgttgcatcttagctttgttgaaactcgctgtcgccagtgcaaattgggctatcatggcatctttagcaacagcccttggcttgggggcgactgctggccacccacttccgaactacgctccagctttcctagcttggcagtggttttacgcttatgggatcctatcgtcgcggaccatgaaacaattttacggcatcgatcacaatgcctcgccaagagaagatctgaacaaatacggcgaagcagcagtcaaatcgggaaaaatcacccaaaggcagcttggcatgatgcgacgcacagagtctgcatctgctaacgcagttgagggctttacgctcttcgtcgcagcccttggtttcgcgactttcgccggcgtcgaaacccacctcatcaatcgcgcgggcgttacctacactattgcgcgtctcgcatatggtgttatctatgtattggttgatcatccaacttggagccagcttcgcggtattacgtggtggattggaaactccagctgtctttttctactatggaaagcaggggcaaagctgagtgcaacatgacggcaaatgctaagctgggccagacaaacctgccttgcatgagccgtgagtatcgcagaccacgctttgatggagcgtactcatagcgaacgagatatatctctatgagttactttcaagctgagccttgccattaagggttgtgtttcctagctttagtacgacgcaatcatgtacgctcgacttcgttgcatcgttaggcgtaaatatttagggagataatatgttgaaagccactacaaacaaattaagcttctttgtgattcaaatttagctgtatgttatgtttccatctttgttgcgacagtttaggccttgtcagacgacacaactagggcatagacaaatcgaagttga

SEQ ID NO: 2567 - DNA, 2319 bp, Muscodor strobelii
  misc_feature: SGI cDNA ID NO. 560491
  misc_feature: Encodes the peptide sequence at SEQ ID NO 2568
atggagaataacgcattcaacagagagtgtgcaacaatcaatgaaaagtatggccctcggactattacaagttcatcaactgcgcgccagcatatcttgacgctggactcaagcgtttcacagctcaaagttcaggtgccgacggaatacccagacagcgcagagtgcgtgaaagtcattgatgtccgaaagcataacgggcgaggcgatacgcagaaggacaaggaagaattcaattcggctctgaattatacattccgaactggtggtacttatgttagtgaggcaattagtgttttctatcaacgacgaggattaagttcatatcaacagcccgttcaagaatcacatagctctacaacaggcacaattcgtggcgccttacccctaaggcccttccaaggaaaccagccacgagatccttcgccgaagaaacgtgtcgtttccgagtcctcgacacaatctccttcaaagaagacaagggaaatggcaccagagcctccaagcgaagaagaggccatgtattattatcatggcctagtcggaggacgactagtcgcaagaacaggtacgaacacatttgtattgcgaagcgacggcgaatggctacacaacaaagtgtatatggctctgggtcggaatggagcagaccgtcaaatgataggtcagatacgaccaatactggagcagattgctgctgcgctggagagtagcagaatgccttgggtctggtttactgcaatccggatcggttacgagatcgactgccaaaaactggacgcaatgccacctgtgctgctggtgaacgtggaccccggaaagattccctttgagcaggcttatcttgtagcttggaaagtgaagagaattctcttgtctaaggatgtcccaatcgaggtagaaatccgggagtatatgttgcagcgccatgcagcagtacgagcaatcgaagaccacatcatgtggccatcagtggaccctgtaactggcggaatatacgacgaaggtgatcaagaaaaacaaaaaggcaacgctatagcccaacctctgttatcaaacagcggttggtgcgtgcactatcgacatggatatggaacggtcggactattcctcacactatctggcaacacaagtaagccactgggcctaacagcggcacacgtgttgaaagaggaagacgggacatatcaaagcgttaagaaccaccagccagtgaaggtcatttatcagggaaacagcaaagctgtcagcatgatactgggcaagctacaggaagtatccgaagacatcgctgcgaacccagaccttgtcgggcctgttttggacgaagcccagacgaatcaagatcttgccgaacctgcttcggacgaagcccaggagaacccaaaccctgtcaagactgctgcgcacgacgctcaggtttatattgacaagctgcgtaaactcattggggcaaatcaagagctgagcaacagattggtcggtaaagtggcctgggcccaaatctatgagaaaactaacgagggtgtgcttaacgactgggcgcttcttgaccttgactccgacaagttcaaaaacgctagcaacaaggtttttgtcgacgtaaacgatggattttgtctgttcaacccagccttcaataagagcgctaacatggagttttttgtgccgaatcttactggacaggttagaaacgaagcaagactgatgcgcgatcaatgggtcagagacaatgggttcattaaattcaagtcaagccatatctgtgtcgctgaaaacatgggcattgataaaaacttcttctctcctacgagagtgttcaagcaaggtgtgacaactggccttacaattggcctgacaaacggtgtcgaagctgtaatgaagaaagcaagcggtgataaggacgtcctcgtgtggagccttcttgtcgtccctttcccaaataccgcgccagaggaagtgcatttggtcaatggggacacgaagaatcttcgtgccttttctgccaaaggcgactcgggatctgccgtcgtctccatcaagggtgaagtactaggtctggttgtcagtggagggcagatgcaggatcgcttcaagtggcggggcaagttctggaaggaaactgagcagcgtgagccagtctcttacaaggcaggcatggatcccaaggatgtcgaggtcaccaggccatttcctgaagtccgaaagttcaaggatagcaatgaactaatggatgtcacgttcgttgagccaatcgacacgatttgtcgagacatccagagcttcacaaaccagaaggtcagcttctactcaaactag

SEQ ID NO: 2568 - protein, 772 aa, Muscodor strobelii
  misc_feature: SGI Peptide ID NO. 560491
MENNAFNRECATINEKYGPRTITSSSTARQHILTLDSSVSQLKVQVPTEYPDSAECVKVIDVRKHNGRGDTQKDKEEFNSALNYTFRTGGTYVSEAISVFYQRRGLSSYQQPVQESHSSTTGTIRGALPLRPFQGNQPRDPSPKKRVVSESSTQSPSKKTREMAPEPPSEEEAMYYYHGLVGGRLVARTGTNTFVLRSDGEWLHNKVYMALGRNGADRQMIGQIRPILEQIAAALESSRMPWVWFTAIRIGYEIDCQKLDAMPPVLLVNVDPGKIPFEQAYLVAWKVKRILLSKDVPIEVEIREYMLQRHAAVRAIEDHIMWPSVDPVTGGIYDEGDQEKQKGNAIAQPLLSNSGWCVHYRHGYGTVGLFLTLSGNTSKPLGLTAAHVLKEEDGTYQSVKNHQPVKVIYQGNSKAVSMILGKLQEVSEDIAANPDLVGPVLDEAQTNQDLAEPASDEAQENPNPVKTAAHDAQVYIDKLRKLIGANQELSNRLVGKVAWAQIYEKTNEGVLNDWALLDLDSDKFKNASNKVFVDVNDGFCLFNPAFNKSANMEFFVPNLTGQVRNEARLMRDQWVRDNGFIKFKSSHICVAENMGIDKNFFSPTRVFKQGVTTGLTIGLTNGVEAVMKKASGDKDVLVWSLLVVPFPNTAPEEVHLVNGDTKNLRAFSAKGDSGSAVVSIKGEVLGLVVSGGQMQDRFKWRGKFWKETEQREPVSYKAGMDPKDVEVTRPFPEVRKFKDSNELMDVTFVEPIDTICRDIQSFTNQKVSFYSN

SEQ ID NO: 2569 - DNA, 1845 bp, Muscodor strobelii
  misc_feature: SGI cDNA ID NO. 560492
  misc_feature: Encodes the peptide sequence at SEQ ID NO 2570
atggacgctttgggttggcctcttcagacaatttaccggatcaaagcgggaaacgacgaatgtcttaatactcagttctacgtaaacgattctccatacaagaactacttctattcagactgtcatgcggctactcaggttgtgactacctctaattttcccaccgatggcgtaggaaatgcccgggtcgttgtggcatggccggccggcaacagcggccttgtcgcgttttttggtggcaacgtcgacgaaggcaatgagtctgttgggattgagctggttaacgcaacaacagaggacgttctaactcccatttatgaccctgcctcgagtggacagaacgcaacagttgggatcagtacggttattagcttcaacacatctgcgagcctgaatttcgcccatttgggcagtattcggagcatcagagacgcgcctggaactgttcaccctgagcttcagatcatgaattacacccaaagcgcagatggcaatgtttccatctcgcgattgtggttagacaatgttactacgaccgagttgagcttttcgcccgtaacatccagtagttcaatatccatcgtgaacggggacgggactaacgtaacagtgactttcgacgctggtatgtacgtaatgaacgccacttacaactatcctcaattagagcaattgacccttgagagtcttttgacggacgaggcgcagggcctgatcacaacacaaccagaccaggttgattcattgcagtttctatcttacagcacgaaacttctcgctggaggttggcattatctgacttacttcggtcgcgattcgatgatttccgctcttctcctagagccaattcttagccaggggaatggaagcgccatggaaggcgtacttgcagctgtagttgagcgtcttaattataccgatggacgtgtcgctcacgaagaggtcatcggtgactatgcaacatggactaatctccagaacgggctcattagtactgcgccgtcttgcacctaccaaatgattgatacggacttctacctaccgatccttatggtcaaatattttgtcgaaagtagtacaggatctaaacgcgtggccgacttctttgcgaaacaagcttctttctatcctacagaagctaatctaacatactacgacaaggcattagctaatgcggaaaggattatggatctagctgcaccatttgctgcaaacccgactgtcgaaaacttgatacatcttcaaaacggccagtccgtcggacaatggcgcgatagtgatattgggctcggtggcggtcgtattccttttgacgtgaataccgcactggttccggctgctctaagagctattggaaagctagcccgcgcgggcgtgtatagaaataacacagattgggagactctggcagacactcatgccaccgtgtgggagagtgccactctcccgctgttcgaagtcatcattccaaaggacgaagcggccacgctgattcaagactacatcgacgagacttccttcccggggccaaatcaggttgacagtttagacagccaagtagggttctatggaattgcactcaaagacgactcagggtcagttattaagacaatgcattcagatgctgccttccgattgcttctattgaacgataccaacgatgcgcagtcgaccaagttcattaatcacacagcaaaatcagtactaaatctcttcccggctggtctgttgactgatgcaggcatgcttatctcgaatccggcgtatggtgacaccccagactacgcttcaacttggacgacaactacgtaccatgtggggtttccaattggcgatgatggctag

SEQ ID NO: 2570 - protein, 614 aa, Muscodor strobelii
  misc_feature: SGI Peptide ID NO. 560492
  misc_feature (28)..(605): NCBI GI: 115400275 Blast Desc: conserved [Aspergillus terreus NIH2624] gi|114191392|gb|EAU33092.1| conserved [Aspergillus terreus NIH2624]
  misc_feature (24)..(605): NCBI GI: 242784734 Blast Desc: TSTA_032710 [Talaromyces stipitatus ATCC 10500] gi|218720599|gb|EED20018.1| TSTA_032710 [Talaromyces stipitatus ATCC 10500]
  misc_feature (25)..(605): NCBI GI: 261354777 Blast Desc: glycogen debranching enzyme [Verticillium albo-atrum VaMs.102]
  misc_feature (26)..(605): NCBI GI: 212527824 Blast Desc: PMAA_024250 [Penicillium marneffei ATCC 18224] gi|210073467|gb|EEA27554.1| PMAA_024250 [Penicillium marneffei ATCC 18224]
  misc_feature (28)..(605): NCBI GI: 70996508 Blast Desc: AFUA_1G16430 [Aspergillus fumigatus Af293] gi|66850644|gb|EAL90971.1| AFUA_1G16430 [Aspergillus fumigatus Af293]
  misc_feature (28)..(605): NCBI GI: 119494449 Blast Desc: NFIA_009010 [Neosartorya fischeri NRRL 181] gi|119412282|gb|EAW22223.1| conserved [Neosartorya fischeri NRRL 181]
  misc_feature (8)..(605): NCBI GI: 46113532 Blast Desc: FG02933.1 [Gibberella zeae PH-1]
  misc_feature (30)..(605): NCBI GI: 169623136 Blast Desc: SNOG_14798 [Phaeosphaeria nodorum SN15] gi|160704922|gb|EAT77990.2| SNOG_14798 [Phaeosphaeria nodorum SN15]
  misc_feature (26)..(605): NCBI GI: 189188374 Blast Desc: PTRG_00193 [Pyrenophora tritici-repentis Pt-1C-BFP] gi|187972132|gb|EDU39631.1| PTRG_00193 [Pyrenophora tritici-repentis Pt-1C-BFP]
  misc_feature (8)..(605): NCBI GI: 256720236 Blast Desc: NECHADRAFT_56248 [Nectria haematococca mpVI 77-13-4]
MDALGWPLQTIYRIKAGNDECLNTQFYVNDSPYKNYFYSDCHAATQVVTTSNFPTDGVGNARVVVAWPAGNSGLVAFFGGNVDEGNESVGIELVNATTEDVLTPIYDPASSGQNATVGISTVISFNTSASLNFAHLGSIRSIRDAPGTVHPELQIMNYTQSADGNVSISRLWLDNVTTTELSFSPVTSSSSISIVNGDGTNVTVTFDAGMYVMNATYNYPQLEQLTLESLLTDEAQGLITTQPDQVDSLQFLSYSTKLLAGGWHYLTYFGRDSMISALLLEPILSQGNGSAMEGVLAAVVERLNYTDGRVAHEEVIGDYATWTNLQNGLISTAPSCTYQMIDTDFYLPILMVKYFVESSTGSKRVADFFAKQASFYPTEANLTYYDKALANAERIMDLAAPFAANPTVENLIHLQNGQSVGQWRDSDIGLGGGRIPFDVNTALVPAALRAIGKLARAGVYRNNTDWETLADTHATVWESATLPLFEVIIPKDEAATLIQDYIDETSFPGPNQVDSLDSQVGFYGIALKDDSGSVIKTMHSDAAFRLLLLNDTNDAQSTKFINHTAKSVLNLFPAGLLTDAGMLISNPAYGDTPDYASTWTTTTYHVGFPIGDDG

SEQ ID NO: 2571 - DNA, 1973 bp, Muscodor strobelii
  misc_feature: SGI EST ID NO. CUFF.6418.0
  misc_feature: Variant of the nucleotide sequence at SEQ ID NO 2569
caacctctactatgtttagacacacagggacgctaactactctactagtgactatgcaacatggactaatctccagaacgggctcattagtactgcgccgtcttgcacctaccaaatgattgatacggacttctacctaccgatccttatggtcaaatattttgtcgaaagtagtacaggatctaaacgcgtggccgacttctttgcgaaacaagcttctttctatcctacagaagctaatctaacatactacgacaaggcattagctaatgcggaaaggattatggatctagctgcaccatttgctgcaaacccgactgtcgaaaacttgatacatcttcaaaacggccagtccgtcggacaatggcgcgatagtgatattgggctcggtggcggtcgtattccttttgacgtgaataccgcactggttccggctgctctaagagctattggaaagctagcccgcgcgggcgtgtatagaaataacacagattgggagactctggcagacactcatgccaccgtgtgggagagtgccactctcccgctgttcgaagtcatcattccaaaggacgaagcggccacgctgattcaagactacatcgacgagacttccttcccggggccaaatcaggttgacagtttagacagccaagtagggttctatggaattgcactcaaagacgactcagggtcagttattaagacaatgcattcagatgctgccttccgattgcttctattgaacgataccaacgatgcgcagtcgaccaagttcattaatcacacagcaaaatcagtactaaatctcttcccggctggtctgttgactgatgcaggcatgcttatctcgaatccggcgtatggtgacaccccagactacgcttcaacttggacgacaactacgtaccatggtacggtggtgtggggtttccaattggcgatgatggctagaggttttgagcttcaactatcgcgttgcgtggacgccaccgagcaacccgcattctgccaagatgaggtggtattgagcaatgcgaagacagcatacaacaaattgtgggatacaattgaaaacaatgaatcattcctgagtacggagttgtggtcttggacatacagcaacagttcgtttcaagcaaagagctggagcgtggtcgcgccagggcaggagggcgacggaatccagctttggagtctcacatttctcgctgtggtgagaaatgagagcctcagatgacaggacctgttgcattcggagctgcttcccgtggccaaatttcggggtcgtattcggaaagacttgtcctgaatcatgaaataatgacctcagggtaatacgagcttgacagaagctactagcgatcaatcaaaaccaattcgatatcggctctgatgtattgaagacctactcagctctggaaggtaatcgagctatgctgaattgcctcgtggtgcctcgtccggagaattagtgatgtgcctcttttagcatctacgttgtgactcattctgcagaaacgcattcccgatccttataaagctttcaaatgggtgtcttgatgcacgcaacctgcaagtaagtatggcatcatgacacgtttgggaggctgcatgcagacggccgcgtaactaccggagagttcgcttcctcgcttagcattgggcacccatgtggctgaatgatacactcgcctaccaaccgggattgaatacggggcatttcgcatcaggagagaacatgtgaacccaatttggtcgcatagatttaagtaagttgaataattcctgttcagtgtgattagtaaccgatgtacgaaagagttcattcactggtgcatgttacgatgagctactacaggcaatgtttgaataaggcatagatatagtcattcgtttcacacttaatcgtccgcctagtacttattagctgctctaactacttctgaacatttggactacctaaacttttg

SEQ ID NO: 2572 - DNA, 2517 bp, Muscodor strobelii
  misc_feature: SGI cDNA ID NO. 560493
  misc_feature: Encodes the peptide sequence at SEQ ID NO 2573
atgcgttgggtttggtctctggctctgataagcgtcggattcgttacagccgaagatggcatcaacgcctggctacgatacgcccgtctcccctcgaatctcctacgagaagctagtataccgtcaacaattgtagctctcaatgacactaagacgagccctgtgtatgtggctggacaggagatccagaaggcgatctggggaataaccggacgaaatgtcaccgtctctcacaaacataacaacgggtcgtccattctcgtaggcacagtagatgcttatcttgcaggtgggggtagcttcaagacaccagatcttcaagaagatggattttggcttagcaccaaaggcgactctgtccagatcctcggaaagaatgaacgaggcgcgttatacggcgcgttcgagtatctgtcaatgcttgcgcaaggcaatttcacgaaagtggcgtatgcttcaaaccctagtgctacaatccgctgggtgaatcaatgggacaaattggacggcacgattgagaggggatatgcaggtctgtccatcttctttaagaacaaccgaacgcttgacaatacgacacggatcaacgattatggccgtttacttgcatctattggtatcaatggcataatcatcaacaacgtcaatgcagacgctattttgctcaacgatgaaaacatagtagggctagggaaaatagcggacgtcttacggccatggggagtccaagtaggaatatcgctgaactttgcatcaccacagtcgctcggcggtctcccaacattcgatccattggacagtgcggtcattgactggtggcagaacaagacagatcagctatatcagaatgtgcctgatatggccggttacttggtgaaagcgaactccgaggggcagcccggtccactgacatacaatcgtacactagcagagggggcgaatctgttcgcaagatctctgaagtcgcacggcgggattgtgatgtttcgggcctttgtgtatgacagcacaagcctgaatgagagcatttggacagacgaccgagccaacgctgctgtgcagttcttcgatggcctagatagcaagttcgatgacaacgttgtcgtccagatcaagtatggaccgattgacttccaggtccgggagccaccgtcgcctctctttgcacatttacctaatactgctatggcgatcgagttgcaaatcacgcaagagtatctggggcagcaatgtcatctcgtttacctcccgccactatggaaaacgatattagattttgatctgcgtatagacgacaagccgtctgttatcggcaaagacatcttgtcgggccgacgtttcaacaagactctaacaggtttcgccggtgttgtaaatgttgggcaaaacacaacgtggctggggtcacatctcgcaatgtccaatctatatgcatacggacgtctagcatgggatacaacacaatccgaggtctccattctacaagactggattagactgaccttcggccaggatcagaaggttctagacacaatcacccagatgtcaatggagtcctggcctgcctatgaaaattacacaggaaatctaggagagcagactctcacagatatcacgggcccacactacggcccaaacccccaaagtatggataacaacccctggggccaatggacgcgggcggatgcaacaacaattggcatggataggacagtatcgaatgggacagggttctctggtcaatacccgactgccatagctgcgcaattcgagaacatcgagacaacacccgatgatctccttctgtggttccatcatgtgaattatacccatattctcaagaacggaaagaccgtaattcaacacttctacgacgcacactacacgggcgcagaaactgctgcttcatttccagcacaatgggagggacttaaaggtttgattgacgagcagcgttataatgagatgctcttccgacttgagtatcaagctggccacgcgatagtatggcgagactcaatcacgcagttttacaacaacatatccggaataccagacgcagcagaccgagtccggaatcacccctggcgtgttgaagcggagactatgcagtcacaaggctatcgcgtaacagctgtgaacccgtttgaagtcgcaagtgagctacagatcgtgcaaacaactgacaactcgactgccgcctctttgcagactacgctgcactatcctgcggggacgtatgacctggctgttgcatactatgatttatacgaggggaaagccaaatatgagctcttcctcaatgacgaaagactcggaaactgggtcggggatcttgaggatagactcggatacacgctcacccgtggaattgacggacactcggctacgcgggttactttcaaggatgtacaaattggagagggcgatgtagtcagaattgaaactctgcctaatggccgggagaccgcaccgattgactacatcgctgtgctgccgaagggcatcgtggattga

SEQ ID NO: 2573 - protein, 838 aa, Muscodor strobelii
  misc_feature: SGI Peptide ID NO. 560493
  misc_feature (467)..(693): Pfam Id: PF07477 Pfam Desc: Glycosyl hydrolase family 67 C-terminus
  misc_feature (138)..(466): Pfam Id: PF07488 Pfam Desc: Glycosyl hydrolase family 67 middle domain
  misc_feature (23)..(137): Pfam Id: PF03648 Pfam Desc: Glycosyl hydrolase family 67 N-terminus
  misc_feature (7)..(838): NCBI GI: 255956121 Blast Desc: Pc21g18190 [Penicillium chrysogenum Wisconsin 54-1255] gi|211590524|emb|CAP96716.1| Pc21g18190 [Penicillium chrysogenum Wisconsin 54-1255]
  misc_feature (13)..(838): NCBI GI: 40557182 Blast Desc: alpha glucuronidase [Aureobasidium pullulans]
  misc_feature (9)..(838): NCBI GI: 119477063 Blast Desc: alpha-glucuronidase [Neosartorya fischeri NRRL 181] gi|119407388|gb|EAW17337.1| alpha-glucuronidase [Neosartorya fischeri NRRL 181]
  misc_feature (9)..(838): NCBI GI: 159127056 Blast Desc: alpha-glucuronidase [Aspergillus fumigatus A1163]
  misc_feature (9)..(838): NCBI GI: 70996929 Blast Desc: alpha-glucuronidase [Aspergillus fumigatus Af293] gi|66850855|gb|EAL91181.1| alpha-glucuronidase [Aspergillus fumigatus Af293]
  misc_feature (4)..(838): NCBI GI: 115399348 Blast Desc: alpha-glucuronidase precursor [Aspergillus terreus NIH2624] gi|114192146|gb|EAU33846.1| alpha-glucuronidase precursor [Aspergillus terreus NIH2624]
  misc_feature (1)..(838): NCBI GI: 212542305 Blast Desc: alpha-glucuronidase [Penicillium marneffei ATCC 18224] gi|210066214|gb|EEA20307.1| alpha-glucuronidase [Penicillium marneffei ATCC 18224]
  misc_feature (1)..(838): NCBI GI: 238497171 Blast Desc: alpha-glucuronidase [Aspergillus flavus NRRL3357] gi|220694701|gb|EED51045.1| alpha-glucuronidase [Aspergillus flavus NRRL3357]
  misc_feature (6)..(838): NCBI GI: 121714190 Blast Desc: alpha-glucuronidase [Aspergillus clavatus NRRL 1] gi|119402859|gb|EAW13280.1| alpha-glucuronidase [Aspergillus clavatus NRRL 1]
  misc_feature (1)..(838): NCBI GI: 169774311 Blast Desc: [Aspergillus oryzae RIB40] gi|83769486|dbj|BAE59621.1| protein product [Aspergillus oryzae]
  misc_feature (18)..(838): SWISSPROT Homolog: EC 3.2.1.139 Alpha-glucuronidase
MRWVWSLALISVGFVTAEDGINAWLRYARLPSNLLREASIPSTIVALNDTKTSPVYVAGQEIQKAIWGITGRNVTVSHKHNNGSSILVGTVDAYLAGGGSFKTPDLQEDGFWLSTKGDSVQILGKNERGALYGAFEYLSMLAQGNFTKVAYASNPSATIRWVNQWDKLDGTIERGYAGLSIFFKNNRTLDNTTRINDYGRLLASIGINGIIINNVNADAILLNDENIVGLGKIADVLRPWGVQVGISLNFASPQSLGGLPTFDPLDSAVIDWWQNKTDQLYQNVPDMAGYLVKANSEGQPGPLTYNRTLAEGANLFARSLKSHGGIVMFRAFVYDSTSLNESIWTDDRANAAVQFFDGLDSKFDDNVVVQIKYGPIDFQVREPPSPLFAHLPNTAMAIELQITQEYLGQQCHLVYLPPLWKTILDFDLRIDDKPSVIGKDILSGRRFNKTLTGFAGVVNVGQNTTWLGSHLAMSNLYAYGRLAWDTTQSEVSILQDWIRLTFGQDQKVLDTITQMSMESWPAYENYTGNLGEQTLTDITGPHYGPNPQSMDNNPWGQWTRADATTIGMDRTVSNGTGFSGQYPTAIAAQFENIETTPDDLLLWFHHVNYTHILKNGKTVIQHFYDAHYTGAETAASFPAQWEGLKGLIDEQRYNEMLFRLEYQAGHAIVWRDSITQFYNNISGIPDAADRVRNHPWRVEAETMQSQGYRVTAVNPFEVASELQIVQTTDNSTAASLQTTLHYPAGTYDLAVAYYDLYEGKAKYELFLNDERLGNWVGDLEDRLGYTLTRGIDGHSATRVTFKDVQIGEGDVVRIETLPNGRETAPIDYIAVLPKGIVD

SEQ ID NO: 2574 - DNA, 1798 bp, Muscodor strobelii
  misc_feature: SGI EST ID NO. CUFF.6441.0
  misc_feature: Variant of the nucleotide sequence at SEQ ID NO 2572
gtttcgggcctttgtgtatgacagcacaagcctgaatgagagcatttggacagacgaccgagccaacgctgctgtgcagttcttcgatggcctagatagcaagttcgatgacaacgttgtcgtccagatcaagtatggaccgattgacttccaggtccgggagccaccgtcgcctctctttgcacatttacctaatactgctatggcgatcgagttgcaaatcacgcaagagtatctggggcagcaatgtcatctcgtttacctcccgccactatggaaaacgatattagattttgatctgcgtatagacgacaagccgtctgttatcggcaaagacatcttgtcgggccgacgtttcaacaagactctaacaggtttcgccggtgttgtaaatgttgggcaaaacacaacgtggctggggtcacatctcgcaatgtccaatctatatgcatacggacgtctagcatgggatacaacacaatccgaggtctccattctacaagactggattagactgaccttcggccaggatcagaaggttctagacacaatcacccagatgtcaatggagtcctggcctgcctatgaaaattacacaggaaatctaggagagcagactctcacagatatcacgggcccacactacggcccaaacccccaaagtatggataacaacccctggggccaatggacgcgggcggatgcaacaacaattggcatggataggacagtatcgaatgggacagggttctctggtcaatacccgactgccatagctgcgcaattcgagaacatcgagacaacacccgatgatctccttctgtggttccatcatgtgaattatacccatattctcaagaacggaaagaccgtaattcaacacttctacgacgcacactacacgggcgcagaaactgctgcttcatttccagcacaatgggagggacttaaaggtttgattgacgagcagcgttataatgagatgctcttccgacttgagtatcaagctggccacgcgatagtatggcgagactcaatcacgcagttttacaacaacatatccggaataccagacgcagcagaccgagtccggaatcacccctggcgtgttgaagcggagactatgcagtcacaaggctatcgcgtaacagctgtgaacccgtttgaagtcgcaagtgagctacagatcgtgcaaacaactgacaactcgactgccgcctctttgcagactacgctgcactatcctgcggggacgtatgacctggctgttgcatactatgatttatacgaggggaaagccaaatatgagctcttcctcaatgacgaaagactcggaaactgggtcggggatcttgaggatagactcggatacacgctcacccgtggaattgacggacactcggctacgcgggttactttcaaggatgtacaaattggagagggcgatgtagtcagaattgaaactctgcctaatggccgggagaccgcaccgattgactacatcgctgtgctgccgaagggcatcgtggattgagatattcatggatatagcatacatctagtcataatgtacaataatcaattcctgcaggagttactgacatttaaaggagaaagcatcattagtgctgtggggggcttgggccgtgctgtgtggtagacctgatttgctcgttctcattttgacttcatgcgcaacgcttgcctcatcgtttgttccgtgtgatccgaacgttgccagtgatgaacctcatattggtgttcaatgtacagactgttcctacctcttcgatgcggg

SEQ ID NO: 2575 - DNA, 3762 bp, Muscodor strobelii
  misc_feature: SGI cDNA ID NO. 560494
  misc_feature: Encodes the peptide sequence at SEQ ID NO 2576
atggagattgaaacccttcttctattccaagaccctgacttggcatccaatattgctcataccaaatccctcacggttttcaaaaatgaatcggccccattagactgtgaaacacctacagagaacgaatacgactgctatgaagatgtctgggttgaatccctacttgacgatagctcgcttctatcagaaggtacgatagacagacagcaagacacccaccaagccggacgacatcttgctcacttcagcaaccgcagaacggaaggcggaatcgatgatttgaacaaggctgagcctcaatcatacgagcaagcggtaacagttgggctccccttttcaaccttaacaaacccgaggtctctgtatgatggtttcattgctccagcacccgaggcccgagaatcgcgggctgtcgaagctctccttgaattgattggatcagacgatgcatatgactatatcgaattcgagcttgatcatttcagcatttacatcgacaccaaagattacccgtgtgaacttcggccgcttcaacacctcaacacaagacacagcacctcggaaatgttctttgatggaacacttcgctacaaagacaccgagtttttcgtcaagaaggcacggtttgacaaacttccaatagggaactatgacgtgaccaaccatgcagttgacgatcaaatatggattcattcagctctcaacgatagattaggcagggaaatatactacaaattacgatcgccttcaacagagtacagacgtttccatgcgccattcctttggattgcagatctcgccaagcatgtggccgactactgtgagggtctccgcgcccatcttcgacatgttacccttggcgattttgagtctgatttcagcatatggacaagtaagaagcaccgaggctcgcaagcatttcaaagatggcactcactcaaccgcacttgcgattttcgcggtgcagttgtcgctaatattgactatctatggaaggaagctcacggcttagatcccaaaatcatatcgtggcatcccttgtggaaacaggttaagacccgggactactatacctcaaaccttgattggagagaccagacagaaaagtcgtcagaaaattggagaatgagtgacggaaagaggatgaaatcagctaacaccattgtgacgccttatattcacaatctcttctcgcatatggtctttggagagctgctcgaatctacgaagcccgctgtcacaattgacaagagtaggatacatgacgaatttcttcgaaaggcgaaatttgttacaagtgaaactctgcctagccccagtacaaagaagcacagcgagacaactcaccatgtcaatgtcagggatattcaggcaggggacgtgatatctacgaagcccgacgacgaaacgactgacacgcgatggaaaacccgacgctcaagacactaccaaggcgaccatctctggtttggcctcgtccagacagtccacaaaagcgccagcggcaagcgatcattcgatgttttatggctataccagcctgtcgatactccatgttccgtcatgaaatatccgtgggacaatgaactctttctttctgataactgtacttgtcatcatcatggcactgcaaaggttgagggacatcagattcttggaacacacgaagttgaatggtttggcgatccaacaacttctgctgaatttttcgttcggcagacatatgttgctagtgagtgccggtggttgacgctcaagaacgaacacctcatttgcggcaatgatggcgccttctccaaagagtctgcccgggaattttgcattggtgatgcggtattggtcagaacccagccgacgagattggaaacattcgttatagaagggttcttcgaagaaggcagatcccggaaagctcgagtgcgaagattaccgcaaaggcgacacgtcgatgaaagtgctcccagatcacgtcccaacgagctcgtctactcgcaagaattagtcgaaatagccacagcgaatattgatcgacgttttcttctgagagctttcaaacccgacgaatcaatcccgtctccgtatgaccgcaacggtactggcgatgcatttttcatgacgcacgaagaagtcaatctcaacggtaacctagaatactatcctctcgatcacgccaaactcggagttttgcaacagggcctcgatccctctatcgaccctggcataccgaagctgcaaggtctcgacctcttctgcggtggtggcaactttggtcggggtatagaggacggtggtgctgtagaaatgcgctggactaacgatatatggagtccagctatccacacatacatggcaaacagtgagcccgaaaggtgtacaccttatttaggctctgtggatagcttattagggatggcactgagaggtgacgagcgagttccagcaccgggcgacgtgcatttcatctcggccgggtccccttgccctggattctcgtcgcttacggcggaccggacaacccccgcccagaagaaaaaccagtcacttgtcgcctcttttgcgtcttatgtagatttctatcgcccattatatgggctgctcgagaatgtgcctaaaatggtcaatagtagcaggtttcgcgacgcttgcgtcttctctcaacttgtatgtgcactagttgggttgggctaccaagtacaagttcttttccttgatgcgtgggcatttggcgcacctcaacatagaagtcgcgttttcttgagctttacagccccaggccttcggacgctaaagaaacctgctcaatctcattcccatcctaagcaggtacgcaaagaaaagctaggtgaaatgtcatgtggtcgaccgttcgacgaaaggactatcgtacctacaccgttcaaatttgtggggatgcgagaagcagtcggcgacttgccagacataaacgatgctaaaacagactattgcattggttatcccgatcaccatctttctattggctacacatctaccacgcgcaagcaagttcagcacataccgactcacccatactgcatgaacttcagtaaggcatggtttggcacgcctcgcgtcttgtctgaggctgaacgcctcctttatccaccggagccatcggaacgtacaacgcctaaatctaagggatggggacgtatagatccaaataacattattcgcacgatagcaacctgctgcctgcctactgatttacgcgttggtcagttgaaccattgggaacaaggcaggccaatcactattttagaagctcgccgtgctcaaggctttctcgatagtgaagtcatcattggatctccatcggagcagtacagaatagttggaaacagtgtctctagacacgtttcactcgtattgggcctagccgttcgagaagcgtgggtcggcacgctgttcgatgaaggcagcacgaggttacagcttcctgtcagggtagacgtaggccctgatatcaaagtcgacagcattgagctcaacgacttaccagctccaccgaaaattgagataattgagatcgattcagattctgaagtgtcctcaagagaacccatattcacgcacttatcaaatacgccgacgcccgccacaagcatttctgccgatgaggatacaagccatacttcaactcgcaagcgacagtcatctctactagtagagattatgtcgaaacgtcaacgacagattgccagccaggagacgtcccaaatatacccaaatatctgctag

SEQ ID NO: 2576 - protein, 1253 aa, Muscodor strobelii
  misc_feature: SGI Peptide ID NO. 560494
  misc_feature (745)..(1137): Pfam Id: PF00145 Pfam Desc: C-5 cytosine-specific DNA methylase
  misc_feature (821)..(920): Pfam Id: PF00145 Pfam Desc: C-5 cytosine-specific DNA methylase
  misc_feature (1082)..(1123): Pfam Id: PF00145 Pfam Desc: C-5 cytosine-specific DNA methylase
  misc_feature (98)..(1168): NCBI GI: 256729163 Blast Desc: NECHADRAFT_39810 [Nectria haematococca mpVI 77-13-4]
  misc_feature (106)..(1166): NCBI GI: 46138503 Blast Desc: FG10766.1 [Gibberella zeae PH-1]
  misc_feature (100)..(1150): NCBI GI: 171679563 Blast Desc: protein product [Podospora anserina] gi|170939407|emb|CAP64635.1| protein product [Podospora anserina]
  misc_feature (105)..(1169): NCBI GI: 261355061 Blast Desc: DNA methyltransferase Dim-2 [Verticillium albo-atrum VaMs.102]
  misc_feature (107)..(1144): NCBI GI: 145610805 Blast Desc: MGG_00889 [Magnaporthe grisea 70-15] gi|145018162|gb|EDK02441.1| MGG_00889 [Magnaporthe grisea 70-15]
  misc_feature (438)..(1146): NCBI GI: 85094494 Blast Desc: NCU02247 [Neurospora crassa OR74A] gi|13936826|gb|AAK49954.1|AF348971_1 DNA methyltransferase Dim-2 [Neurospora crassa] gi|28921348|gb|EAA30655.1| [Neurospora crassa
  misc_feature (454)..(1148): NCBI GI: 164510148 Blast Desc: DNA cytosine methyltransferase [Sordaria macrospora]
  misc_feature (116)..(1240): NCBI GI: 156050777 Blast Desc: SS1G_07976 [Sclerotinia sclerotiorum 1980] gi|154692376|gb|EDN92114.1| SS1G_07976 [Sclerotinia sclerotiorum 1980]
  misc_feature (460)..(1140): NCBI GI: 116203489 Blast Desc: CHGG_09628 [Chaetomium globosum CBS 148.51] gi|88175756|gb|EAQ83224.1| CHGG_09628 [Chaetomium globosum CBS 148.51]
  misc_feature (109)..(1138): NCBI GI: 225560828 Blast Desc: DNA methyltransferase Dim-2 [Ajellomyces capsulatus G186AR]
MEIETLLLFQDPDLASNIAHTKSLTVFKNESAPLDCETPTENEYDCYEDVWVESLLDDSSLLSEGTIDRQQDTHQAGRHLAHFSNRRTEGGIDDLNKAEPQSYEQAVTVGLPFSTLTNPRSLYDGFIAPAPEARESRAVEALLELIGSDDAYDYIEFELDHFSIYIDTKDYPCELRPLQHLNTRHSTSEMFFDGTLRYKDTEFFVKKARFDKLPIGNYDVTNHAVDDQIWIHSALNDRLGREIYYKLRSPSTEYRRFHAPFLWIADLAKHVADYCEGLRAHLRHVTLGDFESDFSIWTSKKHRGSQAFQRWHSLNRTCDFRGAVVANIDYLWKEAHGLDPKIISWHPLWKQVKTRDYYTSNLDWRDQTEKSSENWRMSDGKRMKSANTIVTPYIHNLFSHMVFGELLESTKPAVTIDKSRIHDEFLRKAKFVTSETLPSPSTKKHSETTHHVNVRDIQAGDVISTKPDDETTDTRWKTRRSRHYQGDHLWFGLVQTVHKSASGKRSFDVLWLYQPVDTPCSVMKYPWDNELFLSDNCTCHHHGTAKVEGHQILGTHEVEWFGDPTTSAEFFVRQTYVASECRWLTLKNEHLICGNDGAFSKESAREFCIGDAVLVRTQPTRLETFVIEGFFEEGRSRKARVRRLPQRRHVDESAPRSRPNELVYSQELVEIATANIDRRFLLRAFKPDESIPSPYDRNGTGDAFFMTHEEVNLNGNLEYYPLDHAKLGVLQQGLDPSIDPGIPKLQGLDLFCGGGNFGRGIEDGGAVEMRWTNDIWSPAIHTYMANSEPERCTPYLGSVDSLLGMALRGDERVPAPGDVHFISAGSPCPGFSSLTADRTTPAQKKNQSLVASFASYVDFYRPLYGLLENVPKMVNSSRFRDACVFSQLVCALVGLGYQVQVLFLDAWAFGAPQHRSRVFLSFTAPGLRTLKKPAQSHSHPKQVRKEKLGEMSCGRPFDERTIVPTPFKFVGMREAVGDLPDINDAKTDYCIGYPDHHLSIGYTSTTRKQVQHIPTHPYCMNFSKAWFGTPRVLSEAERLLYPPEPSERTTPKSKGWGRIDPNNIIRTIATCCLPTDLRVGQLNHWEQGRPITILEARRAQGFLDSEVIIGSPSEQYRIVGNSVSRHVSLVLGLAVREAWVGTLFDEGSTRLQLPVRVDVGPDIKVDSIELNDLPAPPKIEIIEIDSDSEVSSREPIFTHLSNTPTPATSISADEDTSHTSTRKRQSSLLVEIMSKRQRQIASQETSQIYPNIC

SEQ ID NO: 2577 - DNA, 1285 bp, Muscodor strobelii
  misc_feature: SGI EST ID NO. CUFF.6451.0
  misc_feature: Variant of the nucleotide sequence at SEQ ID NO 2575
cttcgaaaggcgaaatttgttacaagtgaaactctgcctagccccagtacaaagaagcacagcgagacaactcaccatgtcaatgtcagggatattcaggcaggggacgtgatatctacgaagcccgacgacgaaacgactgacacgcgatggaaaacccgacgctcaagacactaccaaggcgaccatctctggtttggcctcgtccagacagtccacaaaagcgccagcggcaagcgatcattcgatgttttatggctataccagcctgtcgatactccatgttccgtcatgaaatatccgtgggacaatgaactctttctttctgataactgtacttgtcatcatcatggcactgcaaaggttgagggacatcagattcttggaacacacgaagttgaatggtttggcgatccaacaacttctgctgaatttttcgttcggcagacatatgttgctagtgagtgccggtggttgacgctcaagaacgaacacctcatttgcggcaatgatggcgccttctccaaagagtctgcccgggaattttgcattggtgatgcggtattggtcagaacccagccgacgagattggaaacattcgttatagaagggttcttcgaagaaggcagatcccggaaagctcgagtgcgaagattaccgcaaaggcgacacgtcgatgaaagtgctcccagatcacgtcccaacgagctcgtctactcgcaagaattagtcgaaatagccacagcgaatattgatcgacgttttcttctgagagctttcaaacccgacgaatcaatcccgtctccgtatgaccgcaacggtactggcgatgcatttttcatgacgcacgaagaagtcaatctcaacggtaacctagaatactatcctctcgatcacgccaaactcggagttttgcaacagggcctcgatccctctatcgaccctggcataccgaagctgcaaggtctcgacctcttctgcggtggtggcaactttggtcggggtatagaggacggtggtgctgtagaaatgcgctggactaacgatatatggagtccagctatccacacatacatggcaaacagtgagcccgaaaggtgtacaccttatttaggctctgtggatagcttattagggatggcactgagaggtgacgagcgagttccagcaccgggcgacgtgcatttcatctcggccgggtccccttgccctggattctcgtcgcttacggcggaccggacaacccccgcccagaagaaaaaccagtcacttgtcgcctcttttg

SEQ ID NO: 2578 - DNA, 759 bp, Muscodor strobelii
  misc_feature: SGI cDNA ID NO. 560495
  misc_feature: Encodes the peptide sequence at SEQ ID NO 2579
atgctgctctctacactaacagcactcaccctcgcatccagcgcggcgggctattcggtaccgactccaatcgagatgatgaaacgtgtacacacagcagggacagttataacgaaatgttcaaccccaaaaacattggctttggcctacgatgacgggccatacacttacacatcgtcgatcgtcgatacgcttgacgctgccggtgtcaaaggcacgttcttttttaccggtacactttacggatgcatttataatcagcgcgctgctgtcaagaaggcctacgataacggacaccaggttgcaagtcatacgtggacacaccctcacatgggcaccatgagcgcctcggcgatccagtcagagatggagaaagtggaacaagcattcgtaaacatctttgggcggaaaccaggatacatgcgacctccctacctcgataccggcggctcgtttctctcggtaatgaagaccatgaattacaccgtcatcacggacgatatcgacacgggcgattggaataacaacacacctgcgcaaagcgaagcgctattcaccgcagcaggacctagtggcaatggccatattccgcttatgcacgagacgtaccagagcactgctacgacacttacgaactggttgattaattgggcgaagacgaatgggttaagcatcgtcactgtggcggagtgcttaggtgatactgcgggtatgtataaggccggcaatttcacggggaatggagcaacgacatgctag

SEQ ID NO: 2579 - protein, 252 aa, Muscodor strobelii
  misc_feature: SGI Peptide ID NO. 560495
  misc_feature (39)..(164): Pfam Id: PF01522 Pfam Desc: Polysaccharide deacetylase
  misc_feature (2)..(252): NCBI GI: 39942762 Blast Desc: MGG_03461 [Magnaporthe grisea 70-15] gi|145009990|gb|EDJ94646.1| MGG_03461 [Magnaporthe grisea 70-15]
  misc_feature (1)..(252): NCBI GI: 164422983 Blast Desc: NCU09582 [Neurospora crassa OR74A] gi|157069898|gb|EAA30457.2| conserved [Neurospora crassa OR74A]
  misc_feature (1)..(252): NCBI GI: 261358935 Blast Desc: chitin deacetylase [Verticillium albo-atrum VaMs.102]
  misc_feature (14)..(245): NCBI GI: 171679785 Blast Desc: protein product [Podospora anserina] gi|170939518|emb|CAP64746.1| protein product [Podospora anserina]
  misc_feature (13)..(252): NCBI GI: 46124149 Blast Desc: FG06452.1 [Gibberella zeae PH-1]
  misc_feature (20)..(252): NCBI GI: 256732313 Blast Desc: carbohydrate esterase family 4 [Nectria haematococca mpVI 77-13-4]
  misc_feature (20)..(252): NCBI GI: 189188092 Blast Desc: chitin deacetylase [Pyrenophora tritici-repentis Pt-1C-BFP] gi|187971991|gb|EDU39490.1| chitin deacetylase [Pyrenophora tritici-repentis Pt-1C-BFP]
  misc_feature (46)..(252): NCBI GI: 169623140 Blast Desc: SNOG_14800 [Phaeosphaeria nodorum SN15] gi|160704924|gb|EAT77992.2| SNOG_14800 [Phaeosphaeria nodorum SN15]
  misc_feature (46)..(252): NCBI GI: 116206246 Blast Desc: CHGG_02416 [Chaetomium globosum CBS 148.51] gi|88183013|gb|EAQ90481.1| CHGG_02416 [Chaetomium globosum CBS 148.51]
  misc_feature (34)..(234): NCBI GI: 169850453 Blast Desc: CC1G_12897 [Coprinopsis cinerea okayama7#130] gi|116506998|gb|EAU89893.1| CC1G_12897 [Coprinopsis cinerea okayama7#130]
  misc_feature (46)..(201): SWISSPROT Homolog: EC 3.2.1.8 Endo-1,4-beta-xylanase
MLLSTLTALTLASSAAGYSVPTPIEMMKRVHTAGTVITKCSTPKTLALAYDDGPYTYTSSIVDTLDAAGVKGTFFFTGTLYGCIYNQRAAVKKAYDNGHQVASHTWTHPHMGTMSASAIQSEMEKVEQAFVNIFGRKPGYMRPPYLDTGGSFLSVMKTMNYTVITDDIDTGDWNNNTPAQSEALFTAAGPSGNGHIPLMHETYQSTATTLTNWLINWAKTNGLSIVTVAECLGDTAGMYKAGNFTGNGATTC

SEQ ID NO: 2580 - DNA, 3496 bp, Muscodor strobelii
  misc_feature: SGI EST ID NO. CUFF.6655.0
  misc_feature: Variant of the nucleotide sequence at SEQ ID NO 2578
caacgctagaaatgcccttgaggggcgacctggtgatataatagtactgccatctgcatctatatgcaatctccctttttccaatatcctcctgagcgtgctattccgcttggttctgctccaaggttaactccgaactcgcatctggcctcgagtattgtacctagtttacgatgctgctctctacactaacagcactcaccctcgcatccagcgcggcgggctattcggtaccgactccaatcgagatgatgaaacgtgtacacacagcagggacagttataacgaaatgttcaaccccaaaaacattggctttggcctacgatgacgggccatacacttacacatcgtcgatcgtcgatacgcttgacgctgccggtgtcaaaggcacgttcttttttaccggtacactttacggatgcatttataatcagcgcgctgctgtcaagaaggcctacgataacggacaccaggttgcaagtcatacgtggacacaccctcacatgggcaccatgagcgcctcggcgatccagtcagagatggagaaagtggaacaagcattcgtaaacatctttgggcggaaaccaggatacatgcgacctccctacctcgataccggcggctcgtttctctcggtaatgaagaccatgaattacaccgtcatcacggacgatatcgacacgggcgattggaataacaacacacctgcgcaaagcgaagcgctattcaccgcagcaggacctagtggcaatggccatattccgcttatgcacgagacgtaccagagcactgctacgacacttacgaactggttgattaattgggcgaagacgaatgggttaagcatcgtcactgtggcggagtgcttaggtgatactgcgggtatgtataaggccggcaatttcacggggaatggagcaacgacatgctagtcaacagcaaaggctacgcgatgcgaatgcgttaaactaggggattgacttatagcgagtacgcaaatgtacaccaaacacgacgagccagagatgatgtgacgtttatcagaaagccgcgatgaaacgtcttctcgaagccacattgtacaaaaattactgccattaataaaatacttggtttatgtacggtatgcggtattatgttacgaaggggctcggatccagattcccattcaacctcactatgtcccagaaaatgctttatttcatccaacgccgcgtgcaatcataaaagtctcacaagtcgctcccacgtaactgccgtacgcaagtccacctcagccaactatgtctcctcatatatccaacatactcctaatttgctgtggcggtccgctcatcgagacaccactagctgtactcgcgctccttgggttcgttgccggtctctgcgtcggaggagctgatggatctgattcccgccctctctgctcagcgggtgtcgtattgttggcattagggaagagcagatttgcaaccatttcctgggtccgttcgttccttcgtcggtccgatcggcctgcataggcagggggagcatatggtggtggagctgtattgttgctgcccctgcttgcgtgactcgttgttcgtggtatcgaactcatctcgattgagttgttgttccctccggcattatttgcttgtgtcgcttcagcgttggccgctcttcgctcggccactgctgcacgttcacgacgaccggtgacttcctgtacgttgcggagtacctgttcattcatgttttgagggccctggtcaccattgagtcgccgccaccacgctggcttatgagtgatgccaagctcctgatccaggcgattgcctctctcgcgtcgctgtcgaatgagttctttatcttcattcggtcgaaggaatccagcagcacattgaatcaggaccagcagtagactaggaacgtacccaccaacaaacagcgcgacaaggtttgtatgggcttttaggggagacacatcgaagtcccatgctgagagagcttggtatgcaatggcagcgagggagatagggagcatgagtaagaagcgaaagggtacataattgaagaacccagtaatcaggttaagccagccacggttacgctcttcgtaatgtctaatagaatgccacagagacacaatgatggtgagccagctaacaaggagaaaaaagggggcaatcttgaagcgaatgtcagtggcggagggcttcgctttttgctccaattgtgaaggcgatcgctgaagctcaatctgcccccaatttcgtggaatgatgacgaagaaagtctgtagatcttagcaacaaataaaggccgagagagtaggagaagcttaccagccaccaccaaagatagaagaagaggggcaaccagaactcgaatatgcctcttttatccgtttgatgaaggacaaaaggattcggatcgatgaattgcctctccatccaacttccccaatggcgcaccgattcccataccatagccatggcagccatattcatcaggaaccaaaagaagcattggaggacaagtggtaattcaacaacgcgataacggtcgatatccacacctgtgatcaggcctatgaatgcaaaaacacataatatgatggcccagtaccactgccatctcctccctatggggtagaatctcttcgtagccggcaaataaagcttcccgtgtcgggtcagattgaccaggacgaatatcaggctcaggccgtagccgacggcgaagcctatgcctgtgttcgagcgtgggccggtaggttgaatcgcgttgtaacagccagtgccgttcactataatgcagtaaagataagtagagtgttggctgacggaagttcgctagactgattctcactaaccaaatgtgccgttatcaagtagctgaacaggcgtgaaaggtggatccataagatggcatctcgaccagttactgacggtccaattggcctcgtagaaagagtagttccagtgctgaagggtggtgaggttgagttgcacgccgaagaaatctgtgaagctgtcgttggcgcctttgggccactcggaagctgccattgcggcagaggagagcgcagtcgcctatgtatgtattatacgtgtgctaatgctgtcgcttgcggcgattggttctcaaaacgattgatccatacgccggatcgctggcaccgggtgcaaagatcgacggagaaatggatgagcaggcaagctctcacggtgtcccgcactcaaacgggttgagatgcaaatacaaggtatatgatgtatatgatgcttgatgtgctttactgcaaggtatggaataaaaaatgtccaaaaaaatatgcagagcactagtgagatcatgcagtgcgtgtcgagtactgcaacgccttcaagataatgcaaagtcgcgatgggaggacttgcgatgaaaggttcgccaagcggcggacaacagtgagattgctgatgttttccgcgcggccgtagttgcaataagcccccggagcctgcgg

SEQ ID NO: 2581 - DNA, 1650 bp, Muscodor strobelii
  misc_feature: SGI cDNA ID NO. 560496
  misc_feature: Reduced expression when VOC is produced
  misc_feature: Encodes the peptide sequence at SEQ ID NO 2582
atggcagcttccgagtggcccaaaggcgccaacgacagcttcacagatttcttcggcgtgcaactcaacctcaccacccttcagcactggaactactctttctacgaggccaattggaccgtcagtaactggtcgagatgccatcttatggatccacctttcacgcctgttcagctacttgataacggcacatttgtgaacggcactggctgttacaacgcgattcaacctaccggcccacgctcgaacacaggcataggcttcgccgtcggctacggcctgagcctgatattcgtcctggtcaatctgacccgacacgggaagctttatttgccggctacgaagagattctaccccatagggaggagatggcagtggtactgggccatcatattatgtgtttttgcattcataggcctgatcacaggtgtggatatcgaccgttatcgcgttgttgaattaccacttgtcctccaatgcttcttttggttcctgatgaatatggctgccatggctatggtatgggaatcggtgcgccattggggaagttggatggagaggcaattcatcgatccgaatccttttgtccttcatcaaacggataaaagaggcatattcgagttctggttgcccctcttcttctatctttggtggtggctgactttcttcgtcatcattccacgaaattgggggcagattgagcttcagcgatcgccttcacaattggagcaaaaagcgaagccctccgccactgacattcgcttcaagattgcccccttttttctccttgttagctggctcaccatcattgtgtctctgtggcattctattagacattacgaagagcgtaaccgtggctggcttaacctgattactgggttcttcaattatgtaccctttcgcttcttactcatgctccctatctccctcgctgccattgcataccaagctctctcagcatgggacttcgatgtgtctcccctaaaagcccatacaaaccttgtcgcgctgtttgttggtgggtacgttcctagtctactgctggtcctgattcaatgtgctgctggattccttcgaccgaatgaagataaagaactcattcgacagcgacgcgagagaggcaatcgcctggatcaggagcttggcatcactcataagccagcgtggtggcggcgactcaatggtgaccagggccctcaaaacatgaatgaacaggtactccgcaacgtacaggaagtcaccggtcgtcgtgaacgtgcagcagtggccgagcgaagagcggccaacgctgaagcgacacaagcaaataatgccggagggaacaacaactcaatcgagatgagttcgataccacgaacaacgagtcacgcaagcaggggcagcaacaatacagctccaccaccatatgctccccctgcctatgcaggccgatcggaccgacgaaggaacgaacggacccaggaaatggttgcaaatctgctcttccctaatgccaacaatacgacacccgctgagcagagagggcgggaatcagatccatcagctcctccgacgcagagaccggcaacgaacccaaggagcgcgagtacagctagtggtgtctcgatgagcggaccgccacagcaaattaggagtatgttggatatatga

SEQ ID NO: 2582 - protein, 549 aa, Muscodor strobelii
  misc_feature: SGI Peptide ID NO. 560496
  misc_feature (6)..(549): NCBI GI: 256721832 Blast Desc: NECHADRAFT_73080 [Nectria haematococca mpVI 77-13-4]
  misc_feature (2)..(549): NCBI GI: 46127103 Blast Desc: FG07929.1 [Gibberella zeae PH-1]
  misc_feature (5)..(549): NCBI GI: 261358944 Blast Desc: conserved [Verticillium albo-atrum VaMs.102]
  misc_feature (6)..(549): NCBI GI: 85079874 Blast Desc: NCU05066 [Neurospora crassa OR74A] gi|28917504|gb|EAA27204.1| [Neurospora crassa OR74A]
  misc_feature (1)..(549): NCBI GI: 39942738 Blast Desc: MGG_03449 [Magnaporthe grisea 70-15] gi|145010001|gb|EDJ94657.1| MGG_03449 [Magnaporthe grisea 70-15]
  misc_feature (3)..(549): NCBI GI: 116178944 Blast Desc: CHGG_00100 [Chaetomium globosum CBS 148.51] gi|88184397|gb|EAQ91865.1| CHGG_00100 [Chaetomium globosum CBS 148.51]
  misc_feature (6)..(549): NCBI GI: 171679305 Blast Desc: protein product [Podospora anserina] gi|170939278|emb|CAP64506.1| protein product [Podospora anserina]
  misc_feature (6)..(549): NCBI GI: 156042548 Blast Desc: SS1G_11072 [Sclerotinia sclerotiorum 1980] gi|154695458|gb|EDN95196.1| SS1G_11072 [Sclerotinia sclerotiorum 1980]
  misc_feature (9)..(549): NCBI GI: 261204067 Blast Desc: conserved [Ajellomyces dermatitidis SLH14081] gi|239587032|gb|EEQ69675.1| conserved [Ajellomyces dermatitidis SLH14081]
  misc_feature (9)..(549): NCBI GI: 239608733 Blast Desc: conserved [Ajellomyces dermatitidis ER-3]
  misc_feature: Useful for introducing or modulating the production of volatile compounds
MAASEWPKGANDSFTDFFGVQLNLTTLQHWNYSFYEANWTVSNWSRCHLMDPPFTPVQLLDNGTFVNGTGCYNAIQPTGPRSNTGIGFAVGYGLSLIFVLVNLTRHGKLYLPATKRFYPIGRRWQWYWAIILCVFAFIGLITGVDIDRYRVVELPLVLQCFFWFLMNMAAMAMVWESVRHWGSWMERQFIDPNPFVLHQTDKRGIFEFWLPLFFYLWWWLTFFVIIPRNWGQIELQRSPSQLEQKAKPSATDIRFKIAPFFLLVSWLTIIVSLWHSIRHYEERNRGWLNLITGFFNYVPFRFLLMLPISLAAIAYQALSAWDFDVSPLKAHTNLVALFVGGYVPSLLLVLIQCAAGFLRPNEDKELIRQRRERGNRLDQELGITHKPAWWRRLNGDQGPQNMNEQVLRNVQEVTGRRERAAVAERRAANAEATQANNAGGNNNSIEMSSIPRTTSHASRGSNNTAPPPYAPPAYAGRSDRRRNERTQEMVANLLFPNANNTTPAEQRGRESDPSAPPTQRPATNPRSASTASGVSMSGPPQQIRSMLDI

SEQ ID NO: 2583 - DNA, 2889 bp, Muscodor strobelii
  misc_feature: SGI EST ID NO. CUFF.6656.1
  misc_feature: Variant of the nucleotide sequence at SEQ ID NO 2581
ccgcaggctccgggggcttattgcaactacggccgcgcggaaaacatcagcaatctcactgttgtccgccgcttggcgaacctttcatcgcaagtcctcccatcgcgactttgcattatcttgaaggcgttgcagtactcgacacgcactgcatgatctcactagtgctctgcatatttttttggacattttttattccataccttgcagtaaagcacatcaagcatcatatacatcatataccttgtatttgcatctcaacccgtttgagtgcgggacaccgtgagagcttgcctgctcatccatttctccgtcgatctttgcacccggtgccagcgatccggcgtatggatcaatcgttttgagaaccaatcgccgcaagcgacagcattagcacacgtataatacatacataggcgactgcgctctcctctgccgcaatggcagcttccgagtggcccaaaggcgccaacgacagcttcacagatttcttcggcgtgcaactcaacctcaccacccttcagcactggaactactctttctacgaggccaattggaccgtcagtaactggtcgagatgccatcttatggatccacctttcacgcctgttcagctacttgataacggcacatttgtgaacggcactggctgttacaacgcgattcaacctaccggcccacgctcgaacacaggcataggcttcgccgtcggctacggcctgagcctgatattcgtcctggtcaatctgacccgacacgggaagctttatttgccggctacgaagagattctaccccatagggaggagatggcagtggtactgggccatcatattatgtgtttttgcattcataggcctgatcacaggtgtggatatcgaccgttatcgcgttgttgaattaccacttgtcctccaatgcttcttttggttcctgatgaatatggctgccatggctatggtatgggaatcggtgcgccattggggaagttggatggagaggcaattcatcgatccgaatccttttgtccttcatcaaacggataaaagaggcatattcgagttctggttgcccctcttcttctatctttggtggtggctgactttcttcgtcatcattccacgaaattgggggcagattgagcttcagcgatcgccttcacaattggagcaaaaagcgaagccctccgccactgacattcgcttcaagattgcccccttttttctccttgttagctggctcaccatcattgtgtctctgtggcattctattagacattacgaagagcgtaaccgtggctggcttaacctgattactgggttcttcaattatgtaccctttcgcttcttactcatgctccctatctccctcgctgccattgcataccaagctctctcagcatgggacttcgatgtgtctcccctaaaagcccatacaaaccttgtcgcgctgtttgttggtgggtacgttcctagtctactgctggtcctgattcaatgtgctgctggattccttcgaccgaatgaagataaagaactcattcgacagcgacgcgagagaggcaatcgcctggatcaggagcttggcatcactcataagccagcgtggtggcggcgactcaatggtgaccagggccctcaaaacatgaatgaacaggtactccgcaacgtacaggaagtcaccggtcgtcgtgaacgtgcagcagtggccgagcgaagagcggccaacgctgaagcgacacaagcaaataatgccggagggaacaacaactcaatcgagatgagttcgataccacgaacaacgagtcacgcaagcaggggcagcaacaatacagctccaccaccatatgctccccctgcctatgcaggccgatcggaccgacgaaggaacgaacggacccaggaaatggttgcaaatctgctcttccctaatgccaacaatacgacacccgctgagcagagagggcgggaatcagatccatcagctcctccgacgcagagaccggcaacgaacccaaggagcgcgagtacagctagtggtgtctcgatgagcggaccgccacagcaaattaggagtatgttggatatatgaggagacatagttggctgaggtggacttgcgtacggcagttacgtgggagcgacttgtgagacttttatgattgcacgcggcgttggatgaaataaagcattttctgggacatagtgaggttgaatgggaatctggatccgagccccttcgtaacataataccgcataccgtacataaaccaagtattttattaatggcagtaatttttgtacaatgtggcttcgagaagacgtttcatcgcggctttctgataaacgtcacatcatctctggctcgtcgtgtttggtgtacatttgcgtactcgctataagtcaatcccctagtttaacgcattcgcatcgcgtagcctttgctgttgactagcatgtcgttgctccattccccgtgaaattgccggccttatacatacccgcagtatcacctaagcactccgccacagtgacgatgcttaacccattcgtcttcgcccaattaatcaaccagttcgtaagtgtcgtagcagtgctctggtacgtctcgtgcataagcggaatatggccattgccactaggtcctgctgcggtgaatagcgcttcgctttgcgcaggtgtgttgttattccaatcgcccgtgtcgatatcgtccgtgatgacggtgtaattcatggtcttcattaccgagagaaacgagccgccggtatcgaggtagggaggtcgcatgtatcctggtttccgcccaaagatgtttacgaatgcttgttccactttctccatctctgactggatcgccgaggcgctcatggtgcccatgtgagggtgtg

SEQ ID NO: 2584 - DNA, 1551 bp, Muscodor strobelii
  misc_feature: SGI cDNA ID NO. 560497
  misc_feature: Elevated expression when VOC is produced
  misc_feature: Encodes the peptide sequence at SEQ ID NO 2585
atgacgcgcctgacggcagctctattcgcaatcactgctctcgtcggacacgctgtcgctcaggattgcatatcctatgcgaggtattcgcagcagaagcaccagccctattcgaccggtcaattcgctctctcgtaccaaagaccagacccagcatgtcggacgtttaactcgacgatcatcgaggattacatactcgatatgcgacaaaagatagccgaccctgacctttttcgtctcttcgagaacacattccccaataccctcgatacggcgatcaaatggcgaggtcccgcagcgaataatacagaggaagaattggccttcatcatcacaggcgatatcgatgccatgtggataagagactctgcgaaccaggttgcgccgtaccgaagcgtgctgaagagcaaagacgacgatctcgcgtcggtgtttcgtggcgcgttgaatctgcaggctcgctatctgatccagtttccctactgtaatgcgtttctcccgccagcggagtcgggtttgaacccggggccgaacggcgcgtcttaccaggtgaagcctccgtatgaccacaatgtagtttttacctgcaatttcgaactggacgattttggggctttcctacaactctcgcacgactactacacctccactggcgacgttgatttcttcggaaaatttcagtggattcacgcgattcagtcgatcatggcggcttcggaggatttgcgtaaaccgacatacggtcctgatggcgaatggattccacctgtctacacattccagtcatcgacaatgacagcgttcggaacacttggaaataacgggatgaattatccagttaattatacaggcatggtccgctccccctttcgcccaagcgacgatgccgccatatacgacttccagatcccggccaatatgatgctctcacgttatcttgaagcaacggctgtaatcatggacaagctccctaatgcacccaaagatctcgcggcgcagatgcggagcatggcggaagagatcagcgcgggcatcgagcaattcggtgttgtaatgtcgccaaacggacaaaagatcttcgcctatgaagtcgacgggttcggcggacagaatctcatggatgatgcgaacatcccttctctgctttctgcaccgtctctgggttacttggacaaaaatgatcccatctatcagaatacgcgcaaattcgtgctttcaagatccaatccatggtggtgtcagggttctgtgatcaacgctgtcggaagcccgcatattaaacctggcgctgcttggcctatggcatctattatgcgagctatgacatctgatgacggggatgagattcttgctgccatccgagaggtgctgtcaagcacagatggatatgggctgatccacgagagcgtcaacagctccaatgcggaggaatggacaaggtcatggtttggttggggaaacgcagtcttcggacaaatgatgactgagctgtcggagagaaaaccggatctcttgaattatatatttcagccacggcggcatttagattaa

SEQ ID NO: 2585 - protein, 516 aa, Muscodor strobelii
  misc_feature: SGI Peptide ID NO. 560497
  misc_feature (74)..(496): Pfam Id: PF06824 Pfam Desc: Domain of function (DUF1237)
  misc_feature (10)..(500): NCBI GI: 156056843 Blast Desc: SS1G_04152 [Sclerotinia sclerotiorum 1980] gi|154701938|gb|EDO01677.1| SS1G_04152 [Sclerotinia sclerotiorum 1980]
  misc_feature (10)..(504): NCBI GI: 154323598 Blast Desc: BC1G_00198 [Botryotinia fuckeliana B05.10] gi|150842427|gb|EDN17620.1| BC1G_00198 [Botryotinia fuckeliana B05.10]
  misc_feature (7)..(510): NCBI GI: 169598258 Blast Desc: SNOG_01930 [Phaeosphaeria nodorum SN15] gi|111069022|gb|EAT90142.1| SNOG_01930 [Phaeosphaeria nodorum SN15]
  misc_feature (23)..(510): NCBI GI: 189208398 Blast Desc: conserved [Pyrenophora tritici-repentis Pt-1C-BFP] gi|187976625|gb|EDU43251.1| conserved [Pyrenophora tritici-repentis Pt-1C-BFP]
  misc_feature (1)..(510): NCBI GI: 256734062 Blast Desc: NECHADRAFT_36723 [Nectria haematococca mpVI 77-13-4]
  misc_feature (1)..(510): NCBI GI: 46128091 Blast Desc: FG08423.1 [Gibberella zeae PH-1]
  misc_feature (16)..(482): NCBI GI: 145612946 Blast Desc: MGG_08320 [Magnaporthe grisea 70-15] gi|145020032|gb|EDK04260.1| MGG_08320 [Magnaporthe grisea 70-15]
  misc_feature (23)..(500): NCBI GI: 85095398 Blast Desc: NCU05819 [Neurospora crassa OR74A] gi|28921538|gb|EAA30843.1| conserved [Neurospora crassa OR74A]
  misc_feature (1)..(510): NCBI GI: 189192248 Blast Desc: conserved [Pyrenophora tritici-repentis Pt-1C-BFP] gi|187974069|gb|EDU41568.1| conserved [Pyrenophora tritici-repentis Pt-1C-BFP]
  misc_feature (22)..(510): NCBI GI: 170674512 Blast Desc: secreted protein [Epichloe festucae]
  misc_feature: Useful for introducing or modulating the production of volatile compounds
MTRLTAALFAITALVGHAVAQDCISYARYSQQKHQPYSTGQFALSYQRPDPACRTFNSTIIEDYILDMRQKIADPDLFRLFENTFPNTLDTAIKWRGPAANNTEEELAFIITGDIDAMWIRDSANQVAPYRSVLKSKDDDLASVFRGALNLQARYLIQFPYCNAFLPPAESGLNPGPNGASYQVKPPYDHNVVFTCNFELDDFGAFLQLSHDYYTSTGDVDFFGKFQWIHAIQSIMAASEDLRKPTYGPDGEWIPPVYTFQSSTMTAFGTLGNNGMNYPVNYTGMVRSPFRPSDDAAIYDFQIPANMMLSRYLEATAVIMDKLPNAPKDLAAQMRSMAEEISAGIEQFGVVMSPNGQKIFAYEVDGFGGQNLMDDANIPSLLSAPSLGYLDKNDPIYQNTRKFVLSRSNPWWCQGSVINAVGSPHIKPGAAWPMASIMRAMTSDDGDEILAAIREVLSSTDGYGLIHESVNSSNAEEWTRSWFGWGNAVFGQMMTELSERKPDLLNYIFQPRRHLD

SEQ ID NO: 2586 - DNA, 4713 bp, Muscodor strobelii
  misc_feature: SGI EST ID NO. CUFF.6501.0
  misc_feature: Variant of the nucleotide sequence at SEQ ID NO 2584
gaacgatggattttgaagatgactctactgttatgaagattggatttcatgaactagtcgaacgtgctacaagcagtccgatgccataatcccgagctccgaagcgcgaaattgtttatctgggtcattgatgatatcaaatcaagaacgtatctcctcagcgtgcactaggtattagccgcaaatgtgtcgacagtactgatacctcgctgtggatctttccttacatcgtagtgaagcgcgtctcgccgcagcgcacatgtacattcaatactcatcctgtccaacataagcgaacctagaggcacagcatgcatgccaggtccttgtgtgctgcttgcctagcttgtcgggtcttcactagggtacgctgaaagcaacaatagcttagtttctgcccattcccacgcaacaagcgtacgaagcaattgatggtggtcataagacgcatatgagttagcttgtgccgcttgcgacgtccgaggcactcctcgatcatcaacatggcatgcgctagctcgcaagggtcgcggctcatgcaacctctggcgaaacgtacgccgcgcagcgtaggctgctttgcctgtaagcggatgaaagtgaaggtaaagtcagcagcgaagagcaatagggaactgcgtgtgactaaatctggtgtacatagtgtgatggccggcgtcctcgatgtgagaggtgttgtagagcaagccgtgtctgcccgggctaccgagatgtctccgagatccaatttcgttctatgaacgagacagtcgctgcaagaagcgagggttctagcctcggaagcagcaagatagatatcatgccacacccaactccactcattgttcgaccggcgacggtgtgggaaaccaatgcaacttcctacttcctgcatcattactctttcaatcgaacaaagtatagcccgggatatctcaatttcctaccggagctactgtcgtccgcttcgtgttgccggcagttagagtctgcagtgctcgcagctggctttgcgagtcttcggaacactacgggcctgagtaatctccagggacgcgctgaaaagtattatggtgaatcattaaaacacatcttagctgcatctcaagactcgacacgggctgcaactgatgctaacttagccgccattattgtgatccaacattatgaagccattagcgacacggccgatttgccgcatgacccccatcaaagaggattaacagaactgctgcgccgacgcggaaagacaacggaccgtagtcatgaggtagctcgtatgatccatagccgccgccagatcaacgagattggaggagaagcacccttaaaacacgagcctcaagcagcattcgagctagagaacgcgggtcttcctcagaagaacgtttggcagttattgccagaagtttcaagagcctgtggagagctccaatccttaatttcatctcagactttggagcttcatcctcatgatgatattgttgaagtcatcaatagggtgtctttggcctaccaatccctagctgagtggcagtcttctcttccgtccggccaattatatcagtcatttgagatacctgagggtgacgaagacacgacgagtcagatgccgagttttccgccgagatatcatatttttaaggacgtacagcaaggggctttatggatctgcttctggtgtgcacaggtctattcactgcaaatcctcgtcagggccgctactttaccacatctacaagcttacctcgagcaggaaccaagtctccaatgggacatcgcaaaacaacttcgcagtgttatcgataatatgtgtgcctcagtcccttacatgatggacgacatagaccagatgggactgccgaagatctctgcagaagggaaggcactgggggctttcttcttgatacgagggttgtacgttgcaaactcggtgtccggcctcaccgatgctcaacgacggtatatattggaaacgtttgaacgcattggtcatgtaaggggtatcaaactggctttgcgggcgaggacagaatggctgaaacaacataatagtaaaaatgccggtattgattcacatgtgtgagaacataacgcagaacaagcctgaggttgtctaatttcgcgaaagtctagggcctttatatggggcaaaaattgcttgatggcacgaatcgtgatcatcggtgttcttgatagttgctggaaaagaacctgattcacttatgcatcaataccacgtgtttctgacagatcatgctttttctttgggtaacaccttggtgattgcaaagtataggggaaaacacctggacctggcatctaaagttcaatgcatgtcagccgtgatggcgggggagggaaagcggacggcaaggcgccaaggaggcttggcaccattcaagtcacttgccaaattcaggcatcggagctttctaatttagctctggaccacgttggcacgcacgttaaaccttggcatcttggcgcaagacagactgatcccttgaaagcgaaatggggtctcagcctcgacttcgcgatgatcaagcacaccgaaagacgtcccgtcgtgtccgtggcagcaggtctgctggtttatggtgttgaagggcctatctgaccatgtcgtcacgatacatgacgcgcctgacggcagctctattcgcaatcactgctctcgtcggacacgctgtcgctcaggattgcatatcctatgcgaggtattcgcagcagaagcaccagccctattcgaccggtcaattcgctctctcgtaccaaagaccagacccagcatgtcggacgtttaactcgacgatcatcgaggattacatactcgatatgcgacaaaagatagccgaccctgacctttttcgtctcttcgagaacacattccccaataccctcgatacggcgatcaaatggcgaggtcccgcagcgaataatacagaggaagaattggccttcatcatcacaggcgatatcgatgccatgtggataagagactctgcgaaccaggttgcgccgtaccgaagcgtgctgaagagcaaagacgacgatctcgcgtcggtgtttcgtggcgcgttgaatctgcaggctcgctatctgatccagtttccctactgtaatgcgtttctcccgccagcggagtcgggtttgaacccggggccgaacggcgcgtcttaccaggtgaagcctccgtatgaccacaatgtagtttttacctgcaatttcgaactggacgattttggggctttcctacaactctcgcacgactactacacctccactggcgacgttgatttcttcggaaaatttcagtggattcacgcgattcagtcgatcatggcggcttcggaggatttgcgtaaaccgacatacggtcctgatggcgaatggattccacctgtctacacattccagtcatcgacaatgacagcgttcggaacacttggaaataacgggatgaattatccagttaattatacaggcatggtccgctccccctttcgcccaagcgacgatgccgccatatacgacttccagatcccggccaatatgatgctctcacgttatcttgaagcaacggctgtaatcatggacaagctccctaatgcacccaaagatctcgcggcgcagatgcggagcatggcggaagagatcagcgcgggcatcgagcaattcggtgttgtaatgtcgccaaacggacaaaagatcttcgcctatgaagtcgacgggttcggcggacagaatctcatggatgatgcgaacatcccttctctgctttctgcaccgtctctgggttacttggacaaaaatgatcccatctatcagaatacgcgcaaattcgtgctttcaagatccaatccatggtggtgtcagggttctgtgatcaacgctgtcggaagcccgcatattaaacctggcgctgcttggcctatggcatctattatgcgagctatgacatctgatgacggggatgagattcttgctgccatccgagaggtgctgtcaagcacagatggatatgggctgatccacgagagcgtcaacagctccaatgcggaggaatggacaaggtcatggtttggttggggaaacgcagtcttcggacaaatgatgactgagctgtcggagagaaaaccggatctcttgaattatatatttcagccacggcggcatttagattaatatcctatgtaaaatacgattcaatctttcaatcaacaggacgctcaagatgtgaaattcagaagaagcatttatactatgatgtccacttaagagtaacatgttatataagccttagttgtgcagataggaagcttcgtctacatgtgatgaaagtcatatggcaacaattgaaagtgcgtacagcagaaccccaccgcatttactttgtaaatggaaactcgctggcccttgggtttacactttgatatttcaagtcaatctaacgaaactgttcgatataagaccttgaatttctcactctatttaggggatgagcagtgatgtgggaatggatcatgtacgtacagaaatgtgtatggcattctaggcgtagaccaaaggtcggctaggtgtttgaagacagcccgtcccagttacatacaccttggggccgagctacacttcgacttatgataactcatggtactaactcatcgagctagagaaataggaagtgatttgcaactcatattcgacccc

SEQ ID NO: 2587 - DNA, 1248 bp, Muscodor strobelii
  misc_feature: SGI cDNA ID NO. 560498
  misc_feature: Encodes the peptide sequence at SEQ ID NO 2588
atgccgacacggttcctagtcaccgcagctctcttaggcatcttcagtctcggccacgcatgccagtttgattcaatcaaagatctcagtagcagagactatacactcattgcggcggagaatcacagctttcgatctcggaataacaatgctactcctatgactggcaagacagccatccacaacgctcgagtcttcgatggatatacgctcttaccgccagctacaatcatcattgatggcagtatcatcggggattttcaagacgattatagcgatatagtcgatcatgtcgatgccgataatggcgtcttgctgccaggcttgattgatgcccacgctcatccatctactatctcggacatgcaagatatgagtcgatatggcgtgacgacgacgctggtgatggcttgtttcgcgccacagctttgcaagtctttgatgaaccacaccggtcttgtcgatgtcattacagggtcactacccgcagcagctccgaatagcacacatggaaacattacgaccgctgtcgatggcaatggggatcgtttaatctacaattcgagcatggctacggaatggcttgaagatgcgttagcttggggaccggctttcgtcaaggttattgccgagtcgccgggcctaagtcaagaaactattaacatcttgaccaagacatcacaccagaagcagaaacgtgtggcttgtcacgctgctgattatgcctcgtatgtacaagctgcaactgctggagtcgacaacatccaacactcgccactcgacaggcccattgaactagccttggctaagggcatggcttgcaatcaacgtgtggcaacacccacgttgacaattatgaaagctatcagcaagacaaggccatcgaattataccgccgcggaagagagtgttaggcggctcaagcatgcgggtgtatccatacttgcaggtaccgacgcaaatcttcaaccgggtctcgtagcggaagtaccattcggatcaagtattcacgatgagctagacttgatggtgaaagcaggacttactgcaggagaagctttgcgcgcggctacctctactccggccaagcattggggcttatacgatagaggcacgatcgccccgggcaaacgagcagatctcctgttggtttctggaaatccgcttgaagacatcgcaaacacccgaaacattcaaaaggtatggcttgctggtgttcacttcgacggcgaaatcggcaaattttag

SEQ ID NO: 2588 - protein, 415 aa, Muscodor strobelii
  misc_feature: SGI Peptide ID NO. 560498
  misc_feature (104)..(385): Pfam Id: PF01979 Pfam Desc: Amidohydrolase family
  misc_feature (104)..(383): Pfam Id: PF07969 Pfam Desc: Amidohydrolase family
  misc_feature (338)..(385): Pfam Id: PF01979 Pfam Desc: Amidohydrolase family
  misc_feature (348)..(383): Pfam Id: PF07969 Pfam Desc: Amidohydrolase family
  misc_feature (60)..(406): NCBI GI: 280962368 Blast Desc: amidohydrolase [Frankia sp. EuI1c] gi|270733603|gb|EFA61810.1| amidohydrolase [Frankia sp. EuI1c]
  misc_feature (57)..(405): NCBI GI: 226362713 Blast Desc: hydrolase [Rhodococcus opacus B4] gi|226241198|dbj|BAH51546.1| hydrolase [Rhodococcus opacus B4]
  misc_feature (57)..(406): NCBI GI: 256375015 Blast Desc: amidohydrolase [Actinosynnema mirum DSM 43827] gi|255919318|gb|ACU34829.1| amidohydrolase [Actinosynnema mirum DSM 43827]
  misc_feature (57)..(408): NCBI GI: 256671626 Blast Desc: hydrolase [Streptomyces sp. AA4]
  misc_feature (58)..(410): NCBI GI: 239983297 Blast Desc: hydrolase [Streptomyces albus J1074]
  misc_feature (58)..(406): NCBI GI: 226364749 Blast Desc: hydrolase [Rhodococcus opacus B4] gi|226243238|dbj|BAH53586.1| hydrolase [Rhodococcus opacus B4]
  misc_feature (60)..(405): NCBI GI: 256667920 Blast Desc: StAA4_12265 [Streptomyces sp. AA4]
  misc_feature (58)..(408): NCBI GI: 226313647 Blast Desc: BBR47_40600 [Brevibacillus brevis NBRC 100599] gi|226096595|dbj|BAH45037.1| conserved [Brevibacillus brevis NBRC 100599]
  misc_feature (57)..(407): NCBI GI: 271966265 Blast Desc: amidohydrolase [Streptosporangium roseum DSM 43021] gi|270509440|gb|ACZ87718.1| amidohydrolase [Streptosporangium roseum DSM 43021]
  misc_feature (58)..(405): NCBI GI: 251798521 Blast Desc: amidohydrolase [Paenibacillus sp. JDR-2] gi|247546147|gb|ACT03166.1| amidohydrolase [Paenibacillus sp. JDR-2]
  misc_feature (54)..(405): SWISSPROT Homolog: EC 3.5.4.2 Adenine deaminase
MPTRFLVTAALLGIFSLGHACQFDSIKDLSSRDYTLIAAENHSFRSRNNNATPMTGKTAIHNARVFDGYTLLPPATIIIDGSIIGDFQDDYSDIVDHVDADNGVLLPGLIDAHAHPSTISDMQDMSRYGVTTTLVMACFAPQLCKSLMNHTGLVDVITGSLPAAAPNSTHGNITTAVDGNGDRLIYNSSMATEWLEDALAWGPAFVKVIAESPGLSQETINILTKTSHQKQKRVACHAADYASYVQAATAGVDNIQHSPLDRPIELALAKGMACNQRVATPTLTIMKAISKTRPSNYTAAEESVRRLKHAGVSILAGTDANLQPGLVAEVPFGSSIHDELDLMVKAGLTAGEALRAATSTPAKHWGLYDRGTIAPGKRADLLLVSGNPLEDIANTRNIQKVWLAGVHFDGEIGKF

SEQ ID NO: 2589 - DNA, 1958 bp, Muscodor strobelii
  misc_feature: SGI EST ID NO. CUFF.6482.0
  misc_feature: Variant of the nucleotide sequence at SEQ ID NO 2587
ctaattcttaactttcaaggacttttggattgtcatttcgagatggctctagagcttggacactcgatcgctggcgttgccccttcgagagccatgacatgggcagtgtcgacgaacatgattgcttgtctgactcttcccagactatcaagagtgcagaactgcagtaatccgtgttgtctggcgaaagagcattcaactatttaagaagcagtggtcgcatgaaaagaaaatatgcgatacgtgctaatacacagaatttctgattttgcagcaggtaccgttctaaatatgccgacacggttcctagtcaccgcagctctcttaggcatcttcagtctcggccacgcatgccagtttgattcaatcaaagatctcagtagcagagactatacactcattgcggcggagaatcacagctttcgatctcggaataacaatgctactcctatgactggcaagacagccatccacaacgctcgagtcttcgatggatatacgctcttaccgccagctacaatcatcattgatggcagtatcatcggggattttcaagacgattatagcgatatagtcgatcatgtcgatgccgataatggcgtcttgctgccaggcttgattgatgcccacgctcatccatctactatctcggacatgcaagatatgagtcgatatggcgtgacgacgacgctggtgatggcttgtttcgcgccacagctttgcaagtctttgatgaaccacaccggtcttgtcgatgtcattacagggtcactacccgcagcagctccgaatagcacacatggaaacattacgaccgctgtcgatggcaatggggatcgtttaatctacaattcgagcatggctacggaatggcttgaagatgcgttagcttggggaccggctttcgtcaaggttattgccgagtcgccgggcctaagtcaagaaactattaacatcttgaccaagacatcacaccagaagcagaaacgtgtggcttgtcacgctgctgattatgcctcgtatgtacaagctgcaactgctggagtcgacaacatccaacactcgccactcgacaggcccattgaactagccttggctaagggcatggcttgcaatcaacgtgtggcaacacccacgttgacaattatgaaagctatcagcaagacaaggccatcgaattataccgccgcggaagagagtgttaggcggctcaagcatgcgggtgtatccatacttgcaggtaccgacgcaaatcttcaaccgggtctcgtagcggaagtaccattcggatcaagtattcacgatgagctagacttgatggtgaaagcaggacttactgcaggagaagctttgcgcgcggctacctctactccggccaagcattggggcttatacgatagaggcacgatcgccccgggcaaacgagcagatctcctgttggtttctggaaatccgcttgaagacatcgcaaacacccgaaacattcaaaaggtatggcttgctggtgttcacttcgacggcgaaatcggcaaattttagaacaccatccgcttcgagaacttaattttggcggtaagccccaaagatatactcgatcttttcaacctgcaacgaccgagcatgccaaggattgaataaaagcagacgaaatatcaatagatcacattcaccagatcgacagcactcagtaatctgtgccatgatgtcatgcatgcctgtatacaacattacgcgtgaccgtcttcattgtggggtagattttggtggccatcagacaaaaacttggaaagaaagcaacattgactcgggtgtacctaagatacaggctatccaatcgctgaacacggatcagagttggacgagatgagtaattgatgcggtgggtgatagtctcatccagtggaggtcccctaactataccccctagggctagctaccagcgcccaactagggaaaag

SEQ ID NO: 2590 - DNA, 1275 bp, Muscodor strobelii
  misc_feature: SGI cDNA ID NO. 560499
  misc_feature: Elevated expression when VOC is produced
  misc_feature: Encodes the peptide sequence at SEQ ID NO 2591
atggctcgtccgcacattagagacttgggctacggcccgggctattacacaccaggacgacagaactcaattctcgatgtgcctggtgtacagatcgggcagaagacaatccacgatgaagaaaaaggggttcatgttggagttactctcatctatccccggggcactgtaaacacgcgcctgaagccatcctatgccgctgttcatacattgaatggaggcggtgagatgaccggaatgcatttcattaaagactgggggtttactggatctcctattgcattcactgactctatgtcatgtggcgcagtctatcaagctttaactaactacagctttgagctatcacgtagtctgaaagagggagacgaagctatgtactcgcatcacggctggcccgtggttggcgaaacgtggggcggtatgaacacggatattcatgactttaagtccactcttacctatgatcaagttgtcgaggccgtcaaagacgcagagagacgccagcaagtcgctgagggtggttatggcggtgggagcggcatgctatgcatgggccacaaaggaggaactggaactagcagccgccttatcccgcaagctgacaagaaggaagatctcgtacttggtgtcctcgttcagactaattttggacagaaggccatgctcaatatcggtggtgtaccagtggggaaactgctctatcgcgacgaactgaagaagactccgggacaaacgaaaatcgcggatgtaggagccaatcctgtctctgagggcagtattctcgtatgcgtagtcaccaacgcgcccttgctaccacatcagcttagaagagtcgctgcccgtgcttctctaggtatatctgccgttgggggactcgggaccggctacaactcctcaggcgatatcataatcgccctatctacggctgagaactgcgcgccagaggtgttgatgaagcatgaatggcggagaccagacctaaagaccaacagctatgcaggtggtcggccatctgtgcccacagggcaaatgagtggttctggattccgaagacccgtggagacgcaaacagttgaaacagtgaataaaggcctaaataaggaattatcgacacatttccttgctctggcagtgggcgaggcgactgaggaggcgatcttaaactcactctgccaagccgaagacctgaaaggtcacgatggaactttacataaaggtctagacgttgacagggtccgagaaatgctgaaggaacatcgttcataccagtga

SEQ ID NO: 2591 - protein, 424 aa, Muscodor strobelii
  misc_feature: SGI Peptide ID NO. 560499
  misc_feature (21)..(415): Pfam Id: PF03576 Pfam Desc: Peptidase family S58
  misc_feature (21)..(310): Pfam Id: PF03576 Pfam Desc: Peptidase family S58
  misc_feature (2)..(420): NCBI GI: 212540892 Blast Desc: conserved [Penicillium marneffei ATCC 18224] gi|210067900|gb|EEA21992.1| conserved [Penicillium marneffei ATCC 18224]
  misc_feature (2)..(420): NCBI GI: 242800265 Blast Desc: conserved [Talaromyces stipitatus ATCC 10500] gi|218716896|gb|EED16317.1| conserved [Talaromyces stipitatus ATCC 10500]
  misc_feature (7)..(421): NCBI GI: 154292378 Blast Desc: BC1G_14678 [Botryotinia fuckeliana B05.10] gi|150846157|gb|EDN21350.1| BC1G_14678 [Botryotinia fuckeliana B05.10]
  misc_feature (3)..(420): NCBI GI: 260062314 Blast Desc: RB2501_11992 [Robiginitalea biformata HTCC2501] gi|88783876|gb|EAR15047.1| RB2501_11992 [Robiginitalea biformata HTCC2501]
  misc_feature (14)..(420): NCBI GI: 189193181 Blast Desc: peptidase family T4 protein [Pyrenophora tritici-repentis Pt-1C-BFP] gi|187978493|gb|EDU45119.1| peptidase family T4 protein [Pyrenophora tritici-repentis Pt-1C-BFP]
  misc_feature (3)..(421): NCBI GI: 90415847 Blast Desc: GB2207_01402 [marine gamma proteobacterium HTCC2207] gi|90332221|gb|EAS47418.1| GB2207_01402 [marine gamma proteobacterium HTCC2207]
  misc_feature (14)..(420): NCBI GI: 46115440 Blast Desc: FG03562.1 [Gibberella zeae PH-1]
  misc_feature (14)..(420): NCBI GI: 39943622 Blast Desc: MGG_03822 [Magnaporthe grisea 70-15] gi|145014509|gb|EDJ99077.1| MGG_03822 [Magnaporthe grisea 70-15]
  misc_feature (14)..(421): NCBI GI: 46139117 Blast Desc: FG11073.1 [Gibberella zeae PH-1]
  misc_feature (14)..(419): NCBI GI: 238842655 Blast Desc: peptidase family T4 protein [Microsporum canis CBS 113480]
  misc_feature: Useful for introducing or modulating the production of volatile compounds
MARPHIRDLGYGPGYYTPGRQNSILDVPGVQIGQKTIHDEEKGVHVGVTLIYPRGTVNTRLKPSYAAVHTLNGGGEMTGMHFIKDWGFTGSPIAFTDSMSCGAVYQALTNYSFELSRSLKEGDEAMYSHHGWPVVGETWGGMNTDIHDFKSTLTYDQVVEAVKDAERRQQVAEGGYGGGSGMLCMGHKGGTGTSSRLIPQADKKEDLVLGVLVQTNFGQKAMLNIGGVPVGKLLYRDELKKTPGQTKIADVGANPVSEGSILVCVVTNAPLLPHQLRRVAARASLGISAVGGLGTGYNSSGDIIIALSTAENCAPEVLMKHEWRRPDLKTNSYAGGRPSVPTGQMSGSGFRRPVETQTVETVNKGLNKELSTHFLALAVGEATEEAILNSLCQAEDLKGHDGTLHKGLDVDRVREMLKEHRSYQ

SEQ ID NO: 2592 - DNA, 1428 bp, Muscodor strobelii
  misc_feature: SGI EST ID NO. CUFF.6485.0
  misc_feature: Variant of the nucleotide sequence at SEQ ID NO 2590
catggcgcatcacacatcattttgttggtatcttgtcccttaacctcgttagttgtatacgctttcgtagtcatggctcgtccgcacattagagacttgggctacggcccgggctattacacaccaggacgacagaactcaattctcgatgtgcctggtgtacagatcgggcagaagacaatccacgatgaagaaaaaggggttcatgttggagttactctcatctatccccggggcactgtaaacacgcgcctgaagccatcctatgccgctgttcatacattgaatggaggcggtgagatgaccggaatgcatttcattaaagactgggggtttactggatctcctattgcattcactgactctatgtcatgtggcgcagtctatcaagctttaactaactacagctttgagctatcacgtagtctgaaagagggagacgaagctatgtactcgcatcacggctggcccgtggttggcgaaacgtggggcggtatgaacacggatattcatgactttaagtccactcttacctatgatcaagttgtcgaggccgtcaaagacgcagagagacgccagcaagtcgctgagggtggttatggcggtgggagcggcatgctatgcatgggccacaaaggaggaactggaactagcagccgccttatcccgcaagctgacaagaaggaagatctcgtacttggtgtcctcgttcagactaattttggacagaaggccatgctcaatatcggtggtgtaccagtggggaaactgctctatcgcgacgaactgaagaagactccgggacaaacgaaaatcgcggatgtaggagccaatcctgtctctgagggcagtattctcgtatgcgtagtcaccaacgcgcccttgctaccacatcagcttagaagagtcgctgcccgtgcttctctaggtatatctgccgttgggggactcgggaccggctacaactcctcaggcgatatcataatcgccctatctacggctgagaactgcgcgccagaggtgttgatgaagcatgaatggcggagaccagacctaaagaccaacagctatgcaggtggtcggccatctgtgcccacagggcaaatgagtggttctggattccgaagacccgtggagacgcaaacagttgaaacagtggtacacagctcaattgattccatctttgtattagactccttggagctactttttcccattttcggcatagatctgactcctggatcacttgtttcaaaagtagacgggagtcattgtcctcgtgatcttgcgccttcgattcttatgcctcttgtaaccactgacaataccactatctcatagttatagcgtcggaacgtagctatagtggcgagtgtagtgatagcggtaagggcgacgatagtaacgagggtagtaataaatttccga

SEQ ID NO: 2593 - DNA, 504 bp, Muscodor strobelii
  misc_feature: SGI cDNA ID NO. 560500
  misc_feature: Encodes the peptide sequence at SEQ ID NO 2594
atgttctcgctttttgctatgaagtacctcattgtcgccgctctcgcggttattccaacctgtctggcttcgttcggtgggagatcaggcggtggtagccccttcgaccctcaacctccgcacggcaattttgtacagatgggtttcaacgatgacggtagcgtgtcagcaagcatactcattggtatgattggtcacgtctctggtctagttgtgcagcctgccagtccaaacgatccacccaaccgccagaagcaccgaagacaagcccaacagacttttatagattgcaagaaggggctagaacaagcatcgatgcatttttcgagtcctctcaccggaaacctgctggtttctggcgtccctccagcttgcatgactctcgccagtacgatgttcggcaatggcaaaccaatacatgtcgggcctgagtcgctcctgttccagaatttggacgatgacgatatgattgagctccaagctgctatagacgctcacacctag

SEQ ID NO: 2594 - protein, 167 aa, Muscodor strobelii
  misc_feature: SGI Peptide ID NO. 560500
MFSLFAMKYLIVAALAVIPTCLASFGGRSGGGSPFDPQPPHGNFVQMGFNDDGSVSASILIGMIGHVSGLVVQPASPNDPPNRQKHRRQAQQTFIDCKKGLEQASMHFSSPLTGNLLVSGVPPACMTLASTMFGNGKPIHVGPESLLFQNLDDDDMIELQAAIDAHT

SEQ ID NO: 2595 - DNA, 4728 bp, Muscodor strobelii
  misc_feature: SGI cDNA ID NO. 560501
  misc_feature: Encodes the peptide sequence at SEQ ID NO 2596
atggagagtgggtcagcgaaaaacgcgcccgtgggcgcgatgtctcttgacgatatatgggccaaagctgcaaaggattttgaagaactctgtggcaaatcgctcaaaaaaggagatatcaagagcttcgacgacgtccagaatcgaattcagaacagcgtcaggtcgtcgaatctcgatgctgagcaggaaagcaaatgggacaaggcaaagggctatggcctcgagtcccttcggtatttgaaaatgcttgttggtgctgcatctcaagcggttgcttttgctcctattccgtcgtctgtttcaaatattactagttctgcgctttgcttcgttttcgatatcccagtagctatcaaagggtacaacgacgccataaatgaggtcttcggtgaagtggcatcggcgctctcccaattccaaatctatcagtcgatgaatagtgtggacgacaaactcatttaccagatccatattgtcatggtgcatttcgtgaagctttgcgctcatgttatccagtatcgtcaaggtggcaaggcagagcgcttcttgagaaaattcaaatcggtattcgatgacgattccggcttagcagaccagatgacacagttcaagcaagctttgcaacaccatcgcgacgtcgagggaactatcaccctcgcaacagtagttgaatcgcgacaagatatcgccttgatgctgagtaaatctatcgtcttcgagaaaacaaccgaggaaacgcatcaaatcgtgcaatccctttatgcagaggctgatcgtgacaagtctctaaagaagatccgcgacgcgttgggcgtcccgctaactgtccggcttgatgggaaaactactaaaacgtgcacagacattcaccgcaaatgtctagatggaacgggcttgtggatatatgctcacagtgcctatattgcttggacatcaccaaaagacaacgatgggtcgcacgtcctcgccatatcaggtccgccctcatcaggcaaaaccgcagccgctgccctcattaccaaaagtctcgaagaagcaagaggacgaacttacgttgcacattatttcttcacacctaccagccagaaatcagatgaagctgagagaaacacgcctcaatcagctctaaaatacatggcatatcaaatcgcgcgtgttgacaccgctgtccaaaaagcgttgggtaaagcgtgcgagggcgaaccgggacagttccgcgctctgacaagattgaaagatttatgggagagattgaagatcggtacagcatctggaggagcgacgtattatcttgtcttcgatggacttgacaatctctcaaatgaccagcgggacatactcctggactttgtcttcagtccggttctagcagccagtcccggcggtcgagtgcgagtgctcgtaaccggacagtccgaagttttcagtagtagacctgtcacgaagcatgcactacggattcaaatggaagcccataatgagactgacatgcgtatgatcatagaagactctctggcacagcaagacatactggctgacgcgaagcctaattcaaatcaacaaaaggccaagaaaaagatcatcgaaagactaccacacaaggtgaaaggcagctattcgtcgttgcatttcgaactagatgagttcatccgcctgctaatgacgcggaccacgattgaagaacttgatcgcatgctcgaccagtcgagcagtagccatgagatagctatcaagaagctgcagaggtctttatctccggaagaaatagaagagttaaacgagctcttgaaatgggtactttattttgggcaaccaatgagcatagaagatcttgaggccgtcatgctcctcttttcggacacagaatccatagcgccattacaatatatcatcaagaataagtatcatactctaatgaaaattacgggaacgactgtcgccgcgtacgatggggtaggagagtattttcaacgagtcaacaatacccgcaataggccatcacgtaataaagaccaacccactattagcatgacaataacgataaacaatgtggatcaagagctatgtggtcattttttgtgggatcttgctcacaaagctatccgagacaagttcaaattcgatttcgattcagcttctaatgctttccacaatagccgtggcaccatttcaatagataagttcgacgcgcatcatactatcgtacagcggactttcaaattcctctatcaaggccctaagagcgaaacatcgaccttcagccgatatatttgtgcatggctgccgtaccaccttgaacagttgcgtttacttcaagaccgagaccaggggcacctctctccaaatgaactgcacgaaattggccaaaacttgtacgacctcttcaagcctgacggccgcctcctgagtcatcgaaacgtcttcgaagaaatctggtggtctgcaaaagagatagaagatgtgcagagatggttgatggactctgctgttgtgcgaaagttggaaagcagttggcgagaggaggtacaatttgcagttagtccaatgcagggatttatgaagcctttcgcaaaactgctcgtcgagaagtctttgcgagaaaggagttggcggcttcagaattcttgggattgggtcgaagaattcgtcaaggtggacgtgaagaagggtcaatttcccgaaccgctcgccctagagcgagagatgggcgagaaagatgacgatgtgaagagctgggatcgctttagctcttggtgtcagggcttcttaaaattttcggactctcagctggattccctgtggtgtgaacggctcgctgaccattcagcgtacttcgaaaacgatgacacatgtgtgacattgctctacgaacgcgcgctaaagaaagacaatcctagctggttgtgtcatcgcggcttcggaatggctcacttcaggttcggtcgaataacacatgcgatagagcaggtcaccttggcactcgaagaagcaaaaagaaacagtgcaaatccgaaggcagaaaagacagacatcttggaactgcatctcttactgggagactataattatgcagcaggagagcgtcaaaaggcagcaaagaactacgcccttgcaagccaaagcgaaaacccagaccaagcaagacgaggaacggtcggtcacttgaagtccaacttgaatcttccggatgccgaagaaacaaagagcttcttgaaaaaaatcttgacccaaatagacggagaagggagacccattgagaatctacttaagactattgctcgagacgaggatcacaatgctattgtcacaaagatgcttaccgcggcgaaagatgactcgaagctgctcaaggatgtcatgcagtctatggagacagccacggacccgccaatacctgggaacctcacagcaaaccttccagatgcgaaatatcgagagatggaagtccgcggagttttgctatacatgagaggtaatgccatctacaagtataagcttgtgcctgaaggcatagagcctatcgacgaagctctgcggctctggaaagaagctcgtgcgcaattaacgggtcttggtggaaataacgcttctattgcactaggaaatgccactgccgctctggcaaggcattatttccaaaatatgataaaaacacagaacatgacttacatcgacgagttagcaaagctggcagatgacgatgctgacagccatcggagcgattcgccgggatatttagcagtgttatatgccctacatgacaagaaggagctttcgagatctgtcctcaaacgtcgcttgaggcttgcgctacattttctttcggatgacacacctcacaatgattcattggcatactcaataatgttcaaaacactaatgcagtatggggacttactcaacggcggtgttgcaatgtcattatgcgggaagccggcaagagtcattgaagcgctgcatatcagcccggtcgatcatgatgttctcgctgccacatcgaacgcggataagcaaaaggtagtagacttcgctacgaaggtagcgacagaaattctacacaacgtcagatgtcctttccctggtgcccttggacaaagccagcatattgccatggcccggaaacacatcgataagctgctactcgcggggaaaaggagcgtcgagtcagagcccagtcttccagatgaatctagcagcgatattgtcgttggaatctccgacccaattagaaaaccagccctcacgatcttggcgaagcgtctatcagctatagaaccaacgatatcggatccaaggacgtgtgatgggactgcattggatggcaacatgtgtccgaatgtcttagattatgacaatgagatttatcactgtgtatactgctctgatcgagacttttgcaaagattgcctcaagcagttgcgaaatccagactccactgttgagattacagtgtgtgatcctggtcaccgatggatacgcattccacctcaaggactcgatctattccttggaccttcggccaaggacgtggtgatcccgaaggatgtcagatcagtggaaggtgacgataatgttctggaagtgatttgggacggggttggagcaacgaaaacgatgacggtggaagcgtggaaagagagtattgctaaagagtggaatatacctctggaggagatacgcaacaaggcggctcaggagactcagtatgaagatagttcatcgtag

SEQ ID NO: 2596 - protein, 1575 aa, Muscodor strobelii
  misc_feature: SGI Peptide ID NO. 560501
  misc_feature (3)..(949): NCBI GI: 67525769 Blast Desc: AN3342.2 [Aspergillus nidulans FGSC A4] gi|40744130|gb|EAA63310.1| AN3342.2 [Aspergillus nidulans FGSC A4] gi|259485680|tpe|CBF82907.1| TPA: conserved [Aspergillus FGSC
  misc_feature (15)..(944): NCBI GI: 119483526 Blast Desc: NFIA_093890 [Neosartorya fischeri NRRL 181] gi|119409822|gb|EAW19769.1| conserved [Neosartorya fischeri NRRL 181]
  misc_feature (16)..(869): NCBI GI: 171686048 Blast Desc: protein product [Podospora anserina] gi|170942985|emb|CAP68638.1| protein product [Podospora anserina]
  misc_feature (16)..(963): NCBI GI: 258569000 Blast Desc: [Uncinocarpus reesii 1704] gi|237906690|gb|EEP81091.1| [Uncinocarpus reesii 1704]
  misc_feature (15)..(844): NCBI GI: 238497494 Blast Desc: conserved [Aspergillus flavus NRRL3357] gi|220693256|gb|EED49601.1| conserved [Aspergillus flavus NRRL3357]
  misc_feature (16)..(1496): NCBI GI: 154287794 Blast Desc: conserved [Ajellomyces capsulatus NAm1] gi|150408333|gb|EDN03874.1| conserved [Ajellomyces capsulatus NAm1]
  misc_feature (16)..(1496): NCBI GI: 240276123 Blast Desc: neutral amino acid permease [Ajellomyces capsulatus H143]
  misc_feature (12)..(1298): NCBI GI: 255937537 Blast Desc: Pc13g13860 [Penicillium chrysogenum Wisconsin 54-1255] gi|211584415|emb|CAP92455.1| Pc13g13860 [Penicillium chrysogenum Wisconsin 54-1255]
  misc_feature (15)..(839): NCBI GI: 115388974 Blast Desc: [Aspergillus terreus NIH2624] gi|114194388|gb|EAU36088.1| [Aspergillus terreus NIH2624]
  misc_feature (12)..(826): NCBI GI: 238839104 Blast Desc: conserved [Microsporum canis CBS 113480]
MESGSAKNAPVGAMSLDDIWAKAAKDFEELCGKSLKKGDIKSFDDVQNRIQNSVRSSNLDAEQESKWDKAKGYGLESLRYLKMLVGAASQAVAFAPIPSSVSNITSSALCFVFDIPVAIKGYNDAINEVFGEVASALSQFQIYQSMNSVDDKLIYQIHIVMVHFVKLCAHVIQYRQGGKAERFLRKFKSVFDDDSGLADQMTQFKQALQHHRDVEGTITLATVVESRQDIALMLSKSIVFEKTTEETHQIVQSLYAEADRDKSLKKIRDALGVPLTVRLDGKTTKTCTDIHRKCLDGTGLWIYAHSAYIAWTSPKDNDGSHVLAISGPPSSGKTAAAALITKSLEEARGRTYVAHYFFTPTSQKSDEAERNTPQSALKYMAYQIARVDTAVQKALGKACEGEPGQFRALTRLKDLWERLKIGTASGGATYYLVFDGLDNLSNDQRDILLDFVFSPVLAASPGGRVRVLVTGQSEVFSSRPVTKHALRIQMEAHNETDMRMIIEDSLAQQDILADAKPNSNQQKAKKKIIERLPHKVKGSYSSLHFELDEFIRLLMTRTTIEELDRMLDQSSSSHEIAIKKLQRSLSPEEIEELNELLKWVLYFGQPMSIEDLEAVMLLFSDTESIAPLQYIIKNKYHTLMKITGTTVAAYDGVGEYFQRVNNTRNRPSRNKDQPTISMTITINNVDQELCGHFLWDLAHKAIRDKFKFDFDSASNAFHNSRGTISIDKFDAHHTIVQRTFKFLYQGPKSETSTFSRYICAWLPYHLEQLRLLQDRDQGHLSPNELHEIGQNLYDLFKPDGRLLSHRNVFEEIWWSAKEIEDVQRWLMDSAVVRKLESSWREEVQFAVSPMQGFMKPFAKLLVEKSLRERSWRLQNSWDWVEEFVKVDVKKGQFPEPLALEREMGEKDDDVKSWDRFSSWCQGFLKFSDSQLDSLWCERLADHSAYFENDDTCVTLLYERALKKDNPSWLCHRGFGMAHFRFGRITHAIEQVTLALEEAKRNSANPKAEKTDILELHLLLGDYNYAAGERQKAAKNYALASQSENPDQARRGTVGHLKSNLNLPDAEETKSFLKKILTQIDGEGRPIENLLKTIARDEDHNAIVTKMLTAAKDDSKLLKDVMQSMETATDPPIPGNLTANLPDAKYREMEVRGVLLYMRGNAIYKYKLVPEGIEPIDEALRLWKEARAQLTGLGGNNASIALGNATAALARHYFQNMIKTQNMTYIDELAKLADDDADSHRSDSPGYLAVLYALHDKKELSRSVLKRRLRLALHFLSDDTPHNDSLAYSIMFKTLMQYGDLLNGGVAMSLCGKPARVIEALHISPVDHDVLAATSNADKQKVVDFATKVATEILHNVRCPFPGALGQSQHIAMARKHIDKLLLAGKRSVESEPSLPDESSSDIVVGISDPIRKPALTILAKRLSAIEPTISDPRTCDGTALDGNMCPNVLDYDNEIYHCVYCSDRDFCKDCLKQLRNPDSTVEITVCDPGHRWIRIPPQGLDLFLGPSAKDVVIPKDVRSVEGDDNVLEVIWDGVGATKTMTVEAWKESIAKEWNIPLEEIRNKAAQETQYEDSSS

SEQ ID NO: 2597 - DNA, 2577 bp, Muscodor strobelii
  misc_feature: SGI EST ID NO. CUFF.6515.1
  misc_feature: Variant of the nucleotide sequence at SEQ ID NO 2595
gttgatggactctgctgttgtgcgaaagttggaaagcagttggcgagaggaggtacaatttgcagttagtccaatgcagggatttatgaagcctttcgcaaaactgctcgtcgagaagtctttgcgagaaaggagttggcggcttcagaattcttgggattgggtcgaagaattcgtcaaggtggacgtgaagaagggtcaatttcccgaaccgctcgccctagagcgagagatgggcgagaaagatgacgatgtgaagagctgggatcgctttagctcttggtgtcagggcttcttaaaattttcggactctcagctggattccctgtggtgtgaacggctcgctgaccattcagcgtacttcgaaaacgatgacacatgtgtgacattgctctacgaacgcgcgctaaagaaagacaatcctagctggttgtgtcatcgcggcttcggaatggctcacttcaggttcggtcgaataacacatgcgatagagcaggtcaccttggcactcgaagaagcaaaaagaaacagtgcaaatccgaaggcagaaaagacagacatcttggaactgcatctcttactgggagactataattatgcagcaggagagcgtcaaaaggcagcaaagaactacgcccttgcaagccaaagcgaaaacccagaccaagcaagacgaggaacggtcggtcacttgaagtccaacttgaatcttccggatgccgaagaaacaaagagcttcttgaaaaaaatcttgacccaaatagacggagaagggagacccattgagaatctacttaagactattgctcgagacgaggatcacaatgctattgtcacaaagatgcttaccgcggcgaaagatgactcgaagctgctcaaggatgtcatgcagtctatggagacagccacggacccgccaatacctgggaacctcacagcaaaccttccagatgcgaaatatcgagagatggaagtccgcggagttttgctatacatgagaggtaatgccatctacaagtataagcttgtgcctgaaggcatagagcctatcgacgaagctctgcggctctggaaagaagctcgtgcgcaattaacgggtcttggtggaaataacgcttctattgcactaggaaatgccactgccgctctggcaaggcattatttccaaaatatgataaaaacacagaacatgacttacatcgacgagttagcaaagctggcagatgacgatgctgacagccatcggagcgattcgccgggatatttagcagtgttatatgccctacatgacaagaaggagctttcgagatctgtcctcaaacgtcgcttgaggcttgcgctacattttctttcggatgacacacctcacaatgattcattggcatactcaataatgttcaaaacactaatgcagtatggggacttactcaacggcggtgttgcaatgtcattatgcgggaagccggcaagagtcattgaagcgctgcatatcagcccggtcgatcatgatgttctcgctgccacatcgaacgcggataagcaaaaggtagtagacttcgctacgaaggtagcgacagaaattctacacaacgtcagatgtcctttccctggtgcccttggacaaagccagcatattgccatggcccggaaacacatcgataagctgctactcgcggggaaaaggagcgtcgagtcagagcccagtcttccagatgaatctagcagcgatattgtcgttggaatctccgacccaattagaaaaccagccctcacgatcttggcgaagcgtctatcagctatagaaccaacgatatcggatccaaggacgtgtgatgggactgcattggatggcaacatgtgtccgaatgtcttagattatgacaatgagatttatcactgtgtatactgctctgatcgagacttttgcaaagattgcctcaagcagttgcgaaatccagactccactgttgagattacagtgtgtgatcctggtcaccgatggatacgcattccacctcaaggactcgatctattccttggaccttcggccaaggacgtggtgatcccgaaggatgtcagatcagtggaaggtgacgataatgttctggaagtgatttgggacggggttggagcaacgaaaacgatgacggtggaagcgtggaaagagagtattgctaaagagtggaatatacctctggaggagatacgcaacaaggcggctcaggagactcagtatgaagatagttcatcgtagccgagcatatctgcatataatcttcaatagtccttaaccagatacaatttatgggagaagatgaatgcggtgacacaaacaaacataatgaattggccacatgttggacaacagtggaagccaacctacatcgcctgtctgtaactatgtcgggtccttgtactctacgtacagtgtatacattacgccaatggcgagcgtcagaagctactactttgaaaattccgtggttgtcgtgcttgtgaagctaatgatcattgctctaagcatgccgcatgatcgcgatagcctgacgaggtgcaccgagtatatttgcgtaatcc

SEQ ID NO: 2598 - DNA, 987 bp, Muscodor strobelii
  misc_feature: SGI cDNA ID NO. 560502
  misc_feature: Reduced expression when VOC is produced
  misc_feature: Encodes the peptide sequence at SEQ ID NO 2599
atggcgcccctcccacggatcgtagttggcgggcccgactacaagaagcgctttgagccaagagagctattacagatggttcgagccgcgaagttggctcctcctgatgccgcaagcctcgacaatgtcgccaacgaaaagtcacaggtccgtatcatagctgaaggacaccaagacgcaatcaatttctcagtcaatgcggccaaaccaatcccagatactcagcgtcgtcttctgctccactctgatggatcccttggagagaaacctcggcggctcaagggaacaggtgtcgtttataaatgtcttggtggctctggcaccaatgactggcagacgaacatatggatacacgacgggtgtgcagtgcatggagatttcgacatcaccgatattgaagttatcgccatctcgcgcgctttggatatcgctctcaaggtgttggacacctggatcaaagaacatccaactgaagataccccccgcgtcattgtcttcacggattgcattgcggctttaaatttcatcaatcgaaatccaggtcattgcggcattgagggaaatgacttggcggatcgtatggcactccttgccggtcgtttcgcaggcgaaatcccatcgggtattggccatggctcaggcttttcgatgttctcattatctgagttgttttcaaatgcagttgtcaagcatatgggatccaacaccctttgggaagagccatctaagaactcgcatgttgactggacatcgacacgtgtccaaagtctgtacaaaaaggccaacaaggaactgcctaaaaagacgaaaggcattaagaaacaaaccatagacttttatatgcacaagtgggtggagcgactacaagttttgattgcgaagagtcgattgcagtacgcacctagagaatgggaggaagaggtcgacaacagtggcgacctcgccaaaggagcaatggcaggccaaaaacgaaaacgacaactatag

SEQ ID NO: 2599 - protein, 328 aa, Muscodor strobelii
  misc_feature: SGI Peptide ID NO. 560502
  misc_feature: Useful for introducing or modulating the production of volatile compounds
MAPLPRIVVGGPDYKKRFEPRELLQMVRAAKLAPPDAASLDNVANEKSQVRIIAEGHQDAINFSVNAAKPIPDTQRRLLLHSDGSLGEKPRRLKGTGVVYKCLGGSGTNDWQTNIWIHDGCAVHGDFDITDIEVIAISRALDIALKVLDTWIKEHPTEDTPRVIVFTDCIAALNFINRNPGHCGIEGNDLADRMALLAGRFAGEIPSGIGHGSGFSMFSLSELFSNAVVKHMGSNTLWEEPSKNSHVDWTSTRVQSLYKKANKELPKKTKGIKKQTIDFYMHKWVERLQVLIAKSRLQYAPREWEEEVDNSGDLAKGAMAGQKRKRQL

SEQ ID NO: 2600 - DNA, 3816 bp, Muscodor strobelii
  misc_feature: SGI EST ID NO. CUFF.6513.0
  misc_feature: Variant of the nucleotide sequence at SEQ ID NO 2598
ttccaagtcccttcattgtcgcgtccttggcatccgacaactttttcttgggtttgatttatgcgcgcgtacgtccatttgtcgaaccctaagaggctattttcacttctctctgttcccttcactcccaactgcactcacgacaagtgaagagcacatgctatggcgcccctcccacggatcgtagttggcgggcccgactacaagaagcgctttgagccaagagagctattacagatggttcgagccgcgaagttggctcctcctgatgccgcaagcctcgacaatgtcgccaacgaaaagtcacaggtccgtatcatagctgaaggacaccaagacgcaatcaatttctcagtcaatgcggccaaaccaatcccagatactcagcgtcgtcttctgctccactctgatggatcccttggagagaaacctcggcggctcaagggaacaggtgtcgtttataaatgtcttggtggctctggcaccaatgactggcagacgaacatatggatacacgacgggtgtgcagtgcatggagatttcgacatcaccgatattgaagttatcgccatctcgcgcgctttggatatcgctctcaaggtgttggacacctggatcaaagaacatccaactgaagataccccccgcgtcattgtcttcacggattgcattgcggctttaaatttcatcaatcgagtgcgacacggcgtccccatcgagaacgatacaatcccactacattttcatttacacctcctcgaacctctcaaccggctaatccaactcggcgccaatgttgacctgagatagaatccaggtcattgcggcattgagggaaatgacttggcggatcgtatggcactccttgccggtcgtttcgcaggcgaaatcccatcgggtattggccatggctcaggcttttcgatgttctcattatctgagttgttttcaaatgcagttgtcaagcatatgggatccaacaccctttgggaagagccatctaagaactcgcatgttgactggacatcgacacgtgtccaaagtctgtacaaaaaggccaacaaggaactgcctaaaaagacgaaaggcattaagaaacaaaccatagacttttatatgcacaagtgggtggagcgactacaagttttgattgcgaagagtcgattgcagtacgcacctagagaatgggaggaagaggtcgacaacagtggcgacctcgccaaaggagcaatggcaggccaaaaacgaaaacgacaactatagcgtatcaactcaaagggaggtctggacgacattcagactactctatttctaatatcacacgactcaggagcgcagcagtgcttcatgttattggagttcgtattatgtgattgatgctttcgcatgtcggcgcaagaacagtcgagcatcgtcatcgttgatattgttcaactcctcaagtgtcgaaagcttcgtcacaaccgcttgcgattggcacggcgaaacctgctgtgccgcctgtcgacagatataatgcttttctttcttccctcattggcgttggtttacgaagcagaatgctttgctccagcgcaattgactgtcggtcgtgcgacaagatctaggtttgtatcgaactttgggggccaaaactgatcaataccataaatagctcgacaactgccttgtttgagatcatcgtaagctaagatgacaatatagcgcatcgaccccagcgaaatgcgactgtacggggcgcaaacgtgctctcataggcggatgctgcagctgcgcataattgggctgacctgaacgacaggggtgccggcgagcagtcgagcagtcgttttgcggctttcaggtgtctcatatacataataacccaagagaagcttggctttcgcaaatgccgacctctttggtatgactttgtatcattcatacctactacgtggtgggtagatttgcgacatgacgaaggcaaaagagatggagagtgggtcagcgaaaaacgcgcccgtgggcgcgatgtctcttgacgatatatgggccaaagctgcaaaggattttgaagaactctgtggcaaatcgctcaaaaaaggagatatcaagagcttcgacgacgtccagaatcgaattcagaacagcgtcaggtcgtcgaatctcgatgctgagcaggaaagcaaatgggacaaggcaaagggctatggcctcgagtcccttcggtatttgaaaatgcttgttggtgctgcatctcaagcggttgcttttgtaggtcgagtatgtcaatgctgtctgacgtgtgcttacgcctataggctcctattccgtcgtctgtttcaaatattactagttctgcgctttgcttcgttttcgatatcccagtagctatcaaagggtacaacgacgccataaatgaggtcttcggtgaagtggcatcggcgctctcccaattccaaatctatcagtcgatgaatagtgtggacgacaaactcatttaccagatccatattgtcatggtgcatttcgtgaagctttgcgctcatgttatccagtatcgtcaaggtggcaaggcagagcgcttcttgagaaaattcaaatcggtattcgatgacgattccggcttagcagaccagatgacacagttcaagcaagctttgcaacaccatcgcgacgtcgagggaactatcaccctcgcaacagtagttgaatcgcgacaagatatcgccttgatgctgagtaaatctatcgtcttcgagaaaacaaccgaggaaacgcatcaaatcgtgcaatccctttatgcagaggctgatcgtgacaagtctctaaagaagatccgcgacgcgttgggcgtcccgctaactgtccggcttgatgggaaaactactaaaacgtgcacagacattcaccgcaaatgtctagatggaacgggcttgtggatatatgctcacagtgcctatattgcttggacatcaccaaaagacaacgatgggtcgcacgtcctcgccatatcaggtccgccctcatcaggcaaaaccgcagccgctgccctcattaccaaaagtctcgaagaagcaagaggacgaacttacgttgcacattatttcttcacacctaccagccagaaatcagatgaagctgagagaaacacgcctcaatcagctctaaaatacatggcatatcaaatcgcgcgtgttgacaccgctgtccaaaaagcgttgggtaaagcgtgcgagggcgaaccgggacagttccgcgctctgacaagattgaaagatttatgggagagattgaagatcggtacagcatctggaggagcgacgtattatcttgtcttcgatggacttgacaatctctcaaatgaccagcgggacatactcctggactttgtcttcagtccggttctagcagccagtcccggcggtcgagtgcgagtgctcgtaaccggacagtccgaagttttcagtagtagacctgtcacgaagcatgcactacggattcaaatggaagcccataatgagactgacatgcgtatgatcatagaagactctctggcacagcaagacatactggctgacgcgaagcctaattcaaatcaacaaaaggccaagaaaaagatcatcgaaagactaccacacaaggtgaaaggcagctattcgtcgttgcatttcgaactagatgagttcatccgcctgctaatgacgcggaccacgattgaagaacttgatcgcatgctcgaccagtcgagcagtagccatgagatagctatcaagaagctgcagaggtctttatctccggaagaaatagaagagttaaacgagctcttgaaatggg

SEQ ID NO: 2601 - DNA, 1566 bp, Muscodor strobelii
  misc_feature: SGI cDNA ID NO. 560503
  misc_feature: Encodes the peptide sequence at SEQ ID NO 2602
atggctgaagtcgtgttttctgttggcacaaactccgagttaatgccatcaaggcgatatgactatgccaatggtccagcgaaagtgcccacgccttggcgaagaggaaggccacatggagctacgcagaaatcgaaaccgaagaagactctgcccgaagtttcatgcgagttcattagcgtgacacctggaggggcgggaactaaagctatcgacgtagagtctcggtctaaaatccgtcgacatgccaagcttcaagcaggtcggcagcatgagcctacctcagcccaagaaacagacgcgcaagatacgcggagtcaggcagtgataccaaagctcagagttggcagtattcctggtgccgatccgtttgatgcgtttcccgccaagcttgaaccatatatgctcaatttgcttaagtattatgtcaatgacatatggagggagttctataaactagaggccctggtgggatgtaacccaatggccgacttctggatgccactggctttccaggatcccgccttacttcacactatgatcggatgcgccgatgcatggattacgggctacagcacttctaagcggcccggaagagaagtggtgcacttgcatcagagcatctccatagtcaacgaacgactacaaacggcaatgaacgtcgcatctgaagtgaccatagcaattgtcgcaggaatggcacttctggagaaaggccttggccgccacgagcattggagaatccacatgcgcgggcttaagcggctagtcgatatgatcggaggattgtacagcttgtcccacagaccgttagtcctgtataaaatataccgggccgacctttacggtgccctcgatgcggtggaaacacctttctttcctagatcaataatcggcccgtacgaagcaaatgtgttgcgagcttttcgaagtagcggcttcaacacagtgagggctagtgtcaagcttgatgatactctgtgcttgtgtattcatcagcttgaagaagcgatgcaattctgggacaggctaagagcaagagatggcgaatctctcaccccgttaacagcagctcaaactcgacatttgcttacgcaagtgcagtacacattgatatcaccagatctccaggacaaattcgatacccagacttgtgaaggccagatgatggagtactgtcgcatatcgttaatcctctataccctaactgttctgcgagagcggccgcccactacgtccatgggccaacaaatcggcactacatatcagcgagtagtaacgaatctgatcgaatcactgcgaaatccatcaggagatcatgtacctgcagtttcattgccctttgagtttcacctctggacgctcttcctcgcgtcaaatgtcatgagagatcatcgggttaaaggccgaagctgggtgctggagaccttcgaagagcttgcgagcatgaggattgttctgggttgcgactggcataacttgaaatcccaaatgtgcacgtatctatggattccggagattcatgatgtcagttttgcgaccttgcggtcggaaatgagaagctga

SEQ ID NO: 2602 - protein, 521 aa, Muscodor strobelii
  misc_feature: SGI Peptide ID NO. 560503
  misc_feature (2)..(520): NCBI GI: 145248119 Blast Desc: An13g01700 [Aspergillus niger] gi|134081057|emb|CAK41569.1| protein product [Aspergillus niger]
  misc_feature (2)..(237): NCBI GI: 169784944 Blast Desc: [Aspergillus oryzae RIB40] gi|83775680|dbj|BAE65800.1| protein product [Aspergillus oryzae]
  misc_feature (2)..(237): NCBI GI: 242819655 Blast Desc: conserved [Talaromyces stipitatus ATCC 10500] gi|218713827|gb|EED13251.1| conserved [Talaromyces stipitatus ATCC 10500]
  misc_feature (58)..(485): NCBI GI: 156032734 Blast Desc: [Sclerotinia sclerotiorum 1980] gi|154699175|gb|EDN98913.1| [Sclerotinia sclerotiorum 1980]
  misc_feature (117)..(510): NCBI GI: 169594610 Blast Desc: SNOG_00031 [Phaeosphaeria nodorum SN15] gi|111070406|gb|EAT91526.1| SNOG_00031 [Phaeosphaeria nodorum SN15]
  misc_feature (138)..(308): NCBI GI: 116208100 Blast Desc: [Chaetomium globosum CBS 148.51] gi|88183940|gb|EAQ91408.1| [Chaetomium globosum CBS 148.51]
  misc_feature (71)..(293): NCBI GI: 171688826 Blast Desc: protein product [Podospora anserina] gi|170944375|emb|CAP70485.1| protein product [Podospora anserina]
  misc_feature (137)..(509): NCBI GI: 256730301 Blast Desc: NECHADRAFT_45111 [Nectria haematococca mpVI 77-13-4]
  misc_feature (45)..(305): NCBI GI: 240279977 Blast Desc: conserved [Ajellomyces capsulatus H143]
  misc_feature (13)..(407): NCBI GI: 115398363 Blast Desc: [Aspergillus terreus NIH2624] gi|114192964|gb|EAU34664.1| [Aspergillus terreus NIH2624]
MAEVVFSVGTNSELMPSRRYDYANGPAKVPTPWRRGRPHGATQKSKPKKTLPEVSCEFISVTPGGAGTKAIDVESRSKIRRHAKLQAGRQHEPTSAQETDAQDTRSQAVIPKLRVGSIPGADPFDAFPAKLEPYMLNLLKYYVNDIWREFYKLEALVGCNPMADFWMPLAFQDPALLHTMIGCADAWITGYSTSKRPGREVVHLHQSISIVNERLQTAMNVASEVTIAIVAGMALLEKGLGRHEHWRIHMRGLKRLVDMIGGLYSLSHRPLVLYKIYRADLYGALDAVETPFFPRSIIGPYEANVLRAFRSSGFNTVRASVKLDDTLCLCIHQLEEAMQFWDRLRARDGESLTPLTAAQTRHLLTQVQYTLISPDLQDKFDTQTCEGQMMEYCRISLILYTLTVLRERPPTTSMGQQIGTTYQRVVTNLIESLRNPSGDHVPAVSLPFEFHLWTLFLASNVMRDHRVKGRSWVLETFEELASMRIVLGCDWHNLKSQMCTYLWIPEIHDVSFATLRSEMRS

SEQ ID NO: 2603 - DNA, 1237 bp, Muscodor strobelii
  misc_feature: SGI EST ID NO. CUFF.6504.0
  misc_feature: Variant of the nucleotide sequence at SEQ ID NO 2601
ctggatgccactggctttccaggatcccgccttacttcacactatgatcggatgcgccgatgcatggattacgggctacagcacttctaagcggcccggaagagaagtggtgcacttgcatcagagcatctccatagtcaacgaacgactacaaacggcaatgaacgtcgcatctgaagtgaccatagcaattgtcgcaggaatggcacttctggagaaaggccttggccgccacgagcattggagaatccacatgcgcgggcttaagcggctagtcgatatgatcggaggattgtacagcttgtcccacagaccgttagtcctgtataaaatataccgggccgacctttacggtgccctcgatgcggtggaaacacctttctttcctagatcaataatcggcccgtacgaagcaaatgtgttgcgagcttttcgaagtagcggcttcaacacagtgagggctagtgtcaagcttgatgatactctgtgcttgtgtattcatcagcttgaagaagcgatgcaattctgggacaggctaagagcaagagatggcgaatctctcaccccgttaacagcagctcaaactcgacatttgcttacgcaagtgcagtacacattgatatcaccagatctccaggacaaattcgatacccagacttgtgaaggccagatgatggagtactgtcgcatatcgttaatcctctataccctaactgttctgcgagagcggccgcccactacgtccatgggccaacaaatcggcactacatatcagcgagtagtaacgaatctgatcgaatcactgcgaaatccatcaggagatcatgtacctgcagtttcattgccctttgagtttcacctctggacgctcttcctcgcgtcaaatgtcatgagagatcatcgggttaaaggccgaagctgggtgctggagaccttcgaagagcttgcgagcatgaggattgttctgggttgcgactggcataacttgaaatcccaaatgtgcacgtatctatggattccggagattcatgatgtcagttttgcgaccttgcggtcggaaatgagaagctgatttcagactcgtgcatcaatggggccgccaacgcctggtccttgtccgtaaactagtgtcgactgtgtttctttcttatctgagttccatatctcagaaacgattgttcgtattcaaatgcgatgattctcaggctaatattgacttatgtcatggttataaaat

SEQ ID NO: 2604 - DNA, 942 bp, Muscodor strobelii
  misc_feature: SGI cDNA ID NO. 560504
  misc_feature: Encodes the peptide sequence at SEQ ID NO 2605
atgaccacttatacgcgagaaacgaccgcagagcaagtcgcagatgactgcaaagctcagattctcaacaaaactgttctcataaccggtgcgacaccgggaggtctgggagctgtattcggtaccatcatcgcgaagtacggtccagcttctatcattttggcaactcgcgatgtgaacaaggctcaggagacagcccaagaaatcagctctgcagctcctaatgtccgtgtgtactgcatcgagttggatctcgggtctctctcgcagattccaaaggccgctgagcaaatcaactctcttgacgagaatatcgatgtgatcatcaataatgctggtgttatggctcctccatactccaagacaatcgacggcatcgagtctcagtttgccatcaaccacattggccattttctccttacaaacctcctattgccgaagctactggctcgaaacgtacctattcgcgtcgtcaatgtgagcagtggtggccatcgataccatcatgtacggttgcaagattggaattttgatgatggcaaggagtacaatcgttggcacggctatggtcagtccaagtcagccaacaacttgttctcggtcgcactagctaagaagctgggtgacaagggactcgtctccgtgtcccttcatcccggtgtcatcactactaccaatttgtctcgctcggtagtcatggaagacttcgaggaaactggcaatgataaatttacgtataagacaccctccgcaggagtggcaacacatgtctttgctgctttccatccatctcttgatgcgccagacttaaatgggtcttacctggaggattgtggggttagagatgcacgcaaagttcccagctgggctagagaccctattgatgctgaaagtctctggaaactgagtgagaagcttgtttctcggcagttcgactattaa

SEQ ID NO: 2605 - protein, 313 aa, Muscodor strobelii
  misc_feature: SGI Peptide ID NO. 560504
  misc_feature (24)..(175): Pfam Id: PF00106 Pfam Desc: short chain dehydrogenase
  misc_feature (24)..(163): Pfam Id: PF00106 Pfam Desc: short chain dehydrogenase
  misc_feature (1)..(313): NCBI GI: 145248117 Blast Desc: An13g01690 [Aspergillus niger] gi|134081056|emb|CAK41568.1| protein product [Aspergillus niger]
  misc_feature (1)..(313): NCBI GI: 242819661 Blast Desc: short-chain dehydrogenase, [Talaromyces stipitatus ATCC 10500] gi|218713828|gb|EED13252.1| short-chain dehydrogenase, [Talaromyces stipitatus ATCC 10500]
  misc_feature (1)..(313): NCBI GI: 212539079 Blast Desc: short-chain dehydrogenase, [Penicillium marneffei ATCC 18224] gi|210069437|gb|EEA23528.1| short-chain dehydrogenase, [Penicillium marneffei ATCC 18224]
  misc_feature (4)..(313): NCBI GI: 171685268 Blast Desc: protein product [Podospora anserina] gi|170942595|emb|CAP68247.1| protein product [Podospora anserina]
  misc_feature (1)..(231): NCBI GI: 169784946 Blast Desc: [Aspergillus oryzae RIB40] gi|83775681|dbj|BAE65801.1| protein product [Aspergillus oryzae]
  misc_feature (4)..(313): NCBI GI: 238839103 Blast Desc: WW domain-containing oxidoreductase [Microsporum canis CBS 113480]
  misc_feature (4)..(313): NCBI GI: 39972379 Blast Desc: MGG_07491 [Magnaporthe grisea 70-15] gi|145016681|gb|EDK01111.1| MGG_07491 [Magnaporthe grisea 70-15]
  misc_feature (2)..(306): NCBI GI: 67522653 Blast Desc: AN1783.2 [Aspergillus nidulans FGSC A4] gi|40744803|gb|EAA63959.1| AN1783.2 [Aspergillus nidulans FGSC A4] gi|259487128|tpe|CBF85553.1| TPA: short-chain dehydrogenase,
  misc_feature (4)..(313): NCBI GI: 115387141 Blast Desc: conserved [Aspergillus terreus NIH2624] gi|114195160|gb|EAU36860.1| conserved [Aspergillus terreus NIH2624]
  misc_feature (4)..(313): NCBI GI: 159124059 Blast Desc: short-chain dehydrogenase, [Aspergillus fumigatus A1163]
  misc_feature (22)..(224): SWISSPROT Homolog: EC 1.1.1.62 Estradiol 17-beta-dehydrogenase
  misc_feature (22)..(224): SWISSPROT Homolog: EC 1.1.1.270 3-keto-steroid reductase
MTTYTRETTAEQVADDCKAQILNKTVLITGATPGGLGAVFGTIIAKYGPASIILATRDVNKAQETAQEISSAAPNVRVYCIELDLGSLSQIPKAAEQINSLDENIDVIINNAGVMAPPYSKTIDGIESQFAINHIGHFLLTNLLLPKLLARNVPIRVVNVSSGGHRYHHVRLQDWNFDDGKEYNRWHGYGQSKSANNLFSVALAKKLGDKGLVSVSLHPGVITTTNLSRSVVMEDFEETGNDKFTYKTPSAGVATHVFAAFHPSLDAPDLNGSYLEDCGVRDARKVPSWARDPIDAESLWKLSEKLVSRQFDY

SEQ ID NO: 2606 - DNA, 2364 bp, Muscodor strobelii
  misc_feature: SGI cDNA ID NO. 560505
  misc_feature: Encodes the peptide sequence at SEQ ID NO 2607
atggcctcctacacccaaggtcatgaggcatcagactctgaccagcttgcgctccccgccgaccctgcacaccaacaacaacaccagtcgcaccatcagtccccgcaggcacatcaccaccagctgcaacagcaacaacagcacacatatcaatccaccgcagcctcatcgccgcccttgccgccgactctcaaccacagcaacatcatcacccaggcacagctcgtcgagcaggtccttagctccatccccgcggccaccgctgcccaccatggcctccagatcctgcagactgcatctgctgcagctcccgctgctcccctctcgccgcctgccgacatagctcaacacttcgtccactcgctgccccaacagccccctcagcctgctcagccttctcccatctcccccactgctgccaccaacctcgcccagcagtatgcccagtccgccgcactgcagttggctgatgattcccaattcgcccccgtcgccaaccaaactcaagtaagggcctttatcgatggcacacctccggcccataaggtaacccgccttcgtcgcgcttgtgacatgtgcagctcgcgcaaagtcaagtgcgacgaatctggccccccgtgtaagccatgcgccgatcttcaagtcgagtgtaccttcaggcgcgagatgaagcggcgaggccctcccaacaaacatgccgaggccgccaaggctgcgaagcgacaccgcggcgaggacgagtcgcccccggccgcggagacattcacgcccatcgccgctaccaatggcagcggcacgttggatgccgaagccattgcgccttggcccatcctgcagcttctcgtcgacgacttcttcacctatcttcatccgctcattcctttccctcacgagccatccttccgccacaacttcaacagccgagtagatcgcaccgatcgcgaattcttggccctcctgtccagcatggtgggagtccttgtcgcctccttccccagatgtgcccgtgcccatctcaaggcccagcacagcactgagctgtttcccaccgccgtaaccatgatcgatcactgccgaaatattgcactagaggcccgaggcgcgtcgcttctgacaaaggaagagccgagcgtagacgatgcagcaacctgctattttctgggcttggccgccggatacacattgcgatggaccacttgcacgcagttcatgactttcaccttgaacatctgcaagaagctggttactcatacatcaccagacttaaccagccctgcaggtcctttctctagagatatgggcaacggggcttccgctaccaataagcccgtagaccacattaaagatcagattgcgaagcgaatattctgggtcatggtggcaggaattcgatccatgacgcagctcggcgcttcacttcacgagttaccgctccctccaccgactacacacgagccatatcccgagcaaccagcagaggtcgatgacgaatttatattctccgatcagatcttgccgcagcccgaaggcaccatctctctgattaccggattcaacagaaatatccgcacgtatatgaccatgaatgaactgatcggagtggaaatgtgttatggcatcaactttttcgattggagtgctcagaagaatatcctgagcaacggactcattgccgccaaagatgccattcaggacttgccagaagaattacaggtacataatgaagtcaaggccgactcaacgcagttggatccagccgggcttgaccaggttggattaaagtacttcccaccatctttcccagaggcccaacccgagcatgacgttcgacgtgcatttgctgagcagcccatgaggcgacgacagctccagtatgagattcaaaaagccaatatacacgcttctcatctcgctacgcgttcctttttcgttgagcgctatctcaatctacgcgaagcccacccggagaatgccggccaagaaaaggacgagagagacgagatggtggaagctgaccgagaactcgtcatccagaatctactaattgtgctggcttccatcagccagcgaaacatggaaccaaatggacaatcaatcatcaataagattcgacaggtggctagcactcttgtgcagggggcaatggatcgcaagggtccggttgccatcaaggccgaggatcatctgaatcggtttgtcgacatactgatgaagctagagagaagtggaactactgccgtagttgggacggcatccagtacgatgggaccacaggaggaagaggaagaattcaggaattggtcgagcctgaaagaactgcagctgcagttcatatcatctggtggcttccttggcaatggttga

SEQ ID NO: 2607 - protein, 787 aa, Muscodor strobelii
  misc_feature: SGI Peptide ID NO. 560505
  misc_feature (188)..(226): Pfam Id: PF00172 Pfam Desc: Fungal Zn(2)-Cys(6) binuclear cluster domain
  misc_feature (88)..(786): NCBI GI: 145616717 Blast Desc: MGG_03413 [Magnaporthe grisea 70-15] gi|145023213|gb|EDK06710.1| MGG_03413 [Magnaporthe grisea 70-15]
  misc_feature (182)..(786): NCBI GI: 46127093 Blast Desc: FG07924.1 [Gibberella zeae PH-1]
  misc_feature (182)..(786): NCBI GI: 256721836 Blast Desc: [Nectria haematococca mpVI 77-13-4]
  misc_feature (182)..(785): NCBI GI: 261361242 Blast Desc: conserved [Verticillium albo-atrum VaMs.102]
  misc_feature (126)..(785): NCBI GI: 164423617 Blast Desc: NCU10080 [Neurospora crassa OR74A] gi|157070168|gb|EAA28609.2| conserved [Neurospora crassa OR74A]
  misc_feature (56)..(784): NCBI GI: 171681417 Blast Desc: protein product [Podospora anserina] gi|170940667|emb|CAP65895.1| protein product [Podospora anserina]
  misc_feature (155)..(784): NCBI GI: 156042694 Blast Desc: SS1G_11145 [Sclerotinia sclerotiorum 1980] gi|154695531|gb|EDN95269.1| SS1G_11145 [Sclerotinia sclerotiorum 1980]
  misc_feature (176)..(785): NCBI GI: 116179254 Blast Desc: CHGG_00255 [Chaetomium globosum CBS 148.51] gi|88184552|gb|EAQ92020.1| CHGG_00255 [Chaetomium globosum CBS 148.51]
  misc_feature (178)..(785): NCBI GI: 189211137 Blast Desc: conserved [Pyrenophora tritici-repentis Pt-1C-BFP] gi|187977992|gb|EDU44618.1| conserved [Pyrenophora tritici-repentis Pt-1C-BFP]
  misc_feature (184)..(784): NCBI GI: 255935327 Blast Desc: Pc13g02490 [Penicillium chrysogenum Wisconsin 54-1255] gi|211583310|emb|CAP91318.1| Pc13g02490 [Penicillium chrysogenum Wisconsin 54-1255]
MASYTQGHEASDSDQLALPADPAHQQQHQSHHQSPQAHHHQLQQQQQHTYQSTAASSPPLPPTLNHSNIITQAQLVEQVLSSIPAATAAHHGLQILQTASAAAPAAPLSPPADIAQHFVHSLPQQPPQPAQPSPISPTAATNLAQQYAQSAALQLADDSQFAPVANQTQVRAFIDGTPPAHKVTRLRRACDMCSSRKVKCDESGPPCKPCADLQVECTFRREMKRRGPPNKHAEAAKAAKRHRGEDESPPAAETFTPIAATNGSGTLDAEAIAPWPILQLLVDDFFTYLHPLIPFPHEPSFRHNFNSRVDRTDREFLALLSSMVGVLVASFPRCARAHLKAQHSTELFPTAVTMIDHCRNIALEARGASLLTKEEPSVDDAATCYFLGLAAGYTLRWTTCTQFMTFTLNICKKLVTHTSPDLTSPAGPFSRDMGNGASATNKPVDHIKDQIAKRIFWVMVAGIRSMTQLGASLHELPLPPPTTHEPYPEQPAEVDDEFIFSDQILPQPEGTISLITGFNRNIRTYMTMNELIGVEMCYGINFFDWSAQKNILSNGLIAAKDAIQDLPEELQVHNEVKADSTQLDPAGLDQVGLKYFPPSFPEAQPEHDVRRAFAEQPMRRRQLQYEIQKANIHASHLATRSFFVERYLNLREAHPENAGQEKDERDEMVEADRELVIQNLLIVLASISQRNMEPNGQSIINKIRQVASTLVQGAMDRKGPVAIKAEDHLNRFVDILMKLERSGTTAVVGTASSTMGPQEEEEEFRNWSSLKELQLQFISSGGFLGNG

SEQ ID NO: 2608 - DNA, 5414 bp, Muscodor strobelii
  misc_feature: SGI EST ID NO. CUFF.6746.1
  misc_feature: Variant of the nucleotide sequence at SEQ ID NO 2606
cttgccgtggtttaccaacccggcgcggcgcaagcagagacccgatggcctcctacacccaaggtcatgaggcatcagactctgaccagcttgcgctccccgccgaccctgcacaccaacaacaacaccagtcgcaccatcagtccccgcaggcacatcaccaccagctgcaacagcaacaacagcacacatatcaatccaccgcagcctcatcgccgcccttgccgccgactctcaaccacagcaacatcatcacccaggcacagctcgtcgagcaggtccttagctccatccccgcggccaccgctgcccaccatggcctccagatcctgcagactgcatctgctgcagctcccgctgctcccctctcgccgcctgccgacatagctcaacacttcgtccactcgctgccccaacagccccctcagcctgctcagccttctcccatctcccccactgctgccaccaacctcgcccagcagtatgcccagtccgccgcactgcagttggctgatgattcccaattcgcccccgtcgccaaccaaactcaagtaagggcctttatcgatggcacacctccggcccataaggtaacccgccttcgtcgcgcttgtgacatgtgcagctcgcgcaaagtcaagtgcgacgaatctggccccccgtgtaagccatgcgccgatcttcaagtcgagtgtaccttcaggcgcgagatgaagcggcgaggccctcccaacaaacatgccgaggccgccaaggctgcgaagcgacaccgcggcgaggacgagtcgcccccggccgcggagacattcacgcccatcgccgctaccaatggcagcggcacgttggatgccgaagccattgcgccttggcccatcctgcagcttctcgtcgacgacttcttcacctatcttcatccgctcattcctttccctcacgagccatccttccgccacaacttcaacagccgagtagatcgcaccgatcgcgaattcttggccctcctgtccagcatggtgggagtccttgtcgcctccttccccagatgtgcccgtgcccatctcaaggcccagcacagcactgagctgtttcccaccgccgtaaccatgatcgatcactgccgaaatattgcactagaggcccgaggcgcgtcgcttctgacaaaggaagagccgagcgtagacgatgcagcaacctgctattttctgggcttggccgccggatacacattgcgatggaccacttgcacgcagttcatgactttcaccttgaacatctgcaagaagctggttactcatacatcaccagacttaaccagccctgcaggtcctttctctagagatatgggcaacggggcttccgctaccaataagcccgtagaccacattaaagatcagattgcgaagcgaatattctgggtcatggtggcaggaattcgatccatgacgcagctcggcgcttcacttcacgagttaccgctccctccaccgactacacacgagccatatcccgagcaaccagcagaggtcgatgacgaatttatattctccgatcagatcttgccgcagcccgaaggcaccatctctctgattaccggattcaacagaaatatccgcacgtatatgaccatgaatgaactgatcggagtggaaatgtgttatggcatcaactttttcgattggagtgctcagaagaatatcctgagcaacggactcattgccgccaaagatgccattcaggacttgccagaagaattacaggtacataatgaagtcaaggccgactcaacgcagttggatccagccgggcttgaccaggttggattaaagtacttcccaccatctttcccagaggcccaacccgagcatgacgttcgacgtgcatttgctgagcagcccatgaggcgacgacagctccagtatgagattcaaaaagccaatatacacgcttctcatctcgctacgcgttcctttttcgttgagcgctatctcaatctacgcgaagcccacccggagaatgccggccaagaaaaggacgagagagacgagatggtggaagctgaccgagaactcgtcatccagaatctactaattgtgctggcttccatcagccagcgaaacatggaaccaaatggacaatcaatcatcaataagattcgacaggtggctagcactcttgtgcagggggcaatggatcgcaagggtccggttgccatcaaggccgaggatcatctgaatcggtttgtcgacatactgatgaagctagagagaagtggaactactgccgtagttgggacggcatccagtacgatgggaccacaggaggaagaggaagaattcaggaattggtcgagcctgaaagaactgcagctgcagttcatatcatctggtggcttccttggcaatggttgataagagatatgctctgtcaatcccttgtactattataatgtgaacatgtaaaccatactacagatggcatcgccatgatcagaggcaaagatcatggaactgatgcattagcctagatactaggtaggtaggataaggcgaaagtgatattttatgagctctcagagcttgcgacacgcgtggtggtatttttaacatcagggacctggcttggctttgtcgtccaggattcaggattcccggtagagatgcgcctactccaaacgttgcaggggaacttgccaggcaccttgatggccaaattaacacaacaacggcgatcctacactttagactaaattgctccttttgaataccctcattccgaacgcgatgcttcattgcgatattcctctcttcgattactttcatttgtcgtacaggacaccgcggagaagcggatgttaccgcattcgcacgggcgggcactgatagcaatcggagcatcggagtacagatggcgcttctacgtcaccactttaaggtcaagtccgtagacaatgctccgcgcgaccccttactgatgtcgtcatgaaacggtcaaagagtgattcgatgggtcgggatcgggatgagctccttgcaggtgaggagttataaagctgtggttcctaaattttgtactgaaggagctgtttatctgatctaatagtaactcacttgcttgctcctcgacattgtctgtaaaatcagaatttgcggagtgcctaatattgagaaaacgttgccaaaatgccttacccagacgaatttgagggcttcatgatcaatgagcttggtaaataccaagagttcaagaagcagactttcaagcccaagaaattcggcgacaacgacatcgacatcaagatcgaatgctgcggcgtctgcggcagcgacgttcacacgataacaggaggctggggtgatgccccaacaccaatctgcgtcggtcacgaagtcgtcggcaaggccgtcaaagtcggatctaacgtcaaagatgtgaaagtcggagaccgcgtcggtgtcggtgcgcaggtctggtcctgtctgaagtgcgggaactgcaagcacgacaatgagaactactgccctgacatggtcgatacttacggtgctccgtaccctaaggaagtcgatcccgatgagacgattagtcaaggtggttactcatcgcatattcgtgctcatgagtacttcgtgttccccattcctgatgagattccatctcatttggctgcgcctatgctttgcgcgggtctgaccgtctggtcgcctcttgtgcgcgctggtgttggacctggaaagagcgtcgctattgttgggcttggtggattaggtcactttgctgtgatgtgggcgaatgccctcggtgctgaggtaaccgtcatctctcactcgccacataagaaagacgacgctatcaaacttggtgcgaaatacttcgtttcatcaggagaaaaagactgggcgaagcctctagctttctctttcgactttgtgctcaacactgccgatatgacgcatacctttgatctttcggcgtatctatcgatcctcaaggtcgggtgcagattccaccaggttggactccccgatgagccgattaaggagttagatccgaagttgttcatgcctaatggtagctcgattggagctagtcatatcggaaatagaccggagtgtcttgctatgttgaagttggctgcagagaagaaactgttccctatggttgagacggtgccgatttctgagaaggggtgtgcggaggttgttgagagagtcaagaataataaggtgcattatcggtttacgcttacggattatgataaggcttttggggcttaagttgaaggaagggtttgggaggtgttgggtgtgtggttgtaatgtggtaatagtaatattacgtgactacttacattatgaaataaccaaagagatcttcaatagatgtactgtgtgatagctcatgtgaagataattactggctgggatagttcattcttcatagatctgtcttccagagcatacgcttcgggaaacatatcctgctgcccgatacaatcatcgcctattgcactcacgcaaccgaatttcatgatgagtatatactttgtgccttactcattcgaaccgctttgctaacccgtacctgatatctacaacaaaaaggccaaaacagcagtgcccatcacactcgcaaataaagcgccaccaaccgccctatcagccaaccccatcacaccattctcatccgtaatattctccccttctgaagcaatctgccccgccaacatcgtcctattatcatagaacgcattttgtgtataataaggcgccgcagcagtaattaacagattattaagcgtagtattcgtacagttactcagcgttccccgagcatacatataggaccccgcccagtccagcgtcacattctcgttaggtttaatctcgaggattatactatctgactttaaaatatgcgagtcgacggtcgtgctgatgctcgtgaagttcacttttgtgtggttcttgtcgtacgcggtgtacgcggtctcgaccagatggaagatggagtctgcttcgtcgtcaggtaggtcgagtggtgtgtctacggacccgtacccgagttcgcgctcggcggtgatgttgtaggtcttttgcgagaagaaacagcttttcgttgcgtctggaggacattgtgcaacttcgagggggattgcgtgcgcgaatgagaagtgcccattgtcgtcgtccttgtaggttgcgtcgatgtcgaaagttgcgcagcttgcgcttgcgatggattggaggagggataggctgagcaataggcttagcccggcaatttgtaatttggtcgtcattctgttgacgatgtttcttttgtattatgatgatatcgaatatgtctgtctttttgttgttgtatcgcacgaggcaagtttgcaaagtcgattaaacatccagattgtgtaagtg

SEQ ID NO: 2609 - DNA, 1095 bp, Muscodor strobelii
  misc_feature: SGI cDNA ID NO. 560506
  misc_feature: Reduced expression when VOC is produced
  misc_feature: Encodes the peptide sequence at SEQ ID NO 2610
atgccttacccagacgaatttgagggcttcatgatcaatgagcttggtaaataccaagagttcaagaagcagactttcaagcccaagaaattcggcgacaacgacatcgacatcaagatcgaatgctgcggcgtctgcggcagcgacgttcacacgataacaggaggctggggtgatgccccaacaccaatctgcgtcggtcacgaagtcgtcggcaaggccgtcaaagtcggatctaacgtcaaagatgtgaaagtcggagaccgcgtcggtgtcggtgcgcaggtctggtcctgtctgaagtgcgggaactgcaagcacgacaatgagaactactgccctgacatggtcgatacttacggtgctccgtaccctaaggaagtcgatcccgatgagacgattagtcaaggtggttactcatcgcatattcgtgctcatgagtacttcgtgttccccattcctgatgagattccatctcatttggctgcgcctatgctttgcgcgggtctgaccgtctggtcgcctcttgtgcgcgctggtgttggacctggaaagagcgtcgctattgttgggcttggtggattaggtcactttgctgtgatgtgggcgaatgccctcggtgctgaggtaaccgtcatctctcactcgccacataagaaagacgacgctatcaaacttggtgcgaaatacttcgtttcatcaggagaaaaagactgggcgaagcctctagctttctctttcgactttgtgctcaacactgccgatatgacgcatacctttgatctttcggcgtatctatcgatcctcaaggtcgggtgcagattccaccaggttggactccccgatgagccgattaaggagttagatccgaagttgttcatgcctaatggtagctcgattggagctagtcatatcggaaatagaccggagtgtcttgctatgttgaagttggctgcagagaagaaactgttccctatggttgagacggtgccgatttctgagaaggggtgtgcggaggttgttgagagagtcaagaataataaggtgcattatcggtttacgcttacggattatgataaggcttttggggcttaa

SEQ ID NO: 2610 - protein, 364 aa, Muscodor strobelii
  misc_feature: SGI Peptide ID NO. 560506
  misc_feature (33)..(153): Pfam Id: PF08240 Pfam Desc: Alcohol dehydrogenase GroES-like domain
  misc_feature (183)..(320): Pfam Id: PF00107 Pfam Desc: Zinc-binding dehydrogenase
  misc_feature (1)..(362): NCBI GI: 46130850 Blast Desc: FG08980.1 [Gibberella zeae PH-1]
  misc_feature (4)..(364): NCBI GI: 156064787 Blast Desc: SS1G_00401 [Sclerotinia sclerotiorum 1980] gi|154691263|gb|EDN91001.1| SS1G_00401 [Sclerotinia sclerotiorum 1980]
  misc_feature (4)..(364): NCBI GI: 154322749 Blast Desc: BC1G_00717 [Botryotinia fuckeliana B05.10] gi|150848051|gb|EDN23244.1| BC1G_00717 [Botryotinia fuckeliana B05.10]
  misc_feature (1)..(363): NCBI GI: 85097107 Blast Desc: NCU04823 [Neurospora crassa OR74A] gi|28921872|gb|EAA31146.1| conserved [Neurospora crassa OR74A]
  misc_feature (1)..(362): NCBI GI: 39977173 Blast Desc: MGG_06489 [Magnaporthe grisea 70-15] gi|145016085|gb|EDK00575.1| MGG_06489 [Magnaporthe grisea 70-15]
  misc_feature (1)..(363): NCBI GI: 169624594 Blast Desc: SNOG_15556 [Phaeosphaeria nodorum SN15] gi|160705206|gb|EAT76931.2| SNOG_15556 [Phaeosphaeria nodorum SN15]
  misc_feature (1)..(364): NCBI GI: 261354431 Blast Desc: NADP-dependent alcohol dehydrogenase [Verticillium albo-atrum VaMs.102]
  misc_feature (1)..(363): NCBI GI: 189199314 Blast Desc: NADP-dependent alcohol dehydrogenase C [Pyrenophora tritici-repentis Pt-1C-BFP] gi|187983093|gb|EDU48581.1| NADP-dependent alcohol dehydrogenase C [Pyrenophora Pt-1C-BFP]
  misc_feature (1)..(362): NCBI GI: 171681866 Blast Desc: protein product [Podospora anserina] gi|170940892|emb|CAP66542.1| protein product [Podospora anserina]
  misc_feature (3)..(362): NCBI GI: 116203065 Blast Desc: CHGG_09417 [Chaetomium globosum CBS 148.51] gi|88177935|gb|EAQ85403.1| CHGG_09417 [Chaetomium globosum CBS 148.51]
  misc_feature (1)..(362): SWISSPROT Homolog: EC 1.1.1.2 Alcohol dehydrogenase (NADP(+))
  misc_feature: Useful for introducing or modulating the production of volatile compounds
MPYPDEFEGFMINELGKYQEFKKQTFKPKKFGDNDIDIKIECCGVCGSDVHTITGGWGDAPTPICVGHEVVGKAVKVGSNVKDVKVGDRVGVGAQVWSCLKCGNCKHDNENYCPDMVDTYGAPYPKEVDPDETISQGGYSSHIRAHEYFVFPIPDEIPSHLAAPMLCAGLTVWSPLVRAGVGPGKSVAIVGLGGLGHFAVMWANALGAEVTVISHSPHKKDDAIKLGAKYFVSSGEKDWAKPLAFSFDFVLNTADMTHTFDLSAYLSILKVGCRFHQVGLPDEPIKELDPKLFMPNGSSIGASHIGNRPECLAMLKLAAEKKLFPMVETVPISEKGCAEVVERVKNNKVHYRFTLTDYDKAFGA

SEQ ID NO: 2611 - DNA, 5414 bp, Muscodor strobelii; identical to SEQ ID NO: 2608
  misc_feature: SGI EST ID NO. CUFF.6746.1
  misc_feature: Variant of the nucleotide sequence at SEQ ID NO 2609

SEQ ID NO: 2612 - DNA, 711 bp, Muscodor strobelii
  misc_feature: SGI cDNA ID NO. 560507
  misc_feature: Elevated expression when VOC is produced
  misc_feature: Encodes the peptide sequence at SEQ ID NO 2613
atgacgaccaaattacaaattgccgggctaagcctattgctcagcctatccctcctccaatccatcgcaagcgcaagctgcgcaactttcgacatcgacgcaacctacaaggacgacgacaatgggcacttctcattcgcgcacgcaatccccctcgaagttgcacaatgtcctccagacgcaacgaaaagctgtttcttctcgcaaaagacctacaacatcaccgccgagcgcgaactcgggtacgggtccgtagacacaccactcgacctacctgacgacgaagcagactccatcttccatctggtcgagaccgcgtacaccgcgtacgacaagaaccacacaaaagtgaacttcacgagcatcagcacgaccgtcgactcgcatattttaaagtcagatagtataatcctcgagattaaacctaacgagaatgtgacgctggactgggcggggtcctatatgtatgctcggggaacgctgagtaactgtacgaatactacgcttaataatctgttaattactgctgcggcgccttattatacacaaaatgcgttctatgataataggacgatgttggcggggcagattgcttcagaaggggagaatattacggatgagaatggtgtgatggggttggctgatagggcggttggtggcgctttatttgcgagtgtgatgggcactgctgttttggcctttttgttgtag

SEQ ID NO: 2613 - protein, 236 aa, Muscodor strobelii
  misc_feature: SGI Peptide ID NO. 560507
  misc_feature: Useful for introducing or modulating the production of volatile compounds
MTTKLQIAGLSLLLSLSLLQSIASASCATFDIDATYKDDDNGHFSFAHAIPLEVAQCPPDATKSCFFSQKTYNITAERELGYGSVDTPLDLPDDEADSIFHLVETAYTAYDKNHTKVNFTSISTTVDSHILKSDSIILEIKPNENVTLDWAGSYMYARGTLSNCTNTTLNNLLITAAAPYYTQNAFYDNRTMLAGQIASEGENITDENGVMGLADRAVGGALFASVMGTAVLAFLL

SEQ ID NO: 2614 - DNA, 1056 bp, Muscodor strobelii
  misc_feature: SGI cDNA ID NO. 560508
  misc_feature: Reduced expression when VOC is produced
  misc_feature: Encodes the peptide sequence at SEQ ID NO 2615
atgtcgtcggggctgacgagacgtcgtggaggtgttggtggcgccggcgctacgaacgaatccgagtcaagcaacactgtcgtgaaccgctcccagtcctccaacaacgtccgcgacaacggccccgagacgagctacgagaacagcgagaacggccataagatcgccttcgacccccgcgacatcagcgaaagcgcagagagaagcaaacagcccaagctcacattgatggacgaggtcgtgttgctgggtctcaaagataagcagggatacctctcgttctggaatgataacatcagctatgccttacgagggtgtatcgtcatagagctggccttccgaggtcgcattagcatgcagaaagatccctcgaggcggcgcttccccttagcagaccgcgtcatcgaagtcatcgacgacaccctgaccggcgaggtactattggacgaggccttgaaaatgatgaagcagagcgagaagatgagcgtcggcacgtggatcgacctcatgagcggcgagacctggaatctcatgaagatagggtaccagctcaagcaagtccgtgaaagactctgcaaaggtctggtcgacaaaggcatcctgcggaccgagaagcgaaacttcctcctcttcgacatggctacccaccccgtagccgacggcggcgccaaagacgagattcggcggcgcgtcaggaacgtcctcactcaacgtaccgtcgtgctgcccagctcccagtttctccccgataacctcgagttccgatacgtgcgcaccatcgccatgatctgcgctgcctatgctgccaatgttctcgagaacgccctgactaccctgggtcacgaggcccgcgagcgcgccttcacacagacggacgaactgctcgccgaatactctcagtggccgtttggccgaaagccgagctccactggtatcggtgccaacattgcccaggttatttcagaagaggtcaacggagccaaggacaaggagttacagcttgaagtcgtcgcggcctgtctgagcgtcttcacccgtctagactcgctattgtaa

SEQ ID NO: 2615 - protein, 351 aa, Muscodor strobelii
  misc_feature: SGI Peptide ID NO. 560508
  misc_feature (66)..(346): Pfam Id: PF05719 Pfam Desc: Golgi phosphoprotein 3 (GPP34)
  misc_feature (2)..(351): NCBI GI: 39974029 Blast Desc: conserved [Magnaporthe grisea 70-15] gi|145018220|gb|EDK02499.1| conserved [Magnaporthe grisea 70-15]
  misc_feature (1)..(351): NCBI GI: 156039523 Blast Desc: conserved [Sclerotinia sclerotiorum 1980] gi|154697635|gb|EDN97373.1| conserved [Sclerotinia sclerotiorum 1980]
  misc_feature (1)..(351): NCBI GI: 46123937 Blast Desc: FG06346.1 [Gibberella zeae PH-1]
  misc_feature (1)..(351): NCBI GI: 226505550 Blast Desc: LOC100273440 [Zea mays] gi|194704114|gb|ACF86141.1| [Zea mays]
  misc_feature (31)..(351): NCBI GI: 169599785 Blast Desc: SNOG_02718 [Phaeosphaeria nodorum SN15] gi|111068329|gb|EAT89449.1| SNOG_02718 [Phaeosphaeria nodorum SN15]
  misc_feature (2)..(351): NCBI GI: 189191496 Blast Desc: vacuolar protein sorting-associated protein 74 [Pyrenophora tritici-repentis Pt-1C-BFP] gi|187973693|gb|EDU41192.1| vacuolar protein sorting-associated
  misc_feature (29)..(351): NCBI GI: 116203681 Blast Desc: conserved [Chaetomium globosum CBS 148.51] gi|88175852|gb|EAQ83320.1| conserved [Chaetomium globosum CBS 148.51]
  misc_feature (2)..(351): NCBI GI: 171679461 Blast Desc: protein product [Podospora anserina] gi|170939356|emb|CAP64584.1| protein product [Podospora anserina]
  misc_feature (2)..(351): NCBI GI: 85092803 Blast Desc: vacuolar protein sorting-associated protein 74 [Neurospora crassa OR74A] gi|28920993|gb|EAA30317.1| vacuolar protein sorting-associated protein 74 [Neurospora crassa OR74A]
  misc_feature (19)..(351): NCBI GI: 70991126 Blast Desc: Golgi phosphoprotein 3 (GPP34) domain containing protein [Aspergillus fumigatus Af293] gi|66848044|gb|EAL88374.1| Golgi phosphoprotein 3 (GPP34) domain containing protein Af293] 3
  misc_feature: Useful for introducing or modulating the production of volatile compounds
MSSGLTRRRGGVGGAGATNESESSNTVVNRSQSSNNVRDNGPETSYENSENGHKIAFDPRDISESAERSKQPKLTLMDEVVLLGLKDKQGYLSFWNDNISYALRGCIVIELAFRGRISMQKDPSRRRFPLADRVIEVIDDTLTGEVLLDEALKMMKQSEKMSVGTWIDLMSGETWNLMKIGYQLKQVRERLCKGLVDKGILRTEKRNFLLFDMATHPVADGGAKDEIRRRVRNVLTQRTVVLPSSQFLPDNLEFRYVRTIAMICAAYAANVLENALTTLGHEARERAFTQTDELLAEYSQWPFGRKPSSTGIGANIAQVISEEVNGAKDKELQLEVVAACLSVFTRLDSLL

SEQ ID NO: 2616 - DNA, 3884 bp, Muscodor strobelii
  misc_feature: SGI EST ID NO. CUFF.6848.0
  misc_feature: Variant of the nucleotide sequence at SEQ ID NO 2614
ttcagtccggttaagctccaaatcccattgcaacaaggtttctctatgtacaatctgctatcgacaatacatttctatcgaagtcatccttgtttctgccaccgtattctcgcatcgcatcgagttacctcttagtattgactgcgcgtacctgggattgatatctataattgcccgactactagacgaatagtctcacaagctggtagacctcgagagcatcttagcacatagagccgcctagtcgtgtgatccacctgtggcattgggaccacccgctgtccgtttggcgttagtgagccaagcccgcgctgttcttggcccgcggtgcaggtggtgtctgcagcaggcctgggtttgcctgtccaacgcctatcgcctggggcccccaaaatcatcacccttgaaaggagacgagcggaaaagtggccggtcagcttctatcccgacattccatcgacattgatatcgccatcggcatcaattaccatcgacctcgtcgctgccattgcctgatccgtgccggcggacaattcccctccttgcgccgttgaaccagccaccacaccactggtcctgaactgtgtctgtactcttgctcgtatctgccgtcgccgtaccgcccccaacatctgcagctcctcctcctcttcttccacggcttcccgagaaccacacattacacatctagaagcatgtcgtcggggctgacgagacgtcgtggaggtgttggtggcgccggcgctacgaacgaatccgagtcaagcaacactgtcgtgaaccgctcccagtcctccaacaacgtccgcgacaacggccccgagacgagctacgagaacagcgagaacggccataagatcgccttcgacccccgcgacatcagcgaaagcgcagagagaagcaaacagcccaagctcacattgatggacgaggtcgtgttgctgggtctcaaagataagcagggatacctctcgttctggaatgataacatcagctatgccttacgagggtgtatcgtcatagagctggccttccgaggtcgcattagcatgcagaaagatccctcgaggcggcgcttccccttagcagaccgcgtcatcgaagtcatcgacgacaccctgaccggcgaggtactattggacgaggccttgaaaatgatgaagcagagcgagaagatgagcgtcggcacgtggatcgacctcatgagcggcgagacctggaatctcatgaagatagggtaccagctcaagcaagtccgtgaaagactctgcaaaggtctggtcgacaaaggcatcctgcggaccgagaagcgaaacttcctcctcttcgacatggctacccaccccgtagccgacggcggcgccaaagacgagattcggcggcgcgtcaggaacgtcctcactcaacgtaccgtcgtgctgcccagctcccagtttctccccgataacctcgagttccgatacgtgcgcaccatcgccatgatctgcgctgcctatgctgccaatgttctcgagaacgccctgactaccctgggtcacgaggcccgcgagcgcgccttcacacagacggacgaactgctcgccgaatactctcagtggccgtttggccgaaagccgagctccactggtatcggtgccaacattgcccaggttatttcagaagaggtcaacggagccaaggacaaggagttacagcttgaagtcgtcgcggcctgtctgagcgtcttcacccgtctagactcgctattgtaaaaaactcgcggtgtgctgtagtggcagaacggctttggcgcaacctcatttccgtaccccaaccttcactcacaatcgaaatcactgcgtcaccccatgaagcaacatacgagacgatagaggacagaaacctggagtacagcctcgacggcagaacggatcttacgaaagatatcccgattcatgaattgagcgagatgggacgcaggatggatggatagatatatgaaaaatcgttttcgctatcttacgaaagcccacgcccaaaccacaaccaaaagatggcaagcagctgaagggaaaatgggctgagtggtctggatgcacagagggactcgcaaaactttccctcacagctgactatggttagggttgtcttatgttgtaatagttaaaacgttatggaataccaatggtcttttttccctgttattgacgatgctcacttcacttcagataattggatatatgccgcgctctgtactctcacggcatatagattttacatgctctcacaacataccacaacaaacccggcatcataagtcataaatctctccagcctcatcaaacccctgtagcctttctcaacttcgcctgccaccctcccttttcaaaaagccacaaagcctcaatagcgaacgccctcgcactcctatgacccctcccctcctcaagactagcctctgctttcaaactgcgcataatctcgccctcgtcgatctgtctccagagacctatactaacatcatcctgcctcgtccctccgaactgtccaacgcctaatctgtataggatccgcccgagcgtctgatacgccatacagcgctgtcctggcacggcactccgacatagtcgtgcgagctcggcgattgtgtatcctgcggattcgggagcttcgccatgatggtggagaccgaggtttgatgggagggcgcgtgagattcgcggaggtaggagggcgccaaagaagtcgaagcgtagggagctgatggggagggtggattggtctgggtggtagggggagtcgagatctgctggtgagtcttctgtggggatgggtgccatccaggctagttttgatgggtcggctggtaaggaggggaagtatttgctgtgtaggttcgcgaggaagttcgggtcggaggggtcgaggtcgtctggttgcggtgcgcgggggaaatgggtgtgagagtggtcgtggggttggattatgtggtctactggtggtgtggcgggtgcggtgtcgtcctctgcgcgttgcgccgtttgactagattgtgagggctttagctctgtttgttttggtgatatggagggtttagacggtgcggtctccagaggtttgcttgattcgggagtttgtatggttttgactggaggttcgctgggctgaggatcgggaggactggatgtatcttctatctttatttccggtggaggtttgggcgctttggtcgttgttgaaggctcgtcttcttcgccagattttatcttgtcgaagtcaggcgtatttgcaccatcgtccaaatttgcacgtttcaggagcatctgcagtatggacggatcaagaccattgaagagttgttgtcttgcttgctcgatttcccgcggcgacatggatgctagcctctcattattctcgcgatctatgctctccttttcgctgggtagtgagggtcggctggacgtagctgccggcgatgggtcatcggtcggaggggagagcggttgatcgcccgaagatagaaacacatttgacttctgctctggcgggtgaccctgccgcttttgtttgaatgcggatatcttgccgcgcttcttgtgttcgggaaagcctgtagttgtggacttgagctgagggaaggatggcgccttgggctcgtctacttctttctccttgacatcgaggacgaagagctgtgaagccatggtgaagtctggcgatgaaaagataggccgagggccagatgtgcggtttgctgtttccttattctctgggattcagtgatgaacagagaggttgctgttgctcaagagcgttgccagttgtgtatcgaaatggcgtagaataaattcacgtttgacgcaatccacgtcaaaatgatcggccgcccacccaagggacgttca

SEQ ID NO: 2617 - DNA, 1365 bp, Muscodor strobelii
  misc_feature: SGI cDNA ID NO. 560509
  misc_feature: Reduced expression when VOC is produced
  misc_feature: Encodes the peptide sequence at SEQ ID NO 2618
atggcttcacagctcttcgtcctcgatgtcaaggagaaagaagtagacgagcccaaggcgccatccttccctcagctcaagtccacaactacaggctttcccgaacacaagaagcgcggcaagatatccgcattcaaacaaaagcggcagggtcacccgccagagcagaagtcaaatgtgtttctatcttcgggcgatcaaccgctctcccctccgaccgatgacccatcgccggcagctacgtccagccgaccctcactacccagcgaaaaggagagcatagatcgcgagaataatgagaggctagcatccatgtcgccgcgggaaatcgagcaagcaagacaacaactcttcaatggtcttgatccgtccatactgcagatgctcctgaaacgtgcaaatttggacgatggtgcaaatacgcctgacttcgacaagataaaatctggcgaagaagacgagccttcaacaacgaccaaagcgcccaaacctccaccggaaataaagatagaagatacatccagtcctcccgatcctcagcccagcgaacctccagtcaaaaccatacaaactcccgaatcaagcaaacctctggagaccgcaccgtctaaaccctccatatcaccaaaacaaacagagctaaagccctcacaatctagtcaaacggcgcaacgcgcagaggacgacaccgcacccgccacaccaccagtagaccacataatccaaccccacgaccactctcacacccatttcccccgcgcaccgcaaccagacgacctcgacccctccgacccgaacttcctcgcgaacctacacagcaaatacttcccctccttaccagccgacccatcaaaactagcctggatggcacccatccccacagaagactcaccagcagatctcgactccccctaccacccagaccaatccaccctccccatcagctccctacgcttcgacttctttggcgccctcctacctccgcgaatctcacgcgccctcccatcaaacctcggtctccaccatcatggcgaagctcccgaatccgcaggatacacaatcgccgagctcgcacgactatgtcggagtgccgtgccaggacagcgctgtatggcgtatcagacgctcgggcggatcctatacagattaggcgttggacagttcggagggacgaggcaggatgatgttagtataggtctctggagacagatcgacgagggcgagattatgcgcagtttgaaagcagaggctagtcttgaggaggggaggggtcataggagtgcgagggcgttcgctattgaggctttgtggctttttgaaaagggagggtggcaggcgaagttgagaaaggctacaggggtttga

SEQ ID NO: 2618 - protein, 454 aa, Muscodor strobelii
  misc_feature: SGI Peptide ID NO. 560509
  misc_feature (314)..(387): Pfam Id: PF08620 Pfam Desc: RPAP1-like, C-terminal
  misc_feature (91)..(139): Pfam Id: PF08621 Pfam Desc: RPAP1-like, N-terminal
  misc_feature (1)..(449): NCBI GI: 256732903 Blast Desc: NECHADRAFT_59788 [Nectria haematococca mpVI 77-13-4]
  misc_feature (1)..(449): NCBI GI: 39942482 Blast Desc: MGG_03321 [Magnaporthe grisea 70-15] gi|145015670|gb|EDK00160.1| MGG_03321 [Magnaporthe grisea 70-15]
  misc_feature (1)..(449): NCBI GI: 46123949 Blast Desc: FG06352.1 [Gibberella zeae PH-1]
  misc_feature (1)..(449): NCBI GI: 85089605 Blast Desc: NCU06859 [Neurospora crassa OR74A] gi|28919334|gb|EAA28789.1| [Neurospora crassa OR74A]
  misc_feature (1)..(449): NCBI GI: 116203629 Blast Desc: CHGG_09698 [Chaetomium globosum CBS 148.51] gi|88175826|gb|EAQ83294.1| CHGG_09698 [Chaetomium globosum CBS 148.51]
  misc_feature (6)..(446): NCBI GI: 154294307 Blast Desc: BC1G_13926 [Botryotinia fuckeliana B05.10] gi|150844765|gb|EDN19958.1| BC1G_13926 [Botryotinia fuckeliana B05.10]
  misc_feature (6)..(446): NCBI GI: 156039391 Blast Desc: SS1G_11832 [Sclerotinia sclerotiorum 1980] gi|154697569|gb|EDN97307.1| SS1G_11832 [Sclerotinia sclerotiorum 1980]
  misc_feature (1)..(448): NCBI GI: 261361217 Blast Desc: conserved [Verticillium albo-atrum VaMs.102]
  misc_feature (248)..(449): NCBI GI: 171679487 Blast Desc: protein product [Podospora anserina] gi|170939369|emb|CAP64597.1| protein product [Podospora anserina]
  misc_feature (6)..(443): NCBI GI: 189194501 Blast Desc: conserved [Pyrenophora tritici-repentis Pt-1C-BFP] gi|187979153|gb|EDU45779.1| conserved [Pyrenophora tritici-repentis Pt-1C-BFP]
  misc_feature: Useful for introducing or modulating the production of volatile compounds
MASQLFVLDVKEKEVDEPKAPSFPQLKSTTTGFPEHKKRGKISAFKQKRQGHPPEQKSNVFLSSGDQPLSPPTDDPSPAATSSRPSLPSEKESIDRENNERLASMSPREIEQARQQLFNGLDPSILQMLLKRANLDDGANTPDFDKIKSGEEDEPSTTTKAPKPPPEIKIEDTSSPPDPQPSEPPVKTIQTPESSKPLETAPSKPSISPKQTELKPSQSSQTAQRAEDDTAPATPPVDHIIQPHDHSHTHFPRAPQPDDLDPSDPNFLANLHSKYFPSLPADPSKLAWMAPIPTEDSPADLDSPYHPDQSTLPISSLRFDFFGALLPPRISRALPSNLGLHHHGEAPESAGYTIAELARLCRSAVPGQRCMAYQTLGRILYRLGVGQFGGTRQDDVSIGLWRQIDEGEIMRSLKAEASLEEGRGHRSARAFAIEALWLFEKGGWQAKLRKATGV

SEQ ID NO: 2619 - DNA, 1923 bp, Muscodor strobelii
  misc_feature: SGI cDNA ID NO. 560510
  misc_feature: Encodes the peptide sequence at SEQ ID NO 2620
atggccgctacgggacaacaagtgcgctacagctcatcacccgaattatcagatccaccgtccatgctgtctgcacctacatcgccgagcaacttcggcagagccaaggctcagggcggagagcttgatgagatcgtcgtggatcctaatacgattagatatgacacatctggtcacccactactgaccaaagacggccttcctcgtaggaaacctggacctaagcctggctcaagaatcaagcggaatagcacgaatccggaagaaagcgctgaaaagccaaagcgtgcccggaaacctaaggatcccaacgcaccaccttcacagcgcaagcgtaagacaactgtacctcctgacggcgagagtgcagaaccttctccgcgacccgcgagtatgggtatcgccgggatcccgcttcaggctgtatctcgccagcccaagatcacggagatgaccaacccgctgggcaggttcgagccaactccacagcgagagcctaagcgagagtcgctgccaggttccatgtcaaacatacttaatgcggagcctgagcgggatccctaccatcagcaacgagagcaacgagaggcccaggcaccttcacgcccaagcatcactccgcggacgagtggtactgcctacgacccaatcagatcttcaaactacgatccgattcgagaaactatggtcacccacagctatcccaatacgatgggatctcccagaggccctactaccaccagcatgatcaaccgcgcaagcgcttcgccttccattgcaagtctagttgatccccctgtacaacagaacatcatctcccccgttccttcccacaattcctttgcgctcagtcaacaacaaagccttgctcagggtcaagttcagccgcgcccaaacaaagaatctacctcaacatcagttcctgcctcaccaaatcctttccggagagactttgtaccgcccccggctccgaagccacaagccccgccggcagaaatcaggaaaccggcgatgcctttgtctaccttggcagcgtcaaacatccaaattcgcccaacttccattaccaccattggagctgcggctaaacgatcggcgtcgaaaaaagacagtgttacttcttcgtcgccacgcatgcatcccaccaaggattccctagaggctgtgcctggggcagccggtcgatccatcctcgactttggcaaggcagaacctggtgccgaacttgtggtcccctcgattatccttaacatccccctcaatggtgaaactaacaagtacatcaacttcatgcgcatggccgaggatcagtacggttgggatgctcttcatcctcgtcaagctgaacacaaggcaagaaaggcccgtatcgctgctgcgtccgcggctcttgctcagaatgattcgagccgcgaaggcgatgagatgtctgttgacgagtccgataacgacgactcgaatgttgagatgggcgggaccagtggcccagataagcccgtcaagaagaagcgccatttcaaagaagacgaatacgacaaggaggatgattttgtggacgactcagagatgctctgggaggaacaggctgcagccagtcgcgatggtttcttcgtctactctggcccattggtgccagaggtcgagaagcctgagcctggacgtggcgatggtctccctaaacgaggacgtggctctcgaggcggtcgcggcggcagcagaggtgctggtaccggaacaggacgaggtcgtggcggtggtcccggctcccgcggaggtatcacgcgtaaaccacgtatgactaaggcggacaagctgcagatggaccgcgagaaggccgaccgcgaagcagctttcctgaagcagacaaacggctcttcttataatgtcttgcaacccagcagcccgaagtttgctggtttgtaa

SEQ ID NO: 2620 - protein, 640 aa, Muscodor strobelii
  misc_feature: SGI Peptide ID NO. 560510
  misc_feature (86)..(561): Pfam Id: PF08729 Pfam Desc: Histone promoter control 2 (HPC2)
  misc_feature (392)..(561): Pfam Id: PF08729 Pfam Desc: Histone promoter control 2 (HPC2)
  misc_feature (208)..(266): Pfam Id: PF08729 Pfam Desc: Histone promoter control 2 (HPC2)
  misc_feature (23)..(616): NCBI GI: 171679485 Blast Desc: protein product [Podospora anserina] gi|170939368|emb|CAP64596.1| protein product [Podospora anserina]
  misc_feature (41)..(631): NCBI GI: 154294313 Blast Desc: BC1G_13929 [Botryotinia fuckeliana B05.10] gi|150844768|gb|EDN19961.1| BC1G_13929 [Botryotinia fuckeliana B05.10]
  misc_feature (162)..(551): NCBI GI: 164424696 Blast Desc: NCU11000 [Neurospora crassa OR74A] gi|157070623|gb|EDO65080.1| [Neurospora crassa OR74A]
  misc_feature (210)..(615): NCBI GI: 156039393 Blast Desc: SS1G_11833 [Sclerotinia sclerotiorum 1980] gi|154697570|gb|EDN97308.1| SS1G_11833 [Sclerotinia sclerotiorum 1980]
  misc_feature (395)..(640): NCBI GI: 39943662 Blast Desc: MGG_03842 [Magnaporthe grisea 70-15] gi|145014531|gb|EDJ99099.1| MGG_03842 [Magnaporthe grisea 70-15]
  misc_feature (208)..(615): NCBI GI: 240106151 Blast Desc: CPC735_057140 [Coccidioides posadasii C735 delta SOWgp]
  misc_feature (87)..(639): NCBI GI: 189200651 Blast Desc: [Pyrenophora tritici-repentis Pt-1C-BFP] gi|187983761|gb|EDU49249.1| [Pyrenophora tritici-repentis Pt-1C-BFP]
  misc_feature (208)..(557): NCBI GI: 239613735 Blast Desc: conserved [Ajellomyces dermatitidis ER-3]
  misc_feature (206)..(557): NCBI GI: 261193875 Blast Desc: conserved [Ajellomyces dermatitidis SLH14081] gi|239588948|gb|EEQ71591.1| conserved [Ajellomyces dermatitidis SLH14081]
  misc_feature (413)..(639): NCBI GI: 169624917 Blast Desc: SNOG_15725 [Phaeosphaeria nodorum SN15] gi|160705561|gb|EAT76820.2| SNOG_15725 [Phaeosphaeria nodorum SN15]
MAATGQQVRYSSSPELSDPPSMLSAPTSPSNFGRAKAQGGELDEIVVDPNTIRYDTSGHPLLTKDGLPRRKPGPKPGSRIKRNSTNPEESAEKPKRARKPKDPNAPPSQRKRKTTVPPDGESAEPSPRPASMGIAGIPLQAVSRQPKITEMTNPLGRFEPTPQREPKRESLPGSMSNILNAEPERDPYHQQREQREAQAPSRPSITPRTSGTAYDPIRSSNYDPIRETMVTHSYPNTMGSPRGPTTTSMINRASASPSIASLVDPPVQQNIISPVPSHNSFALSQQQSLAQGQVQPRPNKESTSTSVPASPNPFRRDFVPPPAPKPQAPPAEIRKPAMPLSTLAASNIQIRPTSITTIGAAAKRSASKKDSVTSSSPRMHPTKDSLEAVPGAAGRSILDFGKAEPGAELVVPSIILNIPLNGETNKYINFMRMAEDQYGWDALHPRQAEHKARKARIAAASAALAQNDSSREGDEMSVDESDNDDSNVEMGGTSGPDKPVKKKRHFKEDEYDKEDDFVDDSEMLWEEQAAASRDGFFVYSGPLVPEVEKPEPGRGDGLPKRGRGSRGGRGGSRGAGTGTGRGRGGGPGSRGGITRKPRMTKADKLQMDREKADREAAFLKQTNGSSYNVLQPSSPKFAGL

SEQ ID NO: 2621 - DNA, 4334 bp, Muscodor strobelii
  misc_feature: SGI EST ID NO. CUFF.6528.0
  misc_feature: Variant of the nucleotide sequence at SEQ ID NO 2619
tcattgttcatacgctcggtccgtcgttactatcttgtcagttatatcactacgcccctgctttactattcatttctcctgagtacacgccctcgcttcctctttggctggacacggacaaggtcccctctcatcggatgaatccctctgccgtacacgtatttcctgtgtatgaatttctctctaccccgtccgccgtagtcatgctgaggtgatgtcgagtagttcctgtgactctgtagtccctttggccttgccctgtcccccatcatcccttcaatctaacctcattgttgccttcccttcgtcggttcgatctacacccaccccatctcttgcaactatctcctggtgtctaggttagagctctgcaccccggttcttcgttcgaccattgttcttcgttcccctgatgcctttctctcccaattcatgccccatcgccagcacaatagagcccccccagctagttccgatctctaattcctgtccaatgcccatttcccgaaacgattaaatttttaaccctcgtaactcagtctcccgcggcgaatgtcaggacaactcatggtttctcgcttgccccgtttttcgttggagagctaataattcccaattctcgtcaattctcaattcccaattttctcgaaaaacgtagccatccccatcgtccccgtcatctctaccaaacacccctttctcctctccctcaaccacatttctcctcaccaccatcaccgcgaaaatgcccttttcgcgataaactcatcaagaaccatcaccacatcgcgactttgcatcatttttcttgttgcattttgtgcaccgaaacacgctgcatttagtgcagcaacttgcagcacgctgagcgtcaacatacacgacgtgttgaagggttgactgtgggattgaccgcgacgggtgcggttctcgtgaggttattcagacgacccatttgagccgatttgcacgagttgcagcagcaggaccagacacgcgccgcccagaacgccgaccggacaccgtaggtcacgttacccctgcggactatagcgcacaacagagccggcggcgaatcatcgacgattactaaaagtcatcaaggggatcatctaattctcgcaaggaccactcagaagccccgagcagttcccaatttccctttggagcacgacggaagaggagcacaagccaagcctcgaccccacccagctggaatctctgtggaatctctgtgtgtcataagttctgcggtgttgtgaccaattcgaacgtgccaccagctgcaactggcaattgtcaagttggcaaattagctaccctggaccgactaaacagtttccatcttcagaggctggggtacagtaaaccgcaaaaagtgtccgagtcccgggaaacaccgaaacgaacggcttgtcgctaattttatcccgccttcacaattgcttgccgtttgcctaacagccgcagctgcagccacaactactttgcgtcaccaccaattaccatttagagactatttggtcattcgtcgcgggccacacatcgcgaaaaggtgaagacgacattgtgattgattgttgtatttcgatggacttacttcaatctgtctgactcagaaagcaactgttcactatcgtgtttgcgattgcttgtattcgcattcgttctttattaagccctgcaccgtcgcagtactttgttaatcccaaacaaacttattgtgtaatacttgttaaatcactccacaccttcgtagtcgacactctatcgacactcgcggccaaattagcaactgtattctgtttcctgttgatcaaactgtctacagtatggccgctacgggacaacaagtgcgctacagctcatcacccgaattatcagatccaccgtccatgctgtctgcacctacatcgccgagcaacttcggcagagccaaggctcagggcggagagcttgatgagatcgtcgtggatcctaatacgattagatatgacacatctggtcacccactactgaccaaagacggccttcctcgtaggaaacctggacctaagcctggctcaagaatcaagcggaatagcacgaatccggaagaaagcgctgaaaagccaaagcgtgcccggaaacctaaggatcccaacgcaccaccttcacagcgcaagcgtaagacaactgtacctcctgacggcgagagtgcagaaccttctccgcgacccgcgagtatgggtatcgccgggatcccgcttcaggctgtatctcgccagcccaagatcacggagatgaccaacccgctgggcaggttcgagccaactccacagcgagagcctaagcgagagtcgctgccaggttccatgtcaaacatacttaatgcggagcctgagcgggatccctaccatcagcaacgagagcaacgagaggcccaggcaccttcacgcccaagcatcactccgcggacgagtggtactgcctacgacccaatcagatcttcaaactacgatccgattcgagaaactatggtcacccacagctatcccaatacgatgggatctcccagaggccctactaccaccagcatgatcaaccgcgcaagcgcttcgccttccattgcaagtctagttgatccccctgtacaacagaacatcatctcccccgttccttcccacaattcctttgcgctcagtcaacaacaaagccttgctcagggtcaagttcagccgcgcccaaacaaagaatctacctcaacatcagttcctgcctcaccaaatcctttccggagagactttgtaccgcccccggctccgaagccacaagccccgccggcagaaatcaggaaaccggcgatgcctttgtctaccttggcagcgtcaaacatccaaattcgcccaacttccattaccaccattggagctgcggctaaacgatcggcgtcgaaaaaagacagtgttacttcttcgtcgccacgcatgcatcccaccaaggattccctagaggctgtgcctggggcagccggtcgatccatcctcgactttggcaaggcagaacctggtgccgaacttgtggtcccctcgattatccttaacatccccctcaatggtgaaactaacaagtacatcaacttcatgcgcatggccgaggatcagtacggttgggatgctcttcatcctcgtcaagctgaacacaaggcaagaaaggcccgtatcgctgctgcgtccgcggctcttgctcagaatgattcgagccgcgaaggcgatgagatgtctgttgacgagtccgataacgacgactcgaatgttgagatgggcgggaccagtggcccagataagcccgtcaagaagaagcgccatttcaaagaagacgaatacgacaaggaggatgattttgtggacgactcagagatgctctgggaggaacaggctgcagccagtcgcgatggtttcttcgtctactctggcccattggtgccagaggtcgagaagcctgagcctggacgtggcgatggtctccctaaacgaggacgtggctctcgaggcggtcgcggcggcagcagaggtgctggtaccggaacaggacgaggtcgtggcggtggtcccggctcccgcggaggtatcacgcgtaaaccacgtatgactaaggcggacaagctgcagatggaccgcgagaaggccgaccgcgaagcagctttcctgaagcagacaaacggctcttcttataatgtcttgcaacccagcagcccgaagtttgctggtttgtaaaatcaacaaacgttttgaatcccacgaacttgcttcggattatggcgaagaggagagaagtggtaatgtacagcatcattgacttcacacatggcgtctcggagactggagtttcacacggcgtttgtcttctttcactacggctcggactgtagatgtatttgcgttctgcattcataagataccaatcttgtcaagttatggggatcattgttctcggcaaagaagctagacaagaaaaaagacgcaaacgagacggattgactcccttagatgccggcgatgcctgggaagccggaagaatgggaacagaactctcggctcaatgccttgtagagtcctggcatcaaggacatagccctagctttgctagctgtaatacagttattaactctaactttcccaattgtaaataatgacgggaatgtgatattcgaatctgtaacgcgtatgaagtggagatatttaaaatgctactcttccgctgacagtttaacaaaacttatcaccacgctgcatcactttgggatctcgagtggagatgactgatctccaaccccacttaatttctcacccaca

SEQ ID NO: 2622 - DNA, 1029 bp, Muscodor strobelii
  misc_feature: SGI cDNA ID NO. 560511
  misc_feature: Encodes the peptide sequence at SEQ ID NO 2623
atggcaccccctcatcccctatctgcggcttcgctgttcgacctcacgggttgggtcgctgtcgtgactggtggtggtactggtgttggattgagtaggtcggcatctttacccctcaagcccctttttggatactcataccctgaacatgccctcccaaccatcaccactctcccttatatcttcaccgaatttctcgacaaactgatcacccaagctctggcagcaaatggcgcgaaagtgtacatcactggccgacgatcggaaattttagagtcgagcgcgaagattcatgggtcacctgagaagcttggcggaagtgccggaagcatcgtgcccctcgtcatggatgtcaatgataaggagagcatcaaaggcgcggtcgctcggatcacagaattggaagcgggtggtgtgaatttactcgtcaataatgctggcgtgtggatgagtcgaccttccgccggcccggctgaaggacccgaggctttcagcgccgcgatgctcgctgaagagactgaaaattggagacagtcaatggataccaacacgattgcactctatttcgtcactgcggccttcctgccactactggctaaggcagtgaatgggccgaccaggcagcgaggtagtgttatcaataacgcctccgttagcggattgctgcgcatgtcacagcgacagcagtactcgtacaacgtcagcaaatcaggtgctatccacatcggtcggcagatggcattcgacttcggccacgagaacatcgatgttcgcgttaataccattgctctcggttacttcccctccgagatgacggccggcccatcagacgacaacaacgagaacacgtacgacattgagaagttccgagagttcatgaaggggttcgggacgacgatggtgaagcgcatgggatcgtcgagggatatggctagtgccatattgactctcgcggtcaacgattacatgcagggaaccgtgatgattctcgatggtgggtctgcgttgagcttgccttcgcagatgtag

SEQ ID NO: 2623 - protein, 342 aa, Muscodor strobelii
  misc_feature: SGI Peptide ID NO. 560511
  misc_feature (72)..(333): NCBI GI: 169615817 Blast Desc: SNOG_11073 [Phaeosphaeria nodorum SN15] gi|111060452|gb|EAT81572.1| SNOG_11073 [Phaeosphaeria nodorum SN15]
  misc_feature (11)..(337): NCBI GI: 145248007 Blast Desc: An13g01130 [Aspergillus niger] gi|134080999|emb|CAK41513.1| protein product [Aspergillus niger]
  misc_feature (12)..(337): NCBI GI: 70987152 Blast Desc: short chain dehydrogenase/reductase family [Aspergillus fumigatus Af293] gi|66846686|gb|EAL87018.1| short chain dehydrogenase/reductase family [Aspergillus fumigatus short
  misc_feature (1)..(333): NCBI GI: 85068392 Blast Desc: NCU08057 [Neurospora crassa OR74A] gi|28926993|gb|EAA35952.1| NCU08057 [Neurospora crassa OR74A]
  misc_feature (11)..(337): NCBI GI: 119482694 Blast Desc: short-chain dehydrogenase [Neosartorya fischeri NRRL 181] gi|119409530|gb|EAW19478.1| short-chain dehydrogenase [Neosartorya fischeri NRRL 181]
  misc_feature (11)..(337): NCBI GI: 119494241 Blast Desc: short-chain dehydrogenase [Neosartorya fischeri NRRL 181] gi|119412178|gb|EAW22119.1| short-chain dehydrogenase [Neosartorya fischeri NRRL 181]
  misc_feature (11)..(336): NCBI GI: 67540208 Blast Desc: AN6274.2 [Aspergillus nidulans FGSC A4] gi|40739468|gb|EAA58658.1| AN6274.2 [Aspergillus nidulans FGSC A4] gi|259479514|tpe|CBF69805.1| TPA: short chain family nidulans
  misc_feature (11)..(337): NCBI GI: 255944789 Blast Desc: Pc20g06330 [Penicillium chrysogenum Wisconsin 54-1255] gi|211587897|emb|CAP85962.1| Pc20g06330 [Penicillium chrysogenum Wisconsin 54-1255]
  misc_feature (5)..(337): NCBI GI: 121700537 Blast Desc: short-chain dehydrogenase [Aspergillus clavatus NRRL 1] gi|119396676|gb|EAW07107.1| short-chain dehydrogenase [Aspergillus clavatus NRRL 1]
  misc_feature (7)..(340): NCBI GI: 189190744 Blast Desc: short chain dehydrogenase/reductase [Pyrenophora tritici-repentis Pt-1C-BFP] gi|187973317|gb|EDU40816.1| short chain dehydrogenase/reductase [Pyrenophora tritici-repentis
  misc_feature (66)..(333): SWISSPROT Homolog: EC 1.1.1.100 3-oxoacyl-[acyl-carrier-protein] reductase
MAPPHPLSAASLFDLTGWVAVVTGGGTGVGLSRSASLPLKPLFGYSYPEHALPTITTLPYIFTEFLDKLITQALAANGAKVYITGRRSEILESSAKIHGSPEKLGGSAGSIVPLVMDVNDKESIKGAVARITELEAGGVNLLVNNAGVWMSRPSAGPAEGPEAFSAAMLAEETENWRQSMDTNTIALYFVTAAFLPLLAKAVNGPTRQRGSVINNASVSGLLRMSQRQQYSYNVSKSGAIHIGRQMAFDFGHENIDVRVNTIALGYFPSEMTAGPSDDNNENTYDIEKFREFMKGFGTTMVKRMGSSRDMASAILTLAVNDYMQGTVMILDGGSALSLPSQM

SEQ ID NO: 2624 - DNA, 1398 bp, Muscodor strobelii
  misc_feature: SGI EST ID NO. CUFF.6531.0
  misc_feature: Variant of the nucleotide sequence at SEQ ID NO 2622
cttggttgctctgttcctggttcggcttacgctgtactcagatgcttgtgattggacggggtggcgcggggcttcttgtatgagtatttaaggtgttctgttttcttcttttcttgcctcctttttcttacactccttttctcacggacttgatgtttgcttggttgaagataaaacagatttgattacttgtgtagcatgaagcgaaagcattctgaggatatggcaccccctcatcccctatctgcggcttcgctgttcgacctcacgggttgggtcgctgtcgtgactggtggtggtactggtgttggattgatgatcacccaagctctggcagcaaatggcgcgaaagtgtacatcactggccgacgatcggaaattttagagtcgagcgcgaagattcatgggtcacctgagaagcttggcggaagtgccggaagcatcgtgcccctcgtcatggatgtcaatgataaggagagcatcaaaggcgcggtcgctcggatcacagaattggaagcgggtggtgtgaatttactcgtcaataatgctggcgtgtggatgagtcgaccttccgccggcccggctgaaggacccgaggctttcagcgccgcgatgctcgctgaagagactgaaaattggagacagtcaatggataccaacacgattgcactctatttcgtcactgcggccttcctgccactactggctaaggcagtgaatgggccgaccaggcagcgaggtagtgttatcaataacgcctccgttagcggattgctgcgcatgtcacagcgacagcagtactcgtacaacgtcagcaaatcaggtgctatccacatcggtcggcagatggcattcgacttcggccacgagaacatcgatgttcgcgttaataccattgctctcggttacttcccctccgagatgacggccggcccatcagacgacaacaacgagaacacgtacgacattgagaagttccgagagttcatgaaggggttcgggacgacgatggtgaagcgcatgggatcgtcgagggatatggctagtgccatattgactctcgcggtcaacgattacatgcagggaaccgtgatgattctcgatggtgggtctgcgttgagcttgccttcgcagatgtagatgactgatgggatagattggcatgcatgtggcggctgttcgatgggtgggacgatttattagtacttgattttttatagctaatgagacccgaagggctatctcaactcaaaagatcgccaaacagttatcccaacaagcagagcctttaatgctttaacgcgaaactccggaaaaaaatctgtatggggtgaatcgataggtagatagatctaaagggcgctgtatagatggattacagagtgcatcaaagtaaag

SEQ ID NO: 2625 - DNA, 1296 bp, Muscodor strobelii
  misc_feature: SGI cDNA ID NO. 560512
  misc_feature: Encodes the peptide sequence at SEQ ID NO 2626
atgggcaacgtattgtcatctctgtgtcccctggtggacaccgcgcctgaggatctatacaaactcggctctagtgtcaagttcgtagtccagtcgcacgaggaggcaaaagcttttggcaaggcagtgacgacgcctgtcggtcctgacccattcatcgccatcttttgcgacggttctgttaagggttccgacgtaggaattggtgtcgccctccggcgtctcgctggctcaattccagagtggcgaacgcccgcctgggctggacagagcttcgcagccaagaaattgaaaagcaccggcgccgaaggtcttgcgctgcattgcgccttgcttcttgcctattacgaggttctccattggttcgatctgaacgacaagtctgaggttccatcaccatcaccccccaaaatcgtgatcctcggtgattgcaaagtggcgcttacgtacttacgccaggtgtgggcaagagaagagatcactaccgagatactgcccggaagttatcacgagcagttcctagtctctctagtgcagctggcgtcattagggtgtcagatagagtttcattgggtgccagcgcacgagggtgtatcaggtaacgaacgtgcagacaagctggcaaaactggggagagcctttgcagagcaaattccacccgcacttggccacccgtctgggcaaccccttttttcgatgtccagattcttcaaacgcggcatacttgagcacatcggcatgccatccgacgggccgcctctggagttggcaagttctggtgaagcggcgacagagattctctacagatggcttctggcgatgaagaagaatcagcttaatgtcgtcatgggagcagttgaggctcaaattcaggagacaatctcagagaccaaggctcggcttcttctgtttcgtccggctaagtcaactcggcgaacagtgaagaaacagcaattcaagaagaagtaccaaaactccaaaagaaagtatggacgaacgacaatacgtagaaacaataagcgcaaatccaagaagtccaagaagcgcaagaccaagacgaccgatgttgccgatgatggcaacgagcacaagtccaccaaaggcaatgaggacgagtcccacaacaaagtgcacgaatctctcattgatgatgagcacgagttttctagaggcgatgcggacgagtctcacgatcaaagcgacgctcagcaaggtgtcaaaagacgtagatcggggagcgatgaggatgagacacaggaacgcccgaaacgacgcaaagtggcattgttcaagtag

SEQ ID NO: 2626 - protein, 431 aa, Muscodor strobelii
  misc_feature: SGI Peptide ID NO. 560512
  misc_feature (50)..(213): Pfam Id: PF00075 Pfam Desc: RNase H
  misc_feature (167)..(213): Pfam Id: PF00075 Pfam Desc: RNase H
  misc_feature (12)..(209): NCBI GI: 154270239 Blast Desc: HCAG_09089 [Ajellomyces capsulatus NAm1] gi|150410083|gb|EDN05471.1| [Ajellomyces capsulatus NAm1]
  misc_feature (48)..(209): NCBI GI: 154272339 Blast Desc: [Ajellomyces capsulatus NAm1] gi|150409009|gb|EDN04465.1| [Ajellomyces capsulatus NAm1]
  misc_feature (27)..(209): NCBI GI: 154276412 Blast Desc: [Ajellomyces capsulatus NAm1] gi|150414124|gb|EDN09489.1| [Ajellomyces capsulatus NAm1]
  misc_feature (27)..(209): NCBI GI: 115437556 Blast Desc: [Aspergillus terreus NIH2624] gi|114188656|gb|EAU30356.1| [Aspergillus terreus NIH2624]
  misc_feature (48)..(208): NCBI GI: 154271075 Blast Desc: [Ajellomyces capsulatus NAm1] gi|150409614|gb|EDN05058.1| [Ajellomyces capsulatus NAm1]
  misc_feature (11)..(209): NCBI GI: 154278122 Blast Desc: [Ajellomyces capsulatus NAm1] gi|150413468|gb|EDN08851.1| [Ajellomyces capsulatus NAm1]
  misc_feature (171)..(209): NCBI GI: 154276646 Blast Desc: [Ajellomyces capsulatus NAm1] gi|150414241|gb|EDN09606.1| [Ajellomyces capsulatus NAm1]
  misc_feature (27)..(209): NCBI GI: 154284203 Blast Desc: [Ajellomyces capsulatus NAm1] gi|150411077|gb|EDN06465.1| [Ajellomyces capsulatus NAm1]
  misc_feature (171)..(209): NCBI GI: 154272351 Blast Desc: [Ajellomyces capsulatus NAm1] gi|150409015|gb|EDN04471.1| [Ajellomyces capsulatus NAm1]
MGNVLSSLCPLVDTAPEDLYKLGSSVKFVVQSHEEAKAFGKAVTTPVGPDPFIAIFCDGSVKGSDVGIGVALRRLAGSIPEWRTPAWAGQSFAAKKLKSTGAEGLALHCALLLAYYEVLHWFDLNDKSEVPSPSPPKIVILGDCKVALTYLRQVWAREEITTEILPGSYHEQFLVSLVQLASLGCQIEFHWVPAHEGVSGNERADKLAKLGRAFAEQIPPALGHPSGQPLFSMSRFFKRGILEHIGMPSDGPPLELASSGEAATEILYRWLLAMKKNQLNVVMGAVEAQIQETISETKARLLLFRPAKSTRRTVKKQQFKKKYQNSKRKYGRTTIRRNNKRKSKKSKKRKTKTTDVADDGNEHKSTKGNEDESHNKVHESLIDDEHEFSRGDADESHDQSDAQQGVKRRRSGSDEDETQERPKRRKVALFK

SEQ ID NO: 2627 - DNA, 1956 bp, Muscodor strobelii
  misc_feature: SGI cDNA ID NO. 560513
  misc_feature: Encodes the peptide sequence at SEQ ID NO 2628
atgaaagtaatatcaagacccggctcggtgagacacaagaaaaacaaacggtcgcggctcggatgcaatacttgccgtgctcgtaaagtgaaatgcgatgagcgacctggtgtctgtgccaattctcctagagctcagactggcgacccggggccttccccttctgagagaatagaagacctcactttgcaatctgatcacaatagagagcgcgccaaagggctcccggaatggttgagctcagcgaggttaccagaattgaaatacgtcagggtccttcttgtgcactacttccaaaacttccatcctttgcgatgttacgcgtttattcacaaaccttcatttctacgtcaattagatgatgatcaactccctaatctgatgtcaagccctcttttgcatgtgatctgtgcccttggcgcccagttcttcgcacttgagtacagtgaaacagttcatgccgtatcgtattgtaccattcgccttgctggtagtcactgggctaggactgctaatcgtcttttgcttggaaagctcgatgagatatctgtcgaagcattgatgactgttcagctaatgtatgattatgcattacgcatggcaaactttccgcaggccttcatgctgagcgggctcatgacgcggttgacgcaagcactccagattaatttggaatactccgcagatattctgggcgagtcttctgacttaggaccttcagttacgatccgcgaatgtcggagacggctaatgtggtcttgttatgttaccgacgtcttgctaggcagtggcgtagatcagctctcgctcatacatgagcgcgacatgaagatacaattaccgtgtgctgaaagaaatttcttgcatgccaaactatgttcgactgcgactctgggtagccagaatatgggtacaaatgggaatgttggcatgatggcttattttgtccaacagatagagttacggcgtcgcgtattgcgctacattaagcacctcgatcaggctatggatccttggctacctaattccgagttcgccaaactggatgccgaacttcgagaatggtatgaggccttgccttgtgcgccggcgctatacaagttgcgcaatgcctttttattcccgccaacgcaactacaatttgagaagcaattgcaatggcagctttttaaagcagctaggacactggcggcgatcatcgctgaaggagagcgccatgggccacgcactaattgcgacagttggcttccgactattgcatacgatagcaatcgtatcatgctgtattatttaacgcaaattgctgacctcggcgatcgccagagcaaagagcttctcattgcgactatctcgtatctgtatagcaatgtgaaagcattgaagactatgagagcttttaacgctgtagcagatgggcttaccgaggctgcagaaaatatgctggagaagctcctaggtgtaaattcgaacaatatcgtaccgttaccgagcatggttctagaggatccttatttagtagagcttgatccagcgcgtcgcagcactcccggtacaccgccgcaagctgcgccggactatgtattgaaccccctctctatcttccgaatgacccgaagtcgcgtaccggaacgtcatgcgcctgaggtcaacatttcagggcagtcacgagcatccgggtcagcatcttcacgccaaaatatagtcgcgccaacccagacctttaccgatgactctatcgtagaccaaatgcttccggagagcagcgatatattgttaccaaatacagacattatgtcatcggatttgttcgacttcgctgtgctaccggagctgaattgggactggcatgacgcagagacgatggtcggttcgggtatcaacgcggatggacttttgcagtgggttttgccgtcacaggatctgagttcgggtagagaaaactccagtagttcgtaa

SEQ ID NO: 2628 - protein, 651 aa, Muscodor strobelii
  misc_feature: SGI Peptide ID NO. 560513
  misc_feature (183)..(287): Pfam Id: PF04082 Pfam Desc: Fungal specific transcription factor domain
  misc_feature (20)..(41): Pfam Id: PF00172 Pfam Desc: Fungal Zn(2)-Cys(6) binuclear cluster domain
  misc_feature (10)..(635): NCBI GI: 255938454 Blast Desc: Pc14g00020 [Penicillium chrysogenum Wisconsin 54-1255] gi|211584618|emb|CAP74143.1| Pc14g00020 [Penicillium chrysogenum Wisconsin 54-1255]
  misc_feature (9)..(476): NCBI GI: 256730174 Blast Desc: NECHADRAFT_45494 [Nectria haematococca mpVI 77-13-4]
  misc_feature (21)..(486): NCBI GI: 259488218 Blast Desc: TPA: Zn(II)2Cys6 transcription factor (Eurofung) [Aspergillus nidulans FGSC A4]
  misc_feature (21)..(473): NCBI GI: 67904778 Blast Desc: AN9376.2 [Aspergillus nidulans FGSC A4] gi|40747287|gb|EAA66443.1| AN9376.2 [Aspergillus nidulans FGSC A4]
  misc_feature (5)..(635): NCBI GI: 256725784 Blast Desc: [Nectria haematococca mpVI 77-13-4]
  misc_feature (5)..(634): NCBI GI: 46111345 Blast Desc: FG02554.1 [Gibberella zeae PH-1]
  misc_feature (17)..(360): NCBI GI: 238502941 Blast Desc: conserved [Aspergillus flavus NRRL3357] gi|220691514|gb|EED47862.1| conserved [Aspergillus flavus NRRL3357]
  misc_feature (58)..(360): NCBI GI: 242795892 Blast Desc: conserved [Talaromyces stipitatus ATCC 10500] gi|218719273|gb|EED18693.1| conserved [Talaromyces stipitatus ATCC 10500]
  misc_feature (11)..(360): NCBI GI: 145612155 Blast Desc: MGG_08130 [Magnaporthe grisea 70-15] gi|145019377|gb|EDK03605.1| MGG_08130 [Magnaporthe grisea 70-15]
  misc_feature (242)..(484): NCBI GI: 169623219 Blast Desc: SNOG_14844 [Phaeosphaeria nodorum SN15] gi|160704937|gb|EAT77696.2| SNOG_14844 [Phaeosphaeria nodorum SN15]
MKVISRPGSVRHKKNKRSRLGCNTCRARKVKCDERPGVCANSPRAQTGDPGPSPSERIEDLTLQSDHNRERAKGLPEWLSSARLPELKYVRVLLVHYFQNFHPLRCYAFIHKPSFLRQLDDDQLPNLMSSPLLHVICALGAQFFALEYSETVHAVSYCTIRLAGSHWARTANRLLLGKLDEISVEALMTVQLMYDYALRMANFPQAFMLSGLMTRLTQALQINLEYSADILGESSDLGPSVTIRECRRRLMWSCYVTDVLLGSGVDQLSLIHERDMKIQLPCAERNFLHAKLCSTATLGSQNMGTNGNVGMMAYFVQQIELRRRVLRYIKHLDQAMDPWLPNSEFAKLDAELREWYEALPCAPALYKLRNAFLFPPTQLQFEKQLQWQLFKAARTLAAIIAEGERHGPRTNCDSWLPTIAYDSNRIMLYYLTQIADLGDRQSKELLIATISYLYSNVKALKTMRAFNAVADGLTEAAENMLEKLLGVNSNNIVPLPSMVLEDPYLVELDPARRSTPGTPPQAAPDYVLNPLSIFRMTRSRVPERHAPEVNISGQSRASGSASSRQNIVAPTQTFTDDSIVDQMLPESSDILLPNTDIMSSDLFDFAVLPELNWDWHDAETMVGSGINADGLLQWVLPSQDLSSGRENSSSS

SEQ ID NO: 2629 - DNA, 1230 bp, Muscodor strobelii
  misc_feature: SGI cDNA ID NO. 560514
  misc_feature: Encodes the peptide sequence at SEQ ID NO 2630
atggctgtcgcacaagtcgcaggcccatctttctgggaacctacacgtgccgatgaatctatcttccctgatggctacaaaacctctggcatgttagagccaatctattctttagtgcagccttatgagtcgttccctaaacagataatcggaccaactgtctggaaagctgaagatttccgaaataacaaagaagcatggcagcatatcttcactgacgaggaaattactgaaatcggagctgcagctgatgcatttttggcctcttgcactccgctgactggtattgctaaggatcttttcccacttcccaatctagcatctcgcatagaaagtttaaaaaggaccttggttgatggtcagggcttctggctgttcaaaggcattccagtacaagaatggggctctgagaagtcggcgacagcatacatgggccttgggacgcatctaggctattttacaagtcagaatggccgaggccatgtgctaggccacgtaaaagaccttggagatgaccccaataaaacggaccgcattcgcatctacagaaccaatgccaggcagtattttcacacggatggtgccgatctagttggacttctttgtatggcgaaagcaaaagaaggaggcgagtcagatattgtatccatgcatcatatcttcaacattctacaacgtgatcatcctgatgtagctaagacgctgtgcgaacccaactggtactacgatcgcaagcgcgaagtatcccagggtcaagaagagtatctacgtgtgagcgtcttttacatggagcccgacctagacaacacaagctttccttctcgactttacggcaaatttgatcctatgaacgtaacctcactgtcgcgcttcaacacgggcccgaatgcgaaaattccacctctctctgatgctcagcagcacgcaatcgaagttcttgaggaagtctgtcttcgggaatcccttcacatgatccttgatcctggtgacatccaattccttgcgaattcgcacacattccatgcgcgaacatcgtatacagattatgtcgccggtagcctggatgaggctgggagggcacgaccacgaagacatctcatgcgtttatggctttctgtaccccttgatgagggtggctggaggttgccatttgcggacgctaagttcaagaaacggggtgggatccaggtcgatgacacaccaccagtgtgtcctctagacgcggaataa

SEQ ID NO: 2630 - protein, 409 aa, Muscodor strobelii
  misc_feature: SGI Peptide ID NO. 560514
  misc_feature (89)..(376): Pfam Id: PF02668 Pfam Desc: Taurine catabolism dioxygenase TauD, TfdA family
  misc_feature (89)..(257): Pfam Id: PF02668 Pfam Desc: Taurine catabolism dioxygenase TauD, TfdA family
  misc_feature (10)..(409): NCBI GI: 256730418 Blast Desc: NECHADRAFT_44930 [Nectria haematococca mpVI 77-13-4]
  misc_feature (20)..(409): NCBI GI: 255938456 Blast Desc: Pc14g00030 [Penicillium chrysogenum Wisconsin 54-1255] gi|211584619|emb|CAP74144.1| Pc14g00030 [Penicillium chrysogenum Wisconsin 54-1255]
  misc_feature (3)..(409): NCBI GI: 39972635 Blast Desc: MGG_07619 [Magnaporthe grisea 70-15] gi|145016828|gb|EDK01258.1| MGG_07619 [Magnaporthe grisea 70-15]
  misc_feature (20)..(409): NCBI GI: 67904776 Blast Desc: AN9375.2 [Aspergillus nidulans FGSC A4] gi|40747286|gb|EAA66442.1| AN9375.2 [Aspergillus nidulans FGSC A4] gi|259488217|tpe|CBF87496.1| TPA: conserved [Aspergillus FGSC
  misc_feature (14)..(409): NCBI GI: 189200735 Blast Desc: taurine catabolism dioxygenase TauD [Pyrenophora tritici-repentis Pt-1C-BFP] gi|187983803|gb|EDU49291.1| taurine catabolism dioxygenase TauD [Pyrenophora tritici-repentis
  misc_feature (21)..(409): NCBI GI: 238487518 Blast Desc: conserved [Aspergillus flavus NRRL3357] gi|220699876|gb|EED56215.1| conserved [Aspergillus flavus NRRL3357]
  misc_feature (21)..(409): NCBI GI: 255948428 Blast Desc: Pc22g09710 [Penicillium chrysogenum Wisconsin 54-1255] gi|211591998|emb|CAP98259.1| Pc22g09710 [Penicillium chrysogenum Wisconsin 54-1255]
  misc_feature (21)..(409): NCBI GI: 169770109 Blast Desc: [Aspergillus oryzae RIB40] gi|83767383|dbj|BAE57522.1| protein product [Aspergillus oryzae]
  misc_feature (15)..(409): NCBI GI: 67523307 Blast Desc: AN2110.2 [Aspergillus nidulans FGSC A4] gi|40745786|gb|EAA64942.1| AN2110.2 [Aspergillus nidulans FGSC A4] gi|259487484|tpe|CBF86200.1| TPA: conserved [Aspergillus FGSC
  misc_feature (21)..(409): NCBI GI: 119193318 Blast Desc: CIMG_01036 [Coccidioides immitis RS]
MAVAQVAGPSFWEPTRADESIFPDGYKTSGMLEPIYSLVQPYESFPKQIIGPTVWKAEDFRNNKEAWQHIFTDEEITEIGAAADAFLASCTPLTGIAKDLFPLPNLASRIESLKRTLVDGQGFWLFKGIPVQEWGSEKSATAYMGLGTHLGYFTSQNGRGHVLGHVKDLGDDPNKTDRIRIYRTNARQYFHTDGADLVGLLCMAKAKEGGESDIVSMHHIFNILQRDHPDVAKTLCEPNWYYDRKREVSQGQEEYLRVSVFYMEPDLDNTSFPSRLYGKFDPMNVTSLSRFNTGPNAKIPPLSDAQQHAIEVLEEVCLRESLHMILDPGDIQFLANSHTFHARTSYTDYVAGSLDEAGRARPRRHLMRLWLSVPLDEGGWRLPFADAKFKKRGGIQVDDTPPVCPLDAE

SEQ ID NO: 2631 - DNA, 1254 bp, Muscodor strobelii
  misc_feature: SGI cDNA ID NO. 560515
  misc_feature: Encodes the peptide sequence at SEQ ID NO 2632
atgtatctactagcggtgatccaaatcttagggactattattgaaatttcggcatcaagctggatacaatttactatcggccgtgtcgtggcatatgctgccgtcggactagtcgagcccatcgtgccgacttatcaagctgagcttgcccccgcatccctccgtggatttttctctggcaatgtccaagtcctggttcatcttggggctatctggggagcgggcatgagccgtgcgtacgcgaccgaaacggcgaagaagggatggcagatacctgtcggagtccagatgattccagctgcgcttctgctcgctctagtgcccttctgcgtagaaccgccgagatggctggaagaggcgatcagagtcctgtcgcgagtcaggtcacctaagcatcattccagtgacatggtctcccttgaggtcgatgcgttcaagcaagcattagaagacagtaagcagatggatcgagcatcttggagagatctgtttgggaagaagtatattaacaggacaatcgttgttacgctgttgttcttcttccaacaaagcactggtcagcaatttgctaactcctatggcccaacatttttcaagtcaattggcctctcaggagctcgtctattcaactcctccacgttgattcccttggctggcctgatcggttgtctagttgccgtcgccacaaccgacataattggcagaagaacgctatgctatatcggtgctctgctggcaactctttttacaactctgatcagtacagttggctcgcagaatgacgcaacgatcaatgacacgaaaagcaatcttgtggttgcgtctgtgatcctgctcaatggcgtatgtaagctgggtgtcgccagtcagtgctggattatcgcatctgaaattggaggaacacaaatgcggaagaagctcatgacatggggcgtcgtcatcgatgttttttcggcttttgttgtcactttcttcacaccatacttacaaaatggaccacaagtacagcttggaccccgggtcggttacattttcctgggccttgcaattctttcgttattcttcttcgctttcttcacgccggagctgaagggtcgatcgctcgaagaagtcgatgagttgttcgagaaaaagctatgggcttggcaatttaacaaagcgagaactacgggagttggggctcaaattgcagcgatggaagctggtagaaaggcagaagtggatcttgaatctgcatctcatcatgagtgttga

SEQ ID NO: 2632 - protein, 417 aa, Muscodor strobelii
  misc_feature: SGI Peptide ID NO. 560515
  misc_feature (3)..(375): Pfam Id: PF00083 Pfam Desc: Sugar (and other) transporter
  misc_feature (5)..(375): Pfam Id: PF00083 Pfam Desc: Sugar (and other) transporter
  misc_feature (4)..(375): NCBI GI: 256726993 Blast Desc: NECHADRAFT_76534 [Nectria haematococca mpVI 77-13-4]
  misc_feature (23)..(408): NCBI GI: 242799200 Blast Desc: sugar transporter, [Talaromyces stipitatus ATCC 10500] gi|218716674|gb|EED16095.1| sugar transporter, [Talaromyces stipitatus ATCC 10500]
  misc_feature (4)..(375): NCBI GI: 115397921 Blast Desc: [Aspergillus terreus NIH2624] gi|114192743|gb|EAU34443.1| [Aspergillus terreus NIH2624]
  misc_feature (1)..(400): NCBI GI: 212535038 Blast Desc: sugar transporter, [Penicillium marneffei ATCC 18224] gi|210070074|gb|EEA24164.1| sugar transporter, [Penicillium marneffei ATCC 18224]
  misc_feature (4)..(386): NCBI GI: 50307923 Blast Desc: protein product [Kluyveromyces lactis] gi|49643095|emb|CAG99047.1| KLLA0E00287p [Kluyveromyces lactis]
  misc_feature (1)..(388): NCBI GI: 242791879 Blast Desc: sugar transporter, [Talaromyces stipitatus ATCC 10500] gi|218718432|gb|EED17852.1| sugar transporter, [Talaromyces stipitatus ATCC 10500]
  misc_feature (3)..(416): NCBI GI: 212541144 Blast Desc: sugar transporter, [Penicillium marneffei ATCC 18224] gi|210068026|gb|EEA22118.1| sugar transporter, [Penicillium marneffei ATCC 18224]
  misc_feature (1)..(376): NCBI GI: 238490766 Blast Desc: sugar transporter, [Aspergillus flavus NRRL3357] gi|220697033|gb|EED53374.1| sugar transporter, [Aspergillus flavus NRRL3357]
  misc_feature (3)..(400): NCBI GI: 242822996 Blast Desc: sugar transporter, [Talaromyces stipitatus ATCC 10500] gi|218712922|gb|EED12347.1| sugar transporter, [Talaromyces stipitatus ATCC 10500]
  misc_feature (1)..(376): NCBI GI: 169772863 Blast Desc: [Aspergillus oryzae RIB40] gi|83768761|dbj|BAE58898.1| protein product [Aspergillus oryzae]
MYLLAVIQILGTIIEISASSWIQFTIGRVVAYAAVGLVEPIVPTYQAELAPASLRGFFSGNVQVLVHLGAIWGAGMSRAYATETAKKGWQIPVGVQMIPAALLLALVPFCVEPPRWLEEAIRVLSRVRSPKHHSSDMVSLEVDAFKQALEDSKQMDRASWRDLFGKKYINRTIVVTLLFFFQQSTGQQFANSYGPTFFKSIGLSGARLFNSSTLIPLAGLIGCLVAVATTDIIGRRTLCYIGALLATLFTTLISTVGSQNDATINDTKSNLVVASVILLNGVCKLGVASQCWIIASEIGGTQMRKKLMTWGVVIDVFSAFVVTFFTPYLQNGPQVQLGPRVGYIFLGLAILSLFFFAFFTPELKGRSLEEVDELFEKKLWAWQFNKARTTGVGAQIAAMEAGRKAEVDLESASHHEC

SEQ ID NO: 2633 - DNA, 1176 bp, Muscodor strobelii
  misc_feature: SGI cDNA ID NO. 560516
  misc_feature: Encodes the peptide sequence at SEQ ID NO 2634
atgggaaacgaactgtcgacccctcgccctcagataggttgcgggccgttcgtcttgggccccgacccgacggtgcagttctttgaccaggacgaaagcgtcgcgactcagttcgctagagacgcgccaagctacgtcggcaaggagcctaggatcttgttatatcccgatggctcacagcgtgagggccgaataggcgttgggctggctttgaagcgcgtcggcggtgtcaatccgcaatggatcacgcgtaattgggcagggcacagtttcgctgcgttcggcgatatcaacaacaaccacgccgaggcccttggtctatactgcgcgctgatccaggcctactacgaggttttgggttggattcgcataaccgcaagcatgaaccttgattcgactgtccgaccccgagtacaggtcattgccgatggcgatagcgctctgaattgttttcgcgacaggtatcataaacgatcatctaacgacctactacccgagaacttgcacgacaagtggttggagcctctattcggccttcttttctttggctgccacgtcgagttccacaatgtgaaaagtcacaagggcaatgtcgagggcaacgagctggcggatcgcctagcaaagctgggaacatatttcgccaagacgattccgcaagcagtcggcgaagcagtcggtcatccatccggcgataccttgttctcgatgacaaccctagtgcaacacggaatgttaaagcatatcggagggctgttctgcggggttcccgtggatctggctggcacttatcctgccacacaactcttgtacgacacacttgttcgagacaagattcttgatcagcatattattgcggtactcatggaaacgctaagcattcgagttgccgagttgattacgaagggacaagtccaaacctatgttgtcgttccgaagacacccatcgctatgaagaggagacacctaagcaagcgaaagcgacaagaagtagagcaaagcgacaaggccgctatgaatatcgctaaggatgatgaagagaacgacaaggatttcaatccggctgccaagaggcttaaatctagaaaggagactcataccgatcatgaagtcgacaactcacgcgtcgtcgttctacgatcaggcaaagtgataaccattaaaaaatctcgctag

SEQ ID NO: 2634 - protein, 391 aa, Muscodor strobelii
  misc_feature: SGI Peptide ID NO. 560516
MGNELSTPRPQIGCGPFVLGPDPTVQFFDQDESVATQFARDAPSYVGKEPRILLYPDGSQREGRIGVGLALKRVGGVNPQWITRNWAGHSFAAFGDINNNHAEALGLYCALIQAYYEVLGWIRITASMNLDSTVRPRVQVIADGDSALNCFRDRYHKRSSNDLLPENLHDKWLEPLFGLLFFGCHVEFHNVKSHKGNVEGNELADRLAKLGTYFAKTIPQAVGEAVGHPSGDTLFSMTTLVQHGMLKHIGGLFCGVPVDLAGTYPATQLLYDTLVRDKILDQHIIAVLMETLSIRVAELITKGQVQTYVVVPKTPIAMKRRHLSKRKRQEVEQSDKAAMNIAKDDEENDKDFNPAAKRLKSRKETHTDHEVDNSRVVVLRSGKVITIKKSR

SEQ ID NO: 2635 - DNA, 516 bp, Muscodor strobelii
  misc_feature: SGI cDNA ID NO. 560517
  misc_feature: Encodes the peptide sequence at SEQ ID NO 2636
atggttcaagtcgcacctattaatagactcggactcaaacgttcaaagtacgttcctaacgatcttgaaactggactgtgtcaagatgcagtgttaacagaaaatgcgaaggacgaagacatgccccgaatcattgttttgaactaccgctccggatgtatgggccaatactatcttctacagaatagtcgctgtcaattcgtctttcatcatgacgagacatgcgactgctggattcctggaaagccaaagcaccctctcttacaactccccaaggatctggacaattttcgcttgaatcttattcgtgggagggacgttccatatcgcatggagccacaatttgcagcaattatggtcatgaaactattcctcggtatggacgtgccaatatacctgacgccccagatgaataataacaaagttagtgttccagacaccatcgccgaggagcccagggagccaaacgagttagaggaagtagtcaggcagattgaggacatctcacggaggtga

SEQ ID NO: 2636 - protein, 171 aa, Muscodor strobelii
  misc_feature: SGI Peptide ID NO. 560517
MVQVAPINRLGLKRSKYVPNDLETGLCQDAVLTENAKDEDMPRIIVLNYRSGCMGQYYLLQNSRCQFVFHHDETCDCWIPGKPKHPLLQLPKDLDNFRLNLIRGRDVPYRMEPQFAAIMVMKLFLGMDVPIYLTPQMNNNKVSVPDTIAEEPREPNELEEVVRQIEDISRR

SEQ ID NO: 2637 - DNA, 169 bp, Muscodor strobelii
  misc_feature: SGI EST ID NO. CUFF.6558.0
  misc_feature: Variant of the nucleotide sequence at SEQ ID NO 2635
tgaaactattcctcggtatggacgtgccaatatacctgacgccccagatgaataataacaaagttagtgttccagacaccatcgccgaggagcccagggagccaaacgagttagaggaagtagtcaggcagattgaggacatctcacggaggtgagaccgatgaccgtg

SEQ ID NO: 2638 - DNA, 1257 bp, Muscodor strobelii
  misc_feature: SGI cDNA ID NO. 560518
  misc_feature: Encodes the peptide sequence at SEQ ID NO 2639
atggcaccccgtgacgacagctacatggcagactttgagggtccgattaggtctcgctctctaggatctcgtcgccctacgtggattgaagtgcattctgaccgagaggagagcgactattatgatcatcgtgaccgagattactatcgagactacgaggcccgtcggcgaccggatccatatacacgcagagatcgggcatattccagaaccagacctccacgtgcctatctcaacaaatatggtcaagatatggacccctcgctgattccttcgaagccttacgtcgtggacaaggactccatcaggggtcttcgaactccagatctagagggaggttacggccctaacgatggaccgcgattagagtggcgcaacctaacgaaggaagaaaaggcagaagtgctacgtctgccttggacgcagtggatgaattcagacatcaaaaatcacttcgttgcatcacttggcgaattcatagggacgacgctctttcttcttttcgccttcgctggaaccgaggtggcaaacatccagtcaaatgcgggcgcagacaattcaaccactggtggtgccacaggcttcaacgtgtcggttcagttgtacatcgctctcattttcggcttttcgctcatggtaaatgtatggatcttctttcgcattagtggcgggttattcaatccggcagttacttttgctatgattcttgtcaaggccatcaaaccggcacgtgcagtatgtctcttcatctcccagatactcggatcgcttctagcttccgttgtcgtgcgtttcttgttcccggagagtttcaacgtgcgtactacgctatcgagcaacactagcattgttcaaggtatcttcatcgaagcgatactgactgcggaacttgtgttcaccatattcatgcttgcaaaagagaaacatcgggcaacattcattgcaccagttgggattggattagccctgttcatcgcagagatggttggtgtgcagttcactggagggtcgctcaatcccgctagatcattcggtccttgtgttatcaccctaacgtttgatcatgatcattggatttactgggttggaccagcaatcggtgcgcttatcgcagtagtgttctacaaatttatcaagacgcttgagtacgaggtatgtctaatgccctttgcagcactggcagcatacttacttgatcaagatggcaaatcccggagcagacggcgatccaccgaacgagctgagaaatcaccctga

SEQ ID NO: 2639 - protein, 418 aa, Muscodor strobelii
  misc_feature: SGI Peptide ID NO. 560518
  misc_feature (144)..(375): Pfam Id: PF00230 Pfam Desc: Major intrinsic protein
  misc_feature (154)..(375): Pfam Id: PF00230 Pfam Desc: Major intrinsic protein
  misc_feature (35)..(386): NCBI GI: 256729122 Blast Desc: NECHADRAFT_93338 [Nectria haematococca mpVI 77-13-4]
  misc_feature (1)..(386): NCBI GI: 46138603 Blast Desc: FG10816.1 [Gibberella zeae PH-1]
  misc_feature (32)..(386): NCBI GI: 154297745 Blast Desc: BC1G_12284 [Botryotinia fuckeliana B05.10] gi|150858413|gb|EDN33605.1| BC1G_12284 [Botryotinia fuckeliana B05.10]
  misc_feature (37)..(386): NCBI GI: 156043855 Blast Desc: SS1G_10931 [Sclerotinia sclerotiorum 1980] gi|154695318|gb|EDN95056.1| SS1G_10931 [Sclerotinia sclerotiorum 1980]
  misc_feature (47)..(415): NCBI GI: 39943786 Blast Desc: MGG_03904 [Magnaporthe grisea 70-15] gi|145014605|gb|EDJ99173.1| MGG_03904 [Magnaporthe grisea 70-15]
  misc_feature (20)..(376): NCBI GI: 189196913 Blast Desc: nodulin-26 [Pyrenophora tritici-repentis Pt-1C-BFP] gi|187980742|gb|EDU47368.1| nodulin-26 [Pyrenophora tritici-repentis Pt-1C-BFP]
  misc_feature (45)..(386): NCBI GI: 261357114 Blast Desc: aquaporin-1 [Verticillium albo-atrum VaMs.102]
  misc_feature (140)..(386): NCBI GI: 154311708 Blast Desc: BC1G_06313 [Botryotinia fuckeliana B05.10] gi|150850824|gb|EDN26017.1| BC1G_06313 [Botryotinia fuckeliana B05.10]
  misc_feature (142)..(386): NCBI GI: 156035683 Blast Desc: SS1G_13045 [Sclerotinia sclerotiorum 1980] gi|154698450|gb|EDN98188.1| SS1G_13045 [Sclerotinia sclerotiorum 1980]
  misc_feature (116)..(418): NCBI GI: 169595556 Blast Desc: SNOG_00518 [Phaeosphaeria nodorum SN15] gi|111070893|gb|EAT92013.1| SNOG_00518 [Phaeosphaeria nodorum SN15]
MAPRDDSYMADFEGPIRSRSLGSRRPTWIEVHSDREESDYYDHRDRDYYRDYEARRRPDPYTRRDRAYSRTRPPRAYLNKYGQDMDPSLIPSKPYVVDKDSIRGLRTPDLEGGYGPNDGPRLEWRNLTKEEKAEVLRLPWTQWMNSDIKNHFVASLGEFIGTTLFLLFAFAGTEVANIQSNAGADNSTTGGATGFNVSVQLYIALIFGFSLMVNVWIFFRISGGLFNPAVTFAMILVKAIKPARAVCLFISQILGSLLASVVVRFLFPESFNVRTTLSSNTSIVQGIFIEAILTAELVFTIFMLAKEKHRATFIAPVGIGLALFIAEMVGVQFTGGSLNPARSFGPCVITLTFDHDHWIYWVGPAIGALIAVVFYKFIKTLEYEVCLMPFAALAAYLLDQDGKSRSRRRSTERAEKSP

SEQ ID NO: 2640 - DNA, 192 bp, Muscodor strobelii
  misc_feature: SGI EST ID NO. CUFF.6567.0
  misc_feature: Variant of the nucleotide sequence at SEQ ID NO 2638
tgaattcagacatcaaaaatcacttcgttgcatcacttggcgaattcatagggacgacgctctttcttcttttcgccttcgctggaaccgaggtggcaaacatccagtcaaatgcgggcgcagacaattcaaccactggtggtgccacaggcttcaacgtgtcggttcagttgtacatcgctctcattttcg

SEQ ID NO: 2641 - DNA, 2097 bp, Muscodor strobelii
  misc_feature: SGI cDNA ID NO. 560519
  misc_feature: Encodes the peptide sequence at SEQ ID NO 2642
atgatgacaaaagcctcaacgtctcctggctttccggtgccacagccccggcgtaatgccgttgagaagggccgcatcatcatggtagttgtggctatcattcttgtcatttcctacaagtgtggcacggctctaggagacttctcgtcgcgacgcatacactcgcatggccagaagaccgtccccggaaattttgcaccgccctacggccggtttcctgctcccggggatccatttcggtttttaccctgcacaggctcgacgttgccgcctgcactcgacgacccagaaccagttcaaacgtgggcgagtctcttcgatccaaacccagagaactggagttggggccgcccgtcatccgaaagccttacgcgggagggcgacgtatatgctggtcgcgggatttatttatgtggatttcttgacgtgccgcttgactataccaatctctcagatcatcgtatcacacgactcgccgtgacgaaatttcaagtatccggtctctcacctgcaagcggacgcgaaccgcattctggtaacaagagcaagcggacaatcgtaattgaacccggcggtcctggtggaagcggcacatcgtatgtctggcgagttgctgaagatgtgacgaagcggttgagcgacagacagtatgatgtgctaggttgggatccacgcggtgtcaatgcctctctgccagcttttgcttgctatccttataacgtcgaccgtgatcggtggtctttacttactgggcagtattatgaagtctctgcgtcccccgcagcacagctcgagattgctgatgcaatggctgatgcagttcttcacgcttgctacaagcagcatggtgacctaggtcgtttcatgggcactgccttcgtcgccagagatctggaagagattcgcaaagctctggatgagaaagagctaactggatacctcgtcagctacgggactggcattggtcaaacttatgcgaacctatttcctgatagtgtcggtcgcatgatccttgacggaaccgaatatgttcgtgatcatcgcttacttggtggttttggttggaccgctctagacaacggcatgtataaaaagatcccgcgcgacttattcctgaccgcgcttctaagacatgatgctaatgtttttgtagtaacagatgcatggcatgatgggttcttgggggaatgcgtcaatgctggacccaaacactgtgcacttgctcgtcccagagatcgagaaacagtctcagtacaagatctcgaggctcgcatgcattctctcatgaagtcgctaattcgtcgccctataccaggatactcacccaacagcggaccttcacttgtaacgtattcatcgttggtaggtgccatatacggcgctctctacaacgcccagtcatggcctgctttggctcaaatgctgtttgaactcgagagcggaaactccacgcttgctactttaatgcttgaaaagcaaggatgggaattcgatccaacactaccatccccgccatcgccaaagccgtcttcggatgagttagagtctatggtaatctgtgcagatgcatatgacgctcccgaaccacctgagggtatgacgtggtggcattccttgtggtcaaacatgacttctcagtcatggatcgcgggcaattctcgcttctctgctgtatttccttgtcgccactacaccgattattggccgacgcccgctgaagtgtatcgtggagacttgaatcacaccctaaaccatcccattttactcatcgcagaaacatatgatccagcgactccgctaagaaacgggagaaggttagcagcagagatgggatcaaacgcaagattgattgctcatcatggctacgggcactcttcatcacgggatatatcaaactgcaccgacacgatcgcaaagaagtacatcctctctggagacttgccgactgagccagagacggcttgttacgcagatcaaaagccctatctttacgatgtgaaagccacagataattccatcgctccctttgatccggttactctttggcgtgaacacctctacgagcttactttcatgaatacaaggctcggtcgatag

SEQ ID NO: 2642 - protein, 698 aa, Muscodor strobelii
  misc_feature: SGI Peptide ID NO. 560519
  misc_feature (545)..(655): Pfam Id: PF08386 Pfam Desc: TAP-like protein
  misc_feature (567)..(655): Pfam Id: PF08386 Pfam Desc: TAP-like protein
  misc_feature (14)..(696): NCBI GI: 116200630 Blast Desc: CHGG_10860 [Chaetomium globosum CBS 148.51] gi|88175574|gb|EAQ83042.1| CHGG_10860 [Chaetomium globosum CBS 148.51]
  misc_feature (63)..(697): NCBI GI: 71024791 Blast Desc: UM06478.1 [Ustilago maydis 521] gi|46100514|gb|EAK85747.1| UM06478.1 [Ustilago maydis 521]
  misc_feature (68)..(662): NCBI GI: 145611220 Blast Desc: MGG_00578 [Magnaporthe grisea 70-15] gi|145018521|gb|EDK02800.1| MGG_00578 [Magnaporthe grisea 70-15]
  misc_feature (68)..(357): NCBI GI: 27764307 Blast Desc: protein product [Podospora anserina]
  misc_feature (138)..(662): NCBI GI: 71007720 Blast Desc: UM01994.1 [Ustilago maydis 521] gi|46097423|gb|EAK82656.1| UM01994.1 [Ustilago maydis 521]
  misc_feature (136)..(658): NCBI GI: 46124695 Blast Desc: FG06725.1 [Gibberella zeae PH-1]
  misc_feature (138)..(664): NCBI GI: 115390030 Blast Desc: [Aspergillus terreus NIH2624] gi|114194916|gb|EAU36616.1| [Aspergillus terreus NIH2624]
  misc_feature (137)..(658): NCBI GI: 145248299 Blast Desc: An13g02620 [Aspergillus niger] gi|134081149|emb|CAK41659.1| protein product [Aspergillus niger]
  misc_feature (138)..(665): NCBI GI: 238500650 Blast Desc: conserved [Aspergillus flavus NRRL3357] gi|220691796|gb|EED48143.1| conserved [Aspergillus flavus NRRL3357]
  misc_feature (138)..(664): NCBI GI: 238502303 Blast Desc: conserved [Aspergillus flavus NRRL3357] gi|220691195|gb|EED47543.1| conserved [Aspergillus flavus NRRL3357]
MMTKASTSPGFPVPQPRRNAVEKGRIIMVVVAIILVISYKCGTALGDFSSRRIHSHGQKTVPGNFAPPYGRFPAPGDPFRFLPCTGSTLPPALDDPEPVQTWASLFDPNPENWSWGRPSSESLTREGDVYAGRGIYLCGFLDVPLDYTNLSDHRITRLAVTKFQVSGLSPASGREPHSGNKSKRTIVIEPGGPGGSGTSYVWRVAEDVTKRLSDRQYDVLGWDPRGVNASLPAFACYPYNVDRDRWSLLTGQYYEVSASPAAQLEIADAMADAVLHACYKQHGDLGRFMGTAFVARDLEEIRKALDEKELTGYLVSYGTGIGQTYANLFPDSVGRMILDGTEYVRDHRLLGGFGWTALDNGMYKKIPRDLFLTALLRHDANVFVVTDAWHDGFLGECVNAGPKHCALARPRDRETVSVQDLEARMHSLMKSLIRRPIPGYSPNSGPSLVTYSSLVGAIYGALYNAQSWPALAQMLFELESGNSTLATLMLEKQGWEFDPTLPSPPSPKPSSDELESMVICADAYDAPEPPEGMTWWHSLWSNMTSQSWIAGNSRFSAVFPCRHYTDYWPTPAEVYRGDLNHTLNHPILLIAETYDPATPLRNGRRLAAEMGSNARLIAHHGYGHSSSRDISNCTDTIAKKYILSGDLPTEPETACYADQKPYLYDVKATDNSIAPFDPVTLWREHLYELTFMNTRLGR

SEQ ID NO: 2643 - DNA, 1653 bp, Muscodor strobelii
  misc_feature: SGI cDNA ID NO. 560520
  misc_feature: Encodes the peptide sequence at SEQ ID NO 2644
atgagttccggtcagcatcttcaagttatcgccgttgcagtcggtgtctgtgcacatcaaggcctgttcaagcatggtgactggcatttgcacggaccgcacatcatcgccagtcaccttgcgctcggtgtcttactcctctattatgtcgccgcccgtgagccgggctacggagccggctcctttagtagtgtcctgtgcaccacggccctaactactgccgcttaccttggtggactattttcgagtatgaccatttacagattattttttcatagaatcagctccttcagaggtccgacaatagctgccatcacaaagttctggcatgtatggcacattcgatattcaacgaatttccgatttcaagagaagatatatgagaagtatggtccaatcgtgaggacgggacctaatgaaattacgatatttcaccccgccgcctttgagctgctggacggccatggcaatgacacgtctaaggacatttggtacgatataatatcacctcaaaaatccgccatcttcacccgcgacaaaaaagaacataaggagggacgaaaagtatgggcccagtcgctatctacgaaagcgatgaatgactatcatcctcggattgcaagtctcgcgcaagcactagcacgctgcatcgatacttttgacggagctccgattgatctcgacaccgttatgtcgtggttttcttttgatgtgatgggagaggtgttatttggcgatgacttcaacctccttgagtctaaggtcacacacccagcgataaagcacagagatcgcgcattggctgtcgccggtccgctcggcgatgccatttggatagctttgctaggcttcaaactcgtgccctggtatgggcgtatcaaggactggcaccgcatggtcaagttctgcgaggatcatatggttgcacgtcttcagcaaggtgaaagagatggaaagctagatatggccagcttcttcattgacgagcataacaacgcggctggtgtcaaatctcagaaagctagggacttgtatctcgcagggactgcggtaacagcagttgtagccggaagtgacacaactcgtgccgctctgataggaacatggtggtatctcgccatgtatcccgagcacgccaaaaagatacaagctgagatcgaaggtattgacgttaatgatgttaatgcccttgcaatgctaccgcaccttgacggtgtggtgcatgaggctcttcgcctcgtaccgccagcaatgactggaggcaatagaattacagggccaaatggcctgatgattgatgatgtcctgatacccccttataccaaagtcacggcgccgaagtgggtgatccacaggatggaatcgtcatttgtgcgaccaaacgaatttattcctgaacggtggtattctcgcccggaattaattgtcgataaacgagcatatgcgccattttcctacggtgccaggaactgtcttggaaaaagcatggcgtatgctgagctccggctgaccaccgctataatcttaaagaatttcgatgtgacctttgcaccgggctatgacccggaaacgatgtggcgggatatgagggatcaagttacttgccaacctggtgaggttctttgtgtatttaagcaccgtcaacgaacatag

SEQ ID NO: 2644 - protein, 550 aa, Muscodor strobelii
  misc_feature: SGI Peptide ID NO. 560520
  misc_feature (97)..(543): Pfam Id: PF00067 Pfam Desc: Cytochrome P450
  misc_feature (294)..(543): Pfam Id: PF00067 Pfam Desc: Cytochrome P450
  misc_feature (6)..(548): NCBI GI: 154313035 Blast Desc: BC1G_05519 [Botryotinia fuckeliana B05.10] gi|150849604|gb|EDN24797.1| BC1G_05519 [Botryotinia fuckeliana B05.10]
  misc_feature (13)..(549): NCBI GI: 121720148 Blast Desc: benzoate 4-monooxygenase cytochrome P450 [Aspergillus clavatus NRRL 1] gi|119404984|gb|EAW15346.1| benzoate 4-monooxygenase cytochrome P450 [Aspergillus clavatus NRRL 1]
  misc_feature (11)..(549): NCBI GI: 171691038 Blast Desc: protein product [Podospora anserina] gi|170945467|emb|CAP71579.1| protein product [Podospora anserina]
  misc_feature (8)..(548): NCBI GI: 242771984 Blast Desc: benzoate 4-monooxygenase cytochrome P450, [Talaromyces stipitatus ATCC 10500] gi|218721570|gb|EED20988.1| benzoate 4-monooxygenase cytochrome P450, [Talaromyces stipitatus ATCC
  misc_feature (133)..(547): NCBI GI: 242805794 Blast Desc: cytochrome P450, [Talaromyces stipitatus ATCC 10500] gi|218715231|gb|EED14653.1| cytochrome P450, [Talaromyces stipitatus ATCC 10500]
  misc_feature (10)..(484): NCBI GI: 255950776 Blast Desc: Pc22g22610 [Penicillium chrysogenum Wisconsin 54-1255] gi|211593172|emb|CAP99549.1| Pc22g22610 [Penicillium chrysogenum Wisconsin 54-1255]
  misc_feature (74)..(547): NCBI GI: 145257250 Blast Desc: An04g02950 [Aspergillus niger] gi|134058574|emb|CAK96461.1| protein product [Aspergillus niger]
  misc_feature (2)..(549): NCBI GI: 261354521 Blast Desc: benzoate 4-monooxygenase cytochrome P450 [Verticillium albo-atrum VaMs.102]
  misc_feature (11)..(547): NCBI GI: 242810525 Blast Desc: cytochrome P450, [Talaromyces stipitatus ATCC 10500] gi|218716223|gb|EED15645.1| cytochrome P450, [Talaromyces stipitatus ATCC 10500]
  misc_feature (3)..(549): NCBI GI: 261357700 Blast Desc: cytochrome P450 67 [Verticillium albo-atrum VaMs.102]
  misc_feature (172)..(518): SWISSPROT Homolog: EC 1.14.14.1 Unspecific monooxygenase
MSSGQHLQVIAVAVGVCAHQGLFKHGDWHLHGPHIIASHLALGVLLLYYVAAREPGYGAGSFSSVLCTTALTTAAYLGGLFSSMTIYRLFFHRISSFRGPTIAAITKFWHVWHIRYSTNFRFQEKIYEKYGPIVRTGPNEITIFHPAAFELLDGHGNDTSKDIWYDIISPQKSAIFTRDKKEHKEGRKVWAQSLSTKAMNDYHPRIASLAQALARCIDTFDGAPIDLDTVMSWFSFDVMGEVLFGDDFNLLESKVTHPAIKHRDRALAVAGPLGDAIWIALLGFKLVPWYGRIKDWHRMVKFCEDHMVARLQQGERDGKLDMASFFIDEHNNAAGVKSQKARDLYLAGTAVTAVVAGSDTTRAALIGTWWYLAMYPEHAKKIQAEIEGIDVNDVNALAMLPHLDGVVHEALRLVPPAMTGGNRITGPNGLMIDDVLIPPYTKVTAPKWVIHRMESSFVRPNEFIPERWYSRPELIVDKRAYAPFSYGARNCLGKSMAYAELRLTTAIILKNFDVTFAPGYDPETMWRDMRDQVTCQPGEVLCVFKHRQRT

SEQ ID NO: 2645 - DNA, 2265 bp, Muscodor strobelii
  misc_feature: SGI EST ID NO. CUFF.6583.0
  misc_feature: Variant of the nucleotide sequence at SEQ ID NO 2643
cattaagtcacgcacaacactgcatccctgtccgccccggctgcagctgaggctcaggtaagtcagggaggcttgatgattgacaggcaggaactaaacttggctgggcgtaacgcgatgtggtcgtaatgatatggatttctctaagatgagttggggaattcgctcaggggaccctgggtccaaccggcatggcccaaggccagcctacgtttacatcttgcccccctcacatattggagcgtacaagcactcccgcataatttagtggtgggtgtaatgggagctatcgctggtcatgacggaggggcgccgagagggagtggattattattagcagtagttaagagacagatgggtagcatcatcgctctgcatatcctcacctcgccttgtttttcttgcctttcttaaagctttggctccggcctttctcattgcgcaatcaatgtttgttgactcggaaatttgttcatgcgttggctatgagttccggtcagcatcttcaagttatcgccgttgcagtcggtgtctgtgcacatcaaggcctgttcaagcatggtgactggcatttgcacggaccgcacatcatcgccagtcaccttgcgctcggtgtcttactcctctattatgtcgccgcccgtgagccgggctacggagccggctcctttagtagtgtcctgtgcaccacggccctaactactgccgcttaccttggtggactattttcgagtatgaccatttacagattattttttcatagaatcagctccttcagaggtccgacaatagctgccatcacaaagttctggcatgtatggcacattcgatattcaacgaatttccgatttcaagagaagatatatgagaagtatggtccaatcgtgaggacgggacctaatgaaattacgatatttcaccccgccgcctttgagctgctggacggccatggcaatgacacgtctaaggacatttggtacgatataatatcacctcaaaaatccgccatcttcacccgcgacaaaaaagaacataaggagggacgaaaagtatgggcccagtcgctatctacgaaagcgatgaatgactatcatcctcggattgcaagtctcgcgcaagcactagcacgctgcatcgatacttttgacggagctccgattgatctcgacaccgttatgtcgtggttttcttttgatgtgatgggagaggtgttatttggcgatgacttcaacctccttgagtctaaggtcacacacccagcgataaagcacagagatcgcgcattggctgtcgccggtccgctcggcgatgccatttggatagctttgctaggcttcaaactcgtgccctggtatgggcgtatcaaggactggcaccgcatggtcaagttctgcgaggatcatatggttgcacgtcttcagcaaggtgaaagagatggaaagctagatatggccagcttcttcattgacgagcataacaacgcggctggtgtcaaatctcagaaagctagggacttgtatctcgcagggactgcggtaacagcagttgtagccggaaggtatgtaacagtgaaattctcgtcctacttgagatccaaagatagcattatgctgtgttacctgtcatcgtagctgaagctaataattctctcgcagtgacacaactcgtgccgctctgataggaacatggtggtatctcgccatgtatcccgagcacgccaaaaagatacaagctgagatcgaaggtattgacgttaatgatgttaatgcccttgcaatgctaccgcaccttgacggtgtggtgcatgaggctcttcgcctcgtaccgccagcaatgactggaggcaatagaattacagggccaaatggcctgatgattgatgatgtcctgatacccccttataccaaagtcacggcgccgaagtgggtgatccacaggatggaatcgtcatttgtgcgaccaaacgaatttattcctgaacggtggtattctcgcccggaattaattgtcgataaacgagcatatgcgccattttcctacggtgccaggaactgtcttggaaaaagcatggcgtatgctgagctccggctgaccaccgctataatcttaaagaatttcgatgtgacctttgcaccgggctatgacccggaaacgatgtggcgggatatgagggatcaagttacttgccaacctggtgaggttctttgtgtatttaagcaccgtcaacgaacataggatacccaatttgaattttgttaatcaaac

SEQ ID NO: 2646 - DNA, 2019 bp, Muscodor strobelii
  misc_feature: SGI cDNA ID NO. 560521
  misc_feature: Encodes the peptide sequence at SEQ ID NO 2647
atgtggcagcaaaaatcaccattatatctcgatactctgttgtcgccgatagagcaacgaagatttcaccctcgaccactacgaagatatatcttactagcagctgcaataggcgccggctggttcgtgatatcaaaagaatggcattcggtagagctcgctgaggagttcgtccgaaatgcttcctggcaatccgttcctgggactcaatgggttgggggtggttcggtcattacatcaacgccatcctcaaatacgctttcaccctatctcgaagtgcagcggacacaagctgagtccgaacaaaaaagcttaggcctcgaccttcctgacgtaataaggatttcattcgaagatgcagtgaaggatgtcgagctcgaagggtgggaagatgaatggttcacatcagggcattacaacaaagagcagtttggtccgctggcggagccgagcattgatttcgtttataattgggtcaatggatcggatgaggcgttcaaagatattcggcacacatacgaactccagtcgcctctaaacgataaagacggcaaatggattacgcatcatagtgtgaatcgttatcgcgactgggacgagttgagatactcactacggagtcttaacacatatgcaaaaggatttgtcaacaagatccagctacttgtgaactctgtaccaaaaacaggtcttgatggcatcacgaaaatgcaggctcagcgccctacatggctgaaggatgacgagaagacgaacgaacagatacaggtcttgagccaggaagactattttcgaaaggaggagcaatcctgtctgcctactttcaattcactctcattagaaacccagatttacaacacgccgtcggacacggatcagcttgtcgccttgtccgacgacatgctcttgggaatggaccatgccgcctcggatttctattcaccgctctttggtcacgttatgggattcaaatctgacgcctataatgtcaagagcctggataattcaaaagcaccctcttttggcgaaaagccttttgtttattacacatcatatttgttaaatcatcgcttcggacagcgagatcgccatgtccaagctcacttcacacattcgatttcccgagctacaatgcacgaagccatggcttctttcccagccccgtcgctcaatggggcctgtgagcgcttccgtggtgaatcccgctatcagatctatccgtggtttgctgggtttcactactcaatagagagattccgtgaagctcttctctggtcttacatcgaaatgcgggcagatgctaacggagatgggtaccttgactatcaggagcgtcgccaaatcctggacaccattcagcccggatgggaccagcttggcaaaaccgcagatgcctctaagccagcggcacagcctaaggaccgtgagagaatgtactttaaggttcccgagatattacgcgacgctggactacaagctccgaaggtcaatctcaatgttctctggacctccatcgatggacctgagacgattcgaagtgtcaaatgccacaaattcaaagtcaacaaatgcttgggcgagtctttcgcctcgtcactttccgattcgacatcacaaaacccagactttactgcttccaatgtcttctcgcgtctatctcacgagttcccaacatgtggtgactgccttatcaagttcattttggcttcgacaccaagaggactgggacctttgctacccgcacaagctgatgatcgggaagtcatcgtcaaggcactcaaaaagtattcgcacactgtcgttgacacggatactatgaaatttgtcatggtgaaggatgcagagcaggctgagacagagttattggaaagaacagtaaagcgggggaaatcgtttgggcagtggtgtctaaacgacgacgttatgaccgagagcgtcgaagaagtcggtcaagtcaaagacgtgatgaaacaggtgttcgaatctttatggcccagtagaacatcctgggagttatga

SEQ ID NO: 2647 - protein, 672 aa, Muscodor strobelii
  misc_feature: SGI Peptide ID NO. 560521
  misc_feature (112)..(426): NCBI GI: 189210922 Blast Desc: conserved [Pyrenophora tritici-repentis Pt-1C-BFP] gi|187977885|gb|EDU44511.1| conserved [Pyrenophora tritici-repentis Pt-1C-BFP]
  misc_feature (511)..(656): NCBI GI: 189210930 Blast Desc: [Pyrenophora tritici-repentis Pt-1C-BFP] gi|187977889|gb|EDU44515.1| [Pyrenophora tritici-repentis Pt-1C-BFP]
  misc_feature (103)..(580): NCBI GI: 71005892 Blast Desc: UM01465.1 [Ustilago maydis 521] gi|46097105|gb|EAK82338.1| [Ustilago maydis 521]
  misc_feature (256)..(671): NCBI GI: 262285127 Blast Desc: xylosylphosphotransferase [Cryptococcus neoformans var. grubii]
  misc_feature (268)..(671): NCBI GI: 58260318 Blast Desc: CNJ02890 [Cryptococcus neoformans var. neoformans JEC21] gi|134116230|ref|XP_773286.1| CNBJ0640 [Cryptococcus neoformans var. neoformans B-3501A] gi|50255908|gb|EAL18639.1|
  misc_feature (137)..(671): NCBI GI: 242214334 Blast Desc: [Postia placenta Mad-698-R] gi|220727900|gb|EED81806.1| [Postia placenta Mad-698-R]
  misc_feature (148)..(581): NCBI GI: 242218123 Blast Desc: [Postia placenta Mad-698-R] gi|220725982|gb|EED79947.1| [Postia placenta Mad-698-R]
  misc_feature (247)..(582): NCBI GI: 58260208 Blast Desc: [Cryptococcus neoformans var. neoformans JEC21] gi|134116524|ref|XP_773216.1| CNBJ2100 [Cryptococcus neoformans var. neoformans B-3501A] gi|50255837|gb|EAL18569.1| CNBJ2100 var.
  misc_feature (244)..(475): NCBI GI: 71012773 Blast Desc: UM02379.1 [Ustilago maydis 521] gi|46098184|gb|EAK83417.1| UM02379.1 [Ustilago maydis 521]
  misc_feature (152)..(414): NCBI GI: 260203995 Blast Desc: UDP-glucose-4-epimerase cpsY [Mycobacterium tuberculosis K85]
MWQQKSPLYLDTLLSPIEQRRFHPRPLRRYILLAAAIGAGWFVISKEWHSVELAEEFVRNASWQSVPGTQWVGGGSVITSTPSSNTLSPYLEVQRTQAESEQKSLGLDLPDVIRISFEDAVKDVELEGWEDEWFTSGHYNKEQFGPLAEPSIDFVYNWVNGSDEAFKDIRHTYELQSPLNDKDGKWITHHSVNRYRDWDELRYSLRSLNTYAKGFVNKIQLLVNSVPKTGLDGITKMQAQRPTWLKDDEKTNEQIQVLSQEDYFRKEEQSCLPTFNSLSLETQIYNTPSDTDQLVALSDDMLLGMDHAASDFYSPLFGHVMGFKSDAYNVKSLDNSKAPSFGEKPFVYYTSYLLNHRFGQRDRHVQAHFTHSISRATMHEAMASFPAPSLNGACERFRGESRYQIYPWFAGFHYSIERFREALLWSYIEMRADANGDGYLDYQERRQILDTIQPGWDQLGKTADASKPAAQPKDRERMYFKVPEILRDAGLQAPKVNLNVLWTSIDGPETIRSVKCHKFKVNKCLGESFASSLSDSTSQNPDFTASNVFSRLSHEFPTCGDCLIKFILASTPRGLGPLLPAQADDREVIVKALKKYSHTVVDTDTMKFVMVKDAEQAETELLERTVKRGKSFGQWCLNDDVMTESVEEVGQVKDVMKQVFESLWPSRTSWEL

SEQ ID NO: 2648 - DNA, 1221 bp, Muscodor strobelii
  misc_feature: SGI cDNA ID NO. 560522
  misc_feature: Encodes the peptide sequence at SEQ ID NO 2649
atgtatgtgacggactcctcgaaaagagaggacgaggaagcccttctatcctacacgtcttccgagaagcagggctttgaggattcgaaatggggagctggctttagatctctgtcattgcgaaggctcctggtgcagtctctgagcttcatgaggccaagttttatggtgcgggcagcgccagcaggtgaaggtgcagcgaagaagaagaatacaaccgaatacttagatggtgttcgaggtgttgcttcgctcattgtcttcatacttcactggtctcacataccctatcctgcggtcaactcgggctggggttacaaacacaacacatccttatggctactcccattcattcgcctgatcttctccggggcggcaatggtgtctatattttttgtcgtgtctggtggcgcgcccttccagcacagcttcggcgcatatatcgactatctcgatggagagtccaacccctgggactggacagccaatttctatggattctataatccccagttatggtccatttctgtggaatttcgcggttccatggtggtctttctcatgacccttggcttagctaagtcgcgaacatcggtgcggatggcggtagagacattccttacggctcactgctttgcccataagcgctgggatattgcgctcttcatagctgggatgctcctcgccgagcttgaagtgcttgtatcaaaaacgggtacgcgccaaaagagcagatggatcaatgtgctcctcataatcacactagtggtcggccttttcctaactggctatcctcgagaccacccgacgagcacgcctggttatatgtggtcaaaatatacatggccatacaccgcctaccgtcgtcgctactggcttgccatcggtgccatcctgactgttggccctatggtttttatgccatctattcagaacatcttcctcacacgcccggctaagtatcttggccgtattagcttcgctttataccttgtccatggtttaggaaaccgcacgtttggaaaatggatactacttgcatgctggaagtacattggagaagaaggtttctggccatatactatcagctttgttgtttcaacgtctctgtatttccctatcgtcttctgggcctcagatatcttctggagagccgtcgatgtaccatcaaccaactttgcgaggtggatagaaaagcaatgtgccgcgacagaatcatga

SEQ ID NO: 2649 - protein, 406 aa, Muscodor strobelii
  misc_feature: SGI Peptide ID NO. 560522
  misc_feature (73)..(381): Pfam Id: PF01757 Pfam Desc: Acyltransferase family
  misc_feature (169)..(381): Pfam Id: PF01757 Pfam Desc: Acyltransferase family
  misc_feature (41)..(403): NCBI GI: 242800850 Blast Desc: acyltransferase, [Talaromyces stipitatus ATCC 10500] gi|218717009|gb|EED16430.1| acyltransferase, [Talaromyces stipitatus ATCC 10500]
  misc_feature (137)..(400): NCBI GI: 256723995 Blast Desc: NECHADRAFT_24175 [Nectria haematococca mpVI 77-13-4]
  misc_feature (156)..(406): NCBI GI: 67522479 Blast Desc: AN1696.2 [Aspergillus nidulans FGSC A4] gi|40745660|gb|EAA64816.1| AN1696.2 [Aspergillus nidulans FGSC A4] gi|259487037|tpe|CBF85387.1| TPA: acyltransferase, nidulans
  misc_feature (156)..(400): NCBI GI: 169773507 Blast Desc: [Aspergillus oryzae RIB40] gi|83769083|dbj|BAE59220.1| protein product [Aspergillus oryzae]
  misc_feature (156)..(400): NCBI GI: 238491494 Blast Desc: acyltransferase, [Aspergillus flavus NRRL3357] gi|220697397|gb|EED53738.1| acyltransferase, [Aspergillus flavus NRRL3357]
  misc_feature (156)..(401): NCBI GI: 115397867 Blast Desc: conserved [Aspergillus terreus NIH2624] gi|114192716|gb|EAU34416.1| conserved [Aspergillus terreus NIH2624]
  misc_feature (156)..(401): NCBI GI: 70994264 Blast Desc: acyltransferase [Aspergillus fumigatus Af293] gi|66849608|gb|EAL89936.1| acyltransferase, [Aspergillus fumigatus Af293] gi|159125113|gb|EDP50230.1| acyltransferase,
  misc_feature (140)..(403): NCBI GI: 121707144 Blast Desc: acyltransferase, [Aspergillus clavatus NRRL 1] gi|119399893|gb|EAW10319.1| acyltransferase, [Aspergillus clavatus NRRL 1]
  misc_feature (156)..(403): NCBI GI: 212540738 Blast Desc: acyltransferase, [Penicillium marneffei ATCC 18224] gi|210067823|gb|EEA21915.1| acyltransferase, [Penicillium marneffei ATCC 18224]
  misc_feature (156)..(399): NCBI GI: 119500826 Blast Desc: acyltransferase, [Neosartorya fischeri NRRL 181] gi|119415335|gb|EAW25273.1| acyltransferase, [Neosartorya fischeri NRRL 181]
MYVTDSSKREDEEALLSYTSSEKQGFEDSKWGAGFRSLSLRRLLVQSLSFMRPSFMVRAAPAGEGAAKKKNTTEYLDGVRGVASLIVFILHWSHIPYPAVNSGWGYKHNTSLWLLPFIRLIFSGAAMVSIFFVVSGGAPFQHSFGAYIDYLDGESNPWDWTANFYGFYNPQLWSISVEFRGSMVVFLMTLGLAKSRTSVRMAVETFLTAHCFAHKRWDIALFIAGMLLAELEVLVSKTGTRQKSRWINVLLIITLVVGLFLTGYPRDHPTSTPGYMWSKYTWPYTAYRRRYWLAIGAILTVGPMVFMPSIQNIFLTRPAKYLGRISFALYLVHGLGNRTFGKWILLACWKYIGEEGFWPYTISFVVSTSLYFPIVFWASDIFWRAVDVPSTNFARWIEKQCAATES

SEQ ID NO: 2650 - DNA, 924 bp, Muscodor strobelii
  misc_feature: SGI cDNA ID NO. 560523
  misc_feature: Encodes the peptide sequence at SEQ ID NO 2651
atggccatcaagaacattgccctcatcggtgctaatggcaatctcggcaccgagatcctggctactctcgcagcagtagaagacttcagggtaaccgttgtgaagcgggagtcatcgacctcagcgattccagatagtctagcatcaaaggggatttcagtcgctaccgtagatgatagtctctcactcgagagtctgaagacagcgtttgaaggccaagatgccgtcatcacggccatgccactgaaggaccccgcccagcacctacggatcgccgatgccgctgccgcctccggcgtaaagcgtgtcatccccgccgactatggaagttgtgattctgacagcgcccgcgctcaggagctcgtccctttgttcaagaataaagccaatgttcgcgctagattacaagaacacgccgctgcaaacccggagttcgcgtggacaagtctggtctgtgggcatttctttgactgggggctgagagagaatttcctgcattttgacttgaagaacaagactgcggacatcatagatgatgggtcttacaaaagctcaacggcgacgctgggacgcgttgctgaagctcttgttaacgtattaaagaaagatgaagatgccacgaagaacaaggtattgttcatgcagagcttttgtgtctcgcagaatgaggttctggatgcgcttgagaaggctacgggtgagaagtggaaagtgaactaccacgagtcggagcagtatcttaaggaacacaaggcgaaagctgatgcgggtgataagcaggcggttgaggatttggtgtttgcattaggagccctggatgggaattgggaggagagagagaacttctcgatggatttgttggggttgaagaatgaggacctggatgaggttgttaagagagttgttgatgtgtataaaacataa

SEQ ID NO: 2651 - protein, 307 aa, Muscodor strobelii
  misc_feature: SGI Peptide ID NO. 560523
  misc_feature (6)..(242): Pfam Id: PF05368 Pfam Desc: NmrA-like family
  misc_feature (6)..(161): Pfam Id: PF05368 Pfam Desc: NmrA-like family
  misc_feature (1)..(294): NCBI GI: 39942786 Blast Desc: MGG_03473 [Magnaporthe grisea 70-15] gi|145009976|gb|EDJ94632.1| MGG_03473 [Magnaporthe grisea 70-15]
  misc_feature (1)..(306): NCBI GI: 256724539 Blast Desc: NECHADRAFT_64862 [Nectria haematococca mpVI 77-13-4]
  misc_feature (1)..(306): NCBI GI: 46126985 Blast Desc: FG07870.1 [Gibberella zeae PH-1]
  misc_feature (1)..(298): NCBI GI: 240105633 Blast Desc: NmrA-like family protein [Coccidioides posadasii C735 delta SOWgp]
  misc_feature (1)..(243): NCBI GI: 261361282 Blast Desc: CipA protein [Verticillium albo-atrum VaMs.102]
  misc_feature (1)..(298): NCBI GI: 119193626 Blast Desc: CIMG_01190 [Coccidioides immitis RS]
  misc_feature (1)..(298): NCBI GI: 258574867 Blast Desc: [Uncinocarpus reesii 1704] gi|237901881|gb|EEP76282.1| [Uncinocarpus reesii 1704]
  misc_feature (23)..(229): NCBI GI: 148978220 Blast Desc: [Colletotrichum cereale]
  misc_feature (1)..(302): NCBI GI: 169603690 Blast Desc: SNOG_04853 [Phaeosphaeria nodorum SN15] gi|111066124|gb|EAT87244.1| SNOG_04853 [Phaeosphaeria nodorum SN15]
  misc_feature (3)..(303): NCBI GI: 145251798 Blast Desc: An16g00990 [Aspergillus niger] gi|134082950|emb|CAK97348.1| protein product [Aspergillus niger]
MAIKNIALIGANGNLGTEILATLAAVEDFRVTVVKRESSTSAIPDSLASKGISVATVDDSLSLESLKTAFEGQDAVITAMPLKDPAQHLRIADAAAASGVKRVIPADYGSCDSDSARAQELVPLFKNKANVRARLQEHAAANPEFAWTSLVCGHFFDWGLRENFLHFDLKNKTADIIDDGSYKSSTATLGRVAEALVNVLKKDEDATKNKVLFMQSFCVSQNEVLDALEKATGEKWKVNYHESEQYLKEHKAKADAGDKQAVEDLVFALGALDGNWEERENFSMDLLGLKNEDLDEVVKRVVDVYKT

SEQ ID NO: 2652 - DNA, 1312 bp, Muscodor strobelii
  misc_feature: SGI EST ID NO. CUFF.6613.0
  misc_feature: Variant of the nucleotide sequence at SEQ ID NO 2650
aacgacttgcctacatgtaggtaacacagcaagaagatgcagacatcaagccagccttcttccatcgtgcgtacacaatgcgtacacaaataccctaaagtcttggcatgattaatgttgcccgtcacatctgcgtatagtaagattttacaaaacagccaagaaacaaagaaaaacaacactcgactacggcaacagccgcagtaacattaacacaactcaaatctcgccatagattacctcgcgccacttgcgcaacaaatttcccggccccaacaaaacggtcactttgcccataccttatcacatacgtcatggccatcaagaacattgccctcatcggtgctaatggcaatctcggcaccgagatcctggctactctcgcagcagtagaagacttcagggtaaccgttgtgaagcgggagtcatcgacctcagcgattccagatagtctagcatcaaaggggatttcagtcgctaccgtagatgatagtctctcactcgagagtctgaagacagcgtttgaaggccaagatgccgtcatcacggccatgccactgaaggaccccgcccagcacctacggatcgccgatgccgctgccgcctccggcgtaaagcgtgtcatccccgccgactatggaagttgtgattctgacagcgcccgcgctcaggagctcgtccctttgttcaagaataaagccaatgttcgcgctagattacaagaacacgccgctgcaaacccggagttcgcgtggacaagtctggtctgtgggcatttctttgactgggggctgagagagaatttcctgcattttgacttgaagaacaagactgcggacatcatagatgatgggtcttacaaaagctcaacggcgacgctgggacgcgttgctgaagctcttgttaacgtattaaagaaagatgaagatgccacgaagaacaaggtattgttcatgcagagcttttgtgtctcgcagaatgaggttctggatgcgcttgagaaggctacgggtgagaagtggaaagtgaactaccacgagtcggagcagtatcttaaggaacacaaggcgaaagctgatgcgggtgataagcaggcggttgaggatttggtgtttgcattaggagccctggatgggaattgggaggagagagagaacttctcgatggatttgttggggttgaagaatgaggacctggatgaggttgttaagagagttgttgatgtgtataaaacataagagatgggatcgcattatagactagtagaggcatgcatcataaacaaaatagagatagaaagggtattagccta

SEQ ID NO: 2653 - DNA, 1188 bp, Muscodor strobelii
  misc_feature: SGI cDNA ID NO. 560524
  misc_feature: Elevated expression when VOC is produced
  misc_feature: Encodes the peptide sequence at SEQ ID NO 2654
atgtttcttcagtttctcggccttttatgtctcgccacagcgataaaatgtgatacatcaacagccgggaaatatgtgaagttatctgtagttcactccacaaatcagaaggtcttttcgaaggcgaacgtaggtgagcgagcaatatcgactgtgcctctggcaaatcgatctgatatcgcctacttcgcaaagttgaacattggcacaccggctcaggaaatttttgcccagttagacaccgccgacactttgcaagatgttcaatttggggtcgcgttcgagacatcccaagaatttgccggtattctcggtattggatatggaataaacatgactatacgatacaagaatctcatcgaccagctagcggaccaaggagttacgaacacgaaagcgtttagcttagcactcggtagtaaagacgacgaagaaggtgtcataatatttggaggcttagacacttccaagttcactggcactctccagactctaccgatgatcccacccggtgagtcgcctgacggggtacccagatactggattcaaatgaactcggtcagccttcggccacccagtggtcaagtcaaggaatattccaatacatcgctgcccgtatttctagacagtggttcgacactgagtctgctaccgactgcagtagctgaagctatctcggccgattttggaggccaagcaaatgcacaagccggcttctacctcgtagactgctctcttagggacgaaccaggcacagttgactttgccttcgacggcgttacgatccatgtgccatattcggaattcgttcgggagtttgcttcatcttttggctccatgtgtgcgcttggcataacacctagtgacgacttcacgctcctaggcgatacagtacttcgctcagcatacgctgtgtttgaccaaaccaacaatgcaatccatctagctgaatacgtgaattgcggctcgaaagaggttgagattacatcaaaactcgatatgggtacggtgaagggagactgcagtggcctttctttcccaggatcaaattccacgactgcaagtgaccaaacttcagcgaacgagaccaacggcgcctctactctatactctctcaacgcgacaagttttaatgccattttcatgatgttatttgtgatacatgctttatttggaaatgttttatag

SEQ ID NO: 2654 - protein, 395 aa, Muscodor strobelii
  misc_feature: SGI Peptide ID NO. 560524
  misc_feature (61)..(318): Pfam Id: PF00026 Pfam Desc: Eukaryotic aspartyl protease
  misc_feature (99)..(318): Pfam Id: PF00026 Pfam Desc: Eukaryotic aspartyl protease
  misc_feature (84)..(341): NCBI GI: 116191517 Blast Desc: CHGG_05476 [Chaetomium globosum CBS 148.51] gi|88181389|gb|EAQ88857.1| CHGG_05476 [Chaetomium globosum CBS 148.51]
  misc_feature (26)..(371): NCBI GI: 171680938 Blast Desc: protein product [Podospora anserina] gi|170940427|emb|CAP65654.1| protein product [Podospora anserina]
  misc_feature (63)..(341): NCBI GI: 39948622 Blast Desc: MGG_08698 [Magnaporthe grisea 70-15] gi|145009241|gb|EDJ93952.1| MGG_08698 [Magnaporthe grisea 70-15]
  misc_feature (98)..(341): NCBI GI: 261359208 Blast Desc: candidapepsin-8 [Verticillium albo-atrum VaMs.102]
  misc_feature (81)..(341): NCBI GI: 85090078 Blast Desc: NCU09155 [Neurospora crassa OR74A] gi|28919587|gb|EAA29011.1| conserved [Neurospora crassa OR74A]
  misc_feature (90)..(333): NCBI GI: 85096825 Blast Desc: NCU07063 [Neurospora crassa OR74A] gi|28921816|gb|EAA31092.1| [Neurospora crassa OR74A]
  misc_feature (84)..(371): NCBI GI: 171682894 Blast Desc: protein product [Podospora anserina] gi|170941406|emb|CAP67057.1| protein product [Podospora anserina]
  misc_feature (85)..(324): NCBI GI: 261353472 Blast Desc: candidapepsin-1 [Verticillium albo-atrum VaMs.102]
  misc_feature (85)..(395): NCBI GI: 39970765 Blast Desc: MGG_02849 [Magnaporthe grisea 70-15] gi|149210259|ref|XP_001522504.1| MGCH7_ch7g607 [Magnaporthe grisea 70-15] gi|86196562|gb|EAQ71200.1| MGCH7_ch7g607 grisea
  misc_feature (6)..(325): NCBI GI: 171691448 Blast Desc: protein product [Podospora anserina] gi|170945672|emb|CAP71785.1| protein product [Podospora anserina]
  misc_feature (88)..(317): SWISSPROT Homolog: EC 3.4.23.24 Candidapepsin
  misc_feature: Useful for introducing or modulating the production of volatile compounds
MFLQFLGLLCLATAIKCDTSTAGKYVKLSVVHSTNQKVFSKANVGERAISTVPLANRSDIAYFAKLNIGTPAQEIFAQLDTADTLQDVQFGVAFETSQEFAGILGIGYGINMTIRYKNLIDQLADQGVTNTKAFSLALGSKDDEEGVIIFGGLDTSKFTGTLQTLPMIPPGESPDGVPRYWIQMNSVSLRPPSGQVKEYSNTSLPVFLDSGSTLSLLPTAVAEAISADFGGQANAQAGFYLVDCSLRDEPGTVDFAFDGVTIHVPYSEFVREFASSFGSMCALGITPSDDFTLLGDTVLRSAYAVFDQTNNAIHLAEYVNCGSKEVEITSKLDMGTVKGDCSGLSFPGSNSTTASDQTSANETNGASTLYSLNATSFNAIFMMLFVIHALFGNVL

SEQ ID NO: 2655 - DNA, 2413 bp, Muscodor strobelii
  misc_feature: SGI EST ID NO. CUFF.6617.0
  misc_feature: Variant of the nucleotide sequence at SEQ ID NO 2653
ctagaccgaagttttgtgtgaaaaggcttcagtttggatggcagggtttcgtgtggcccaggggtgggtaggtctacaaggcctcaaacagatgcagctgaagctgaagcagggggcatatccattcgctgtacggtgaaacaagtgctgatctgatgccacccaaattgctgcaatgggaatcacggcttctcatcatcaatgatgtgaattatcgaattctaatacagtcataaaacaaacctgcacgtctgaaaggaaaattgatcagtctattaaaaattcaacgagtttggaggcctgtactcagcgaagttttcagatgacagacagactttgctctccgctatgcaatcacccctggccgtttcgtatgggccgtttcatatcgggcatgttcgtgagctaacttcgccaacattgtttgatctacggctcgctggttgcacatcccttggcatggcgaccctacagcgtgcttttggtagccgagagccgtgtctgacgattcgagctctcgggggtggcttgacgagctcttggagctgtttaatcattgcattggcgttttcgttctcctcactgaccttttctctattctcgtcgccggtcgttgtcgacgtcaatgagaagtcacttctatctttcattttgtctttcgctttttcgttgccggtcaactgttgcttgatttcgaggagtattgggacaatatccgtttgtttttcggcgtttcgttatttctattcgcggataaatcgacaattttgcagacgaaatatcgactgcgaatggaagcggccaataattcaagtcgaatcgagatcaagaaaattggcaatattgttcaagacaacacctgagcgacatttgtcctatcaacaccgatcgacgtgcacacaactcagcgaatagtcttggaggcatgtttcttcagtttctcggccttttatgtctcgccacagcgataaaatgtgatacatcaacagccgggaaatatgtgaagttatctgtagttcactccacaaatcagaaggtcttttcgaaggcgaacgtaggtgagcgagcaatatcgactgtgcctctggcaaatcgatctgatatcgcctacttcgcaaagttgaacattggcacaccggctcaggaaatttttgcccagttagacaccggttcgtttgagttatgggtcaacccggattgcaacactcttgaaagctcatccgattttcgtttctgccaagctgtcgggcgttacgatccgtctacttcttccacggctgtagagctttctggcacacaggtgttacaatatggaattgggaatgccagcattcaatatgtcacagacacaattagtctaacagggtccaccgacactttgcaagatgttcaatttggggtcgcgttcgagacatcccaagaatttgccggtattctcggtattggatatggaataaacatgactatacgatacaagaatctcatcgaccagctagcggaccaaggagttacgaacacgaaagcgtttagcttagcactcggtagtaaagacgacgaagaaggtgtcataatatttggaggcttagacacttccaagttcactggcactctccagactctaccgatgatcccacccggtgagtcgcctgacggggtacccagatactggattcaaatgaactcggtcagccttcggccacccagtggtcaagtcaaggaatattccaatacatcgctgcccgtatttctagacagtggttcgacactgagtctgctaccgactgcagtagctgaagctatctcggccgattttggaggccaagcaaatgcacaagccggcttctacctcgtagactgctctcttagggacgaaccaggcacagttgactttgccttcgacggcgttacgatccatgtgccatattcggaattcgttcgggagtttgcttcatcttttggctccatgtgtgcgcttggcataacacctagtgacgacttcacgctcctaggcgatacagtacttcgctcagcatacgctgtgtttgaccaaaccaacaatgcaatccatctagctgaatacgtgaattgcggctcgaaagaggttgagattacatcaaaactcgatatgggtacggtgaagggagactgcagtggcctttctttcccaggatcaaattccacgactgcaagtgaccaaacttcagcgaacgagaccaacggcgcctctactctatactctctcaacgcgacaagttttaatgccattttcatgatgttatttgtgatacatgctttatttggaaatgttttatagacgcattaggatagcttagactggtcagcgcataatagcatattaggagttgcattttgctactttggcatttaaataagactcatatgatcatttccc

SEQ ID NO: 2656 - DNA, 588 bp, Muscodor strobelii
  misc_feature: SGI cDNA ID NO. 560525
  misc_feature: Encodes the peptide sequence at SEQ ID NO 2657
atgggtgattctatccaggtatcgagcagcacagctcctatggcagtagctcccacgacattcacttcagacctctctctcaataaattcaagctcaaccggaccgcgtacatagaagcataccctgacccagtgctcaacggcatatgtgtgggagcatgcgtctttgacaagttcaatagggtgttgcttatacagcgtgccgcccacgattcaatgccaaaccgctgggaagtacctggtggcgcctgcgaccccgaagacgaatcgatcttgcatggtgctgtgcgggagctatgggaagaagctgggctgcgcgcagtctcaatcgacgcactcatcgaccaaggtcgcggattcttcactcgccgcggggctctgatctataaattcactttcgtcgtgaccgttgagtcacacgaggtgaaactcgaccacaacgaacaccaggcgtttgtctgggctactgaggaggatgttagggccaaaaagtgcggcactgtcaacctagtgtatacggatgaggcgcaatttcaggatgtgttggatgcttttgagtggaggaaggcgaaggtggctcagacttga

SEQ ID NO: 2657 - protein, 195 aa, Muscodor strobelii
  misc_feature: SGI Peptide ID NO. 560525
  misc_feature (47)..(181): Pfam Id: PF00293 Pfam Desc: NUDIX domain
  misc_feature (47)..(163): Pfam Id: PF00293 Pfam Desc: NUDIX domain
  misc_feature (14)..(189): NCBI GI: 46111721 Blast Desc: FG02742.1 [Gibberella zeae PH-1]
  misc_feature (21)..(190): NCBI GI: 256726126 Blast Desc: NECHADRAFT_44269 [Nectria haematococca mpVI 77-13-4]
  misc_feature (12)..(195): NCBI GI: 261359231 Blast Desc: conserved [Verticillium albo-atrum VaMs.102]
  misc_feature (20)..(191): NCBI GI: 171680934 Blast Desc: protein product [Podospora anserina] gi|170940425|emb|CAP65652.1| protein product [Podospora anserina]
  misc_feature (47)..(191): NCBI GI: 85090076 Blast Desc: NCU09154 [Neurospora crassa OR74A] gi|28919586|gb|EAA29010.1| conserved [Neurospora crassa OR74A]
  misc_feature (47)..(188): NCBI GI: 39948630 Blast Desc: MGG_08699 [Magnaporthe grisea 70-15] gi|145009242|gb|EDJ93953.1| MGG_08699 [Magnaporthe grisea 70-15]
  misc_feature (50)..(185): NCBI GI: 261353272 Blast Desc: conserved [Verticillium albo-atrum VaMs.102]
  misc_feature (7)..(149): NCBI GI: 116191521 Blast Desc: CHGG_05478 [Chaetomium globosum CBS 148.51] gi|88181391|gb|EAQ88859.1| CHGG_05478 [Chaetomium globosum CBS 148.51]
  misc_feature (8)..(189): NCBI GI: 39974035 Blast Desc: MGG_00836 [Magnaporthe grisea 70-15] gi|145018224|gb|EDK02503.1| MGG_00836 [Magnaporthe grisea 70-15]
  misc_feature (25)..(185): NCBI GI: 85096465 Blast Desc: NCU07101 [Neurospora crassa OR74A] gi|28921747|gb|EAA31026.1| [Neurospora crassa OR74A]
MGDSIQVSSSTAPMAVAPTTFTSDLSLNKFKLNRTAYIEAYPDPVLNGICVGACVFDKFNRVLLIQRAAHDSMPNRWEVPGGACDPEDESILHGAVRELWEEAGLRAVSIDALIDQGRGFFTRRGALIYKFTFVVTVESHEVKLDHNEHQAFVWATEEDVRAKKCGTVNLVYTDEAQFQDVLDAFEWRKAKVAQT

SEQ ID NO: 2658 - DNA, 1211 bp, Muscodor strobelii
  misc_feature: SGI EST ID NO. CUFF.6625.0
  misc_feature: Variant of the nucleotide sequence at SEQ ID NO 2656
ctcatgctttcttcgtagaatcaatgcaatgctgctcattaacagacaatcgaaatgaattgtttgggcataatgctccactgatctggtaaacctaagtcctactacccgcactaggtagtgactcagatctgagcgacaaggcatctatctacctgaaagcaagtaggcacctgtgttagacaatatcaatcatttgctttgtgagcctcatggccattgccaaccaaaactccattcttacatagcctttgactcaccctgcaatccagctggtaggaataggttgcgcacttaaagaacggagagccctcgttacaaacgccacttgccgctgaggcaataagaaatcatcaactcatcagatttgcgaatcagacaccagatcacgaacatgggtgattctatccaggtatcgagcagcacagctcctatggcagtagctcccacgacattcacttcagacctctctctcaataaattcaagctcaaccggaccgcgtacatagaagcataccctgacccagtgctcaacggcatatgtgtgggagcatgcgtctttgacaagttcaatagggtgttgcttatacagcgtgccgcccacgattcaatgccaaaccgctgggaagtacctggtggcgcctgcgaccccgaagacgaatcgatcttgcatggtgctgtgcgggagctatgggaagaagctgggctgcgcgcagtctcaatcgacgcactcatcgaccaaggtcgcggattcttcactcgccgcggggctctgatctataaattcactttcgtcgtgaccgttgagtcacacgaggtgaaactcgaccacaacgaacaccaggcgtttgtctgggctactgaggaggatgttagggccaaaaagtgcggcactgtcaacctagtgtatacggatgaggcgcaatttcaggatgtgttggatgcttttgagtggaggaaggcgaaggtggctcagacttgaactgtgatgaggaaggatctattcagagggcatgtgaaagaagcgactgaatggcatcgggaagctgcgcagcatgagacgggatgttgtgtgacgataggggttgaaaatggaagagattccatataatagaacacagacagatagacgagatagatggcgacaggctagacatgctacgctaggctggagagaaaccaatactaatgagacgctgcattgactgtat

SEQ ID NO: 2659 - DNA, 582 bp, Muscodor strobelii
  misc_feature: SGI cDNA ID NO. 560526
  misc_feature: Encodes the peptide sequence at SEQ ID NO 2660
atgtacttctcacgatctgtcgtcgcggtcgctcgtcgcgccgctgtcgcacccatctcccccgtcgtccgccgcagcttcgccgcttccgtcatccgacgtgacgccaagaatgtcgagccccagcagaccgttggccagaagatgaagaccttcgaagagatccagaccgaagccgacctctttggccccggtgccgccgccggttccgtccctaccgatctcgaccagtccaccggtctcgagcgtctcgagatcctcggaaagatgcagggcgttgacattttcgacatgcgacccctcgactcctcgcgaaagggaaccatcgacaaccccatcatggtcaagtccgctggtgacgagcagtacgccggttgcactggctctcccgccgactctcacgttgtcaactggctcggtatgtcccgtgagcgaccgatggagcgatgccccgagtgcggcagcgtctataagatggagtatgtcggaccccaggacgatggccacggccaccacgaccaccaccatggtcccgaggagcccaagaccttcgccgactacgtcaagcctcaatactggtag

SEQ ID NO: 2660 - protein, 193 aa, Muscodor strobelii
  misc_feature: SGI Peptide ID NO. 560526
  misc_feature (59)..(165): Pfam Id: PF01215 Pfam Desc: Cytochrome c oxidase subunit Vb
  misc_feature (66)..(165): Pfam Id: PF01215 Pfam Desc: Cytochrome c oxidase subunit Vb
  misc_feature (1)..(193): NCBI GI: 121710590 Blast Desc: cytochrome c subunit Vb, [Aspergillus clavatus NRRL 1] gi|119401061|gb|EAW11485.1| cytochrome c subunit Vb, [Aspergillus clavatus NRRL 1]
  misc_feature (1)..(193): NCBI GI: 171681110 Blast Desc: protein product [Podospora anserina] gi|170940513|emb|CAP65741.1| protein product [Podospora anserina]
  misc_feature (19)..(192): NCBI GI: 154310538 Blast Desc: subunit IV of cytochrome c oxidase [Botryotinia fuckeliana B05.10] gi|150851283|gb|EDN26476.1| subunit IV of cytochrome c oxidase [Botryotinia fuckeliana B05.10]
  misc_feature (21)..(193): NCBI GI: 116191289 Blast Desc: CHGG_05362 [Chaetomium globosum CBS 148.51] gi|88181275|gb|EAQ88743.1| CHGG_05362 [Chaetomium globosum CBS 148.51]
  misc_feature (1)..(192): NCBI GI: 261359264 Blast Desc: cytochrome c oxidase polypeptide IV [Verticillium albo-atrum VaMs.102]
  misc_feature (1)..(193): NCBI GI: 258576175 Blast Desc: cytochrome c oxidase polypeptide IV [Uncinocarpus reesii 1704] gi|237902535|gb|EEP76936.1| cytochrome c oxidase polypeptide IV [Uncinocarpus reesii 1704]
  misc_feature (1)..(193): NCBI GI: 261196756 Blast Desc: cytochrome c subunit Vb [Ajellomyces dermatitidis SLH14081] gi|239596026|gb|EEQ78607.1| cytochrome c subunit Vb [Ajellomyces dermatitidis SLH14081]
  misc_feature (1)..(193): NCBI GI: 239609607 Blast Desc: cytochrome c subunit Vb [Ajellomyces dermatitidis ER-3]
  misc_feature (21)..(192): NCBI GI: 156058382 Blast Desc: cytochrome c oxidase polypeptide IV, mitochondrial precursor [Sclerotinia sclerotiorum 1980] gi|154700990|gb|EDO00729.1| cytochrome c oxidase polypeptide IV,
  misc_feature (1)..(193): NCBI GI: 67536710 Blast Desc: AN4525.2 [Aspergillus nidulans FGSC A4] gi|40741678|gb|EAA60868.1| AN4525.2 [Aspergillus nidulans FGSC A4] gi|259482647|tpe|CBF77328.1| TPA: cytochrome c subunit Vb,
MYFSRSVVAVARRAAVAPISPVVRRSFAASVIRRDAKNVEPQQTVGQKMKTFEEIQTEADLFGPGAAAGSVPTDLDQSTGLERLEILGKMQGVDIFDMRPLDSSRKGTIDNPIMVKSAGDEQYAGCTGSPADSHVVNWLGMSRERPMERCPECGSVYKMEYVGPQDDGHGHHDHHHGPEEPKTFADYVKPQYW

SEQ ID NO: 2661 - DNA, 1031 bp, Muscodor strobelii
  misc_feature: SGI EST ID NO. CUFF.6683.0
  misc_feature: Variant of the nucleotide sequence at SEQ ID NO 2659
gttgggatttgggagtgcgtagcgggttcgagcttctcgaattgtcaaatcagaccactggaaatctctcaggctctatcgaacgactcgcctcgctgacctcaatccaagcttgcctgagctgagccaaattcacaacctcaccacgatctcacccgcctctccactccaccgcccaccatgtacttctcacgatctgtcgtcgcggtcgctcgtcgcgccgctgtcgcacccatctcccccgtcgtccgccgcagcttcgccgcttccgtcatccgacgtgacgccaagaatgtcgagccccagcagaccgttggccagaagatgaagaccttcgaagagatccagaccgaagccgacctctttggccccggtgccgccgccggttccgtccctaccgatctcgaccagtccaccggtctcgagcgtctcgagatcctcggaaagatgcagggcgttgacattttcgacatgcgacccctcgactcctcgcgaaagggaaccatcgacaaccccatcatggtcaagtccgctggtgacgagcagtacgccggttgcactggctctcccgccgactctcacgttgtcaactggctcggtatgtcccgtgagcgaccgatggagcgatgccccgagtgcggcagcgtctataagatggagtatgtcggaccccaggacgatggccacggccaccacgaccaccaccatggtcccgaggagcccaagaccttcgccgactacgtcaagcctcaatactggtagagacacgaattatcaaccagcgggattttattatgggcggaaacgagagaagagcggagactcaaacctgtagaattgtacattgcgaatgggcagggtgtcatagatctgcattttgtttatccccgtggcattattataccatgtcttagacgtgtgacttaagttccctttgttcatacgacctgtgcttgcgtatcgcgtgtagagacgtgaacccatgaaactcattcaataaagcagacataaatttactcggatgatctcac

SEQ ID NO: 2662 - DNA, 675 bp, Muscodor strobelii
  misc_feature: SGI cDNA ID NO. 560527
  misc_feature: Encodes the peptide sequence at SEQ ID NO 2663
atgactgacctcaagcctctcgtccttcacggccactacggcggcccgaacccagtgaaaatttggatactcctcgaagaactcaatctgccatacgaacaccgacaagtagacataaccacaatcacccaacacccctacctctccctaaaccccaacggcagactgcccaccctcgaagatccgaacacaggggtgacaatttgggagagcgcggcgatcatcgagtatctgatcgaaacgtacgataaagaagcacgactaacgttcaaggaagggaaggagaaatgggagttgaaacaatacctaagtttacagatgagtggccagggcccgtactacgggcagtgggtttggttcagggttaatgagcctgatgagacgcttgcgctgcgacggtacgaagaacagcttttgagagtctggggcgtgcttgataggattttggaggggagggattggttggttggtgggaagtgtacctatgcggatctcgcgtttgtagcgtgggaggacgttatgagggagaaatatcctgtgtttggcctgaataagaaggctaaggattatccaaattatgatgcttggtatcagaggcttgttaagagacctgctgtgaagagggttctgaaggagaatagggagaaaatggtcgtcccggctgtgagggagtag

SEQ ID NO: 2663 - protein, 224 aa, Muscodor strobelii
  misc_feature: SGI Peptide ID NO. 560527
  misc_feature (112)..(204): Pfam Id: PF00043 Pfam Desc: Glutathione S-transferase, C-terminal domain
  misc_feature (5)..(80): Pfam Id: PF02798 Pfam Desc: Glutathione S-transferase, N-terminal domain
  misc_feature (114)..(204): Pfam Id: PF00043 Pfam Desc: Glutathione S-transferase, C-terminal domain
  misc_feature (1)..(211): NCBI GI: 261355862 Blast Desc: glutathione S-transferase II [Verticillium albo-atrum VaMs.102]
  misc_feature (4)..(218): NCBI GI: 255941120 Blast Desc: Pc16g10190 [Penicillium chrysogenum Wisconsin 54-1255] gi|211585952|emb|CAP93689.1| Pc16g10190 [Penicillium chrysogenum Wisconsin 54-1255]
  misc_feature (4)..(219): NCBI GI: 256721835 Blast Desc: NECHADRAFT_54515 [Nectria haematococca mpVI 77-13-4]
  misc_feature (1)..(210): NCBI GI: 256726875 Blast Desc: NECHADRAFT_90907 [Nectria haematococca mpVI 77-13-4]
  misc_feature (3)..(218): NCBI GI: 115399946 Blast Desc: ATEG_06384 [Aspergillus terreus NIH2624] gi|114191228|gb|EAU32928.1| ATEG_06384 [Aspergillus terreus NIH2624]
  misc_feature (4)..(219): NCBI GI: 145236749 Blast Desc: An06g02010 [Aspergillus niger] gi|134075483|emb|CAK48044.1| protein product [Aspergillus niger]
  misc_feature (5)..(212): NCBI GI: 156063600 Blast Desc: SS1G_01918 [Sclerotinia sclerotiorum 1980] gi|154697252|gb|EDN96990.1| SS1G_01918 [Sclerotinia sclerotiorum 1980]
  misc_feature (6)..(224): NCBI GI: 119467490 Blast Desc: glutathione-s-transferase theta, gst [Neosartorya fischeri NRRL 181] gi|119405703|gb|EAW15654.1| glutathione-s-transferase theta, gst [Neosartorya fischeri NRRL
  misc_feature (3)..(210): NCBI GI: 121711541 Blast Desc: glutathione S-transferase, [Aspergillus clavatus NRRL 1] gi|119401537|gb|EAW11960.1| glutathione S-transferase, [Aspergillus clavatus NRRL 1]
  misc_feature (1)..(209): NCBI GI: 256729986 Blast Desc: NECHADRAFT_82526 [Nectria haematococca mpVI 77-13-4]
  misc_feature (4)..(217): SWISSPROT Homolog: EC 2.5.1.18 Glutathione transferase
MTDLKPLVLHGHYGGPNPVKIWILLEELNLPYEHRQVDITTITQHPYLSLNPNGRLPTLEDPNTGVTIWESAAIIEYLIETYDKEARLTFKEGKEKWELKQYLSLQMSGQGPYYGQWVWFRVNEPDETLALRRYEEQLLRVWGVLDRILEGRDWLVGGKCTYADLAFVAWEDVMREKYPVFGLNKKAKDYPNYDAWYQRLVKRPAVKRVLKENREKMVVPAVRE

SEQ ID NO: 2664 - DNA, 1478 bp, Muscodor strobelii
  misc_feature: SGI EST ID NO. CUFF.6628.0
  misc_feature: Variant of the nucleotide sequence at SEQ ID NO 2662
tcttagtactgtgcatgaatgcactgcatgcagcttcaatatttcctctttgggtaaacggtggtctacgattggactggctccgtacagaccctctatcatgactgcaacatcacttgtttacactacgaagtggtcatctcaagacgtggatgcgcctttctacatcaaaaactctttgcactaaatgcctaatctcagtcgagagcctaaagccgagtggattggtaatggccaccgagagtcaaacaccgcaagagcttaggaatcatggtagggagccgttgacggactgcacgaagagggaaagccgaatgagaatccccttcgcatccatgaaatggcgattttataaataaggcatcatgtcgcattcggcccatcgatcacgaacaccaacagttctctactgaaatcctaaagcccacgactcaatcagctatcatcgaaatacacgtttttcaacatgactgacctcaagcctctcgtccttcacggccactacggcggcccgaacccagtgaaaatttggatactcctcgaagaactcaatctgccatacgaacaccgacaagtagacataaccacaatcacccaacacccctacctctccctaaaccccaacggcagactgcccaccctcgaagatccgaacacaggggtgacaatttgggagagcgcggcgatcatcgagtatctgatcgaaacgtacgataaagaagcacgactaacgttcaaggaagggaaggagaaatgggagttgaaacaatacctaagtttacagatgagtggccagggcccgtactacgggcagtgggtttggttcagggttaatgagcctgatgagacgcttgcgctgcgacggtacgaagaacagcttttgagagtctggggcgtgcttgataggattttggaggggagggattggttggttggtgggaagtgtacctatgcggatctcgcgtttgtagcgtgggaggacgttatgagggagaaatatcctgtgtttggcctgaataagaaggctaaggattatccaaattatgatgcttggtatcagaggcttgttaagagacctgctgtgaagagggttctgaaggagaatagggagaaaatggtcgtcccggctgtgagggagtagggattgcagacttggaggggaaaggaggaatgctttcgaagatggttagaggggattgtgttagagatagggaataagtttgttgttcggtcacagattgtcgtgcgttgttcagatgttgtgccctcttggatgcaggtttgcagtcgcaaatgtgtcacataaggtacctatcagggtatatatatggggttggtgcactggcaaaacactctctttctacatcatatacacctcagcaacttcaccttcaatgtagtgagctagttcggtgtgcagcatgactggtcccagtcgcattctttgcgaatcagtcattaggacaatatccaatgag

SEQ ID NO: 2665 - DNA, 2076 bp, Muscodor strobelii
  misc_feature: SGI cDNA ID NO. 560528
  misc_feature: Encodes the peptide sequence at SEQ ID NO 2666
atgtcctctgcagcccagcccgagggccatggagactggccggcgttggaggcggattactggcagaccactagacgcgctcgggaccgagaagatgcaaagctggcacacgagtattctacgcgtcaagaacatgtacagcaacaagtggttgagttgtccagtaagaggcaggggcttgagagagagatcagagaactcgatgcccatctcgcgttccaagagagagagggacaacgtcttcagcaagaatttaacttccgaaaatccactctagcagcccaacgacaggaagaagatcgctcgcagcaaagatggttcgagcgcgctcgcgagggtagctaccccggcaaggagaatgcaatgcctaaagacaacgaggaaagattgcgtggcgagctaccgcctcctgacgccgccggtggatggacaagcatcaacggttcactccgccgcagcgctcgacgtgaagcccgagaacagaaaccgccgagcaacccaggcagcctgtttggcaatgtgttccacaatcctgtggaagaagatgagtcaccggcttcaagcaacgtggtcgaacgaaatgagccagcccggccgcaacccatcaacgccggccgtgccgatgttggatatgccaatatcagagctgatgatgggagcgttgtcgaccatgcacgtaacagacctctgaagcctagagaacgccgtagtcttcccgatttccccacgccaagccgatctcccgctgatcttcctgaggagtcttcagtttccaggaagaggtcaccgcgaagccgcaaagccttgccccaggccagagactctgcaacaccggcgcagagcccggttccaagtacaaatgatgcggacctcacagagattacccgagatcgactagttcttgtggataatggttctgtcatcactgagccggcaatgtttgcaggagtaccactcaagaggattgacgaaagccatccgttctggaaccccgagtgggaatctctggagagcctgatccaacctgcgctcgataaatggaagaataagctggatggtctccgaagcaatcccgaagccgtgcgccatactactttcctcgccaaccgacaggtcaaccgaggacaagccataatggagttcatgaaggacgggtgctttcatcctttccaattcgctaaccgagacatgatagacaaggctttcaagacgtacacaaactacgacacgattttccggctcgtcagtgttcacgaagaactgaagaagtttgatttggatgtcacacctctggagtggcttcgacatcgtttctacgagattgcaacggaggagggggacaagttcagtttgtccaggacaatgcacgacctttaccatgacataaagctgaagtttctacgcgagaagcatgggtttggcaacattgggcgtccatccggttacaagcttgccgacaaggattccgcaaaaggcgggaaatccaaatccaagaaagagtcctccacgacacgtcgccgaagtcgaagatccatcagccaagccgaccctgaggcgccgggcacacctttaaaggtggaggagaccgcaactgccccagcagagtatctcgagtctgtcgctctccgcccgtccaagcgccagcgtatggatgcacaaccgggtcaggatgacctggactttgatggctacaccagcaccgactctttctcaaagggtcgggttacgtatatcgacttccgcgtccatcagattaagaccaaggctttgaccactgacccgaaggttacacaatattggacttggaaacctgaggagaacaagttcgagcatcaagtcctccgtgacgtgcggccgcaggtatcatggggaacttacgaaaagcccgcagacttcaattgcgccctacacgagatcaaagaggttcattacgtatcgggagatcgaaatatcgctattgtgacgaatggattccggggtgacatcctcatccagttcaagagagaccgcactactaagcgatttctttcattcgtccagaagaaaggagtcaaacttgtattgagcacttcgtaa

SEQ ID NO: 2666 - protein, 691 aa, Muscodor strobelii
  misc_feature: SGI Peptide ID NO. 560528
  misc_feature (258)..(691): NCBI GI: 85109412 Blast Desc: NCU05718 [Neurospora crassa OR74A] gi|28924547|gb|EAA33668.1| [Neurospora crassa OR74A]
  misc_feature (208)..(691): NCBI GI: 256726115 Blast Desc: NECHADRAFT_43333 [Nectria haematococca mpVI 77-13-4]
  misc_feature (259)..(687): NCBI GI: 46111693 Blast Desc: FG02728.1 [Gibberella zeae PH-1]
  misc_feature (10)..(691): NCBI GI: 39942082 Blast Desc: MGG_03121 [Magnaporthe grisea 70-15] gi|145015905|gb|EDK00395.1| MGG_03121 [Magnaporthe grisea 70-15]
  misc_feature (277)..(691): NCBI GI: 261359280 Blast Desc: conserved [Verticillium albo-atrum VaMs.102]
  misc_feature (260)..(527): NCBI GI: 116191195 Blast Desc: CHGG_05315 [Chaetomium globosum CBS 148.51] gi|88181228|gb|EAQ88696.1| CHGG_05315 [Chaetomium globosum CBS 148.51]
  misc_feature (252)..(528): NCBI GI: 171681158 Blast Desc: protein product [Podospora anserina] gi|170940537|emb|CAP65765.1| protein product [Podospora anserina]
  misc_feature (559)..(686): NCBI GI: 116191195 Blast Desc: CHGG_05315 [Chaetomium globosum CBS 148.51] gi|88181228|gb|EAQ88696.1| CHGG_05315 [Chaetomium globosum CBS 148.51]
  misc_feature (558)..(689): NCBI GI: 171681158 Blast Desc: protein product [Podospora anserina] gi|170940537|emb|CAP65765.1| protein product [Podospora anserina]
MSSAAQPEGHGDWPALEADYWQTTRRARDREDAKLAHEYSTRQEHVQQQVVELSSKRQGLEREIRELDAHLAFQEREGQRLQQEFNFRKSTLAAQRQEEDRSQQRWFERAREGSYPGKENAMPKDNEERLRGELPPPDAAGGWTSINGSLRRSARREAREQKPPSNPGSLFGNVFHNPVEEDESPASSNVVERNEPARPQPINAGRADVGYANIRADDGSVVDHARNRPLKPRERRSLPDFPTPSRSPADLPEESSVSRKRSPRSRKALPQARDSATPAQSPVPSTNDADLTEITRDRLVLVDNGSVITEPAMFAGVPLKRIDESHPFWNPEWESLESLIQPALDKWKNKLDGLRSNPEAVRHTTFLANRQVNRGQAIMEFMKDGCFHPFQFANRDMIDKAFKTYTNYDTIFRLVSVHEELKKFDLDVTPLEWLRHRFYEIATEEGDKFSLSRTMHDLYHDIKLKFLREKHGFGNIGRPSGYKLADKDSAKGGKSKSKKESSTTRRRSRRSISQADPEAPGTPLKVEETATAPAEYLESVALRPSKRQRMDAQPGQDDLDFDGYTSTDSFSKGRVTYIDFRVHQIKTKALTTDPKVTQYWTWKPEENKFEHQVLRDVRPQVSWGTYEKPADFNCALHEIKEVHYVSGDRNIAIVTNGFRGDILIQFKRDRTTKRFLSFVQKKGVKLVLSTS

SEQ ID NO: 2667 - DNA, 4401 bp, Muscodor strobelii
  misc_feature: SGI EST ID NO. CUFF.6680.0
  misc_feature: Variant of the nucleotide sequence at SEQ ID NO 2665
ctcgccttacctcacctttaagtccgatccagttagcctcgcatatacgtacatgcctggaagtgtatactcgttgagacgaaaactttcaagattcacttgccgggatgctactattttcgtgacgactgtttgacagtttattgttacgccctgcacgaaaccctttacctaccaacaaccacttctattccttggctttcttgtttcaccactatcctctgttcccaaaaccaaagcaaccaacatctgcagacgtgccatccggtacgggcgaaggcgaaggcactcttccagttcaggcatccaatacctaattcattcctgccacgagtcacctccgtccgtggttccgacataaggcgtatccttaacattgttcaccaatttaggatgtgtccctgcagttaacttcaacttgcctgacatattcatctgccccatccatccttattatcacttcttctaatattacacttttgaaggcctttgtcttccattgtgtcaacacccgcctctcaagctcttgacgcgttcttccctccacacacctaccgcactggttcctcccgccaggtgaacacaaatcttctctgcatacctctcggcaacccccgcaatagcttcttttcagaactagccgtgacgtttattacatcttccatttccggactattactttggagactggtcctattccgtcccaccacctttggcgacctggcctgatatccctccgccgttctccacactaccaacatttcgtccttcatcgccatttccttttctaacgaaactctcagagcgttaataacactgtcgattttcgcatcctaagaacaccatatgtgcgcgtcgttcgtttgatgggtcttcagccagcattcatacgtatcggtcaagctcagttccactccttcgaccctgaccagggacgtactgttgtacataccgcatccagatccacatctggccgccgagttcatcacgctgcaaacccatcagtttggaacctaccgcatcattgccgccaataacacagcatctgttgacttgtagatacgatattgtgtatgatcagcggtggtcttgccagctaattctcgtttgtttttgaaatttggccatacaagttgtcccgaccactaagtcacacgtcaaatttacgttctggcacaggcacaacgtacatgaatacttgatattctgagtctgcgccatgtcctctgcagcccagcccgagggccatggagactggccggcgttggaggcggattactggcagaccactagacgcgctcgggaccgagaagatgcaaagctggcacacgagtattctacgcgtcaagaacatgtacagcaacaagtggttgagttgtccagtaagaggcaggggcttgagagagagatcagagaactcgatgcccatctcgcgttccaagagagagagggacaacgtcttcagcaagaatttaacttccgaaaatccactctagcagcccaacgacaggaagaagatcgctcgcagcaaagatggttcgagcgcgctcgcgagggtagctaccccggcaaggagaatgcaatgcctaaagacaacgaggaaagattgcgtggcgagctaccgcctcctgacgccgccggtggatggacaagcatcaacggttcactccgccgcagcgctcgacgtgaagcccgagaacagaaaccgccgagcaacccaggcagcctgtttggcaatgtgttccacaatcctgtggaagaagatgagtcaccggcttcaagcaacgtggtcgaacgaaatgagccagcccggccgcaacccatcaacgccggccgtgccgatgttggatatgccaatatcagagctgatgatgggagcgttgtcgaccatgcacgtaacagacctctgaagcctagagaacgccgtagtcttcccgatttccccacgccaagccgatctcccgctgatcttcctgaggagtcttcagtttccaggaagaggtcaccgcgaagccgcaaagccttgccccaggccagagactctgcaacaccggcgcagagcccggttccaagtacaaatgatgcggacctcacagagattacccgagatcgactagttcttgtggataatggttctgtcatcactgagccggcaatgtttgcaggagtaccactcaagaggattgacgaaagccatccgttctggaaccccgagtgggaatctctggagagcctgatccaacctgcgctcgataaatggaagaataagctggatggtctccgaagcaatcccgaagccgtgcgccatactactttcctcgccaaccgacaggtcaaccgaggacaagccataatggagttcatgaaggacgggtgctttcatcctttccaattcgctaaccgagacatgatagacaaggctttcaagacgtacacaaactacgacacgattttccggctcgtcagtgttcacgaagaactgaagaagtttgatttggatgtcacacctctggagtggcttcgacatcgtttctacgagattgcaacggaggagggggacaagttcagtttgtccaggacaatgcacgacctttaccatgacataaagctgaagtttctacgcgagaagcatgggtttggcaacattgggcgtccatccggttacaagcttgccgacaaggattccgcaaaaggcgggaaatccaaatccaagaaagagtcctccacgacacgtcgccgaagtcgaagatccatcagccaagccgaccctgaggcgccgggcacacctttaaaggtggaggagaccgcaactgccccagcagagtatctcgagtctgtcgctctccgcccgtccaagcgccagcgtatggatgcacaaccgggtcaggatgacctggactttgatggctacaccagcaccgactctttctcaaagggtcgggttacgtatatcgacttccgcgtccatcagattaagaccaaggctttgaccactgacccgaaggttacacaatattggacttggaaacctgaggagaacaagttcgagcatcaagtcctccgtgacgtgcggccgcaggtatcatggggaacttacgaaaagcccgcagacttcaattgcgccctacacgagatcaaagaggttcattacgtatcgggagatcgaaatatcgctattgtgacgaatggattccggggtgacatcctcatccagttcaagagagaccgcactactaagcgatttctttcattcgtccagaagaaaggagtcaaacttgtattgagcacttctaatcacctcgaggaacagtggcagctgatgagatctgaggtcatctcggacacaatctcaaaattctgaaggaataacccttttggtgttcttcactactaatatgcctgtcatgctccctgaaggagttcgacaaacctcttcgacactacccatctcgctagctttgcgacgtgcagagctacttgtacaaaaagaaaactttcctacttagacaactagtggcccacgccactttacgaccctcctccgagaaatgaatccgactacctaatatacgacttctccgggaagaaagaggacgggcaatcactagacccaagacgctagatcttcagacctcccggggcgaagcttcacgccagccgttcagcctgccatatgtcgccgtaacgactttcctctctcgcacctaattatacatcttcttcttgcatttcactttacggcacctcgacggagttggcggggttcgaaaacttcgtaaagatatccatttcctttcgttttcaagttacagaggctcgcacacaagcccggaaaagccaagaagaggcggcatcagcatgatatgggcgttctgagcattggatttcaagaagaacgtgcagcacacttagcatgcgctgctggatctgtccacacgacgctttcgcatttgattttttttcccagtcggttgtccctgattctcggattattgcataggcgttgttgcgcgaaagccgggcatttgatacaacactccggtgggctggaaacctatagaagagattacagcatcctacaggtattcaactaaactcaacggcgggctcacaatgtgttggctatacacggatgctagattgtcacggctgtaaaggcgtcggtgtatttgctctctgttaaaagttgcagattctgtacaaataacaaaaatgtactaatagttgcacaaaaagaagccggcaaaaggcgaaaggcattgaggggtctctgctgtgctccagacccctacaaacagagtatgtcgcgattgtttttaaccggtatctcttgcatcgtcttgtaacttttgtcttgtgagaaatgatgattggtgtgccaaggactacatgactctaggg

SEQ ID NO: 2668 - DNA, 624 bp, Muscodor strobelii
  misc_feature: SGI cDNA ID NO. 560529
  misc_feature: Elevated expression when VOC is produced
  misc_feature: Encodes the peptide sequence at SEQ ID NO 2669
atgtcaggctcctctccccgacgcggtcacagggcgactggttctctcgcttcccaacgttccacctcttccacgggttcttattactctgagatcttagatataatcgagttttttgctgggaaagaaggatcgagtgctccgtccagggcgtcctggcaaggacttcgagaggaagcggacctcgttttcacttatcaagataagaaaatcagcgatgagaaacaagtggccgtcgacgcgacacagtcgcaacatgttgaacaagaatcacatttggaactggcgctgccaccagcgaagccaacacttgaagagtggctagaatgggttaaaaatcatccgtcccagattgaacaataccttgctatcggccttggagaaaaaaccgtaaacgctgttgagacaacaatgcgtgaggccaccctcagacagtaccaggaggtcactggaccggcatatgaccatatcttcaatattttcaagatgcctagagatccgaatgagtacaccaatggatctgaggaatatcagaaacttttcattgaacctctcaaggaacttttaaaggctcaaaacgctcaagcggccgagagagagcaggcgcgcaatatgaaaggatga

SEQ ID NO: 2669 - protein, 207 aa, Muscodor strobelii
  misc_feature: SGI Peptide ID NO. 560529
  misc_feature: Useful for introducing or modulating the production of volatile compounds
MSGSSPRRGHRATGSLASQRSTSSTGSYYSEILDIIEFFAGKEGSSAPSRASWQGLREEADLVFTYQDKKISDEKQVAVDATQSQHVEQESHLELALPPAKPTLEEWLEWVKNHPSQIEQYLAIGLGEKTVNAVETTMREATLRQYQEVTGPAYDHIFNIFKMPRDPNEYTNGSEEYQKLFIEPLKELLKAQNAQAAEREQARNMKG

SEQ ID NO: 2670 - DNA, 1210 bp, Muscodor strobelii
  misc_feature: SGI EST ID NO. CUFF.6662.0
  misc_feature: Variant of the nucleotide sequence at SEQ ID NO 2668
cgcatctctctgccgactacacactctagctttagaacaacaccaataacttgcttgatatagattaaagcgctcgcacacttaatagaatatttccatctaaggaaacctcggcaaagtcaacttttgtcacgatgtcaggctcctctccccgacgcggtcacagggcgactggttctctcgcttcccaacgttccacctcttccacgggttcttattactctgagatcttagatataatcgagttttttgctgggaaagaaggatcgagtgctccgtccagggcgtcctggcaaggacttcgagaggaagcggacctcgttttcacttatcaagataagaaaatcagcgatgagaaacaagtggccgtcgacgcgacacagtcgcaacatgttgaacaagaatcacatttggaactggcgctgccaccagcgaagccaacacttgaagagtggctagaatgggttaaaaatcatccgtcccagattgaacaataccttgctatcggccttggagaaaaaaccgtaaacgctgttgagacaacaatgcgtgaggccaccctcagacagtaccaggaggtcactggaccggcatatgaccatatcttcaatattttcaagatgcctagagatccgaatgagtacaccaatggatctgaggaatatcagaaacttttcattgaacctctcaaggaacttttaaaggctcaaaacgctcaagcggccgagagagagcaggcgcgcaatatgaaaggatgatggcaaatagccatacaactcaaacgcaagtgacgaatctagtgtctcctcatttctgtcctttttattccctcttgcgctctgcacaaatttctcacattcattacgagaatggatttggcttcatacacttgtctgacgacagcatctgtaaccattcgctcgccttgacttacattcttcttaacctttccattgagttttctttttcccttgagttctggatcgaggactgaaagacggaagaaaggcgcaggtcattaaatcgattttttgcctttatttcacggtcacaatcttttagctatagtaattgtcataacgctacacgctcatttagaatagctttctacactttgaacaaggatttcaatttgatcagtatggcatcttaaactttgtgatgctgatctcgttttatttgcttaaactcatttccaattaaggttttg

SEQ ID NO: 2671 - DNA, 1170 bp, Muscodor strobelii
  misc_feature: SGI cDNA ID NO. 560530
  misc_feature: Encodes the peptide sequence at SEQ ID NO 2672
atgatgcctccgatatcaccaccccagaaagctatcctcgcaatgtctcgggcgcagtatctgcgaactcaggctagcttcgatgaagatatttatggaaatggtcctgtggacaaggtctcagtcggagtctgtatattcagactggatggcacgacactcaggcccgccgtgctcttgcttaggcgctcgccccgctggtggcaccatgatatgtccccttcggaacgacaaaaaggaggggagtgggagttaccgggagggaaagtcaagaatagtgatttttgcgttgcagctgcgatcgagcgtctagtgagagaacagactgggttgaaagtactcaaggtcttgggagggttgaacgagatgcggtggagtacggagacaaaagtgctactctgggacgatgatgaagatttcgaggacgaggaagacgaagatagtaatagggagttggtcaaggttagcgtagggatggaaattcctgttcaacgaccacagccaagaagggcatatgccattagtgatggtagcgatgacgctctggcatatttcaccgaccgcacgatagatattttcggtatccggattgcgtcttcatcttcgggctctacaccgccttcaccctcaccagtcacccctgtatcattcgatatgccaccaccgttgccgccaaaggaccgtggatatgagcatgacgcgtcacttgagcccgcaccactgtcactacggacgcgagatagacctgaaaagatcagaccaaatatgacgattgacacgcagcaatggaaaccagagtacccaaatgttcgggctgtacccgcagctgctacacctcggtatcctcaactgccggaaactcccaacaagcgccaagcccacatcataccacacaagatacttcggaagaaacacgtacagctcaacttctccgtgctcgtcgacgaatcacctgaggccgagccaataccagcgtttctaaataaaggtggtaatagcggtagtcagaccgagtatgaacatgatgctttggactgggcgactttcagtcgagtcgagggtatgcctatgaatgctgacctcaagcaagtcgttcatcaggggttggcttgggctggggagttcattgcgggaaatgctttggaggaggaggggaggaattttctttag

SEQ ID NO: 2672 - protein, 389 aa, Muscodor strobelii
  misc_feature: SGI Peptide ID NO. 560530
  misc_feature (38)..(174): Pfam Id: PF00293 Pfam Desc: NUDIX domain
  misc_feature (38)..(117): Pfam Id: PF00293 Pfam Desc: NUDIX domain
  misc_feature (36)..(130): NCBI GI: 255937101 Blast Desc: Pc13g11600 [Penicillium chrysogenum Wisconsin 54-1255] gi|211584197|emb|CAP92229.1| Pc13g11600 [Penicillium chrysogenum Wisconsin 54-1255]
MMPPISPPQKAILAMSRAQYLRTQASFDEDIYGNGPVDKVSVGVCIFRLDGTTLRPAVLLLRRSPRWWHHDMSPSERQKGGEWELPGGKVKNSDFCVAAAIERLVREQTGLKVLKVLGGLNEMRWSTETKVLLWDDDEDFEDEEDEDSNRELVKVSVGMEIPVQRPQPRRAYAISDGSDDALAYFTDRTIDIFGIRIASSSSGSTPPSPSPVTPVSFDMPPPLPPKDRGYEHDASLEPAPLSLRTRDRPEKIRPNMTIDTQQWKPEYPNVRAVPAAATPRYPQLPETPNKRQAHIIPHKILRKKHVQLNFSVLVDESPEAEPIPAFLNKGGNSGSQTEYEHDALDWATFSRVEGMPMNADLKQVVHQGLAWAGEFIAGNALEEEGRNFL

SEQ ID NO: 2673 - DNA, 224 bp, Muscodor strobelii
  misc_feature: SGI EST ID NO. CUFF.6674.0
  misc_feature: Variant of the nucleotide sequence at SEQ ID NO 2671
accatgatatgtccccttcggaacgacaaaaaggaggggagtgggagttaccgggagggaaagtcaagaatagtgatttttgcgttgcagctgcgatcgagcgtctagtgagagaacagactgggttgaaagtactcaaggtcttgggagggttgaacgagatgcggtggagtacggagacaaaagtgctactctgggacgatgatgaagatttcgaggacgag

SEQ ID NO: 2674 - DNA, 1035 bp, Muscodor strobelii
  misc_feature: SGI cDNA ID NO. 560531
  misc_feature: Encodes the peptide sequence at SEQ ID NO 2675
atgcagcaatggcaagtcggccctgtgccggagtacctataccagaactctacgggtcagcatccggaacaaatgcacccaacgcactcatatcagcctgatatgtcgcgctctcgaagcgacttcactggctacccaacgccagctcagaatgccgcggctcagtctcaccaacagcatggtcagcagcaccaccagcagcctcatgcacaacatcagtcccacccggcacatcaagcgcaccagtcacatcctcaacatcctcaacacgctcagcagcagcatcaacagcatcaacatgctcagcaccaaccacagactcatcatcagcagcacccccatgcgactccggtgccgcctccgatgaacctctcagccccgacggcctcacccgcgcaacagcaacagtccacgccaactcaaacccctgctcagcctgcccctcgtggtcgtaagagacccgcgcctgggcatcaacaggcagcgcaacaatcgcatcagcaagctcatccccagccgcactcggtaactccaactccagcccctgctgttgcgaccgcaccacctgtgaccgcttcggcccctatgccggcaactcctgctgccgtacccactccgattcccgcgccgacggtagcccagcaaacacctgttcctgctccaacccctgcagtggagagtactgaagctccgagctcagctccgcctagcaagaagagccgcactaacaccccctggactccggctgaagaattgagactgaagcagatgcgtgatgctggcaacagctgggctgagatagcaaagacatttccaacgcgaactgagggtagtgtcaagaagcattggtataaagatatgcactatgccgagtttgctgaggacgaaagccaggcgcttctcaatgcgatcaaagattatgagaacaataagtggaaaaccattggacagaaagtcggcaagcccgcaaaggcatgcgagcaatacgccaaagagcatttccctgatctctttgcgactcaaaaggcacgctaa

SEQ ID NO: 2675 - protein, 344 aa, Muscodor strobelii
  misc_feature: SGI Peptide ID NO. 560531
  misc_feature (294)..(334): Pfam Id: PF00249 Pfam Desc: Myb-like DNA-binding domain
  misc_feature (243)..(287): Pfam Id: PF00249 Pfam Desc: Myb-like DNA-binding domain
  misc_feature (226)..(338): NCBI GI: 256725703 Blast Desc: NECHADRAFT_81687 [Nectria haematococca mpVI 77-13-4]
  misc_feature (218)..(335): NCBI GI: 46111675 Blast Desc: FG02719.1 [Gibberella zeae PH-1]
  misc_feature (230)..(334): NCBI GI: 156060713 Blast Desc: SS1G_02499 [Sclerotinia sclerotiorum 1980] gi|154699903|gb|EDN99641.1| SS1G_02499 [Sclerotinia sclerotiorum 1980]
  misc_feature (238)..(337): NCBI GI: 171681096 Blast Desc: protein product [Podospora anserina] gi|170940506|emb|CAP65734.1| protein product [Podospora anserina]
  misc_feature (234)..(334): NCBI GI: 154314014 Blast Desc: BC1G_04950 [Botryotinia fuckeliana B05.10] gi|150849096|gb|EDN24289.1| BC1G_04950 [Botryotinia fuckeliana B05.10]
  misc_feature (219)..(337): NCBI GI: 119498211 Blast Desc: NFIA_035340 [Neosartorya fischeri NRRL 181] gi|119414027|gb|EAW23966.1| conserved [Neosartorya fischeri NRRL 181]
  misc_feature (219)..(337): NCBI GI: 255942947 Blast Desc: Pc18g04060 [Penicillium chrysogenum Wisconsin 54-1255] gi|211586975|emb|CAP94630.1| Pc18g04060 [Penicillium chrysogenum Wisconsin 54-1255]
  misc_feature (235)..(337): NCBI GI: 212540440 Blast Desc: MYB DNA-binding domain protein [Penicillium marneffei ATCC 18224] gi|210067674|gb|EEA21766.1| MYB DNA-binding domain protein [Penicillium marneffei ATCC 18224]
  misc_feature (235)..(337): NCBI GI: 242801758 Blast Desc: MYB DNA-binding domain protein [Talaromyces stipitatus ATCC 10500] gi|218717178|gb|EED16599.1| MYB DNA-binding domain protein [Talaromyces stipitatus ATCC 10500]
  misc_feature (238)..(337): NCBI GI: 119189063 Blast Desc: CIMG_04579 [Coccidioides immitis RS]
MQQWQVGPVPEYLYQNSTGQHPEQMHPTHSYQPDMSRSRSDFTGYPTPAQNAAAQSHQQHGQQHHQQPHAQHQSHPAHQAHQSHPQHPQHAQQQHQQHQHAQHQPQTHHQQHPHATPVPPPMNLSAPTASPAQQQQSTPTQTPAQPAPRGRKRPAPGHQQAAQQSHQQAHPQPHSVTPTPAPAVATAPPVTASAPMPATPAAVPTPIPAPTVAQQTPVPAPTPAVESTEAPSSAPPSKKSRTNTPWTPAEELRLKQMRDAGNSWAEIAKTFPTRTEGSVKKHWYKDMHYAEFAEDESQALLNAIKDYENNKWKTIGQKVGKPAKACEQYAKEHFPDLFATQKAR

SEQ ID NO: 2676 - DNA, 3014 bp, Muscodor strobelii
  misc_feature: SGI EST ID NO. CUFF.7099.1
  misc_feature: Variant of the nucleotide sequence at SEQ ID NO 2674
caggaaggtacctcagagattaccacacccgcaagtgacgagtacgcgctagagccgcgtcatacaaacagctggcagtactgggcagtgttcggcgccaaggaccagttctcaaacaaacgacagcgtcggaacgagtcctttttcgccctgccaccctgcctgattttcagttttttcttgctcatgctccacaatttaagaatcgaccgattggcaggtcctcgcaaagtcactttcgattccctcccctccttccgtcccttccacgctacctctggtcacattgctcccgccgtaccgccagtaccctcgtaccaccaaatccatatacctctcctcccccaacgcgacgtgtacacaaaattttcctctcctccaccccttctacgtgccctggttcatggtcgacttgccccatctacgacctgacgaccttgtccacttgtccacatctcctcccttcttaactgacgtctacctgcatctactttccagacacacgcaccgcaacaagcgtcgcacacacgagcacattactatctcgtctgcggtggctcttgctagcatatgtttcttctgacgatacttgacatctcagatcgttgcagtcccacgaaccagtctgttgacttgcactataactgcattcgcatcttgtttgcagcaacaagtacctgtctttgatcagtctgttttgagcatcgctttttatcgacacgcgtcgacagtttagcgtcgttgacttatgaaccgtgctcgcgcctattgtcacgacacggaaaaaactcaatccccagtcacttctttaggcgtcacgaccatcatctcaatcatccatcatgcagcaatggcaagtcggccctgtgccggagtacctataccagaactctacgggtcagcatccggaacaaatgcacccaacgcactcatatcagcctgatatgtcgcgctctcgaagcgacttcactggctacccaacgccagctcagaatgccgcggctcagtctcaccaacagcatggtcagcagcaccaccagcagcctcatgcacaacatcagtcccacccggcacatcaagcgcaccagtcacatcctcaacatcctcaacacgctcagcagcagcatcaacagcatcaacatgctcagcaccaaccacagactcatcatcagcagcacccccatgcgactccggtgccgcctccgatgaacctctcagccccgacggcctcacccgcgcaacagcaacagtccacgccaactcaaacccctgctcagcctgcccctcgtggtcgtaagagacccgcgcctgggcatcaacaggcagcgcaacaatcgcatcagcaagctcatccccagccgcactcggtaactccaactccagcccctgctgttgcgaccgcaccacctgtgaccgcttcggcccctatgccggcaactcctgctgccgtacccactccgattcccgcgccgacggtagcccagcaaacacctgttcctgctccaacccctgcagtggagagtactgaagctccgagctcagctccgcctagcaagaagagccgcactaacaccccctggactccggctgaagaattgagactgaagcagatgcgtgatgctggcaacagctgggctgagatagcaaagacatttccaacgcgaactgagggtagtgtcaagaagcattggtataaagatatgcactatgccgagtttgctgaggacgaaagccaggcgcttctcaatgcgatcaaagattatgagaacaataagtggaaaaccattggacagaaagtcggcaagcccgcaaaggcatgcgagcaatacgccaaagagcatttccctgatctctttgcgactcaaaaggcacgctaaaaccagtgatgcctgcccgatgatttgggcgcctattgcagcatttgattattttccaacgcgatcagtgaaagcttgagctacgaatcattctcgttatgagttcaacatataccctctcgactggttctgtaaatgtaattcaaaggacataagacacatgttccccttcattccactgtcagccaattatgtgcatgccggattgcgtatgcaagcacgcacgggtctcacgacttcgagtagaaaaactacgcacaatctcacttcgagtaatcagcataccgaagatatatccttttcggtcgtgctggtcgcaaaaccttgcctctaggggtgcgagaaaatgttctgttgtcgaacacggatagctgtggctctacattcgtcattcgacggccttattcctctccgccctgtgcctggtacttaccgccaatgcacacaggtggccgaagtaccgatgtgtgtgatcaagatcaatcatggctcaaatacagctgcttggctgttgcgaaggactcatcggcagtgtgatctcgttctgtgttctcagcaaattttaaggcggcttgggatcttgagactggggtttccattgattttcagtgtcacgcatgcattcgtcacctaggcgcttccgagttccataaaggggcagggcacgatcaaagccccgagacaaatttgtattcgaacagggtggcagagatgttttaaaagtaggtagacagcttgtctcacggcagattaacgcgatgatttctttgtaagacgaatcataatgacaagtgagattgccatgtagtgaccataaacaaagacgatggttcatataaagtcgactatcggctacacgcgaatgcgacagggttattttacacgccttcagtctgcgagctccagatgttcaacgtcggcgatgaaacttaaattatagacggttttccctagctcttagttctagctgattggcctgtagccacaactcacgcattgatttgctatggggatccgtttgtgcaacggcaatgcttacttcgcttcataaccgtgcgctacaccgttgaagcaatggtcctctgcgctgcgtgatggcggaaggggaaagcggaagaggcttaaattagaattggg

SEQ ID NO: 2677 - DNA, 450 bp, Muscodor strobelii
  misc_feature: SGI cDNA ID NO. 560532
  misc_feature: Reduced expression when VOC is produced
  misc_feature: Encodes the peptide sequence at SEQ ID NO 2678
atgccgaccagactcagcaagaccaggaagcaccgcggccacgtcagcgccggtcacggtcgcgtcggcaagcacagaaagcaccccggtggtcgtggtatggccggtggtcagcaccatcaccgaaccaacttggacaagtaccatcccggttacttcggaaagatcggtatgaggcgcttccacctcctgcgcaaccaccaatggaacccaaccatcaacctcgacaagctcacatctctactccccgaggagatgcgcgagaagtacctagccggtgatgccaaggacaccgcccccgtcattgacctcctcaacctcggctactccaagctgctcggcaagggtcgcctccccgagatccccttcgtcgtccgtgcccgatacgtcagcaagatcgctgagaagaagatcaccgaggctggtggtgtcattgagttggttgcataa

SEQ ID NO: 2678 - protein, 149 aa, Muscodor strobelii
  misc_feature: SGI Peptide ID NO. 560532
  misc_feature (111)..(143): Pfam Id: PF00256 Pfam Desc: Ribosomal protein L15
  misc_feature (1)..(149): NCBI GI: 67525973 Blast Desc: AN3444.2 [Aspergillus nidulans FGSC A4] gi|40743798|gb|EAA62984.1| AN3444.2 [Aspergillus nidulans FGSC A4]
  misc_feature (1)..(149): NCBI GI: 116198203 Blast Desc: 60S ribosomal protein L28 [Chaetomium globosum CBS 148.51] gi|88178536|gb|EAQ86004.1| 60S ribosomal protein L28 [Chaetomium globosum CBS 148.51]
  misc_feature (1)..(149): NCBI GI: 242801813 Blast Desc: 60S ribosomal protein L27a, [Talaromyces stipitatus ATCC 10500] gi|218717191|gb|EED16612.1| 60S ribosomal protein L27a, [Talaromyces stipitatus ATCC 10500]
  misc_feature (1)..(149): NCBI GI: 212540416 Blast Desc: 60S ribosomal protein L27a, [Penicillium marneffei ATCC 18224] gi|210067662|gb|EEA21754.1| 60S ribosomal protein L27a, [Penicillium marneffei ATCC 18224]
  misc_feature (1)..(149): NCBI GI: 164426923 Blast Desc: 60S ribosomal protein L28 [Neurospora crassa OR74A] gi|132845|sp|P08978.1|RL28_NEUCR RecName: Full=60S ribosomal protein L28; AltName: Full=L27A; AltName: Full=L29; AltName: put.
  misc_feature (1)..(149): NCBI GI: 171694121 Blast Desc: protein product [Podospora anserina] gi|170947009|emb|CAP73813.1| protein product [Podospora anserina]
  misc_feature (1)..(149): NCBI GI: 261361276 Blast Desc: 60S ribosomal protein L28 [Verticillium albo-atrum VaMs.102]
  misc_feature (1)..(149): NCBI GI: 256724426 Blast Desc: [Nectria haematococca mpVI 77-13-4]
  misc_feature (1)..(149): NCBI GI: 242796702 Blast Desc: 60S ribosomal protein L27a, [Talaromyces stipitatus ATCC 10500] gi|218719444|gb|EED18864.1| 60S ribosomal protein L27a, [Talaromyces stipitatus ATCC 10500]
  misc_feature (1)..(149): NCBI GI: 259485565 Blast Desc: TPA: similar to 60S ribosomal protein L27a (Broad) [Aspergillus nidulans FGSC A4]
  misc_feature: Useful for introducing or modulating the production of volatile compounds
MPTRLSKTRKHRGHVSAGHGRVGKHRKHPGGRGMAGGQHHHRTNLDKYHPGYFGKIGMRRFHLLRNHQWNPTINLDKLTSLLPEEMREKYLAGDAKDTAPVIDLLNLGYSKLLGKGRLPEIPFVVRARYVSKIAEKKITEAGGVIELVA

SEQ ID NO: 2679 - DNA, 1150 bp, Muscodor strobelii
  misc_feature: SGI EST ID NO. CUFF.6726.0
  misc_feature: Variant of the nucleotide sequence at SEQ ID NO 2677
cttttttctcgctaaacctccaagtccacggtctacactgcacttctcgacgcccgaaccgacaacaccaacctctgcatcaacaccgtcgagatgccgaccagactcagcaagaccaggaagcaccgcggccacgtcagcgccggtcacggtcgcgtcggcaagcacagaaagcaccccggtggtcgtggtatggccggtggtcagcaccatcaccgaaccaacttggacaagtaccatcccggttacttcggaaagatcggtatgaggcgcttccacctcctgcgcaaccaccaatggaacccaaccatcaacctcgacaagctcacatctctactccccgaggagatgcgcgagaagtacctagccggtgatgccaaggacaccgcccccgtcattgacctcctcaacctcggctactccaagctgctcggcaagggtcgcctccccgagatccccttcgtcgtccgtgcccgatacgtcagcaagatcgctgagaagaagatcaccgaggctggtggtgtcattgagttggttgcataagggtgtgcgattttcggcgggaagccatcatgagcattacggtgttacggacggtttagggcggttataggacggtagatcctactaatgaccaatccatcatgatctgaaccaattcggcctggcaagacccatccggcctacacgcaagcaaggtcatgcttgacgagtcaatccattcgacggtcttcgaaaatcaagaagccgtacgctgacgagaccggatcaaaaagtccagggaataaaaggaaatcatttgtcaagttcatatacagtgccaacaattctggctggctgctatgctctgtatgctgcgcgtgatgatgacttgatgtgcgtgttgccgatgatacacgcaaataaagattccctcggaagaacagttgcttgcgatgacattacactacgccgtttgcgagttgctcggaaatctgaatattgagagattgtgtcgtaaccgaacaaagttacagctatgataattgagatgtgtcattgtcaatatatgtgacgttgacatgaagacgtcaagcatcgcggcagcttatattcattgcatatcagggtaccacacttgtgctgtctgcaaatttgcgtgacagttccc

SEQ ID NO: 2680 - DNA, 984 bp, Muscodor strobelii
  misc_feature: SGI cDNA ID NO. 560533
  misc_feature: Encodes the peptide sequence at SEQ ID NO 2681
atggcgcctcctattcaactgaatactcacatggcaatgccatacactccgactagcgacgcactcgatcgtcatgaattcggtatcaccaagaatcgaaagcttgcatctaccggaggaggaagagcctggagcgaagatgaggaagtatatctccttcagactcgacttcaaaaaatgccctataagcatattgctgcacacttgaagaagacggaactggcctgtcgccttcactatcatcaattgagccatgggagcaatcgccgcaagcgcactgcctcagtatcatccggatcttcatccgaacagtccccggtgctaccggccatagtgccatcacctatccacgagtcctcgtcccgtgatgagactccccctaggactgctagccacgaatcgaactcccctgactaccacaactcaattcagctgcccaggatcatgtctgccaacagcatgtctccacgtctgccggcaatcttgcccaagcccgcatcaatgtctctctcaacaagcgtcatgtctccggtcttgaactatccgacgcccatgccagacagcgcccggtctctgagtggttgttcatttcctcaaccctcgccgcttagccacactccaactcttcgcttggattgtactttgccgccaccatctgctcaggtggatctcccgcgccttcaagcgctgtacggcgcacatcgatcgtccttttggggcgctatcgcagctgaatacggttctggcgtaagccccatcgtcctagaacaggcatggaaggccaatatgttttcagctggtaatcaaacaccaatcacacctgctccatctcccaatgatcgagatggtccctacgacaagcatgacaagacacgtatcagtgccatactcggcattgatgcaaatcctcgtagcccgaaggaaagagaagctgtacgacgcttagaggaagagcgcgggatcagcgtcgctaccgctgtctag

SEQ ID NO: 2681 - protein, 327 aa, Muscodor strobelii
  misc_feature: SGI Peptide ID NO. 560533
  misc_feature (1)..(325): NCBI GI: 261359269 Blast Desc: conserved [Verticillium albo-atrum VaMs.102]
  misc_feature (10)..(320): NCBI GI: 145610531 Blast Desc: MGG_01130 [Magnaporthe grisea 70-15] gi|145017899|gb|EDK02178.1| MGG_01130 [Magnaporthe grisea 70-15]
  misc_feature (1)..(319): NCBI GI: 254674352 Blast Desc: [Colletotrichum higginsianum]
  misc_feature (1)..(320): NCBI GI: 116191303 Blast Desc: CHGG_05369 [Chaetomium globosum CBS 148.51] gi|88181282|gb|EAQ88750.1| CHGG_05369 [Chaetomium globosum CBS 148.51]
  misc_feature (14)..(319): NCBI GI: 171681094 Blast Desc: protein product [Podospora anserina] gi|170940505|emb|CAP65733.1| protein product [Podospora anserina]
  misc_feature (14)..(326): NCBI GI: 46111673 Blast Desc: FG02718.1 [Gibberella zeae PH-1]
  misc_feature (15)..(319): NCBI GI: 85109185 Blast Desc: NCU05681 [Neurospora crassa OR74A] gi|28924429|gb|EAA33559.1| [Neurospora crassa OR74A]
  misc_feature (4)..(319): NCBI GI: 256726108 Blast Desc: NECHADRAFT_43701 [Nectria haematococca mpVI 77-13-4]
  misc_feature (6)..(322): NCBI GI: 156060709 Blast Desc: SS1G_02497 [Sclerotinia sclerotiorum 1980] gi|154699901|gb|EDN99639.1| SS1G_02497 [Sclerotinia sclerotiorum 1980]
  misc_feature (6)..(321): NCBI GI: 154314020 Blast Desc: BC1G_04953 [Botryotinia fuckeliana B05.10] gi|150849099|gb|EDN24292.1| BC1G_04953 [Botryotinia fuckeliana B05.10]
MAPPIQLNTHMAMPYTPTSDALDRHEFGITKNRKLASTGGGRAWSEDEEVYLLQTRLQKMPYKHIAAHLKKTELACRLHYHQLSHGSNRRKRTASVSSGSSSEQSPVLPAIVPSPIHESSSRDETPPRTASHESNSPDYHNSIQLPRIMSANSMSPRLPAILPKPASMSLSTSVMSPVLNYPTPMPDSARSLSGCSFPQPSPLSHTPTLRLDCTLPPPSAQVDLPRLQALYGAHRSSFWGAIAAEYGSGVSPIVLEQAWKANMFSAGNQTPITPAPSPNDRDGPYDKHDKTRISAILGIDANPRSPKEREAVRRLEEERGISVATAV

SEQ ID NO: 2682 - DNA, 2201 bp, Muscodor strobelii
  misc_feature: SGI EST ID NO. CUFF.6701.0
  misc_feature: Variant of the nucleotide sequence at SEQ ID NO 2680
ttgccacctattttcaatctgtgcatctatcacgacgttgttgcgcgccctcctctttcttctcttctttcgcagctggcgcccactttcattcattgtccaactggcttggctgcttacactcttttgaatttatatttattagttttatatcggattaatcttcgtggcctagttttacttgttcaccaattcagtttcgtgtctgcatcgactcatacacagttatcctatctcaaggctctgggctaaagcacatcgccggatacacgtacaagtcgctcatagtatcaagacagtgggattactggaacgaaacgtcaagggaactcgtgacactcgatctcgaagggtatccgatttgttcgattcttgaagcagctagatctgcccgtttgacaattattaattgttcgctacttctattcgtcgaggccgcaccgtcctaacctcctacgcacacgaagctttattcataagttacatagaaatggcgcctcctattcaactgaatactcacatggcaatgccatacactccgactagcgacgcactcgatcgtcatgaattcggtatcaccaagaatcgaaagcttgcatctaccggaggaggaagagcctggagcgaagatgaggaagtatatctccttcagactcgacttcaaaaaatgccctataagcatattgctgcacacttgaagaagacggaactggcctgtcgccttcactatcatcaattgagccatgggagcaatcgccgcaagcgcactgcctcagtatcatccggatcttcatccgaacagtccccggtgctaccggccatagtgccatcacctatccacgagtcctcgtcccgtgatgagactccccctaggactgctagccacgaatcgaactcccctgactaccacaactcaattcagctgcccaggatcatgtctgccaacagcatgtctccacgtctgccggcaatcttgcccaagcccgcatcaatgtctctctcaacaagcgtcatgtctccggtcttgaactatccgacgcccatgccagacagcgcccggtctctgagtggttgttcatttcctcaaccctcgccgcttagccacactccaactcttcgcttggattgtactttgccgccaccatctgctcaggtggatctcccgcgccttcaagcgctgtacggcgcacatcgatcgtccttttggggcgctatcgcagctgaatacggttctggcgtaagccccatcgtcctagaacaggcatggaaggccaatatgttttcagctggtaatcaaacaccaatcacacctgctccatctcccaatgatcgagatggtccctacgacaagcatgacaagacacgtatcagtgccatactcggcattgatgcaaatcctcgtagcccgaaggaaagagaagctgtacgacgcttagaggaagagcgcgggatcagcgtcgctaccgctgtctagattgaccgtcaatggagacatcggaagcaaattaagaggctcgagtctatgcatacatcaggcaaattgtatggtatgtctacaattcagtgcagtccgagtttccatcttgccctacaacagggtagagcttatcacgacaccccaatacaataaccggcgttgtatgcccttggaggagttcttattcacattcttcccatggggcagtcttctgctcctggtcctttttattcattcaaaaattttaccccttttcaagcgaatttttcatcacatgagaccattgttgtcgaccctgggagcctatcgaggaacacgatggaggagcaacgctctacttgccactacagattcctgtgttgtagaaagagcaaggcgaaaagctacttacatcaaggtgttaaattttgagacagccttcggagtaggtcggaattggaaacttttgggtgatattgttttatgttgcacgatgtgcttatgcccaaaacgatgtgacgaaaacgagcaaaatatgacgattgggtctggcaagggatatgtacactagcaacatatgagctcataggcacaggaggaactcatgatttggctgttatattacataccgactgctatgtttgtgattgtgacttacaccagcgccgctgaatgaagatcacgtgctatgtcagatctttgtttaaaaacacattgcgggagaagctcaaatgtgattaattcg

SEQ ID NO: 2683 - DNA, 723 bp, Muscodor strobelii
  misc_feature: SGI cDNA ID NO. 560534
  misc_feature: Encodes the peptide sequence at SEQ ID NO 2684
atgcccgtgcttcacagaatccagcaggcggcagccgtggcagcacgtcgcgtcagtcatcaaagctcgcttgtgcgaaaagcggctatattgaaccgggttcgaattggtgtgcgccagtcagccgttttgagaggtcatacgataatggcgaatatcgcagaccgtaataatgcatttcaacatggtttacaggttgtgacgggtccggcatctgggttaatgggggcaaggttccctgaatctaatgtggaaatgaatatcagccatcctccaatggtgaatggtcaccccgtcaatgccgtgccggctgcttggcgcccgcataccagggcgttccatccaccgatgagtttaccgaaccaaagcccaagtcctccagcacaatccgctgttcgtgaggatatcgtgtatgatatgggaggaggtggcccatccgcgaatccgcctgtggataatgttttggtttcgatgccgcctgctacgaaggagccacgacacatcactgatctctacgcgaacgatgaggacgaccacaccgcctttccttcatctagctttcatgatcggtatgccgacttgtcagatgatgatatggatgatgtgtatgcggactttggcgttttgttcggatcgcgatcacctgaaccaggaaatccggcagacgagcatttctacgaggagttgctcgatgaacttgatggaattccttgggttccgtaa

SEQ ID NO: 2684 - protein, 240 aa, Muscodor strobelii
  misc_feature: SGI Peptide ID NO. 560534
  misc_feature (176)..(239): NCBI GI: 46111653 Blast Desc: FG02708.1 [Gibberella zeae PH-1]
  misc_feature (169)..(239): NCBI GI: 261359262 Blast Desc: [Verticillium albo-atrum VaMs.102]
MPVLHRIQQAAAVAARRVSHQSSLVRKAAILNRVRIGVRQSAVLRGHTIMANIADRNNAFQHGLQVVTGPASGLMGARFPESNVEMNISHPPMVNGHPVNAVPAAWRPHTRAFHPPMSLPNQSPSPPAQSAVREDIVYDMGGGGPSANPPVDNVLVSMPPATKEPRHITDLYANDEDDHTAFPSSSFHDRYADLSDDDMDDVYADFGVLFGSRSPEPGNPADEHFYEELLDELDGIPWVP

SEQ ID NO: 2685 - DNA, 2511 bp, Muscodor strobelii
  misc_feature: SGI EST ID NO. CUFF.6710.0
  misc_feature: Variant of the nucleotide sequence at SEQ ID NO 2683
tgcaactcctactgagaagcgaccttcgacctcaactcctttcccggtttcattcatcatcaacggtgcctagttgaggctggcgatcttcaaagaatcacgatctagcttcgttatccagtcatttgagcggcattcccctcaaccagttccgaattgcgcctcctcccgaaaagggcatctcacaacggcaggggaatgcgaaacgcgattcaacattctcagcagtctggtaattaatctacaagctgtctattctctggaatagacaagtcagattcggcatcgcgatatcagcacagggcctcttttctgtgtctggtacgagccgtctctccggattactcttttagtctgtgtgactatatccatctctctgccggcggtgatcttatagatctccactacagtttcatattcgatcgcaaagaccgtgctatgtgcagcgaagtctacgagagcgccgtgatagccgaccctggctttggaacttgcaacaaagccgtctacgccgattctctgggactgcagcgagtactatttggtacaactgtcacgggaattattgcctgaacggtacttatttggacaactagaggttacaacacgtctcatttcggtcatatactactttatcacgacttagaccactttgaccacccgttcgttcgggcttttcgagtgtttcgatgaccttggagtgtggagaagcttgacgttgtttccccccagactaccgcacaccagccattacggatccggtatcaagatcatccaatgtcgagttgatactgaacatcacaggtagttactatacttcctacaaatgagtactaccagcgctacttcactattcgagttcaagcgatcgtaaggcctagcaactagccatgagaaactccatacaaagcaggcccgccttattacgtctcaaaattcatcactagtacgattagctacctcattgtgtcgcccaatagcgaacatttcccatgatcagacaagccgccgagcttttggaacatggctgccgagatcaattctcgactgatgccaggtgagcttttcgaagcgcgcctgcatcgaatacaacatgcccagaactcagggatagcagtcccatcttttccatcaaatttccgcataccagatataagctccgtaagaggcgatgtcaacccttcaaggagttattctccagccagccattacacaatgcaaggcactggcgcgaatagggcttctagctcactttccaccttgacaacgcagcagtatcttcagagtgaagcaaggaatggtctatcgactagtcagcccgcaatgaatcagcgagagattccgacaagagggatgtccacagttgctactcaatgtttgaaacaaatgtcagctacggagcttgatactaacatttctccaataccacgaccagcaaagcgcaaacgcgcatctcacgatgtcgatggcccaggaacagacatactaccttgcaaaaagcggcgtttattactccatttcacaacgtcacggctgtcccaaccttactcattcccagcaacacacatcctaattcgcgaaaccagcgacaacatgcccgtgcttcacagaatccagcaggcggcagccgtggcagcacgtcgcgtcagtcatcaaagctcgcttgtgcgaaaagcggctatattgaaccgggttcgaattggtgtgcgccagtcagccgttttgagaggtcatacgataatggcgaatatcgcagaccgtaataatgcatttcaacatggtttacaggttgtgacgggtccggcatctgggttaatgggggcaaggttccctgaatctaatgtggaaatgaatatcagccatcctccaatggtgaatggtcaccccgtcaatgccgtgccggctgcttggcgcccgcataccagggcgttccatccaccgatgagtttaccgaaccaaagcccaagtcctccagcacaatccgctgttcgtgaggatatcgtgtatgatatgggaggaggtggcccatccgcgaatccgcctgtggataatgttttggtttcgatgccgcctgctacgaaggagccacgacacatcactgatctctacgcgaacgatgaggacgaccacaccgcctttccttcatctagctttcatgatcggtatgccgacttgtcagatgatgatatggatgatgtgtatgcggactttggcgttttgttcggatcgcgatcacctgaaccaggaaatccggcagacgagcatttctacgaggagttgctcgatgaacttgatggaattccttgggttccgtaattttgaggcatttgcatgtgggtgttaataaaatggtgtcggggtcgcttatgaattgcatgcaaaggttgaggttaaaaagtacttgaaattgatggcgggttaccacatatgagggcctcgcatgtaatatacctatatatgcatctttttactaatatactttttggctcgccgtaatttatcgttgagggg

SEQ ID NO: 2686 - DNA, 1038 bp, Muscodor strobelii
  misc_feature: SGI cDNA ID NO. 560535
  misc_feature: Encodes the peptide sequence at SEQ ID NO 2687
atggcggtctcgagtcatacagataatgggctcgtattcgcctacctagggccctcctctgtccagaacactaagacacttgattttcaagctaacacatatgctgttcagccccgatgtgttcctgtgtcgaggaaatgccacctcgaaccctacggagcaggaacggaattctactgcgggaaaaacaagacggacttctggacgtataacggacggctaagcaggggaggacctccagaaacgggcataagctggtttgacaacgataacttgacaatgtttgtcgggttgggcaccccatattcacgatattttgggctttcttctatcactgatgaacaagctgccagcaccctcatcacggaagagggttttggagacccagttgatcccgagattttcgcaatgcctcacggcggaacgacatttgttttatggtgcatgtgggcagtgtacgatttagagtacgattgggtgaacgggtctataactagattcgaggcttcgcctagcaaccgatctgtctcaaatctagctctcagtggtatcatgttcacacgtgcggcagatttgtatatcacgtcggcaacgagtgtggtggcagcagtgagcaacagcgcccaagaattagccgataagattgcactgtctttcgggtttgccgtcttgtcactcttttcagtcgcaatggagtctcgaccttcaaacattgcccaagtgcgagacacgcttcttgtcacaaagctatccaaggctgcattgtatagtcttgtcgcggccaaccttttatttgttgtgactggtgctgttctgctggtcattgtactatcctctgataatgctgcaacaaaaagtgttcaatcgaggctaacaataaccggcttaactgctgatcggtttgaggcaacgcggaggaaagaagcagtgaacaaaatcgaagagctatttacggaatttcatggcaaagaaagcactagagttggtattgatcgcactagtcgcggcggcttcaagtataccaatcatatatactga

SEQ ID NO: 2687 - protein, 345 aa, Muscodor strobelii
  misc_feature: SGI Peptide ID NO. 560535
  misc_feature (13)..(341): NCBI GI: 159121967 Blast Desc: AFUB_100850 [Aspergillus fumigatus A1163]
  misc_feature (13)..(341): NCBI GI: 70981788 Blast Desc: AFUA_4G00330 [Aspergillus fumigatus Af293] gi|66844045|gb|EAL84385.1| AFUA_4G00330 [Aspergillus fumigatus Af293]
  misc_feature (13)..(341): NCBI GI: 119501707 Blast Desc: NFIA_045320 [Neosartorya fischeri NRRL 181] gi|119415776|gb|EAW25713.1| conserved [Neosartorya fischeri NRRL 181]
  misc_feature (3)..(337): NCBI GI: 145254142 Blast Desc: An18g00670 [Aspergillus niger] gi|134084114|emb|CAK43142.1| protein product [Aspergillus niger]
  misc_feature (3)..(337): NCBI GI: 238504786 Blast Desc: conserved [Aspergillus flavus NRRL3357] gi|220689736|gb|EED46086.1| conserved [Aspergillus flavus NRRL3357]
  misc_feature (117)..(255): NCBI GI: 115387715 Blast Desc: conserved [Aspergillus terreus NIH2624] gi|114195447|gb|EAU37147.1| conserved [Aspergillus terreus NIH2624]
  misc_feature (27)..(293): NCBI GI: 169625254 Blast Desc: SNOG_15897 [Phaeosphaeria nodorum SN15] gi|111055615|gb|EAT76735.1| SNOG_15897 [Phaeosphaeria nodorum SN15]
MAVSSHTDNGLVFAYLGPSSVQNTKTLDFQANTYAVQPRCVPVSRKCHLEPYGAGTEFYCGKNKTDFWTYNGRLSRGGPPETGISWFDNDNLTMFVGLGTPYSRYFGLSSITDEQAASTLITEEGFGDPVDPEIFAMPHGGTTFVLWCMWAVYDLEYDWVNGSITRFEASPSNRSVSNLALSGIMFTRAADLYITSATSVVAAVSNSAQELADKIALSFGFAVLSLFSVAMESRPSNIAQVRDTLLVTKLSKAALYSLVAANLLFVVTGAVLLVIVLSSDNAATKSVQSRLTITGLTADRFEATRRKEAVNKIEELFTEFHGKESTRVGIDRTSRGGFKYTNHIY

SEQ ID NO: 2688 - DNA, 400 bp, Muscodor strobelii
  misc_feature: SGI EST ID NO. CUFF.6713.0
  misc_feature: Variant of the nucleotide sequence at SEQ ID NO 2686
gacctccagaaacgggcataagctggtttgacaacgataacttgacaatgtttgtcgggttgggcaccccatattcacgatattttgggctttcttctatcactgatgaacaagctgccagcaccctcatcacggaagagggttttggagacccagttgatcccgagattttcgcaatgcctcacggcggaacgacatttgttttatggtgcatgtgggcagtgtacgatttagagtacgattgggtgaacgggtctataactagattcgaggcttcgcctagcaaccgatctgtctcaaatctagctctcagtggtatcatgttcacacgtgcggcagatttgtatatcacgtcggcaacgagtgtggtggcagcagtgagcaacagcgcccaagaatt

SEQ ID NO: 2689 - DNA, 621 bp, Muscodor strobelii
  misc_feature: SGI cDNA ID NO. 560536
  misc_feature: Encodes the peptide sequence at SEQ ID NO 2690
atgaaaatgtcactctcaaccctcccatcgatctcttcgctacccggcgcagacgaagagaccataaaatcagtcttagacactctcttcgagccctcccccgaaatccacgacatagcacttccaatcatccagcagaagacacgtatcctcgcaaacccaggactctcaccagacctcccttctcccccaacgaaagccacagtacccgatgatctacctttcacaagttaccaatctctcatcgaacacatcgggacgctcatgaaccaactaaccgtctcacaatcaccctcctcaggagacaaacttcattcgattctgggctctcatccgcgacttggggcgaggaaagtagatagtgctcagagtcgagctgaacaagctcagttgaagggtagttcggatgaggctgaaagacttgctaggttgaatgcagagtatgaagaacgttttcctgggctgaggtatgtggtttttgtgaatgggaggagtagggatgtggttatggaggatatgcggaggaggatcgataggggtgatcttagggctgaggagagggaggggatacaggctatggtcgatattgctcttgatcgggctgggaagttgggggcatga

SEQ ID NO: 2690 - protein, 206 aa, Muscodor strobelii
  misc_feature: SGI Peptide ID NO. 560536
  misc_feature (14)..(203): Pfam Id: PF09349 Pfam Desc: OHCU decarboxylase
  misc_feature (5)..(204): NCBI GI: 189198930 Blast Desc: conserved [Pyrenophora tritici-repentis Pt-1C-BFP] gi|187982901|gb|EDU48389.1| conserved [Pyrenophora tritici-repentis Pt-1C-BFP]
  misc_feature (6)..(205): NCBI GI: 145616799 Blast Desc: MGG_10973 [Magnaporthe grisea 70-15] gi|145022859|gb|EDK06602.1| MGG_10973 [Magnaporthe grisea 70-15]
  misc_feature (5)..(204): NCBI GI: 154304270 Blast Desc: BC1G_08405 [Botryotinia fuckeliana B05.10] gi|150854207|gb|EDN29399.1| BC1G_08405 [Botryotinia fuckeliana B05.10]
  misc_feature (5)..(204): NCBI GI: 156059102 Blast Desc: SS1G_03563 [Sclerotinia sclerotiorum 1980] gi|154701350|gb|EDO01089.1| SS1G_03563 [Sclerotinia sclerotiorum 1980]
  misc_feature (6)..(204): NCBI GI: 121713820 Blast Desc: conserved [Aspergillus clavatus NRRL 1] gi|119402674|gb|EAW13095.1| conserved [Aspergillus clavatus NRRL 1]
  misc_feature (7)..(204): NCBI GI: 261189539 Blast Desc: conserved [Ajellomyces dermatitidis SLH14081] gi|239591416|gb|EEQ73997.1| conserved [Ajellomyces dermatitidis SLH14081]
  misc_feature (7)..(204): NCBI GI: 239613052 Blast Desc: conserved [Ajellomyces dermatitidis ER-3]
  misc_feature (3)..(206): NCBI GI: 261359261 Blast Desc: conserved [Verticillium albo-atrum VaMs.102]
  misc_feature (25)..(204): NCBI GI: 238499839 Blast Desc: conserved [Aspergillus flavus NRRL3357] gi|220692907|gb|EED49253.1| conserved [Aspergillus flavus NRRL3357]
  misc_feature (8)..(204): NCBI GI: 171681104 Blast Desc: protein product [Podospora anserina] gi|170940510|emb|CAP65738.1| protein product [Podospora anserina]
  misc_feature (62)..(204): SWISSPROT Homolog: EC 3.5.2.5 Allantoinase
MKMSLSTLPSISSLPGADEETIKSVLDTLFEPSPEIHDIALPIIQQKTRILANPGLSPDLPSPPTKATVPDDLPFTSYQSLIEHIGTLMNQLTVSQSPSSGDKLHSILGSHPRLGARKVDSAQSRAEQAQLKGSSDEAERLARLNAEYEERFPGLRYVVFVNGRSRDVVMEDMRRRIDRGDLRAEEREGIQAMVDIALDRAGKLGA

SEQ ID NO: 2691 - DNA, 1050 bp, Muscodor strobelii
  misc_feature: SGI EST ID NO. CUFF.6723.0
  misc_feature: Variant of the nucleotide sequence at SEQ ID NO 2689
ttttgattcatgtaataaccactgaccatactgcctcttcccacataaagatagatatcattttcagctctcaatctcactattctaaaggacttacatctttcattcatgctcggagtctaagacacctctcaagcctttaaagtaaaacataagagatatccaaaaccactacgatcatgaaaatgtcactctcaaccctcccatcgatctcttcgctacccggcgcagacgaagagaccataaaatcagtcttagacactctcttcgagccctcccccgaaatccacgacatagcacttccaatcatccagcagaagacacgtatcctcgcaaacccaggactctcaccagacctcccttctcccccaacgaaagccacagtacccgatgatctacctttcacaagttaccaatctctcatcgaacacatcgggacgctcatgaaccaactaaccgtctcacaatcaccctcctcaggagacaaacttcattcgattctgggctctcatccgcgacttggggcgaggaaagtagatagtgctcagagtcgagctgaacaagctcagttgaagggtagttcggatgaggctgaaagacttgctaggttgaatgcagagtatgaagaacgttttcctgggctgaggtatgtggtttttgtgaatgggaggagtagggatgtggttatggaggatatgcggaggaggatcgataggggtgatcttagggctgaggagagggaggggatacaggctatggtcgatattgctcttgatcgggctgggaagttgggggcatgagggaagatgaagatatgaggttggcgtactatttcatatgacaactgttttgctcctcacatggtgctcacgattaagttcagctgattaagtccaacgacacggcgatagataggatatggctacatatgcatgcaccaatttcaagctgtcaagaaatgagatgggtgttgggttattaggaaacctggggagtcttgaggttgtttgagaagtcgaccaaagaaataaatcaagaaaaaatgttatt

SEQ ID NO: 2692 - DNA, 1437 bp, Muscodor strobelii
  misc_feature: SGI cDNA ID NO. 560537
  misc_feature: Reduced expression when VOC is produced
  misc_feature: Encodes the peptide sequence at SEQ ID NO 2693
atgctgtgcgcaatctctggtgaacctccgcaggagcccgtcgtctccaagctttcgggatccgtcttcgagaagcgattgattgagaagtacatcgaagaaaacggcaaagaccccatctcaggcgaagacctcacactcgacgacctactccccgtcaagaccgcccgtgtcgtccgtccccgaccacccactctcacctccatccccgccctcctttccaccttccagaacgaatgggacgccctcgccctcgagacctacaatctcaaggaacagctcgcccgcacacgcgaagagctggcaacggcattatatcagcacgatgctgccattcgcgtgatcgcaaggctgactagagagcgtgatgatgctcgcgacgctctatctagagtttccgtctcaggaagcgcacccagcaatggcgatgctatggccgttgatgcgccggcactatctgccgagttcaccgccaaggtcgacgacacgcaagcaagattatctaaaagcagaaagaagcgacctgtgcctgagggctggaccacaccagatcttgtcgctaccttcgccgttgaagcttctacttcccttcccgtcggccaggcaacgaccctcacaaccgaatcggggtatgccgcagtgggtgggctggaaggagatgtggccatctactcagtcgaagccgataatgtggagcgctccctgaaggtagacgagcccgtgacagactcgatatgggatgggcccaaggtggccttctcgactgccaaaggctccgtcaaggtattcgagaatggcagcgagattgcctccttcacagaccatgctgggccagccactggcctggctctgcatcccagccatgaaattctggcctcgattggatccgacaagagctttgtcttttacgatttggtcaatctacagaaggccactcaagtctacactaatgctgctctgaccgcttgtgctttccacccggatggtcaccttttcgcggcgggaaccagcgccggcgacatcaagcttttcatgaccaacacgggcgaggaggcggctgctttctcgctcggcgcaccagttcaagctatcgcattctccgagaacgggttttggttcgccgccacggccaagggacagactactgtcacgattttcgatctgcggaagcaaggcgatgcggcacaggccaaggtgctggacattggcaacgcggtgcaaagtctggcatgggactactcgcaacaattcctggctacagctggccctgcgggagtgacggtacagcaatacagcaagagctccaagtcgtggtctgagccgctgcgagctgcggtcaacaatgcggtagatgtgcaatggggcccgaatgcccagaaacttctggtagtcaacaatgagggtgtcatcagcgttctgggagccaaggagtcctag

SEQ ID NO: 2693 - protein, 478 aa, Muscodor strobelii
  misc_feature: SGI Peptide ID NO. 560537
  misc_feature (64)..(133): Pfam Id: PF08606 Pfam Desc: Prp19/Pso4-like
  misc_feature (1)..(477): NCBI GI: 46111649 Blast Desc: FG02706.1 [Gibberella zeae PH-1]
  misc_feature (10)..(477): NCBI GI: 261359260 Blast Desc: cell cycle control protein cwf8 [Verticillium albo-atrum VaMs.102]
  misc_feature (5)..(477): NCBI GI: 116191333 Blast Desc: CHGG_05384 [Chaetomium globosum CBS 148.51] gi|88181297|gb|EAQ88765.1| CHGG_05384 [Chaetomium globosum CBS 148.51]
  misc_feature (1)..(476): NCBI GI: 164424115 Blast Desc: NCU11357 [Neurospora crassa OR74A] gi|157070380|gb|EDO65042.1| NCU11357 [Neurospora crassa OR74A]
  misc_feature (1)..(478): NCBI GI: 171681080 Blast Desc: protein product [Podospora anserina] gi|170940498|emb|CAP65726.1| protein product [Podospora anserina]
  misc_feature (1)..(474): NCBI GI: 39942072 Blast Desc: MGG_03116 [Magnaporthe grisea 70-15] gi|145015912|gb|EDK00402.1| MGG_03116 [Magnaporthe grisea 70-15]
  misc_feature (1)..(476): NCBI GI: 239612964 Blast Desc: cell cycle control protein [Ajellomyces dermatitidis ER-3]
  misc_feature (1)..(476): NCBI GI: 261189721 Blast Desc: cell cycle control protein [Ajellomyces dermatitidis SLH14081] gi|239591507|gb|EEQ74088.1| cell cycle control protein [Ajellomyces dermatitidis SLH14081]
  misc_feature (1)..(476): NCBI GI: 225561668 Blast Desc: cell cycle control protein [Ajellomyces capsulatus G186AR]
  misc_feature (1)..(476): NCBI GI: 240275272 Blast Desc: ubiquitin-protein ligase E4 [Ajellomyces capsulatus H143]
  misc_feature: Useful for introducing or modulating the production of volatile compounds
MLCAISGEPPQEPVVSKLSGSVFEKRLIEKYIEENGKDPISGEDLTLDDLLPVKTARVVRPRPPTLTSIPALLSTFQNEWDALALETYNLKEQLARTREELATALYQHDAAIRVIARLTRERDDARDALSRVSVSGSAPSNGDAMAVDAPALSAEFTAKVDDTQARLSKSRKKRPVPEGWTTPDLVATFAVEASTSLPVGQATTLTTESGYAAVGGLEGDVAIYSVEADNVERSLKVDEPVTDSIWDGPKVAFSTAKGSVKVFENGSEIASFTDHAGPATGLALHPSHEILASIGSDKSFVFYDLVNLQKATQVYTNAALTACAFHPDGHLFAAGTSAGDIKLFMTNTGEEAAAFSLGAPVQAIAFSENGFWFAATAKGQTTVTIFDLRKQGDAAQAKVLDIGNAVQSLAWDYSQQFLATAGPAGVTVQQYSKSSKSWSEPLRAAVNNAVDVQWGPNAQKLLVVNNEGVISVLGAKES

SEQ ID NO: 2694 - DNA, 1894 bp, Muscodor strobelii
  misc_feature: SGI EST ID NO. CUFF.6737.0
  misc_feature: Variant of the nucleotide sequence at SEQ ID NO 2692
gtccagggctgtactatgggccaatcacatctcaattcccaacgcgaccgcgaaaggctggaacttcaagatttggtggtttcggtgactctgtacctaggcaccacagccttctcgacacgtcaaatgcgcctgagttgtcgccaacctccgacttactctattcaccatgctgtgcgcaatctctggtgaacctccgcaggagcccgtcgtctccaagctttcgggatccgtcttcgagaagcgattgattgagaagtacatcgaagaaaacggcaaagaccccatctcaggcgaagacctcacactcgacgacctactccccgtcaagaccgcccgtgtcgtccgtccccgaccacccactctcacctccatccccgccctcctttccaccttccagaacgaatgggacgccctcgccctcgagacctacaatctcaaggaacagctcgcccgcacacgcgaagagctggcaacggcattatatcagcacgatgctgccattcgcgtgatcgcaaggctgactagagagcgtgatgatgctcgcgacgctctatctagagtttccgtctcaggaagcgcacccagcaatggcgatgctatggccgttgatgcgccggcactatctgccgagttcaccgccaaggtcgacgacacgcaagcaagattatctaaaagcagaaagaagcgacctgtgcctgagggctggaccacaccagatcttgtcgctaccttcgccgttgaagcttctacttcccttcccgtcggccaggcaacgaccctcacaaccgaatcggggtatgccgcagtgggtgggctggaaggagatgtggccatctactcagtcgaagccgataatgtggagcgctccctgaaggtagacgagcccgtgacagactcgatatgggatgggcccaaggtggccttctcgactgccaaaggctccgtcaaggtattcgagaatggcagcgagattgcctccttcacagaccatgctgggccagccactggcctggctctgcatcccagccatgaaattctggcctcgattggatccgacaagagctttgtcttttacgatttggtcaatctacagaaggccactcaagtctacactaatgctgctctgaccgcttgtgctttccacccggatggtcaccttttcgcggcgggaaccagcgccggcgacatcaagcttttcatgaccaacacgggcgaggaggcggctgctttctcgctcggcgcaccagttcaagctatcgcattctccgagaacgggttttggttcgccgccacggccaagggacagactactgtcacgattttcgatctgcggaagcaaggcgatgcggcacaggccaaggtgctggacattggcaacgcggtgcaaagtctggcatgggactactcgcaacaattcctggctacagctggccctgcgggagtgacggtacagcaatacagcaagagctccaagtcgtggtctgagccgctgcgagctgcggtcaacaatgcggtagatgtgcaatggggcccgaatgcccagaaacttctggtagtcaacaatgagggtgtcatcagcgttctgggagccaaggagtcctagatacggcattgtggagtacgcactgcaggttctcctcttcacaatattacctgccacatgatcaagagggcaatgggcatgcaaatatgggatcaaaaaagactggtacagagaattgttgtatagtaagatgtgaatgatacctgagcgagataggtttcgtggcaaatagccacgtgtctcactcatcaatatgagccattactcagtcttcctccttttgcttgccctgctctacgaaatctgggcacaactagtggtgatatacctcataatttgaaccagcag

SEQ ID NO: 2695 - DNA, 1782 bp, Muscodor strobelii
  misc_feature: SGI cDNA ID NO. 560538
  misc_feature: Reduced expression when VOC is produced
  misc_feature: Encodes the peptide sequence at SEQ ID NO 2696
atggcagaaacactgcggaatttcattatggccgagatttctgttgctgactctgactcctctggatatctctctggctcttcggactggcctgaaagctctgtaaacaacttcgacgacagcgaccttgacgactccgaccttcacggcagcgacctcgacggtgtcctgagcgagaacgacttttccagcattgactcccgagaagtgtcggacgctgagcacgaggacatcggacacaaccgtatagaagacttagatctgactgacgagagcgacgaagaagacgacgacgacgacgacgacgatctcgacctggacgacctatctgacgagcagttggcgtacctcgacgctcttggtgatgaagactttgacatggacgacggttttggaggagtaaacattggttacgacgacgaggaagccttgttcgtagacgactggatggactacagcgacggggaagaccactttgttgataatctcaacgacgacctccaccaccgcgtgcttcaccacaacgccttccaccgcgccttacaagaactgaaccgcgatttggataacgagatggacgacgtcaatcagggtaggtgggatcctctgtttgattccccgccgcccgtaggtcctatgaaccaaggtcaaggcggacaggctggacgcgaccgtcagaggcagcaacgagacgagctggtacaggtcgaggttgcagggcagggaagagcaggtgctggccagagaagaccagcccctgccgttatcgatctgacgggcgacgacgacgaagaggtagggcagcaccggcaaactgcggcgcagagagcttcggccaacccccgcaggcgtcggtcacaacagcaaaatgccccgcggttgaatagaagcgatgcgaactacgtcggagaccaagctgtcattatcatttcagattcagaagacgaggccgagctcccaccccgccgcggtcgcaacgaccacaacataaataacaacaacaggaatctccatcgacacattcacctccatcatcaccatccttatcatccagttcgcggtgctagaaaccccgccagacctcccccagccatggcagatcacattcccaataacctcaacggtactttgacacgactgatgcagcggcttccgttctttcaggctgtgcacaacaatcctgcacctcccccggctgccaaccgacacattcccgaagatgagctgatgattactggtgagcgtaatctgggactgcctcgccctgtccccgtgaacatagataatgcactgccgggtttcgttattggtggtctcaactacatggccgttccttttcaggatcctcttcacttcccacctgctgcgcccgagccgcgggctagagccccgaagccacagcatgtaccccctaaacctgccagagaaggcttcacccgcgacactggcgaagacatggtcgccgtctgcccaagctgtgagcaggaacttgcctacgaccccgacgccgaccacagcgtcgacactccgacaaagtctggcagacccaagaagaaccagcgcgagcatcacttctgggctgtcaaggcgtgtggacacgtcttctgcaagaagtgtttcgacaaccgcggcaaacgcgctggcgccaaggctcatggcaagaaccaagtcatcaccgctttccgtccacatcccgacagtaacaaaaagactctctgtgccgtcgaggattgcgagagcgatgttaccgcgaagacggcttgggttggaatcttcatgtaa

SEQ ID NO: 2696 - protein, 593 aa, Muscodor strobelii
  misc_feature: SGI Peptide ID NO. 560538
  misc_feature (471)..(593): NCBI GI: 85109729 Blast Desc: NCU05697 [Neurospora crassa OR74A] gi|28924709|gb|EAA33823.1| [Neurospora crassa OR74A]
  misc_feature (464)..(593): NCBI GI: 145608444 Blast Desc: MGG_06634 [Magnaporthe grisea 70-15] gi|145015919|gb|EDK00409.1| MGG_06634 [Magnaporthe grisea 70-15]
  misc_feature (222)..(593): NCBI GI: 261359259 Blast Desc: [Verticillium albo-atrum VaMs.102]
  misc_feature (434)..(593): NCBI GI: 256726100 Blast Desc: NECHADRAFT_42977 [Nectria haematococca mpVI 77-13-4]
  misc_feature (465)..(593): NCBI GI: 156059106 Blast Desc: SS1G_03565 [Sclerotinia sclerotiorum 1980] gi|154701352|gb|EDO01091.1| SS1G_03565 [Sclerotinia sclerotiorum 1980]
  misc_feature (465)..(593): NCBI GI: 154304266 Blast Desc: BC1G_08403 [Botryotinia fuckeliana B05.10] gi|150854205|gb|EDN29397.1| BC1G_08403 [Botryotinia fuckeliana B05.10]
  misc_feature (474)..(593): NCBI GI: 46111647 Blast Desc: FG02705.1 [Gibberella zeae PH-1]
  misc_feature (463)..(534): NCBI GI: 171681078 Blast Desc: protein product [Podospora anserina] gi|170940497|emb|CAP65725.1| protein product [Podospora anserina]
  misc_feature (474)..(591): NCBI GI: 116191335 Blast Desc: CHGG_05385 [Chaetomium globosum CBS 148.51] gi|88181298|gb|EAQ88766.1| CHGG_05385 [Chaetomium globosum CBS 148.51]
  misc_feature (450)..(593): NCBI GI: 121714034 Blast Desc: conserved [Aspergillus clavatus NRRL 1] gi|119402781|gb|EAW13202.1| conserved [Aspergillus clavatus NRRL 1]
  misc_feature: Useful for introducing or modulating the production of volatile compounds
MAETLRNFIMAEISVADSDSSGYLSGSSDWPESSVNNFDDSDLDDSDLHGSDLDGVLSENDFSSIDSREVSDAEHEDIGHNRIEDLDLTDESDEEDDDDDDDDLDLDDLSDEQLAYLDALGDEDFDMDDGFGGVNIGYDDEEALFVDDWMDYSDGEDHFVDNLNDDLHHRVLHHNAFHRALQELNRDLDNEMDDVNQGRWDPLFDSPPPVGPMNQGQGGQAGRDRQRQQRDELVQVEVAGQGRAGAGQRRPAPAVIDLTGDDDEEVGQHRQTAAQRASANPRRRRSQQQNAPRLNRSDANYVGDQAVIIISDSEDEAELPPRRGRNDHNINNNNRNLHRHIHLHHHHPYHPVRGARNPARPPPAMADHIPNNLNGTLTRLMQRLPFFQAVHNNPAPPPAANRHIPEDELMITGERNLGLPRPVPVNIDNALPGFVIGGLNYMAVPFQDPLHFPPAAPEPRARAPKPQHVPPKPAREGFTRDTGEDMVAVCPSCEQELAYDPDADHSVDTPTKSGRPKKNQREHHFWAVKACGHVFCKKCFDNRGKRAGAKAHGKNQVITAFRPHPDSNKKTLCAVEDCESDVTAKTAWVGIFM

SEQ ID NO: 2697 - DNA, 3203 bp, Muscodor strobelii
  misc_feature: SGI EST ID NO. CUFF.6759.0
  misc_feature: Variant of the nucleotide sequence at SEQ ID NO 2695
cagtgggcatggtctaaacaaaatttaagacgaatcttgcttgagtcagggcagtagggccaaagcatagcacaataatagggttagatactgaatctaccttagctagatagtcgtccgaaaaacataggactgaatggtgtccgtgactgcagcgtgcaaagtgtgtgaagtgtgtgaagtcgctacccacatggggcagcagtaatcttcagccgccacccgccaacaggagcagttctagatgattggtgacaggggcatggatgacaacacttgcatttgccgccatactcatggtctcgcggttactcagtcctctctaaatcgcccccccatcgcgtgaggctcgcattttgattttccttaacgtgcatcctgtatgaatgtatagcaggatatgtcttgattcaatcgccgcccccttcaccggattttcaccccattgtgactagattgcgctgcattgaatcgccgccgctcgtcagccgtctgaacccctgtcgacgtcgtctggttgcaggcttgaggcttgcagcgcccctccaaacatcatcaaactccacgcgccaaggtcggcgataggaaccgttttgccgacgtggtgttgtttgacctcaacacacacacgcagccttggacttgatgtcccgtcagccgcatcactgaccacagatcccctccgctgcctgtttgccgcacggcaagccgcaagcccagcttctgggcctcgacccttctctcgacagacactctcagtttgccgaccggtcggcatgggcatcttttgagcctgtttcaacctcgagagagagacctgagaggtctgcatcagaggtttgtttttctcgtttctctctcctcatccatctccttgctttttgccacaacacaacacacgacacccggcctggcctcggagtctttcccttgctaccccctatctccgccccgaccaacgacagccgtccacaacgccactgccgctgactagtgactgacttgtgtcatggcagaaacactgcggaatttcattatggccgagatttctgttgctgactctgactcctctggatatctctctggctcttcggactggcctgaaagctctgtaaacaacttcgacgacagcgaccttgacgactccgaccttcacggcagcgacctcgacggtgtcctgagcgagaacgacttttccagcattgactcccgagaagtgtcggacgctgagcacgaggacatcggacacaaccgtatagaagacttagatctgactgacgagagcgacgaagaagacgacgacgacgacgacgacgatctcgacctggacgacctatctgacgagcagttggcgtacctcgacgctcttggtgatgaagactttgacatggacgacggttttggaggagtaaacattggttacgacgacgaggaagccttgttcgtagacgactggatggactacagcgacggggaagaccactttgttgataatctcaacgacgacctccaccaccgcgtgcttcaccacaacgccttccaccgcgccttacaagaactgaaccgcgatttggataacgagatggacgacgtcaatcagggtaggtgggatcctctgtttgattccccgccgcccgtaggtcctatgaaccaaggtcaaggcggacaggctggacgcgaccgtcagaggcagcaacgagacgagctggtacaggtcgaggttgcagggcagggaagagcaggtgctggccagagaagaccagcccctgccgttatcgatctgacgggcgacgacgacgaagaggtagggcagcaccggcaaactgcggcgcagagagcttcggccaacccccgcaggcgtcggtcacaacagcaaaatgccccgcggttgaatagaagcgatgcgaactacgtcggagaccaagctgtcattatcatttcagattcagaagacgaggccgagctcccaccccgccgcggtcgcaacgaccacaacataaataacaacaacaggaatctccatcgacacattcacctccatcatcaccatccttatcatccagttcgcggtgctagaaaccccgccagacctcccccagccatggcagatcacattcccaataacctcaacggtactttgacacgactgatgcagcggcttccgttctttcaggctgtgcacaacaatcctgcacctcccccggctgccaaccgacacattcccgaagatgagctgatgattactggtgagcgtaatctgggactgcctcgccctgtccccgtgaacatagataatgcactgccgggtttcgttattggtggtctcaactacatggccgttccttttcaggatcctcttcacttcccacctgctgcgcccgagccgcgggctagagccccgaagccacagcatgtaccccctaaacctgccagagaaggcttcacccgcgacactggcgaagacatggtcgccgtctgcccaagctgtgagcaggaacttgcctacgaccccgacgccgaccacagcgtcgacactccgacaaagtctggcagacccaagaagaaccagcgcgagcatcacttctgggctgtcaaggcgtgtggacacgtcttctgcaagaagtgtttcgacaaccgcggcaaacgcgctggcgccaaggctcatggcaagaaccaagtcatcaccgctttccgtccacatcccgacagtaacaaaaagactctctgtgccgtcgaggattgcgagagcgatgttaccgcgaagacggcttgggttggaatcttcatgtaatccaatcaggtaattacaggcaaggaaagagggaaacagtaactcagggggacaatgaaggagaacggcgtttgtttcctcctcggttcattcgtaagcatagcacttttacttggctttcacgtagcatcatttgcatcgcaaggcgtcggaggcgtacggggaaaccagaactggaaccaggagaggcgtggaaattgccacttcacctggtctactgcacggcatttgacaagggagcttcttctttctgtgctgtctgctagcaagcaacctagtattcagagaaaggcccgtcggaagatacggatacggctcccctttctctatggttagcatctagcgtgagagaatcgctggagcgtgctagagcagtctaggacaacacaatgaaataaagatataattaatt

SEQ ID NO: 2698 - DNA, 909 bp, Muscodor strobelii
  misc_feature: SGI cDNA ID NO. 560539
  misc_feature: Encodes the peptide sequence at SEQ ID NO 2699
atggcgttgaacgaggttcgccctgcccatgtggtagacgagccagctgcagagcccgaaactatggagagagacctcaaggagaaaatccagaacgaggaaagatatgatgatctcaataacgaaaaggagctggagatagaggaagagctcgatctctacgtccctctgaagcttgacccaaatatcccatacgagcccaacccgttgacagctcgtgctgtcgttgtcggtatcttgttaggtgctttagtgaacgcgtcaaacttgtatctgggcctgaagacagggtttaccttcccggctagtatgttcggagcgatctttggctatggtattgtcaagttattatccaaaagctgcaagggcattccgattcttggaggtgattttggtccgcaagagaactcgattattcaggctgctgctactggcagtggaggcatcgccggcattttcgtagcggcgatccctgcgatgtaccgcctgcagacaatcgaaggaacgccccaacaaaacttcggcgccatcattaccatcactctgatttgctcgttcttcggactcttcttcgtgactccgcttcgaaaatttttcatcattcgagttggtcgtgagctgaggttgatctttccaacacccaccgccgtggccttgaccattcggtccatgcatgccggcgctgctggcgccagtgaagctattagcaagctgaaggctctcgctttggctttctctgccgctctcatccaacgtgttgcaagctattacgctattggcattttgtacgactggcatttcttcacatggatccatatctggagtaattacaccagttgggcgctgaatatcgaatcctggggctggtattttgagtggactcccgcattcatcggcagtggcatgtaa

SEQ ID NO: 2699 - protein, 302 aa, Muscodor strobelii
  misc_feature: SGI Peptide ID NO. 560539
  misc_feature (69)..(302): Pfam Id: PF03169 Pfam Desc: OPT oligopeptide transporter protein
  misc_feature (25)..(302): NCBI GI: 85090904 Blast Desc: NCU09874 [Neurospora crassa OR74A] gi|28920019|gb|EAA29405.1| conserved [Neurospora crassa OR74A]
  misc_feature (2)..(302): NCBI GI: 171694534 Blast Desc: protein product [Podospora anserina] gi|170947509|emb|CAP59670.1| protein product [Podospora anserina]
  misc_feature (53)..(302): NCBI GI: 39944474 Blast Desc: MGG_04248 [Magnaporthe grisea 70-15] gi|145014996|gb|EDJ99564.1| MGG_04248 [Magnaporthe grisea 70-15]
  misc_feature (15)..(302): NCBI GI: 261359883 Blast Desc: oligopeptide transporter [Verticillium albo-atrum VaMs.102]
  misc_feature (14)..(302): NCBI GI: 116182960 Blast Desc: CHGG_02108 [Chaetomium globosum CBS 148.51] gi|88186405|gb|EAQ93873.1| CHGG_02108 [Chaetomium globosum CBS 148.51]
  misc_feature (1)..(302): NCBI GI: 256722636 Blast Desc: [Nectria haematococca mpVI 77-13-4]
  misc_feature (19)..(302): NCBI GI: 46120458 Blast Desc: FG04876.1 [Gibberella zeae PH-1]
  misc_feature (44)..(302): NCBI GI: 256719827 Blast Desc: NECHADRAFT_98486 [Nectria haematococca mpVI 77-13-4]
  misc_feature (21)..(302): NCBI GI: 169772417 Blast Desc: [Aspergillus oryzae RIB40] gi|83768538|dbj|BAE58675.1| protein product [Aspergillus oryzae]
  misc_feature (13)..(302): NCBI GI: 225562439 Blast Desc: conserved [Ajellomyces capsulatus G186AR]
MALNEVRPAHVVDEPAAEPETMERDLKEKIQNEERYDDLNNEKELEIEEELDLYVPLKLDPNIPYEPNPLTARAVVVGILLGALVNASNLYLGLKTGFTFPASMFGAIFGYGIVKLLSKSCKGIPILGGDFGPQENSIIQAAATGSGGIAGIFVAAIPAMYRLQTIEGTPQQNFGAIITITLICSFFGLFFVTPLRKFFIIRVGRELRLIFPTPTAVALTIRSMHAGAAGASEAISKLKALALAFSAALIQRVASYYAIGILYDWHFFTWIHIWSNYTSWALNIESWGWYFEWTPAFIGSGM

SEQ ID NO: 2700 - DNA, 5061 bp, Muscodor strobelii
  misc_feature: SGI EST ID NO. CUFF.6740.0
  misc_feature: Variant of the nucleotide sequence at SEQ ID NO 2698
agcttctctgttgcaaatgcatattgcattatacggtagttttttcgctctagggcttttgttgtaaggcatgtggcctagctattttcagcatattgtgagtgcagctatgttaaacaaaaccagttccggtggcaagttctcttcaagtagatcgttggagaagtactaaaacactatactcaacatgagtatttctgtaccttgaaattttgaacacagctaaaacgtgacgctcaactggtggtaccttcatgacaaagttgtgccgaattctcgatgatagccccgatacgagtcttttaattgaaacaagttctgcgaaaccctcatggctcctggaaatagaatgtttgttcactgggacctcgtttgtaaatcactaaagagcccggaaggccgaaaacaaagcgccggtgatcatgttgtgccacagaggactgtcatatgatacttatacgaaaataacatgatctcagctcgattggaagcgcgcatctgtgacaacggtgagctattgatgacaactttactcttgaacccattagatgcaaaacgatgcgagcgatagattgtctaactcgtattattatgaaatacagcattttctttcaataggtctagcacaggcgaacccgatttcttcccttgcatggacttatcttcagactctcgtggggcatttgctatgttgacacatcatgtctgcgataggattctatctgtaagcggaagatccccgtgctttcctgttctcgccgtcagggcattaaatacggcgtgaggatagagaagaggatctggatcatgaagttgtcctaaaaggtgatatggagcgagccgagttctacagactcacaattaatctcacccgccgccattgattggtttaggtctacgatacggcgtgtatctacgaccatggagagcagagatagcgaagacagtttaatcacttgatcgtttgtaggattcagacttttcgcctaacgccgaacgtcagcgaaggcgagcttacctcgcgtaatggttattgtatgattgatatcactttcgtcttgttgtcgagtggcacaacatgaagcacaccgtctttacatggtgccattttccaaactctttgggacagctggacatatgaatttttccaacccgcgccgtaacggataagaactcgctcgcagtagtacatatgatagcacctttaaaactcaaaatcttacccgacccaattgtattgagtccttcgtatggaaaagtcgggcggtactgagtagacggtgaaggtacgcaaagcgaactgtcccgtagcgctatatgttaggtttgggaggaaggttggtaggctacatctactttctactggcagatcttcatagctgagggaatgcgggctcgtttgcctcggtggggagaccacgcgaggctcatgtgtaagtacgctgggaggccctggttgtgcaacctggggcgcaagtgaacattcgatggcgatttcctttctggacatcgggtactgcacgaacatcagaccgcaacatccggaaagctcccaattcgtgggctttctgttgaagcatgtaacctaccggcccgatgcaaggtaatagcgccaattttgaaagataactggcatatcagattggtttccaagtaaggcatcgagcacgtgaacgagataagttgtttgcttctcagctcacaatgcatcatggacattgtgccgtagtttgatattcccatggagaatagagaacataggattgaacaggggtcctttcgacctggggtctgggcgcaacttcggagcttgtgaaccgtttatggtgttgaaaccgctgcgctatgccattaaaaggcactttccacgtgccaagcaagccgagcaagagtccatttaagactcgactatcggaatctgccacaaatatcatgttgaagtatctgtcattaagttcgataccaatgtagtaggctcgagccttgccatgccggattggcaatggggtttccaaagcatgttatgcaactactggtgacagaatgtggaacatcttgactggaagtgaaggtgatgaaacgaatgaccatcaatcatcgtattaaattcgataattacgggttgattatcgggtttcagctgcgcgggaggcgaataaagtaggtctcgggatcttgtgccggtgaactgcttctcaacgctgccgttgcttctaggcgacttgtagatgcgaggcgtatgaaatgccccgctctgtgccgtcgcctttcgtagtggagcttttgtgagcattgggtgtagaacggttcaaactaaaacgttcgcggatttgtgccgttgtctattcggcgctacactttcaaaagtgtaaattgctgcaacagttcgtatacgccaaattgacgttctttcggatttgaacaaacatactcagtagggtttccaattaggatcttctttggatgcgtcccatgccaggctggagaactggcactgcaaaatcttcagcaatctatcctcgcgtcatagatgttgcacgtggacagaagcgtatcgacgactaccaatgcttgaccccatgccatcttttgtggctctaatccccgcaccatgggtgccgcaccaccccatttccctgtagactgtaaagatattctagaataagacgcttaatctgaaggctgcagataggctatctccttcacgagcgagctgagacgcatgggtgttggcgctggcccaatgattgtgtctcgcttgggttacttgcttccgtctggaggtttgttgcagacggatagtggctaggaggtagcaaacgagagaaatccttatcatctccctctcgtccaaggtatacacatgtgtgtcaatgccaagtttaccattctctcgttgctcggagaccgaaattcagcattccggtggtcaatggtttagaagagccgggttccgttaagaaatccatcatttgcgtgttattcggtggtgacaattgttgcagagatcattcgcgcattgtgatccttttccaagagtcgctaaagtcgcgaaaggaaagtcgagataagaagaagaattggctggcttggcattgaatggaccaagggacctggtggggaatcacgctagatagaagtccttaaagtcatgaaaatagcaccacaatggccatgggagtctagtaccacgttcgagactatgggcagaaagacataagctcctttgtgccattgcgggggtcaccagtcgcaagacactttgcgttaactagtagcataacatcgaccatgttaagtcccgtagctttggtaggccagtggatctcaatagtcggcgcatcaatgtggcatgtcttgactcgatttggaaagtgacaagaaattgccagttgctcgaattttggtcatctgcggaaacatgacctagatgggttttgtggctggacggacggcggttcccaattgcttgcgatgcgataggatccaacgacagtccaaacaagccagcgcctctggcatgaatcgccaccttcacaagcgaggcttggatagatcgacaacggaataggagcccccttgtgaaaggtatgtatcaagatcgaagagtgctgctcggaattcccggtttttaggctctctaaattagtacgagatcttcagttgatgaaaacgttgtaggccagattaaaatccacctctcgtactgcccgccatgtacatccagccagctcttcggatatgtcagatccctgtcagggttgtatcacttatcgtgatatccccggcgtggaggtggacagccaaacaacttggacatgggtaaaggtgccaagcagtttttatggtttcgaggcttctggtctctggccatgaggtggggtatcaaatggtaccgatatcttgtcctggatgaagtgcgaaccgcggcaacgtaccatgctcgagatgtggctagatgggcttgtctctgagacaagtatgcccgtgccgtccattgatatgaatagccagcctgcccagccttctgattaatctccctctcgctcttttccctcttgtgtcaacatactcctttgcctcattctacctcctggccattgcaggagcttggctttgaatacacatccgcagcaatggcgttgaacgaggttcgccctgcccatgtggtagacgagccagctgcagagcccgaaactatggagagagacctcaaggagaaaatccagaacgaggaaagatatgatgatctcaataacgaaaaggagctggagatagaggaagagctcgatctctacgtccctctgaagcttgacccaaatatcccatacgagcccaacccgttgacagctcgtgctgtcgttgtcggtatcttgttaggtgctttagtgaacgcgtcaaacttgtatctgggcctgaagacagggtttaccttcccggctagtatgttcggagcgatctttggctatggtattgtcaagttattatccaaaagctgcaagggcattccgattcttggaggtgattttggtccgcaagagaactcgattattcaggctgctgctactggcagtggaggcatcgccggcattttcgtagcggcgatccctgcgatgtaccgcctgcagacaatcgaaggaacgccccaacaaaacttcggcgccatcattaccatcactctgatttgctcgttcttcggactcttcttcgtgactccgcttcgaaaatttttcatcattcgagttggtcgtgagctgaggttgatctttccaacacccaccgccgtggccttgaccattcggtccatgcatgccggcgctgctggcgccagtgaagctattagcaagctgaaggctctcgctttggctttctctgccgctctcatccaacgtgttgcaagctattacgctattggcattttgtacgactggcatttcttcacatggatccatatctggagtaattacaccagttgggcgctgaatatcgaatcctggggctggtattttgagtggactcccgcattcatcggcagtggcatggtacgtgtagaaagagccc

SEQ ID NO: 2701 - DNA, 1326 bp, Muscodor strobelii
  misc_feature: SGI cDNA ID NO. 560540
  misc_feature: Encodes the peptide sequence at SEQ ID NO 2702
atgaactctgccatcagtctcttcggcggcgctgtcctcgcctgggccatcatcggcccggtccttgttcactacggagaatgcattggtctccgggtcgtagaggacgaccctcattggcatgactactacactttcgcctcgctcaagaacattggcacgcagacaccttctccacgttattggctgctgtggcctggtgttttgatcatggtggctacatcgctcgctgagcttttcgtccaatataaggtccttatgcatgctggtcaatcggtttggcgtgcttcgtgcggtggcctcaatgccttgaccgtcaggttcaagggcaaaccctcgccatatctggagcgtcaggccaatatggactttggtaacacagacttggtgcaagactccgcgaagcctgaagaccaggtcccgatgtggcagtggatgctgggcctcgtcgcgagtattgttgtcgccatcatcatcttcgaataccaatggggtgtgaaccctgggttgaccattcttgcctgcctgcttggtttccttttctccttcttggctatccagatcggagctgtcaccgaccagacgccgttgactgccgcctccaaggccagtcagcttgttttcggtgctgctactgccaaccacggatacactatggcacatgcgcagaagatcaaccttgtggccggtggtctggcctcaggagccgctgacgtaggtatgtccctgacttcggatttccgaacaggtttcctcctgggtactccaccagtcaagcaatggtacgcacagtcgatgggccaactcattagtgtgttcctggcgcctggtctgttcgtactcttcaccacggcctatccttgcattctcacaggcgatgacccgtgtcctttcggagttcctagcgttgcagcctgggcagctgtagcccaagccgtgacaggagccggttctattccgtactcatctggcatcttctccattgtcatggcaattatcgtcgtcgcgcaggtcatcgttcgccatttctacttggttggagagcgtgagtgggttaggaattatctgccaaactggggtgccatcgcactgtcattcgtcttgccaagccctgttttcacgacggcatcactgttcggcgcactggttgcgtttgcgtggcggaagtggaagctctcgtcgtgggacctctacggatacgctgttgccgcggggttcatcgctggcgagggtttgggtggtgtgattggtgctgttctccagatcgctggcgtctcgggagatatcctgggtaccaacattggatgccctgccctctcgtgctga

SEQ ID NO: 2702 - protein, 441 aa, Muscodor strobelii
  misc_feature: SGI Peptide ID NO. 560540
  misc_feature (1)..(421): Pfam Id: PF03169 Pfam Desc: OPT oligopeptide transporter protein
  misc_feature (135)..(421): Pfam Id: PF03169 Pfam Desc: OPT oligopeptide transporter protein
  misc_feature (1)..(441): NCBI GI: 116182960 Blast Desc: CHGG_02108 [Chaetomium globosum CBS 148.51] gi|88186405|gb|EAQ93873.1| CHGG_02108 [Chaetomium globosum CBS 148.51]
  misc_feature (1)..(441): NCBI GI: 261359883 Blast Desc: oligopeptide transporter [Verticillium albo-atrum VaMs.102]
  misc_feature (1)..(441): NCBI GI: 171694534 Blast Desc: protein product [Podospora anserina] gi|170947509|emb|CAP59670.1| protein product [Podospora anserina]
  misc_feature (1)..(441): NCBI GI: 39944474 Blast Desc: MGG_04248 [Magnaporthe grisea 70-15] gi|145014996|gb|EDJ99564.1| MGG_04248 [Magnaporthe grisea 70-15]
  misc_feature (1)..(405): NCBI GI: 85090904 Blast Desc: NCU09874 [Neurospora crassa OR74A] gi|28920019|gb|EAA29405.1| conserved [Neurospora crassa OR74A]
  misc_feature (1)..(437): NCBI GI: 256722636 Blast Desc: [Nectria haematococca mpVI 77-13-4]
  misc_feature (1)..(437): NCBI GI: 46120458 Blast Desc: FG04876.1 [Gibberella zeae PH-1]
  misc_feature (2)..(396): NCBI GI: 256719827 Blast Desc: NECHADRAFT_98486 [Nectria haematococca mpVI 77-13-4]
  misc_feature (1)..(441): NCBI GI: 154279250 Blast Desc: [Ajellomyces capsulatus NAm1] gi|150412381|gb|EDN07768.1| [Ajellomyces capsulatus NAm1]
  misc_feature (1)..(441): NCBI GI: 225562439 Blast Desc: conserved [Ajellomyces capsulatus G186AR]
MNSAISLFGGAVLAWAIIGPVLVHYGECIGLRVVEDDPHWHDYYTFASLKNIGTQTPSPRYWLLWPGVLIMVATSLAELFVQYKVLMHAGQSVWRASCGGLNALTVRFKGKPSPYLERQANMDFGNTDLVQDSAKPEDQVPMWQWMLGLVASIVVAIIIFEYQWGVNPGLTILACLLGFLFSFLAIQIGAVTDQTPLTAASKASQLVFGAATANHGYTMAHAQKINLVAGGLASGAADVGMSLTSDFRTGFLLGTPPVKQWYAQSMGQLISVFLAPGLFVLFTTAYPCILTGDDPCPFGVPSVAAWAAVAQAVTGAGSIPYSSGIFSIVMAIIVVAQVIVRHFYLVGEREWVRNYLPNWGAIALSFVLPSPVFTTASLFGALVAFAWRKWKLSSWDLYGYAVAAGFIAGEGLGGVIGAVLQIAGVSGDILGTNIGCPALSC

SEQ ID NO: 2703 - DNA, 4932 bp, Muscodor strobelii
  misc_feature: SGI EST ID NO. CUFF.6743.0
  misc_feature: Variant of the nucleotide sequence at SEQ ID NO 2701
ggccaccaggctaatcggcatgaactctgccatcagtctcttcggcggcgctgtcctcgcctgggccatcatcggcccggtccttgttcactacggagaatgcattggtctccgggtcgtagaggacgaccctcattggcatgactactacactttcgcctcgctcaagaacattggcacgcagacaccttctccacgttattggctgctgtggcctggtgttttgatcatggtggctacatcgctcgctgagcttttcgtccaatataaggtccttatgcatgctggtcaatcggtttggcgtgcttcgtgcggtggcctcaatgccttgaccgtcaggttcaagggcaaaccctcgccatatctggagcgtcaggccaatatggactttggtaacacagacttggtgcaagactccgcgaagcctgaagaccaggtcccgatgtggcagtggatgctgggcctcgtcgcgagtattgttgtcgccatcatcatcttcgaataccaatggggtgtgaaccctgggttgaccattcttgcctgcctgcttggtttccttttctccttcttggctatccagatcggagctgtcaccgaccagacgccgttgactgccgcctccaaggccagtcagcttgttttcggtgctgctactgccaaccacggatacactatggcacatgcgcagaagatcaaccttgtggccggtggtctggcctcaggagccgctgacgtaggtatgtccctgacttcggatttccgaacaggtttcctcctgggtactccaccagtcaagcaatggtacgcacagtcgatgggccaactcattagtgtgttcctggcgcctggtctgttcgtactcttcaccacggcctatccttgcattctcacaggcgatgacccgtgtcctttcggagttcctagcgttgcagcctgggcagctgtagcccaagccgtgacaggagccggttctattccgtactcatctggcatcttctccattgtcatggcaattatcgtcgtcgcgcaggtcatcgttcgccatttctacttggttggagagcgtgagtgggttaggaattatctgccaaactggggtgccatcgcactgtcattcgtcttgccaagccctgttttcacgacggcatcactgttcggcgcactggttgcgtttgcgtggcggaagtggaagctctcgtcgtgggacctctacggatacgctgttgccgcggggttcatcgctggcgagggtttgggtggtgtgattggtgctgttctccagatcgctggcgtctcgggagatatcctgggtaccaacattggatgccctgccctctcgtgctgaggtgtaggcgagaggcaaggcaaaatgaaagagtaatgtagacatctctataccatatataccctatgataatcttgaaatggatggcttgccgacaggcagctcattgaatacgtaattcatggacaatactgtatcgaagtgccccgtgcaatatgcgatagttgtaacaatttccggcttgagaaaggcagcatgagttttgttcgactatccacaccaagacgcctccaaaatagaaaatgtccggaaaatagagtcgctagttcaagacggaaaagcatcgtatcttccggcttcgtatgcttaaattacccgcatgttccggtgtaaagtgatgtgtgtgatagtcaaacctctggggcgtatcgtggtgctaatgatatgtggagggtgaaggatggtaggtcggtgcttggtcagcgttgatgtccagaagactgttgatgtttatagtagttagcaactccgatctttatgacaccggctgctctaatactgatcaattccgatatttggcagagatattgagcacacaatctcaattccgacgtgaagcggccgcatgtgaggcttagggaaccagaacgcagtgtaaggaatattgcctattcgggagggaggttacacctctgaggtagatacagtgtgtcgtacagtgcgatataatgagcactgctcaacagctaaacagggatccccaccataagctgcattgtgaagatgtctccccactattcgcgtcaacgcggtctcccgtgtaacttggctggatgtcgcctgaagtgaagcattggcacgtgcttctgcgcctgttcgaacttcaagttttgcttcttttctttttccccctcgagccaaacagagggctcgcattggattcgccgtgaaaagagccatgcacataaatgcaagtacccgccgtcggggatagcactgatccgagagggcgggacgagcagaccggaccatgcctcccatccagaacactttctccgtcatccccgatgcgccatccgccatcaacggccatgctggctccggaggcccccagccccgcatgggaagaccccccatgaccaccaagcaagtgaaaaaggcatatcaaaaagcaaacaaagggcccaagctctccaaggctgaacagcgccgccaggagctattcgagcaggaccgcatccgcaaagagttcgagaaggagagaaaccaggcccgagccagggccgcccgtgacaagaaaaaagataaaaaggagcgcgagcgtgccgacaagaagaaaagggggttgcctctcgtcaacgtccggccttcacaggatactattgcttggttcgttcgcggcaagccgaagcaacaggcccaagatgaaggagacagtccgagtggcagcaaagatgacgaaggtgaaatcgacgagaaagaagacgatgaagacgatgagcagtgcgaagggtctattaattcagaggcacaatgctcggcaccactcagcaaaaaaccgagactcaacagcatggatagggaaagtatcccagcggtggatatggcacggaatagtgcatcgccattggaagatgacgaagcacttatggatgtttgcagaccatctactggcactcccatagcttcaaatgaactacccacggttcaggttcagccgattgaagataagctgcatccaacggcagcggccaataggacaaactccgtgacgccaaattctatacccgtgagcgcagttgatgatcaggaagggccccgcgacttcacacaccagcgcaaagtctcgaataaatctgagagtttctcgtccgtcgacttcgatgaacagagtatactagaagaattggaacgtgtggagtctgtacacgggaggcttcgaccaaaatcagaagaattacgaaaacctgaggatcaacgcaatgcaagtccttcacccgagctactgccgcgcagaacaccagaagaagttttatatctgtcgaaactcgaaaataagcacctttctagaaattctaacagcccagagtcatcaatgatgccaccaccggcacccagttcgcgatcttttcgccaccccaaaacgcctatggcaccacctgcaccaaggtttaggcaaagcaagtcaatatcgactgggcaacatacaaggcctcagtttgtcaaatccccattctcacacccaaagccggttcctgctccccttccgcgcaatgcagctgtatccaatcggcttagaaaagacagtttgccgtcaagcacgcaactattcatgatgaacaatcttgacgatttccttccaagtccatcccaagaaatgcgagagattttcgaagaaccaaaacgcccatgctctaataaacgggacaatcgtttttccacgcaacggaatagattgcctagagatcttgctattgcatctaaacagggaggcagatacatcaagccagacagactttcagagatatctcgtccgatacaaagctcaatggacaacattaagctaccaaaggccgcgggtattggcgctatgctaccgccaccctcgggtcactcatccgatttcgatacttcattcttgtctacacaggacgtgtttctgtcatctcaagatatgaaggatattgaggatgaaccgccgagtcctagaaaggcaccggtgacgataccctcagctcctatggtaaaagcatcgaaagaagccaagccattatttagttcgagcagccgggaaatcaactacaagtacgcatcggagcgaagtaagactgccgcatgggagggtccgagggctcaacgacagaggcggagagagttgagtgagattcaagctttagaagatcaacgactgaaggaacttcttgcagagacacatgaggactcccagcagccaaacttcatcggtgcaagtatcaccagcgagtcatcacttcgccacatcccggctcgggacaaccagtctgtcaacaaatcttctaatgacggaaagcaaagctcgattctgtgttcaccgccaatggcgaaaccatccctttcaggcaatccctataaagcgaatactacacaaaaacaaagcgcgcagagccaaactggcagcggacagccccgaaggccctctaaaccgaagagctcattcgaggaaatgtgtgaggcaattggaaatcccaagccacggaagcaagcacaacaacaaaagtccgtcaatctgcgacatctttcaagtgacatggcaagtgggaatagcagcgacaaggaaaatagtcaccatacgagcagtggtaaaaatacgggatctaaacaagagcaaattggtgagccactgttcatcccagggacacaggagacagactacgacgacgaggagtggaatgataatgaattacgtgatgtactgcattttatggattgattacacttgcccatgggagaaacggtgttggcatttgcattggcatggtgcatggatatcggggtgcatataacaatagacctgaacagcggcgcattgaacaactgggtagagatacacttacttgagaaggagagccgtgtagagaatatcgcgataatgcgatctccgccttcgg

SEQ ID NO: 2704 - DNA, 1092 bp, Muscodor strobelii
  misc_feature: SGI cDNA ID NO. 560541
  misc_feature: Encodes the peptide sequence at SEQ ID NO 2705
atgcctcccatccagaacactttctccgtcatccccgatgcgccatccgccatcaacggccatgctggctccggaggcccccagccccgcatgggaagaccccccatgaccaccaagcaagtgaaaaaggcatatcaaaaagcaaacaaagggcccaagctctccaaggctgaacagcgccgccaggagctattcgagcaggaccgcatccgcaaagagttcgagaaggagagaaaccaggcccgagccagggccgcccgtgacaagaaaaaagataaaaaggagcgcgagcgtgccgacaagaagaaaagggggttgcctctcgtcaacgtccggccttcacaggatactattgcttggttcgttcgcggcaagccgaagcaacaggcccaagatgaaggagacagtccgagtggcagcaaagatgacgaaggtgaaatcgacgagaaagaagacgatgaagacgatgagcagtgcgaagggtctattaattcagaggcacaatgctcggcaccactcagcaaaaaaccgagactcaacagcatggatagggaaagtatcccagcggtggatatggcacggaatagtgcatcgccattggaagatgacgaagcacttatggatgtttgcagaccatctactggcactcccatagcttcaaatgaactacccacggttcaggttcagccgattgaagataagctgcatccaacggcagcggccaataggacaaactccgtgacgccaaattctatacccgtgagcgcagttgatgatcaggaagggccccgcgacttcacacaccagcgcaaagtctcgaataaatctgagagtttctcgtccgtcgacttcgatgaacagagtatactagaagaattggaacgtgtggagtctgtacacgggaggcttcgaccaaaatcagaagaattacgaaaacctgaggatcaacgcaatgcaagtccttcacccgagctactgccgcgcagaacaccagaagaacccagagtcatcaatgatgccaccaccggcacccagttcgcgatcttttcgccaccccaaaacgcctatggcaccacctgcaccaaggtttag

SEQ ID NO: 2705 - protein, 363 aa, Muscodor strobelii
  misc_feature: SGI Peptide ID NO. 560541
  misc_feature (1)..(149): NCBI GI: 145608438 Blast Desc: MGG_12779 [Magnaporthe grisea 70-15] gi|145015916|gb|EDK00406.1| MGG_12779 [Magnaporthe grisea 70-15]
  misc_feature (3)..(180): NCBI GI: 85089803 Blast Desc: NCU10002 [Neurospora crassa OR74A] gi|28919441|gb|EAA28881.1| [Neurospora crassa OR74A]
  misc_feature (5)..(157): NCBI GI: 46111645 Blast Desc: FG02704.1 [Gibberella zeae PH-1]
  misc_feature (10)..(119): NCBI GI: 116191339 Blast Desc: CHGG_05387 [Chaetomium globosum CBS 148.51] gi|88181300|gb|EAQ88768.1| CHGG_05387 [Chaetomium globosum CBS 148.51]
  misc_feature (5)..(124): NCBI GI: 256725689 Blast Desc: NECHADRAFT_94417 [Nectria haematococca mpVI 77-13-4]
  misc_feature (1)..(124): NCBI GI: 171681072 Blast Desc: protein product [Podospora anserina] gi|170940494|emb|CAP65722.1| protein product [Podospora anserina]
  misc_feature (1)..(188): NCBI GI: 154311977 Blast Desc: [Botryotinia fuckeliana B05.10] gi|150850672|gb|EDN25865.1| [Botryotinia fuckeliana B05.10]
  misc_feature (5)..(123): NCBI GI: 261359258 Blast Desc: [Verticillium albo-atrum VaMs.102]
  misc_feature (29)..(144): NCBI GI: 156060407 Blast Desc: [Sclerotinia sclerotiorum 1980] gi|154699750|gb|EDN99488.1| [Sclerotinia sclerotiorum 1980]
MPPIQNTFSVIPDAPSAINGHAGSGGPQPRMGRPPMTTKQVKKAYQKANKGPKLSKAEQRRQELFEQDRIRKEFEKERNQARARAARDKKKDKKERERADKKKRGLPLVNVRPSQDTIAWFVRGKPKQQAQDEGDSPSGSKDDEGEIDEKEDDEDDEQCEGSINSEAQCSAPLSKKPRLNSMDRESIPAVDMARNSASPLEDDEALMDVCRPSTGTPIASNELPTVQVQPIEDKLHPTAAANRTNSVTPNSIPVSAVDDQEGPRDFTHQRKVSNKSESFSSVDFDEQSILEELERVESVHGRLRPKSEELRKPEDQRNASPSPELLPRRTPEEPRVINDATTGTQFAIFSPPQNAYGTTCTKV

SEQ ID NO: 2706 - DNA, 921 bp, Muscodor strobelii
  misc_feature: SGI cDNA ID NO. 560542
  misc_feature: Encodes the peptide sequence at SEQ ID NO 2707
atggacaacattaagctaccaaaggccgcgggtattggcgctatgctaccgccaccctcgggtcactcatccgatttcgatacttcattcttgtctacacaggacgtgtttctgtcatctcaagatatgaaggatattgaggatgaaccgccgagtcctagaaaggcaccggtgacgataccctcagctcctatggtaaaagcatcgaaagaagccaagccattatttagttcgagcagccgggaaatcaactacaagtacgcatcggagcgaagtaagactgccgcatgggagggtccgagggctcaacgacagaggcggagagagttgagtgagattcaagctttagaagatcaacgactgaaggaacttcttgcagagacacatgaggactcccagcagccaaacttcatcggtgcaagtatcaccagcgagtcatcacttcgccacatcccggctcgggacaaccagtctgtcaacaaatcttctaatgacggaaagcaaagctcgattctgtgttcaccgccaatggcgaaaccatccctttcaggcaatccctataaagcgaatactacacaaaaacaaagcgcgcagagccaaactggcagcggacagccccgaaggccctctaaaccgaagagctcattcgaggaaatgtgtgaggcaattggaaatcccaagccacggaagcaagcacaacaacaaaagtccgtcaatctgcgacatctttcaagtgacatggcaagtgggaatagcagcgacaaggaaaatagtcaccatacgagcagtggtaaaaatacgggatctaaacaagagcaaattggtgagccactgttcatcccagggacacaggagacagactacgacgacgaggagtggaatgataatgaattacgtgatgtactgcattttatggattga

SEQ ID NO: 2707 - protein, 306 aa, Muscodor strobelii
  misc_feature: SGI Peptide ID NO. 560542
MDNIKLPKAAGIGAMLPPPSGHSSDFDTSFLSTQDVFLSSQDMKDIEDEPPSPRKAPVTIPSAPMVKASKEAKPLFSSSSREINYKYASERSKTAAWEGPRAQRQRRRELSEIQALEDQRLKELLAETHEDSQQPNFIGASITSESSLRHIPARDNQSVNKSSNDGKQSSILCSPPMAKPSLSGNPYKANTTQKQSAQSQTGSGQPRRPSKPKSSFEEMCEAIGNPKPRKQAQQQKSVNLRHLSSDMASGNSSDKENSHHTSSGKNTGSKQEQIGEPLFIPGTQETDYDDEEWNDNELRDVLHFMD

SEQ ID NO: 2708 - DNA, 4932 bp, Muscodor strobelii; identical to SEQ ID NO: 2703
  misc_feature: SGI EST ID NO. CUFF.6743.0
  misc_feature: Variant of the nucleotide sequence at SEQ ID NO 2706

SEQ ID NO: 2709 - DNA, 2499 bp, Muscodor strobelii
  misc_feature: SGI cDNA ID NO. 560543
  misc_feature: Reduced expression when VOC is produced
  misc_feature: Encodes the peptide sequence at SEQ ID NO 2710
atgtctaccgtcaataaacccacagacgtaaagcagaaggaagccgatgtgaaccgcaagcttcaaatctatggcatcatcaatgcattccagttgggcaaagtcccatcgaatgatcaaattgatgtcgccctgaacagtttcctcgcgtcaaaggcgctgtccagcccttctcccaaattgtcagctgagggtcgcgagttggtcgccgatgtacgtgaagtcgtaaaacatgccaagcatcttctcctgtccaagaacgaaggaaacttgcttcaggatttcatttggcaaactcagcaattcgaccccaaggctgtcggcactcccaacgctcctctaagccaagataccgctaagcaacatggtgaccaagctcttgaggggctgaggacgctgggtactctccttattaccaacggtcaattccgaaagttgctcagcgacgctagtcttttgttgcgtgacatggccggtgatgccgccaccaacgccgccaccaaagtcaaaccttctgatgagaagttggcgcagatcgatcagcctgctgacgataacacctggcacgatgcccctgatctttccaaagagaatatcaagtctcagtggcaaagtgtcaccaagaaagcccctaccgaagacgcgaaagatgccgcttccactactgccaacgctgctcagcaaccaggtggtggtgttgatactcaggctgccgtatctactgcacgtgatcaagtgacagagaagacaagggccaacgtcccagaggaggaccgagagtctgctaagcagaccgctgctgcgtaccgcgcccgcgtaaacgaatatctgaaaaagaagatgccacaggagcgtcgtgagcagactatttggcgattgaagaagatggtgctggagtgccagcaacatcccgactaccagcaggccatttcaacgcttcttgaccttgctgagcaatacggttctcatggtaagaacttgacggccggcggcgcagatactgttaagcaaggcagatctgcccttaacaaagctgaggctgacctcaagactctcattgagcgtttcgccaacggcacctccagcgacgatctgtgggactccatcaacaccatctacaaggatgccgatcaagaccctgaacttcgtgactggttcaagtctgttgacacttacatccgaaagtgcctccagcagcaaggatacatcatggatgaagcgtccaacgaggagtggaataggctctacgaccatggcaactatctcttacgcgagaagtatcgatctcatactgatcgtatcgtcgacgagatcaaattcctcgctgatcagttcgaccaagatccccaaaacaaggcgtttggccttgccgttcagaagctgttcaaggatctcggaaatgatgagaacggaaagccaaccttcaagccacatctcctcaaggatttgagcgagatcatccttcctgcaacttttgagaagattgcgtacattcctatccctcgtatcgaatactccgatcctcagatcgatgcagtgattgagaaccttgttctggaaagcgacaacttcatgcccaacgtacttgagcttgctagcgaccactacttccgctggggtcgtaagaagattgccagcaagaacaagaacgctattgatctcaaggttgctggtgtacagatggatctccgtgacgttagcttttacgtcaagcgcaagcaaggcttcccctctattaccgaccagggtgttgccaacatcttcctccccggtgatggattctccttccgtatgaagctgtcaaccgcagacgagaaggacaagcaacatttcttcaagattgacaaggtcgacgttgacatcaaatctctcaaaatcaagttggtcaagtctaaccacaaagtcttgtttggtctcttcaagcctatcatgatgaaggttctgagccctgtcattcagaaggttgccgagaagcaaattaaggaccaatttactcagtttgaccagattctgtacttgatcaagaaggaggctgaccgagctctccaagaggctcggaatgatcctgagaacgttcccaacatctaccagcgctacgtcaacgctgcccagaagcagatcatgcaaggcaagcagaaggccgacgaggttgctgccaagctcgaggacaagaaagtcaaccttgctgtcactaaggaagagagcatcttccccaacattcacttacctggtggcatcagctccaaggctaccgaatacaaggagcttgctcgcaagggcgaagcttgggagagccctgtcttctccatcgggtcttcagccaagagcacagatattcccatcgcatcagaggttgttcgcaaacctcatgccaccaatgggtctgctaccaacggctctacccttcatggttctgctctcaatggaagctacaccaatgggaaggtcgccaacggcaacaatattcagaccaccaatgtcaacactttgagaatttag

SEQ ID NO: 2710 - protein, 832 aa, Muscodor strobelii
  misc_feature: SGI Peptide ID NO. 560543
  misc_feature (2)..(821): NCBI GI: 85109339 Blast Desc: NCU06265 [Neurospora crassa OR74A] gi|28924509|gb|EAA33633.1| conserved [Neurospora crassa OR74A]
  misc_feature (3)..(828): NCBI GI: 116207606 Blast Desc: CHGG_03096 [Chaetomium globosum CBS 148.51] gi|88183693|gb|EAQ91161.1| CHGG_03096 [Chaetomium globosum CBS 148.51]
  misc_feature (47)..(811): NCBI GI: 171686122 Blast Desc: protein product [Podospora anserina] gi|170943022|emb|CAP68675.1| protein product [Podospora anserina]
  misc_feature (2)..(828): NCBI GI: 256726166 Blast Desc: [Nectria haematococca mpVI 77-13-4]
  misc_feature (1)..(827): NCBI GI: 46111407 Blast Desc: FG02585.1 [Gibberella zeae PH-1]
  misc_feature (1)..(826): NCBI GI: 39939980 Blast Desc: MGG_05250 [Magnaporthe grisea 70-15] gi|145010470|gb|EDJ95126.1| MGG_05250 [Magnaporthe grisea 70-15]
  misc_feature (2)..(795): NCBI GI: 189199070 Blast Desc: conserved [Pyrenophora tritici-repentis Pt-1C-BFP] gi|187982971|gb|EDU48459.1| conserved [Pyrenophora tritici-repentis Pt-1C-BFP]
  misc_feature (4)..(795): NCBI GI: 169613647 Blast Desc: SNOG_09955 [Phaeosphaeria nodorum SN15] gi|160707202|gb|EAT82290.2| SNOG_09955 [Phaeosphaeria nodorum SN15]
  misc_feature (4)..(820): NCBI GI: 238504060 Blast Desc: conserved [Aspergillus flavus NRRL3357] gi|220690733|gb|EED47082.1| conserved [Aspergillus flavus NRRL3357]
  misc_feature (3)..(792): NCBI GI: 119500048 Blast Desc: NFIA_103720 [Neosartorya fischeri NRRL 181] gi|119414946|gb|EAW24884.1| conserved [Neosartorya fischeri NRRL 181]
  misc_feature: Useful for introducing or modulating the production of volatile compounds
MSTVNKPTDVKQKEADVNRKLQIYGIINAFQLGKVPSNDQIDVALNSFLASKALSSPSPKLSAEGRELVADVREVVKHAKHLLLSKNEGNLLQDFIWQTQQFDPKAVGTPNAPLSQDTAKQHGDQALEGLRTLGTLLITNGQFRKLLSDASLLLRDMAGDAATNAATKVKPSDEKLAQIDQPADDNTWHDAPDLSKENIKSQWQSVTKKAPTEDAKDAASTTANAAQQPGGGVDTQAAVSTARDQVTEKTRANVPEEDRESAKQTAAAYRARVNEYLKKKMPQERREQTIWRLKKMVLECQQHPDYQQAISTLLDLAEQYGSHGKNLTAGGADTVKQGRSALNKAEADLKTLIERFANGTSSDDLWDSINTIYKDADQDPELRDWFKSVDTYIRKCLQQQGYIMDEASNEEWNRLYDHGNYLLREKYRSHTDRIVDEIKFLADQFDQDPQNKAFGLAVQKLFKDLGNDENGKPTFKPHLLKDLSEIILPATFEKIAYIPIPRIEYSDPQIDAVIENLVLESDNFMPNVLELASDHYFRWGRKKIASKNKNAIDLKVAGVQMDLRDVSFYVKRKQGFPSITDQGVANIFLPGDGFSFRMKLSTADEKDKQHFFKIDKVDVDIKSLKIKLVKSNHKVLFGLFKPIMMKVLSPVIQKVAEKQIKDQFTQFDQILYLIKKEADRALQEARNDPENVPNIYQRYVNAAQKQIMQGKQKADEVAAKLEDKKVNLAVTKEESIFPNIHLPGGISSKATEYKELARKGEAWESPVFSIGSSAKSTDIPIASEVVRKPHATNGSATNGSTLHGSALNGSYTNGKVANGNNIQTTNVNTLRI

SEQ ID NO: 2711 - DNA, 3248 bp, Muscodor strobelii
  misc_feature: SGI EST ID NO. CUFF.6763.1
  misc_feature: Variant of the nucleotide sequence at SEQ ID NO 2709
cgggctctctctcttttgcttttgtttcagttccagcgcagacacgtcctgaaaatatccattataccctatttcttattatacccaagtgtctgcttgtaaacaacatttgtgataccccataccccatatcccttgtaccgcaatctcaactaattcgccaacattaatactctggccactgcaattgagtatcaattgacttgtgaaatcggaaacaacctcaatctgccaaatttgcccacatccgcacactgattgaagagcaacgcaatcaatcatgtctaccgtcaataaacccacagacgtaaagcagaaggaagccgatgtgaaccgcaagcttcaaatctatggcatcatcaatgcattccagttgggcaaagtcccatcgaatgatcaaattgatgtcgccctgaacagtttcctcgcgtcaaaggcgctgtccagcccttctcccaaattgtcagctgagggtcgcgagttggtcgccgatgtacgtgaagtcgtaaaacatgccaagcatcttctcctgtccaagaacgaaggaaacttgcttcaggatttcatttggcaaactcagcaattcgaccccaaggctgtcggcactcccaacgctcctctaagccaagataccgctaagcaacatggtgaccaagctcttgaggggctgaggacgctgggtactctccttattaccaacggtcaattccgaaagttgctcagcgacgctagtcttttgttgcgtgacatggccggtgatgccgccaccaacgccgccaccaaagtcaaaccttctgatgagaagttggcgcagatcgatcagcctgctgacgataacacctggcacgatgcccctgatctttccaaagagaatatcaagtctcagtggcaaagtgtcaccaagaaagcccctaccgaagacgcgaaagatgccgcttccactactgccaacgctgctcagcaaccaggtggtggtgttgatactcaggctgccgtatctactgcacgtgatcaagtgacagagaagacaagggccaacgtcccagaggaggaccgagagtctgctaagcagaccgctgctgcgtaccgcgcccgcgtaaacgaatatctgaaaaagaagatgccacaggagcgtcgtgagcagactatttggcgattgaagaagatggtgctggagtgccagcaacatcccgactaccagcaggccatttcaacgcttcttgaccttgctgagcaatacggttctcatggtaagaacttgacggccggcggcgcagatactgttaagcaaggcagatctgcccttaacaaagctgaggctgacctcaagactctcattgagcgtttcgccaacggcacctccagcgacgatctgtgggactccatcaacaccatctacaaggatgccgatcaagaccctgaacttcgtgactggttcaagtctgttgacacttacatccgaaagtgcctccagcagcaaggatacatcatggatgaagcgtccaacgaggagtggaataggctctacgaccatggcaactatctcttacgcgagaagtatcgatctcatactgatcgtatcgtcgacgagatcaaattcctcgctgatcagttcgaccaagatccccaaaacaaggcgtttggccttgccgttcagaagctgttcaaggatctcggaaatgatgagaacggaaagccaaccttcaagccacatctcctcaaggatttgagcgagatcatccttcctgcaacttttgagaagattgcgtacattcctatccctcgtatcgaatactccgatcctcagatcgatgcagtgattgagaaccttgttctggaaagcgacaacttcatgcccaacgtacttgagcttgctagcgaccactacttccgctggggtcgtaagaagattgccagcaagaacaagaacgctattgatctcaaggttgctggtgtacagatggatctccgtgacgttagcttttacgtcaagcgcaagcaaggcttcccctctattaccgaccagggtgttgccaacatcttcctccccggtgatggattctccttccgtatgaagctgtcaaccgcagacgagaaggacaagcaacatttcttcaagattgacaaggtcgacgttgacatcaaatctctcaaaatcaagttggtcaagtctaaccacaaagtcttgtttggtctcttcaagcctatcatgatgaaggttctgagccctgtcattcagaaggttgccgagaagcaaattaaggaccaatttactcagtttgaccagattctgtacttgatcaagaaggaggctgaccgagctctccaagaggctcggaatgatcctgagaacgttcccaacatctaccagcgctacgtcaacgctgcccagaagcagatcatgcaaggcaagcagaaggccgacgaggttgctgccaagctcgaggacaagaaagtcaaccttgctgtcactaaggaagagagcatcttccccaacattcacttacctggtggcatcagctccaaggctaccgaatacaaggagcttgctcgcaagggcgaagcttgggagagccctgtcttctccatcgggtcttcagccaagagcacagatattcccatcgcatcagaggttgttcgcaaacctcatgccaccaatgggtctgctaccaacggctctacccttcatggttctgctctcaatggaagctacaccaatgggaaggtcgccaacggcaacaatattcagaccaccaatgtcaacactttgagaatttaggggatgataagaggtcctttgtgccgcctgccaacaaatggggagaattggatgcgacgagacgatatatgatacccctggattgtcagaaggtggaaaattgcgcagaataagtacgcgtcaatagttgttcacgttactacttttccttttgttgataccagttttgtgatggacgagtaatgggagatacataataatgaagtaatcagtttttcaaagcttttattttcgcttgtgatgcctttcaactacgttatttcattcgagtgtgctcagaacgaaatgccaccactcaacgccagcacttgttgaacacggttaaggcaaaaacgtattattatatagtcccgataatttcagaccccattcaagactaggggcaagataagtgccagcatgtgctccgtcaagcagacatactgtataggcacacaccgagagagagattttctcggggtggaataac

SEQ ID NO: 2712 - DNA, 777 bp, Muscodor strobelii
  misc_feature: SGI cDNA ID NO. 560544
  misc_feature: Elevated expression when VOC is produced
  misc_feature: Encodes the peptide sequence at SEQ ID NO 2713
atggccgatgcacttccactcaaaggcaagctcgccatagtcaccggtggctcaagaggcatcggtgagggcatcgccctcgaactcgctcagcggggtgcaaatgtcgtaataacctacgtatccgaaaagagcgcccaacgggtagaagaaacatgcacaaatataacttctctgccacataagcccctagcgcactcagtgcgcgtagacctaagcaccattgatggaccgacaattctaaaaaaccacatcttagcatttggcaacggaagagtccaagtcaacatcctcgtcaacaacgcaggactcgaaagagtaaaacccctaggtgccatctccgtagaagactacgaagcagtctacaacctcaacgttcggggtcccatgctactaacccaagccctcctccccttcttcgccccagaaagccggatcatcaacatcgggtctgttggcggcagagctgcgttcaagaatctgagtctttactgctcatcgaaagcagctttggaaggacttacgaggtgctgggcagctgagctgggacataacgggacgacggtgaattgtgtgaatcctgggcctgttcagagcgagttgcttgacaatattcccaaggaaattgtggaaatgcaaaaagctacgacaccgttacagaataggctcggcacagttgatgaaattgcgaaagtcgttgcgggcctcgcaggcccagatggtgcttggataacgggacaggtcattagtgccagtggaggttgggccttatattga

SEQ ID NO: 2713 - protein, 258 aa, Muscodor strobelii
  misc_feature: SGI Peptide ID NO. 560544
  misc_feature (10)..(183): Pfam Id: PF00106 Pfam Desc: short chain dehydrogenase
  misc_feature (95)..(183): Pfam Id: PF00106 Pfam Desc: short chain dehydrogenase
  misc_feature (10)..(38): Pfam Id: PF00106 Pfam Desc: short chain dehydrogenase
  misc_feature (3)..(258): NCBI GI: 39975139 Blast Desc: MGG_00284 [Magnaporthe grisea 70-15] gi|145611582|ref|XP_001411358.1| MGG_11612 [Magnaporthe grisea 70-15] gi|145018840|gb|EDK03119.1| MGG_11612 [Magnaporthe grisea
  misc_feature (3)..(258): NCBI GI: 115401466 Blast Desc: conserved [Aspergillus terreus NIH2624] gi|114190262|gb|EAU31962.1| conserved [Aspergillus terreus NIH2624]
  misc_feature (5)..(258): NCBI GI: 145237246 Blast Desc: An07g01830 [Aspergillus niger] gi|134075737|emb|CAK48085.1| protein product [Aspergillus niger]
  misc_feature (1)..(258): NCBI GI: 169778699 Blast Desc: [Aspergillus oryzae RIB40] gi|238499255|ref|XP_002380862.1| short-chain type dehydrogenase, [Aspergillus flavus NRRL3357] gi|83772553|dbj|BAE62681.1| protein
  misc_feature (7)..(258): NCBI GI: 46115192 Blast Desc: FG03438.1 [Gibberella zeae PH-1]
  misc_feature (3)..(258): NCBI GI: 242768519 Blast Desc: 3-ketoacyl-acyl carrier protein reductase [Talaromyces stipitatus ATCC 10500] gi|218724782|gb|EED24199.1| 3-ketoacyl-acyl carrier protein reductase [Talaromyces stipitatus
  misc_feature (5)..(258): NCBI GI: 212542621 Blast Desc: 3-ketoacyl-acyl carrier protein reductase [Penicillium marneffei ATCC 18224] gi|210066372|gb|EEA20465.1| 3-ketoacyl-acyl carrier protein reductase [Penicillium marneffei ATCC 18224]
  misc_feature (7)..(258): NCBI GI: 256721783 Blast Desc: NECHADRAFT_53240 [Nectria haematococca mpVI 77-13-4]
  misc_feature (5)..(254): NCBI GI: 238487146 Blast Desc: 3-ketoacyl-acyl carrier protein reductase [Aspergillus flavus NRRL3357] gi|220699690|gb|EED56029.1| 3-ketoacyl-acyl carrier protein reductase [Aspergillus flavus NRRL3357]
  misc_feature (5)..(254): NCBI GI: 169770443 Blast Desc: [Aspergillus oryzae RIB40] gi|83767550|dbj|BAE57689.1| protein product [Aspergillus oryzae]
  misc_feature (7)..(257): SWISSPROT Homolog: EC 1.1.1.100 3-oxoacyl-[acyl-carrier-protein] reductase
  misc_feature: Useful for introducing or modulating the production of volatile compounds
MADALPLKGKLAIVTGGSRGIGEGIALELAQRGANVVITYVSEKSAQRVEETCTNITSLPHKPLAHSVRVDLSTIDGPTILKNHILAFGNGRVQVNILVNNAGLERVKPLGAISVEDYEAVYNLNVRGPMLLTQALLPFFAPESRIINIGSVGGRAAFKNLSLYCSSKAALEGLTRCWAAELGHNGTTVNCVNPGPVQSELLDNIPKEIVEMQKATTPLQNRLGTVDEIAKVVAGLAGPDGAWITGQVISASGGWALY

SEQ ID NO: 2714 - DNA, 2059 bp, Muscodor strobelii
  misc_feature: SGI EST ID NO. CUFF.6753.1
  misc_feature: Variant of the nucleotide sequence at SEQ ID NO 2712
accgttcggcgataacgtagtttatatcgacatatatgttctctcacttcttcacataaggatatattgaactcatcttaaacttcatcgtagaaccaatagtgctcttgacttcaaaactcatctgataccaatataaactcttcagaaaactcatcgcacgcatcagcacacgtctagttcacaattctcgtcgaatatggccgatgcacttccactcaaaggcaagctcgccatagtcaccggtggctcaagaggcatcggtgagggcatcgccctcgaactcgctcagcggggtgcaaatgtcgtaataacctacgtatccgaaaagagcgcccaacgggtagaagaaacatgcacaaatataacttctctgccacataagcccctagcgcactcagtgcgcgtagacctaagcaccattgatggaccgacaattctaaaaaaccacatcttagcatttggcaacggaagagtccaagtcaacatcctcgtcaacaacgcaggactcgaaagagtaaaacccctaggtgccatctccgtagaagactacgaagcagtctacaacctcaacgttcggggtcccatgctactaacccaagccctcctccccttcttcgccccagaaagccggatcatcaacatcgggtctgttggcggcagagctgcgttcaagaatctgagtctttactgctcatcgaaagcagctttggaaggacttacgaggtgctgggcagctgagctgggacataacgggacgacggtgaattgtgtgaatcctgggcctgttcagagcgagttgcttgacaatattcccaaggaaattgtggaaatgcaaaaagctacgacaccgttacagaataggctcggcacagttgatgaaattgcgaaagtcgttgcgggcctcgcaggcccagatggtgcttggataacgggacaggtcattagtgccagtggaggttgggccttatattgattagtaagaaaaggtgcttggaacttggataatcgagacagcgcaaagccagctaggagatgatatgcgtttcatatactgttgcctgtgctccataaatctgaggtaatacatgatctgtacccatggaacaagctccatcttcaggttctggttttctttcaagaaatgtagtcatgatcagatctcagcgagaatgtcccatctcctcatgagcaagcgatagaccatccacttagcttttgcgaaactaggcgcaagatatacaccagctctacggacacattgaagtgtctcgttgttcagcacacgggcaaagatcgattgccatacggatcttttcgatctgtctgacagttcctgtgtggttccgtctcccatatcgacctcattcagttcagcgacggcggcaagcgccacgccaataagaccatatggtccgcccgcagatgcactcgcttttagtgatacccaatagtgtaaaatggattcaaccaggccgcaattaaatcctaggagttggagcatctgtaggtagctgattcgttctcggaccatcactattgagatgccgcatcgcgatcctatggtcaagtcattgtgcgaataaggtggagggttatctttatttgtcgtattcagatacccatggcagacagagcgagaatctggcggattttgttttcggaaaacacgcaaaggatatgctggatatggttgttgtcgactagcttcaggagattcttgtgtagctcgacgagtcatgattgaaagacaacctcaagtttcaatggcacaagggcagtgttttgagcactcataggagactggtataggaaacacgaacaatatagggctaatagagctcaaataaataggttttagtttctcccgaagatactagagtcaatgaaagtcgcccgatgactgatcaggacgcaagtcagcacagtttggtccatcagcattgcgcctttatatgactgagtgaggcatgttgaagatgagcaagatgatccgggacaaagcaagtcagagacaatcttcgcaggactagtaatgtcgagaacacatctatcttcc

SEQ ID NO: 2715 - DNA, 2388 bp, Muscodor strobelii
  misc_feature: SGI cDNA ID NO. 560545
  misc_feature: Reduced expression when VOC is produced
  misc_feature: Encodes the peptide sequence at SEQ ID NO 2716
atggcgtccaagagaaaggccgaggatgatttcatctacactctatccgacaacgatgacattcccaacgcagaagaaactgctgcgctcagtccacccaagaagaagtcgaagaaatcaaagaaatcaaagaaggacgcccacactaacgacgatgtcgaagacggtatttggggtaagaaggaagaggacgacggtgcaatggactcagacttcgaattcgcagaggacggtaccagagatttccaggccgaagacttcgaaggttggggattcggatccacccacaaaggtttgaacgagaagaaggctgtcgatgtagatgaaattgtgaggaggcggagaggagacaagagaaaacctgctgcgcccgaacccgaagtcgaagttgaagccgaagacaccgacgacatcgaagcggatgatgttgatttggacgaccaggacgacgaagttctggctgaagatggctttggcatgggagctgcttcagatgacgagtcgggagcagaagttgatgaggaggaagaggattacgaagctgaaggcgacgatatgaacgatgacgacgacgacgaagacgcagccgcctctgacaatgactctgtcgccacacccactgagcaccccgacgatatgggtcattccgatgcttcagatgatgaagaagatcccggagaggccgccaagagagaggcattctttgcccccgaagacaaatcaaccgccaagctaactggaaagtcctcttttcagaacatgtcactctcgcggccgattctccgcggtctgaatgctgttggcttcgcaaaccccactcccatccaggctaaagctataccactcgccctcgaaggcaaggatcttgttggtggcgcagagacaggttctggaaagacggctgcattcgttgtgccaatccttgagcggctgctgtaccgtccgaacaagattcccacaagtcgcgttgtcattctagccccgacacgcgagctggcaatacagtgtcactcggttgccaccaagcttgccagtcataccgatatcaagttctgtttggctgtcggtggtcttagtctcaaagtgcaagaagctgaacttcgactgagacccgatgttatcattgctacgcctggacgtttcatcgatcacatgcgcaactcggctagcttcaacacggacactattgagatccttgttcttgacgaagccgatcgcatgctagaagacggattcgcagacgaattgaacgagatcttgacgaccctgccaaaatctcgccagactatgttgttctcagcgaccatgacatcatcagtcgatcggcttattcgcgccggcctgaacaaaccaatgcgcgtcatggtcaatgcccaaaagaagaccgttgacaagctcgagcaaaagttcatcaggttacggccgggtagagaggagaaacgaatgggctatctcgtccatatctgcaagactatgcataccgagcgagtgattattttcttccggcagaagaaggaggctcaccgagctcgtatcatctttgcccttttcaatctatcatgtgccgagttacatggcagcatgaaccaaagccagcgtattacaagcgtagaagccttccgcgacggaaaagtcaacttcctcctcgccaccgatctcgcatcgcgcggtctagacataaaaggcatcgacacagtaataaactacgaaggaccccaaagcctcgaaatttacgtccaccgcgtaggtcgtacggcgcgcgcaggtcggtcaggtgtcgccataacgctagccgccgagcccgaccgaaaagtcgtcaaagcagcagtgaaagcaggcaaatcccaaggcgccaagatctcctccctaatcatcgacgcggcagacgcagataaatggcaagacgaaatcgactccctatccgatgagatcgaagccgtggcgcgtgaggaaaaagaagaacgacaattagcgaatgcggagatgcagattaagaaaggagagaatatggtcatacacgaagacgagattaaatcccgtccgaaacggacttggttcgagacgcagaatgataaaaagaaagctaaggaagcggggagggcggaattaaatgggtttagagatgcactgaagaagaaaaatgatgggaagttgagtggcaaggatatgaagaagttggatgctagattgcaacggaaacaagatgagaaagggggtgagggacggatgtggaagaagggcgctgctgagagagcggggaagggagctgtgttgaattttaagaaggataaggggaaggggaagaaggggacgacggatgggggtgtgaggaaagctagtggaaaggttggtgcgaagggtgggagtgggaaggggaggaagaggtga

SEQ ID NO: 2716 - protein, 795 aa, Muscodor strobelii
  misc_feature: SGI Peptide ID NO. 560545
  misc_feature (273)..(443): Pfam Id: PF00270 Pfam Desc: DEAD/DEAH box helicase
  misc_feature (513)..(589): Pfam Id: PF00271 Pfam Desc: Helicase conserved C-terminal domain
  misc_feature (1)..(774): NCBI GI: 258563228 Blast Desc: UREG_07132 [Uncinocarpus reesii 1704] gi|237907866|gb|EEP82267.1| UREG_07132 [Uncinocarpus reesii 1704]
  misc_feature (2)..(785): NCBI GI: 116208202 Blast Desc: CHGG_03394 [Chaetomium globosum CBS 148.51] gi|88183991|gb|EAQ91459.1| CHGG_03394 [Chaetomium globosum CBS 148.51]
  misc_feature (1)..(755): NCBI GI: 240108548 Blast Desc: ATP-dependent RNA helicase DRS1, [Coccidioides posadasii C735 delta SOWgp]
  misc_feature (2)..(762): NCBI GI: 142982571 Blast Desc: ATP-dependent RNA helicase DRS1, [Coccidioides posadasii C735 delta SOWgp]
  misc_feature (70)..(755): NCBI GI: 119186507 Blast Desc: CIMG_03301 [Coccidioides immitis RS] gi|118595360|sp|Q1E2B2.1|DRS1_COCIM RecName: Full=ATP-dependent RNA helicase DRS1
  misc_feature (68)..(751): NCBI GI: 238484285 Blast Desc: ATP-dependent RNA helicase (Drs1), [Aspergillus flavus NRRL3357] gi|91206589|sp|Q2UQI6.2|DRS1_ASPOR RecName: Full=ATP-dependent RNA helicase drs1 gi|220701431|gb|EED57769.1|
  misc_feature (68)..(751): NCBI GI: 169767420 Blast Desc: [Aspergillus oryzae RIB40] gi|83766036|dbj|BAE56179.1| protein product [Aspergillus oryzae]
  misc_feature (8)..(773): NCBI GI: 119494918 Blast Desc: ATP-dependent RNA helicase (Drs1), [Neosartorya fischeri NRRL 181] gi|142982588|sp|A1D1R8.1|DRS1_NEOFI RecName: Full=ATP-dependent RNA helicase drs1 gi|119412420|gb|EAW22361.1|
  misc_feature (4)..(751): NCBI GI: 240274680 Blast Desc: ATP-dependent RNA helicase drs1 [Ajellomyces capsulatus H143]
  misc_feature (63)..(751): NCBI GI: 115492615 Blast Desc: ATEG_00849 [Aspergillus terreus NIH2624] gi|121742543|sp|Q0CZN5.1|DRS1_ASPTN RecName: Full=ATP-dependent RNA helicase drs1 gi|114197795|gb|EAU39495.1| ATEG_00849 terreus
  misc_feature: Useful for introducing or modulating the production of volatile compounds
MASKRKAEDDFIYTLSDNDDIPNAEETAALSPPKKKSKKSKKSKKDAHTNDDVEDGIWGKKEEDDGAMDSDFEFAEDGTRDFQAEDFEGWGFGSTHKGLNEKKAVDVDEIVRRRRGDKRKPAAPEPEVEVEAEDTDDIEADDVDLDDQDDEVLAEDGFGMGAASDDESGAEVDEEEEDYEAEGDDMNDDDDDEDAAASDNDSVATPTEHPDDMGHSDASDDEEDPGEAAKREAFFAPEDKSTAKLTGKSSFQNMSLSRPILRGLNAVGFANPTPIQAKAIPLALEGKDLVGGAETGSGKTAAFVVPILERLLYRPNKIPTSRVVILAPTRELAIQCHSVATKLASHTDIKFCLAVGGLSLKVQEAELRLRPDVIIATPGRFIDHMRNSASFNTDTIEILVLDEADRMLEDGFADELNEILTTLPKSRQTMLFSATMTSSVDRLIRAGLNKPMRVMVNAQKKTVDKLEQKFIRLRPGREEKRMGYLVHICKTMHTERVIIFFRQKKEAHRARIIFALFNLSCAELHGSMNQSQRITSVEAFRDGKVNFLLATDLASRGLDIKGIDTVINYEGPQSLEIYVHRVGRTARAGRSGVAITLAAEPDRKVVKAAVKAGKSQGAKISSLIIDAADADKWQDEIDSLSDEIEAVAREEKEERQLANAEMQIKKGENMVIHEDEIKSRPKRTWFETQNDKKKAKEAGRAELNGFRDALKKKNDGKLSGKDMKKLDARLQRKQDEKGGEGRMWKKGAAERAGKGAVLNFKKDKGKGKKGTTDGGVRKASGKVGAKGGSGKGRKR

SEQ ID NO: 2717 - DNA, 5974 bp, Muscodor strobelii
  misc_feature: SGI EST ID NO. CUFF.6808.0
  misc_feature: Variant of the nucleotide sequence at SEQ ID NO 2715
atgcgggacaaattccgcgatgcggggcatttaaagtttcaccgcccggcactaaaaaaataatttggagagaggacgctgttctatcaattggcctgagctgtcgcagctctgctctctggtgcattcacgtgcgcgtgctgaagagttgcgcaacaccacaaaccctgtagtctcttcaattgaacactcacccaatatggcgtccaagagaaaggccgaggatgatttcatctacactctatccgacaacgatgacattcccaacgcagaagaaactgctgcgctcagtccacccaagaagaagtcgaagaaatcaaagaaatcaaagaaggacgcccacactaacgacgatgtcgaagacggtatttggggtaagaaggaagaggacgacggtgcaatggactcagacttcgaattcgcagaggacggtaccagagatttccaggccgaagacttcgaaggttggggattcggatccacccacaaaggtttgaacgagaagaaggctgtcgatgtagatgaaattgtgaggaggcggagaggagacaagagaaaacctgctgcgcccgaacccgaagtcgaagttgaagccgaagacaccgacgacatcgaagcggatgatgttgatttggacgaccaggacgacgaagttctggctgaagatggctttggcatgggagctgcttcagatgacgagtcgggagcagaagttgatgaggaggaagaggattacgaagctgaaggcgacgatatgaacgatgacgacgacgacgaagacgcagccgcctctgacaatgactctgtcgccacacccactgagcaccccgacgatatgggtcattccgatgcttcagatgatgaagaagatcccggagaggccgccaagagagaggcattctttgcccccgaagacaaatcaaccgccaagctaactggaaagtcctcttttcagaacatgtcactctcgcggccgattctccgcggtctgaatgctgttggcttcgcaaaccccactcccatccaggctaaagctataccactcgccctcgaaggcaaggatcttgttggtggcgcagagacaggttctggaaagacggctgcattcgttgtgccaatccttgagcggctgctgtaccgtccgaacaagattcccacaagtcgcgttgtcattctagccccgacacgcgagctggcaatacagtgtcactcggttgccaccaagcttgccagtcataccgatatcaagttctgtttggctgtcggtggtcttagtctcaaagtgcaagaagctgaacttcgactgagacccgatgttatcattgctacgcctggacgtttcatcgatcacatgcgcaactcggctagcttcaacacggacactattgagatccttgttcttgacgaagccgatcgcatgctagaagacggattcgcagacgaattgaacgagatcttgacgaccctgccaaaatctcgccagactatgttgttctcagcgaccatgacatcatcagtcgatcggcttattcgcgccggcctgaacaaaccaatgcgcgtcatggtcaatgcccaaaagaagaccgttgacaagctcgagcaaaagttcatcaggttacggccgggtagagaggagaaacgaatgggctatctcgtccatatctgcaagactatgcataccgagcgagtgattattttcttccggcagaagaaggaggctcaccgagctcgtatcatctttgcccttttcaatctatcatgtgccgagttacatggcagcatgaaccaaagccagcgtattacaagcgtagaagccttccgcgacggaaaagtcaacttcctcctcgccaccgatctcgcatcgcgcggtctagacataaaaggcatcgacacagtaataaactacgaaggaccccaaagcctcgaaatttacgtccaccgcgtaggtcgtacggcgcgcgcaggtcggtcaggtgtcgccataacgctagccgccgagcccgaccgaaaagtcgtcaaagcagcagtgaaagcaggcaaatcccaaggcgccaagatctcctccctaatcatcgacgcggcagacgcagataaatggcaagacgaaatcgactccctatccgatgagatcgaagccgtggcgcgtgaggaaaaagaagaacgacaattagcgaatgcggagatgcagattaagaaaggagagaatatggtcatacacgaagacgagattaaatcccgtccgaaacggacttggttcgagacgcagaatgataaaaagaaagctaaggaagcggggagggcggaattaaatgggtttagagatgcactgaagaagaaaaatgatgggaagttgagtggcaaggatatgaagaagttggatgctagattgcaacggaaacaagatgagaaagggggtgagggacggatgtggaagaagggcgctgctgagagagcggggaagggagctgtgttgaattttaagaaggataaggggaaggggaagaaggggacgacggatgggggtgtgaggaaagctagtggaaaggttggtgcgaagggtgggagtgggaaggggaggaagaggtgaggtagatggaattgtctgagtactgtatgtaaatatcatgaactatctacatattgttatacatatgctcaaggaacattgacgaaaaccaaacagtgaaagtcaatgtaaataattgtttaatttatgagaagagcgtcaagagcgggcgcatttcgcacgcatttcgaggtaagaaataatacacagtaaatactctttttattcctcgtttcttctaaccctttcttttaatattctgcaatgaccaaaccaaaatttatataaaccataacgctattgctattgatagccccatttatgctcttcatctttaatatcaatatcatcacctgatacccatgcgctgcatctcctccctaacaatgcccacagcctccataatgacatcttcccccctccgccacgtgtagagtggtacaccctggcgccccagcgtatcctgtgcccgttccagtcttcttctccagagctctaatttcttgttgagcggtgcttcgccgggtgagtgcgcgttggtcgtcacggtgttgtttgtgttgcttgtggataggggttcgaagtcgacgtctaaatctggacctttgatacttgatggagttctacggcggcgcggtggaggcataggagctccgtttcgagatgggatggcgggcggtgtgtttgtgttcgaggttggctttgaagaagaggagggagacggggatggtgtttgttcggcagagctttggactcgtgataaagggtggagaggcagggatttctctgacgagtttggagttgaacggcgggctggaggagggggtggtgccaagggtttcttcacgcccccgtttggtgacggggtggtgacggtggaggtgctcttaagggctgatggcttcattggctttgggggagggtttctaccttgcgttggcgggctcagctcttcgatacccgacatggtgcgttgtattggagccggctcatcagacagatctatcagatctcccataactggaccttcgacctgggccgttgtcttactgcgcggcggtaaggtaggtcgaaggctcgagtcatctcgtgagttatcgcgggactttggaccaagttggttgttcctagtcttgggaagtttacgggttgcaccggcatcgaatgcggagtcgaaatagcctgcttgctccggtgtagtgacgtctcgaatgaagataccgacaatgcgctttgggtatgcaacagccaattccgtgtatacttccagatccgcctcgccactgtctccgacaaggaggaattttcgttcgggaaaatcgttcattatcttctctaaagtacccttcttacgctcagccactggttcgaatattccctggagcatgcccgtgtatcgctttaggtgcaatgagcctggcgggaggccggcgagtttgaaataggtggcaagaacaggataaagttgccatggactattggaacaatagtgtacccgtacaccaagattactgagttcgttgtaccactccttgacaccattgaccgtcaagtccttcagctcgcggacgaaggtatttcggaagatttctttggcgccaagggcaatgttggatcgtttgatggtgtcgtcaatgtcacttatcaagctgatgccgcggggctcgatgacctttacgggttcggtgcaagatatgtcttcgttgaccagcacgcggacatgggtaggtacgaaatctagggcagcgcgcgacgtaaagtgacccaggtcatcagttgtcacaatgcgggactgtgatttctcatcgttatagaagaatagggtaataggtgtctctataagaggagtcgtcaggaaaggaccaatccgggccatgagattggcatttgcaagggccaattcggcatcgctctgtgtggaagatccgaacgtaggtgccctcgccggcagcgtgggagaagccggtgcggtgctcggggtgcggcttgcgctagagccatgtctgcgtgtatcgccctcatcttcggagtcttgatctttgggtcgctcgctgtagccaccctgttgagcggccagttcctcctcgcgacccctgcgttcaatctcacgggcttcgcgggcgatgctttgctgttcccgctcgtcttcgtgctgattatatacactcaagccttcggcctgtggcgggcggggcactgggatcccactcaattgcctcgcaagaccaaggagcacccgattgcgcctcgtcagaggaccccgatggggattgtagagccaaccacgcacatccacatcgacgatggccttctcgtcctcgtggcgggcccattcctgtcgccaatattcctgctcgttcatgcccatgctcgatgtatgcgggggaccggcgggattggcgaactgcctcggcttctccttaacatgctgtttggcgtaggatgggaacaacaccatctgctcattccccttggtgacgatggcgacttctgggaacgaccccgggatggtgatcttggacacctcggagccctccatgtcgccaattcgggtctggttgtatgactccctgatctcgttggcggctacggcagctccgcggtagatgctgccggccatggcggcgagcttcttgcgcctagcacccctctcgcggccgctgtcggcgccatagttgccgctgccgacgctgccgacgccgtagccagacatggaggtcatcttgtcggcggcacgggctgcggacccatgccttcctctgcgcacgacaggccggccccagagcagccgccgcgcgtggtcgaggaggcgggattgttccttgcggcggcgctgacgctcgaggatgaagcggtagatgcgactctggaagctatgtttgtagtaggggatggtatcgaggtggaggccgatgagccgctctcggtagcgatctctgagtgagcgcgggaagagatattggaggagcgaacgtcgattaccggagtgggggcgggttggtatgaagcggcgaggaggagccagtttggcggaatatgttgtaggaggcagaataggtagcgagggcaggtgaattctacagtgaggcggatgctttacaggctgtgaaccggttacgagatgcaggagcagtgcagggaagcttaacaaggtcacgcgagtggtcgaagacaagatgacgagatcaccttcgcagctcactgtgatagcctgccaacatataggagaatctaggaggtatattagagcaattacctaggtaggtataggtaaactctatgccgattagacagacgtgttgagatcggtttcatagcaagaagatacctatctaaccggccgagtcgggatctgcctggtgcgaagtggtagcaactgagcaacttgaaaagtgaggacatttcatt

SEQ ID NO: 2718 - DNA, 744 bp, Muscodor strobelii
  misc_feature: SGI cDNA ID NO. 560546
  misc_feature: Encodes the peptide sequence at SEQ ID NO 2719
atgggagagtcacgacaagagctcgtatcttggctcaacagccttttgcaactcaacatcaccaaagtcgagcaatgcggaactggtgctgcactatgccaggtctacgacagcatcttcctcgacgtccccatgtcgcgcgtcaagttcaatgtcaatagcgagtatgcctacattcagaacttcaagatcctacagaactgcttcgcaaagcacagtgtcgacaagagcatccccgtcgaggccctcgccaaatgcaagatgcaggacaacctcgagttcttgcagtggaccaagcgattctgggaccaatactaccccggcggcgactacgatgctgtggcgcgccggaagggtaatgctcttccccccactggcaccggccctcgtgtcgccaactccgccgcctctgcccgcagaggtggcacaacacccaccaccggtcctcgtattggtgccagagccggtgctaccggcggagctgcctcggccgctcttctccaggagaataacacccttaaagagaccgtcgttggtctcgagcgggaacgcgacttctatttcagcaaactgcgcgacatagagctgttgatccagcaggctgtcgaggaagaccccgagatcgagaagcaggaggatggccttatcaagtctatccaggcgatcctctattcaaccgaagaagggttcgagatccccgccgagggcgagggagaaggtttggatgatcaggagacattctag

SEQ ID NO: 2719 - protein, 247 aa, Muscodor strobelii
  misc_feature: SGI Peptide ID NO. 560546
  misc_feature (3)..(103): Pfam Id: PF00307 Pfam Desc: Calponin homology (CH) domain
  misc_feature (179)..(233): Pfam Id: PF03271 Pfam Desc: EB1-like C-terminal motif
  misc_feature (1)..(247): NCBI GI: 46124499 Blast Desc: FG06627.1 [Gibberella zeae PH-1]
  misc_feature (1)..(247): NCBI GI: 145615185 Blast Desc: MGG_05427 [Magnaporthe grisea 70-15] gi|145022076|gb|EDK06096.1| MGG_05427 [Magnaporthe grisea 70-15]
  misc_feature (1)..(247): NCBI GI: 171685570 Blast Desc: protein product [Podospora anserina] gi|170942746|emb|CAP68399.1| protein product [Podospora anserina]
  misc_feature (1)..(247): NCBI GI: 67524809 Blast Desc: AN2862.2 [Aspergillus nidulans FGSC A4] gi|40744257|gb|EAA63433.1| AN2862.2 [Aspergillus nidulans FGSC A4] gi|259486202|tpe|CBF83854.1| TPA: EB1 homolog (Eurofung) FGSC
  misc_feature (1)..(245): NCBI GI: 156051514 Blast Desc: SS1G_07164 [Sclerotinia sclerotiorum 1980] gi|154704942|gb|EDO04681.1| SS1G_07164 [Sclerotinia sclerotiorum 1980]
  misc_feature (1)..(247): NCBI GI: 119187397 Blast Desc: CIMG_03746 [Coccidioides immitis RS] gi|240108212|gb|EER26386.1| EB1 microtubule-associated family protein [Coccidioides posadasii C735 delta SOWgp]
  misc_feature (6)..(247): NCBI GI: 164428973 Blast Desc: NCU00243 [Neurospora crassa OR74A] gi|157072359|gb|EAA28478.2| NCU00243 [Neurospora crassa OR74A]
  misc_feature (1)..(247): NCBI GI: 261354116 Blast Desc: microtubule-associated protein RP/EB family member 1 [Verticillium albo-atrum VaMs.102]
  misc_feature (4)..(247): NCBI GI: 256732852 Blast Desc: NECHADRAFT_100259 [Nectria haematococca mpVI 77-13-4]
  misc_feature (1)..(247): NCBI GI: 258564032 Blast Desc: conserved [Uncinocarpus reesii 1704] gi|237908268|gb|EEP82669.1| conserved [Uncinocarpus reesii 1704]
MGESRQELVSWLNSLLQLNITKVEQCGTGAALCQVYDSIFLDVPMSRVKFNVNSEYAYIQNFKILQNCFAKHSVDKSIPVEALAKCKMQDNLEFLQWTKRFWDQYYPGGDYDAVARRKGNALPPTGTGPRVANSAASARRGGTTPTTGPRIGARAGATGGAASAALLQENNTLKETVVGLERERDFYFSKLRDIELLIQQAVEEDPEIEKQEDGLIKSIQAILYSTEEGFEIPAEGEGEGLDDQETF

SEQ ID NO: 2720 - DNA, 1336 bp, Muscodor strobelii
  misc_feature: SGI EST ID NO. CUFF.7080.1
  misc_feature: Variant of the nucleotide sequence at SEQ ID NO 2718
tctttttcttctacatatctcttcgccttgtgttgttgtcaaccatttgacccatcatacacgctgcgcatcctctgctgctagctacatattcacaacactgcagcatcactcacttcttttcgttagcatttacgtcccgccacacccccagtccagatcgcaacgatgggagagtcacgacaagagctcgtatcttggctcaacagccttttgcaactcaacatcaccaaagtcgagcaatgcggaactggtgctgcactatgccaggtctacgacagcatcttcctcgacgtccccatgtcgcgcgtcaagttcaatgtcaatagcgagtatgcctacattcagaacttcaagatcctacagaactgcttcgcaaagcacagtgtcgacaagagcatccccgtcgaggccctcgccaaatgcaagatgcaggacaacctcgagttcttgcagtggaccaagcgattctgggaccaatactaccccggcggcgactacgatgctgtggcgcgccggaagggtaatgctcttccccccactggcaccggccctcgtgtcgccaactccgccgcctctgcccgcagaggtggcacaacacccaccaccggtcctcgtattggtgccagagccggtgctaccggcggagctgcctcggccgctcttctccaggagaataacacccttaaagagaccgtcgttggtctcgagcgggaacgcgacttctatttcagcaaactgcgcgacatagagctgttgatccagcaggctgtcgaggaagaccccgagatcgagaagcaggaggatggccttatcaagtctatccaggcgatcctctattcaaccgaagaagggttcgagatccccgccgagggcgagggagaaggtttggatgatcaggagacattctagacccccatgacacgatgaatgcagaacggaatacgaagtaatgaacagcatgggcggcaaggcaagccccaaatatgagaagtaatgcacatatggagagagcaagacgataccaaaaaggggcagggacacagcaatggcactgaagaggcatcctggattaccctggactgtttgtgttgaattagaggtgtagaggaagaccaaatactgaaaagggggcatgaaggggtaccaaggagcacccaccaagtcccagtcagtatcttctaacaagaattaggaaccaagaacaatgagtataatctcgaaagacaacaagagcaaggatgaatagtatccaacgcgtgctgcttttcttgagctgtgaccccttttccaagcaaatatctcctatcacatccgtacaagctggatgcatttc

SEQ ID NO: 2721 - DNA, 2328 bp, Muscodor strobelii
  misc_feature: SGI cDNA ID NO. 560547
  misc_feature: Encodes the peptide sequence at SEQ ID NO 2722
atggccacacctcgcaaaagaggacccgagagggactccaagagtctcttgcgcttcacttacagcaaaagggctcgagcaagattgggcgcaaacaaatcgtcgctcgtagagcctcgtggccagacaccagccaacactggaggaatctcagagcgccaatcgacaaacatcgcccagcatcatgaagatggtagtaaaagtcacgatcaagaaagtaatcaagtctcccggcctcagcgcagttctttacgccgcgagcttcttgagagtgcggccccacagggtagcaatactcctggaattcaatcgcccgaacctgcagcaggatcatcctcaacttcgcttggctcaacggcttcggttcaggccacgactggcggccactcacaggcagtccaagatggaaatgctgtcgatgagagggcggagggaccgcatggtgccgataatggttcttcggcgcaagttcaaccgactgcgacatattccgggccgcaacgcagttcgcttagaagagcccttcgagagagctcgagggcaactagtaacggcggcacacaaccgacgggcgcatcggacgactcaaattcgcgcgtgcttcgagccgaagagccaactattcagagctattcagaagccgaagccaaaagccaatcttcttctataaatagccgcaagcgtaaattcagcgctgaagaatgcggagatcatgccgatggtacaatcccactgcgacgatctgtccgtcgagctgctcacgaaagtcgatccgagtttgggcaaagcacgagagaagacaacgaagtggacgattatgcctttggagaccccgatataggtcgcgccagggatggccatagcaatggtggccaggaagatgatatggttattgacagcgaagatagcggatcgcctactgccgaccaatactatgatgactttgattatgagctaagatcatcacgtagatctacgcggcacttcactcgcggcgaaggggccggtcacccgcatgactatgccgaaacggcgagcctcgagattcacgatgataggggagaagagacgcctgttgatggccaaagcaacgagatacttaacctggagcaaatcgcaagtgttgaagcagctcaggctgtgtccatttctgcagatgagccgcaggtccttccagacacactacccacgacagacgccgtagatcccgagacaaccggtccaaatgatggccaaaatcagcagactgaagtgccgactgatgatgcttactgggttgccgacatccttcgcactctctcaatctacagagatgactttaacctcaattatgatcaagcaactaacaccccttctcctcctgatgagacagttgccacggagaaccatttaggtgaagatcacgagatgctagacgctgagcatagcgcatctgttaggataatgcgctccatggcgatctcaaacctagttcatccgcctactccctcaatctccacagacgagcctacgatcaattcagatacgtctttgagcgctcattcttatgatcacgagactatcaccactggcgatattgagagtcaagaggagccaggtcattcagagcatgatgcgaatgggaatcatgagctacaagacgccgataggataacgcgttctatgtcgatctcaaatatcgttcacgcgcctgctctcgagatctccacaggtgatggtcgacagcttgatatacttgattacggtggcaactcgactgccgaacgtgcaatccccaaattggtgccagccatcgattattaccgtgctttcgagactcctgcctacccgccgcccttgattcgatcagccgcatggtcgaaccgcacttctactgattcccaggcaagtagttctcagctttatgagcctggagataataagacagtttcgggaaccaaattgggtccgtcatctcgctcaaccctgtctgcttctgcttcgtctgttgctgcaagacccgagaagaaccccgagattgaggatggtgatctagctgccagatactgggctgagattgagaaactaggcacccccgaaacgaatgagaaggcggaggagaaggacggcaaaaccggcggggcggcaggatcgggatggtggcatatccgccagattgtcaatgaggtccctggactttacttggtggagtgggagggtacggatccgaggacgggtgttcattggccgggatcgtgggtcaaaatggaagacgtctcggaggccgctatcaaggagtgggagcagagaagagatattctgtttgcgggtagtgccgcggagttgtga

SEQ ID NO: 2722 - protein, 775 aa, Muscodor strobelii
  misc_feature: SGI Peptide ID NO. 560547
MATPRKRGPERDSKSLLRFTYSKRARARLGANKSSLVEPRGQTPANTGGISERQSTNIAQHHEDGSKSHDQESNQVSRPQRSSLRRELLESAAPQGSNTPGIQSPEPAAGSSSTSLGSTASVQATTGGHSQAVQDGNAVDERAEGPHGADNGSSAQVQPTATYSGPQRSSLRRALRESSRATSNGGTQPTGASDDSNSRVLRAEEPTIQSYSEAEAKSQSSSINSRKRKFSAEECGDHADGTIPLRRSVRRAAHESRSEFGQSTREDNEVDDYAFGDPDIGRARDGHSNGGQEDDMVIDSEDSGSPTADQYYDDFDYELRSSRRSTRHFTRGEGAGHPHDYAETASLEIHDDRGEETPVDGQSNEILNLEQIASVEAAQAVSISADEPQVLPDTLPTTDAVDPETTGPNDGQNQQTEVPTDDAYWVADILRTLSIYRDDFNLNYDQATNTPSPPDETVATENHLGEDHEMLDAEHSASVRIMRSMAISNLVHPPTPSISTDEPTINSDTSLSAHSYDHETITTGDIESQEEPGHSEHDANGNHELQDADRITRSMSISNIVHAPALEISTGDGRQLDILDYGGNSTAERAIPKLVPAIDYYRAFETPAYPPPLIRSAAWSNRTSTDSQASSSQLYEPGDNKTVSGTKLGPSSRSTLSASASSVAARPEKNPEIEDGDLAARYWAEIEKLGTPETNEKAEEKDGKTGGAAGSGWWHIRQIVNEVPGLYLVEWEGTDPRTGVHWPGSWVKMEDVSEAAIKEWEQRRDILFAGSAAEL

SEQ ID NO: 2723 - DNA, 790 bp, Muscodor strobelii
  misc_feature: SGI EST ID NO. CUFF.6779.0
  misc_feature: Variant of the nucleotide sequence at SEQ ID NO 2721
aaactaggcacccccgaaacgaatgagaaggcggaggagaaggacggcaaaaccggcggggcggcaggatcgggatggtggcatatccgccagattgtcaatgaggtccctggactttacttggtggagtgggagggtacggatccgaggacgggtgttcattggccgggatcgtgggtcaaaatggaagacgtctcggaggccgctatcaaggagtgggagcagagaagagatattctgtttgcgggtagtgccgcggagttgtgatcggtgggatgaggagagttggtgttgttgtttagatttgttgatttgtgggtatatatgagttgtttgattgtgggaaatagccggcgtgctggtgttggggagttgggaattagggaatttgggagatgtgccgcggtttataatggcctaaaaataaggtggccggaagtgccctaagataccaaccttagtttgacggacttgatgatagataattcgatgattttgtaaagtaaagagcgttttttgtttgtgtggtgtttgggtgagggtgtgtgatgaattatggctctacgcggactagcatcatggtaatcaggtccgagtgggtaaggacgagtgagtatatttggtgagagttctgacttgatgaggtggttgtgagaatggtctacttcgagaggctttgaccatggagttcacatttgtctgtaaaaagcttttgtgtgtatctcttggataaaatagatcattgttctttagatgagagttgtagaaatcttcactctcatattctgat

SEQ ID NO: 2724 - DNA, 2277 bp, Muscodor strobelii
  misc_feature: SGI cDNA ID NO. 560548
  misc_feature: Encodes the peptide sequence at SEQ ID NO 2725
atgttagcttccgcaatgggcgacgaaaatccaaatgtcaagtcagctcaatctctttcagattacggcgacgaacagatccaacgactcgcgcaagatagtaaacataacttcgatacacagagtttaccttcagtgcctgaagatatagaggggaacgaggccaatcagtatgtatacaacgatctcgaaacacttcagccgaaaacgtatcacgaagaggagagcgaggaaggttatgataacgcgtcggaggctaaagaatatccatcgccaacataccaccccgaaaagagggcggacgaagagaacaagattgatatcgaggacttcgcctctcctcatcatcagtcaaaacaaagcagcagatacttcgtcaggccgtcttcaaaggccaaaaacaaggccgtatcgccattcaaatacaacgaacacggccaagagagccctagcctcgagcccaatgtggtggacggtctgttgggaagccaacattcgagaaaaggcaaagaaaatcttcgcataaacaccaattttgaaaattttgtctctgatatccacgatgtacgagagattgagggcatcacgtctcaaaatctgcacttggagtacaacgaggaatattacgacgaagcataccaatcatctcctctccaaaataccgtttctcccatcgacgaccaagaagacgatgaatcatattctccttctcccacatatgctcgcaaaatacgagacccagtctctccagtcggcgatcaagagctcagcgacaacgaccgccaaacagacaatactccaatgcgagtttctcttgaaaatatcgaagccatcggcaactattgtgaaacaggcttccaccctgttcagttacacgacatcttttgcgaccgctacgaagtcgttcacaagataggtcatggagctttcgcaacaatctggctctgtctcgaccacaccacaaagaaatggcgagcacttaagattgcagcagcagaagaatccctagagtctcgaacagacataaaaatcaaccgtctccttacaggccaaggcattaaatcttcaacctgggaatcccaccacatagcgctaccacgagaacatttctggatcgaaggtccaaacggcaaacactgctgcatggtcctcccactcctcggacctcctatcaaatgccgcatgaaagccaatggaatgctaatgcggaaactcatgtgtcaagtcgcagacggcgtcaaattcctccataacaaaggaataacccacgcagacctgcacccaggaaacatactcctccgcctatcctccaccaccggcatctccaagaaagaaatgctcaccatcctcggcaagcccaaaaccgaagccctcagaaccgcaacaggcacccatccaggcccaagctaccccaaatacgtcgtcgagcccgccgacctctcactcctaggcgtgatagacgaagcaatgataatcgacttcggcgaatccttccccgtcacaaatccaccgcattacctcgggatccccatccaatacgcagcgcccgaagcccggttcgcgcactcacccagtttcggcatcgatatctgggctttgtgctgcacaatcatcgagctgcgtctaaaccgcaccctattcggactaaaagaaccatcctgggtagcccaactcgaagtactcctcgatcccttccccgagcctcagcgctccgatttccaggctctggtcaagaaagcccagtcttactacgatccacagtttctcgcagactggaactgggatacatctctggacgcgctcgggatactcacacccctcacacccactacagagttattaggtcgacaggcaaggctgaagcgcttctcggaactaactgggttcgaagacccgatatgtgccttccttgcgatggaacagcgatattacgattatccgcgtcattataacggggaattagatcgatcggatgggaaatgggctatcaaatacagtcttcctagggaagaagtcattctactgggtgatttgttaacaaaggtgtttaaatacgatcccgaagatcgtattacgatcgatgagctagttgctcatccttggtttgagatggatgggaagaaccaggagaatgagaaggaggattcacatccagtgcctctaaagatcaaggggaaatctgatgccgcggtggaaaagactgtgcatgtcaataacccgagttttaccttgatcctgaaagctacaggcatccacgctcatcgcgtggaaatttga

SEQ ID NO: 2725 - protein, 758 aa, Muscodor strobelii
  misc_feature: SGI Peptide ID NO. 560548
  misc_feature (299)..(433): Pfam Id: PF00069 Pfam Desc: Protein kinase domain
  misc_feature (677)..(702): Pfam Id: PF00069 Pfam Desc: Protein kinase domain
  misc_feature (259)..(704): NCBI GI: 121709688 Blast Desc: protein kinase, [Aspergillus clavatus NRRL 1] gi|119400639|gb|EAW11064.1| protein kinase, [Aspergillus clavatus NRRL 1]
  misc_feature (231)..(710): NCBI GI: 116191345 Blast Desc: CHGG_05390 [Chaetomium globosum CBS 148.51] gi|88181303|gb|EAQ88771.1| CHGG_05390 [Chaetomium globosum CBS 148.51]
  misc_feature (232)..(705): NCBI GI: 159122901 Blast Desc: protein kinase, [Aspergillus fumigatus A1163]
  misc_feature (232)..(705): NCBI GI: 70982656 Blast Desc: protein kinase [Aspergillus fumigatus Af293] gi|66844480|gb|EAL84818.1| protein kinase, [Aspergillus fumigatus Af293]
  misc_feature (276)..(701): NCBI GI: 171694616 Blast Desc: protein product [Podospora anserina] gi|170947550|emb|CAP59711.1| protein product [Podospora anserina]
  misc_feature (224)..(710): NCBI GI: 85109105 Blast Desc: NCU05658 [Neurospora crassa OR74A] gi|28924372|gb|EAA33510.1| [Neurospora crassa OR74A]
  misc_feature (274)..(705): NCBI GI: 256733696 Blast Desc: NECHADRAFT_78065 [Nectria haematococca mpVI 77-13-4]
  misc_feature (274)..(703): NCBI GI: 85109099 Blast Desc: NCU05655 [Neurospora crassa OR74A] gi|28924369|gb|EAA33507.1| [Neurospora crassa OR74A]
  misc_feature (275)..(703): NCBI GI: 85091840 Blast Desc: NCU09189 [Neurospora crassa OR74A] gi|28920497|gb|EAA29863.1| [Neurospora crassa OR74A]
  misc_feature (281)..(715): NCBI GI: 259487982 Blast Desc: TPA: protein kinase, (AFU_orthologue; AFUA_7G00740) [Aspergillus nidulans FGSC A4]
MLASAMGDENPNVKSAQSLSDYGDEQIQRLAQDSKHNFDTQSLPSVPEDIEGNEANQYVYNDLETLQPKTYHEEESEEGYDNASEAKEYPSPTYHPEKRADEENKIDIEDFASPHHQSKQSSRYFVRPSSKAKNKAVSPFKYNEHGQESPSLEPNVVDGLLGSQHSRKGKENLRINTNFENFVSDIHDVREIEGITSQNLHLEYNEEYYDEAYQSSPLQNTVSPIDDQEDDESYSPSPTYARKIRDPVSPVGDQELSDNDRQTDNTPMRVSLENIEAIGNYCETGFHPVQLHDIFCDRYEVVHKIGHGAFATIWLCLDHTTKKWRALKIAAAEESLESRTDIKINRLLTGQGIKSSTWESHHIALPREHFWIEGPNGKHCCMVLPLLGPPIKCRMKANGMLMRKLMCQVADGVKFLHNKGITHADLHPGNILLRLSSTTGISKKEMLTILGKPKTEALRTATGTHPGPSYPKYVVEPADLSLLGVIDEAMIIDFGESFPVTNPPHYLGIPIQYAAPEARFAHSPSFGIDIWALCCTIIELRLNRTLFGLKEPSWVAQLEVLLDPFPEPQRSDFQALVKKAQSYYDPQFLADWNWDTSLDALGILTPLTPTTELLGRQARLKRFSELTGFEDPICAFLAMEQRYYDYPRHYNGELDRSDGKWAIKYSLPREEVILLGDLLTKVFKYDPEDRITIDELVAHPWFEMDGKNQENEKEDSHPVPLKIKGKSDAAVEKTVHVNNPSFTLILKATGIHAHRVEI

SEQ ID NO: 2726 - DNA, 1776 bp, Muscodor strobelii
  misc_feature: SGI cDNA ID NO. 560549
  misc_feature: Encodes the peptide sequence at SEQ ID NO 2727
atgttcgaggttgaagaactatcgcaatatggcccaggtggataccatcccgtccatcttaacgaggtgattctcgataaataccaagtcattcataaactagggcatggcgaaattgcaacagtctggttttgctggcacaagaatcggcgtaattgggtagccgtcaagatataccgcgcagatcgatcacgtcataatcaagacttggaatcccttcaaactagctcctctttcaacccagtcgagtggtcagacgccggtataatacttcctatagagaacttctggctcgaaggagtgaatggagcacacctgggcgaggtgtatcccgtcctgggacccacactagcagatcgatggaaatatgacatgaaacgagacgaattgcccgttttgaaggaatacttctatcaaaccgcaataggtctcaagtttctgcacgcaaagggttttgtacacggccaatttacaccgcagaatatacatctactgctcgacaatctcgcatacaccgaaaaagacgagcttatagaacttatcggacagccgaaacgcatccccgtggagcacaacgacgcagggctacattataccgttgttccagcaagactcgagtatctccctgttaaagatgaaatcgcccttacaggcttcaaagcatcgcctgaagtaatcgactctgtcagcgtaccactcaggtatatctcaccagaagtcgtgtttcagctcccatcagcttcctccgccgatatatggcctttactactcatcgtgctcgaaatccgcgcagaccgctcaatattcctgggcaactcgtttccagacatcgacggctacatccttgggctcgaagatttgatggggccactgcccgagccataccgtactgtattactgaacaaacaagcgagaagacaaggcctacctcctcctgtgcctccaagaagccgccgacgagagaaaaataacgaggtagaggaagcacagcaagatcttcagattgttagcgatgagaagacatacaagaccttacaagactactacgaagaagctgcccctcgtctcggatattcagataaatttgagatcatccttgctgagaccaaagatcatagaggcgacccgttacgaaaactcaagtctctctttatgagagaagaggttgtaattctcgccaatttgctgagaggagcactaaagtggcatccagacgagagattgagtatcgatggcatcttaaatcatgaatggttcaaggatagggcactaaaggtcgagagaaaagagagtgtcacaatgggagatgatgagagtggtgccggggttggagcatcacatgctgaggaacttctaagctttcttgcttatgactcgacctcgacttcaagaatacgcaagtgctggcgattcatgattaaattcttcataattttgcgacatccaaggtctagtttgacactcgtcaagcacagcatcacctcgagagctccccgttacaaacaaatcaagcgctctctatacaactcttacgagtggtttatatggcttgagcctgatacatatatagacttcgtcatcggatttcttctcgtttctgttctaatgctcctttgtgtgttattccgctcgagttgcgatatacaactcccacgacttcatgtgccttggttaaggctgagcgatcgttggcctgaagttctcattctcgctgagaatatcaaaacgtcgacttcgatgtatgctcaggcgctattcaggtttgagaagggatga

SEQ ID NO: 2727 - protein, 591 aa, Muscodor strobelii
  misc_feature: SGI Peptide ID NO. 560549
  misc_feature (3)..(475): NCBI GI: 116191345 Blast Desc: CHGG_05390 [Chaetomium globosum CBS 148.51] gi|88181303|gb|EAQ88771.1| CHGG_05390 [Chaetomium globosum CBS 148.51]
  misc_feature (2)..(420): NCBI GI: 121709688 Blast Desc: protein kinase, [Aspergillus clavatus NRRL 1] gi|119400639|gb|EAW11064.1| protein kinase, [Aspergillus clavatus NRRL 1]
  misc_feature (2)..(420): NCBI GI: 159122901 Blast Desc: protein kinase, [Aspergillus fumigatus A1163]
  misc_feature (4)..(440): NCBI GI: 85109105 Blast Desc: NCU05658 [Neurospora crassa OR74A] gi|28924372|gb|EAA33510.1| [Neurospora crassa OR74A]
  misc_feature (2)..(420): NCBI GI: 70982656 Blast Desc: protein kinase [Aspergillus fumigatus Af293] gi|66844480|gb|EAL84818.1| protein kinase, [Aspergillus fumigatus Af293]
  misc_feature (3)..(422): NCBI GI: 85109099 Blast Desc: NCU05655 [Neurospora crassa OR74A] gi|28924369|gb|EAA33507.1| [Neurospora crassa OR74A]
  misc_feature (8)..(295): NCBI GI: 156032561 Blast Desc: SS1G_13978 [Sclerotinia sclerotiorum 1980] gi|154699380|gb|EDN99118.1| SS1G_13978 [Sclerotinia sclerotiorum 1980]
  misc_feature (3)..(419): NCBI GI: 256733696 Blast Desc: NECHADRAFT_78065 [Nectria haematococca mpVI 77-13-4]
  misc_feature (3)..(420): NCBI GI: 256721211 Blast Desc: NECHADRAFT_82323 [Nectria haematococca mpVI 77-13-4]
  misc_feature (4)..(422): NCBI GI: 85089807 Blast Desc: NCU10004 [Neurospora crassa OR74A] gi|28919443|gb|EAA28883.1| [Neurospora crassa OR74A]
MFEVEELSQYGPGGYHPVHLNEVILDKYQVIHKLGHGEIATVWFCWHKNRRNWVAVKIYRADRSRHNQDLESLQTSSSFNPVEWSDAGIILPIENFWLEGVNGAHLGEVYPVLGPTLADRWKYDMKRDELPVLKEYFYQTAIGLKFLHAKGFVHGQFTPQNIHLLLDNLAYTEKDELIELIGQPKRIPVEHNDAGLHYTVVPARLEYLPVKDEIALTGFKASPEVIDSVSVPLRYISPEVVFQLPSASSADIWPLLLIVLEIRADRSIFLGNSFPDIDGYILGLEDLMGPLPEPYRTVLLNKQARRQGLPPPVPPRSRRREKNNEVEEAQQDLQIVSDEKTYKTLQDYYEEAAPRLGYSDKFEIILAETKDHRGDPLRKLKSLFMREEVVILANLLRGALKWHPDERLSIDGILNHEWFKDRALKVERKESVTMGDDESGAGVGASHAEELLSFLAYDSTSTSRIRKCWRFMIKFFIILRHPRSSLTLVKHSITSRAPRYKQIKRSLYNSYEWFIWLEPDTYIDFVIGFLLVSVLMLLCVLFRSSCDIQLPRLHVPWLRLSDRWPEVLILAENIKTSTSMYAQALFRFEKG

SEQ ID NO: 2728 - DNA, 275 bp, Muscodor strobelii
  misc_feature: SGI EST ID NO. CUFF.6799.0
  misc_feature: Variant of the nucleotide sequence at SEQ ID NO 2726
gcgacatccaaggtctagtttgacactcgtcaagcacagcatcacctcgagagctccccgttacaaacaaatcaagcgctctctatacaactcttacgagtggtttatatggcttgagcctgatacatatatagacttcgtcatcggatttcttctcgtttctgttctaatgctcctttgtgtgttattccgctcgagttgcgatatacaactcccacgacttcatgtgccttggttaaggctgagcgatcgttggcctgaagttctcattctcg

SEQ ID NO: 2729 - DNA, 1218 bp, Muscodor strobelii
  misc_feature: SGI cDNA ID NO. 560550
  misc_feature: Elevated expression when VOC is produced
  misc_feature: Encodes the peptide sequence at SEQ ID NO 2730
atggcaaacacgtccacacccctcgggagcgactcctggattggagccgatgctttcgaaccaggcagtgagttcgaacaacgagcatcgcgttttattgcttcggtgaattgggatgcactgctctccattgcaagttgtctgcgagggcaggatggaatccgatgcaaacttagcgacaagttctccattggtcagtccaacatggtacgacaaatcatcttctatgacaaaacaagcttggtcgctaggctgaggatgccacgcgtgggtgcaattccagcgggtagagaggccgccagtattgcgcagataatggaagtcgaagtagcgggtatgaagtttctcaaagagaagaccaaggttcctgtcccatcggtttactacttcgacacctcagagtccaatgccgttggtgcaccgttcattctcatggactatatacatggcactactgcttacgaactgagactcgccaaagactctgcattaggcctctttggtactccggagcaagataagcgatttagaaaacagatggcggagatccaggtcgaactcacgaagattcagtttgatcagatcggaagtttatatcacgatgcatccaacgactcgttccatatcggtcctgatattgagacgggaaagggtccatggagcattgcaaaagagtactatgctgatgtggcgaagcacgccctacgggtgtgtgctaatagcgcggcccgggaagtcaggttcagcccatcttttgcccttccacttatctttagatatttgatgaagtactgggacaatgattgcaaggtgtattgtcttatgaatagggactttggccctcacaatcttcttgttgacaacgaatttaacatcatcagtgtcatagacttagacggcattatggctgttcctaccgaagttgctgcccagtttcctgtcctggcaggcctcgatccggaaccgcctgggcatgttgaaacaaatccgttggctgttgaacggatcaagagggcagagccattgatccatgaatacgttgatatgatttgggaatctgagaaacactctggtccagaagtaaacaagattgaggccctaatgctctcagatgttgcgagggtcgttcaagggatgagagattataagtcacatcagaaggctacgaatgatagatggatggatgcttttgttcgtatacttgcggcatatttgtga

SEQ ID NO: 2730 - protein, 405 aa, Muscodor strobelii
  misc_feature: SGI Peptide ID NO. 560550
  misc_feature (6)..(292): NCBI GI: 46105060 Blast Desc: FG00158.1 [Gibberella zeae PH-1]
  misc_feature (2)..(355): NCBI GI: 238844458 Blast Desc: conserved [Microsporum canis CBS 113480]
  misc_feature (28)..(370): NCBI GI: 255937449 Blast Desc: Pc13g13370 [Penicillium chrysogenum Wisconsin 54-1255] gi|211584371|emb|CAP92406.1| Pc13g13370 [Penicillium chrysogenum Wisconsin 54-1255]
  misc_feature (13)..(321): NCBI GI: 238845090 Blast Desc: conserved [Microsporum canis CBS 113480]
  misc_feature (28)..(354): NCBI GI: 225557909 Blast Desc: conserved [Ajellomyces capsulatus G186AR]
  misc_feature (8)..(149): NCBI GI: 258566794 Blast Desc: [Uncinocarpus reesii 1704] gi|237905587|gb|EEP79988.1| [Uncinocarpus reesii 1704]
  misc_feature (10)..(313): NCBI GI: 255950420 Blast Desc: Pc22g20780 [Penicillium chrysogenum Wisconsin 54-1255] gi|211592994|emb|CAP99366.1| Pc22g20780 [Penicillium chrysogenum Wisconsin 54-1255]
  misc_feature (10)..(340): NCBI GI: 238841944 Blast Desc: [Microsporum canis CBS 113480]
  misc_feature (33)..(387): NCBI GI: 255930495 Blast Desc: Pc06g02040 [Penicillium chrysogenum Wisconsin 54-1255] gi|211581420|emb|CAP79197.1| Pc06g02040 [Penicillium chrysogenum Wisconsin 54-1255]
  misc_feature (214)..(401): NCBI GI: 258566794 Blast Desc: [Uncinocarpus reesii 1704] gi|237905587|gb|EEP79988.1| [Uncinocarpus reesii 1704]
  misc_feature: Useful for introducing or modulating the production of volatile compounds
MANTSTPLGSDSWIGADAFEPGSEFEQRASRFIASVNWDALLSIASCLRGQDGIRCKLSDKFSIGQSNMVRQIIFYDKTSLVARLRMPRVGAIPAGREAASIAQIMEVEVAGMKFLKEKTKVPVPSVYYFDTSESNAVGAPFILMDYIHGTTAYELRLAKDSALGLFGTPEQDKRFRKQMAEIQVELTKIQFDQIGSLYHDASNDSFHIGPDIETGKGPWSIAKEYYADVAKHALRVCANSAAREVRFSPSFALPLIFRYLMKYWDNDCKVYCLMNRDFGPHNLLVDNEFNIISVIDLDGIMAVPTEVAAQFPVLAGLDPEPPGHVETNPLAVERIKRAEPLIHEYVDMIWESEKHSGPEVNKIEALMLSDVARVVQGMRDYKSHQKATNDRWMDAFVRILAAYL

SEQ ID NO: 2731 - DNA, 1567 bp, Muscodor strobelii
  misc_feature: SGI EST ID NO. CUFF.6805.0
  misc_feature: Variant of the nucleotide sequence at SEQ ID NO 2729
cataagtcacattcctaggcgtcacgctcattccacgcgaccaaggagcactcgacttacattctttcagtctttgacataaatatagatgatcgggtcaggactctacttcgactgacaagacgagttaaccttatctcacaaaagcaaaaaaatacaatggcaaacacgtccacacccctcgggagcgactcctggattggagccgatgctttcgaaccaggcagtgagttcgaacaacgagcatcgcgttttattgcttcggtgaattgggatgcactgctctccattgcaagttgtctgcgagggcaggatggaatccgatgcaaacttagcgacaagttctccattggtcagtccaacatggtacgacaaatcatcttctatgacaaaacaagcttggtcgctaggctgaggatgccacgcgtgggtgcaattccagcgggtagagaggccgccagtattgcgcagataatggaagtcgaagtagcgggtatgaagtttctcaaagagaagaccaaggttcctgtcccatcggtttactacttcgacacctcagagtccaatgccgttggtgcaccgttcattctcatggactatatacatggcactactgcttacgaactgagactcgccaaagactctgcattaggcctctttggtactccggagcaagataagcgatttagaaaacagatggcggagatccaggtcgaactcacgaagattcagtttgatcagatcggaagtttatatcacgatgcatccaacgactcgttccatatcggtcctgatattgagacgggaaagggtccatggagcattgcaaaagagtactatgctgatgtggcgaagcacgccctacgggtgtgtgctaatagcgcggcccgggaagtcaggttcagcccatcttttgcccttccacttatctttagatatttgatgaagtactgggacaatgattgcaaggtgtattgtcttatgaatagggactttggccctcacaatcttcttgttgacaacgaatttaacatcatcagtgtcatagacttagacggcattatggctgttcctaccgaagttgctgcccagtttcctgtcctggcaggcctcgatccggaaccgcctgggcatgttgaaacaaatccgttggctgttgaacggatcaagagggcagagccattgatccatgaatacgttgatatgatttgggaatctgagaaacactctggtccagaagtaaacaagattgaggccctaatgctctcagatgttgcgagggtcgttcaagggatgagagattataagtcacatcagaaggctacgaatgatagatggatggatgcttttgttcgtatacttgcggcatatttgtgaacctatcgcaaactgtttgacagccaatcaagctgacaaatatttcatgggcaatgggggagaagtcttcgcattaaatcagaacaaggaccattgtaccgctacaccggcgagcgtatctacagccataggtagtacacgagggacttaggcagatagatcaaatcccacgatccaagctcttatgaat

SEQ ID NO: 2732 - DNA, 816 bp, Muscodor strobelii
  misc_feature: SGI cDNA ID NO. 560551
  misc_feature: Encodes the peptide sequence at SEQ ID NO 2733
atgccaccgctgtcgtcggctcagaaggccgccgtggccaacttcgtcgccatcactggggctaccgagagagctgccagcaagtatcttaagagttctgcatacaagcttaacgaagctgtcgatgcatactttcaaggaagcactggctcgagcaatgcagcagctaataacaaagagacacagctaaacaagctttttgacagtttacggaatgacaaggaggacgcgaaagatacgcttggcgcagactcggccatgagctatctacagaccattggcatcaatatggaagatgcctcactactagctgctatggaattagtgcaagcgccgagtatgggcgagatccaacggagtggatttgtcgctggttggaaggatgctggtgtggacgccaacacgacagcccaagccttacatgttaagaacctagtcgactccatgaagaaggaccgcgacttattcagaaagatctaccgctataccttcgtcgtaggcaaggaacccgctcagcgtgcgttgtcactagagatggctattatgctctgggatatgctattcaagagcccaggttacacctggaagggcaagtcgattaacgtggactggctccttctctataaggagttccttgaggagaactggaaacgatctgtcagccgcgatatgtggaaccagactctagagtttgctttcaagagtacggatgatgatacactcactttctacagcgaggagggttcctggcctggcgtcatcgacgaatttgtggtctggcataagaagacgaacgcgatggagatcgatgtttag

SEQ ID NO: 2733 - protein, 271 aa, Muscodor strobelii
  misc_feature: SGI Peptide ID NO. 560551
  misc_feature (137)..(262): Pfam Id: PF03556 Pfam Desc: Domain of function (DUF298)
  misc_feature (156)..(262): Pfam Id: PF03556 Pfam Desc: Domain of function (DUF298)
  misc_feature (1)..(266): NCBI GI: 154304278 Blast Desc: BC1G_08409 [Botryotinia fuckeliana B05.10] gi|150854211|gb|EDN29403.1| BC1G_08409 [Botryotinia fuckeliana B05.10]
  misc_feature (1)..(270): NCBI GI: 256726114 Blast Desc: NECHADRAFT_94442 [Nectria haematococca mpVI 77-13-4]
  misc_feature (3)..(263): NCBI GI: 156059094 Blast Desc: SS1G_03559 [Sclerotinia sclerotiorum 1980] gi|154701346|gb|EDO01085.1| SS1G_03559 [Sclerotinia sclerotiorum 1980]
  misc_feature (2)..(270): NCBI GI: 46111689 Blast Desc: FG02726.1 [Gibberella zeae PH-1]
  misc_feature (3)..(270): NCBI GI: 39977449 Blast Desc: MGG_06627 [Magnaporthe grisea 70-15] gi|73919216|sp|Q52DM9.1|DCN1_MAGGR RecName: Full=Defective in cullin neddylation protein 1 gi|145015925|gb|EDK00415.1| grisea
  misc_feature (1)..(258): NCBI GI: 261200517 Blast Desc: defective in Cullin neddylation protein 1 [Ajellomyces dermatitidis SLH14081] gi|239593731|gb|EEQ76312.1| defective in Cullin neddylation protein 1 [Ajellomyces dermatitidis SLH14081]
  misc_feature (81)..(267): NCBI GI: 261359195 Blast Desc: defective in cullin neddylation protein [Verticillium albo-atrum VaMs.102]
  misc_feature (1)..(270): NCBI GI: 238502419 Blast Desc: DUF298 domain protein [Aspergillus flavus NRRL3357] gi|220691253|gb|EED47601.1| DUF298 domain protein [Aspergillus flavus NRRL3357]
  misc_feature (1)..(270): NCBI GI: 115385585 Blast Desc: conserved [Aspergillus terreus NIH2624] gi|114187786|gb|EAU29486.1| conserved [Aspergillus terreus NIH2624]
  misc_feature (1)..(258): NCBI GI: 239607391 Blast Desc: defective in Cullin neddylation protein 1 [Ajellomyces dermatitidis ER-3]
MPPLSSAQKAAVANFVAITGATERAASKYLKSSAYKLNEAVDAYFQGSTGSSNAAANNKETQLNKLFDSLRNDKEDAKDTLGADSAMSYLQTIGINMEDASLLAAMELVQAPSMGEIQRSGFVAGWKDAGVDANTTAQALHVKNLVDSMKKDRDLFRKIYRYTFVVGKEPAQRALSLEMAIMLWDMLFKSPGYTWKGKSINVDWLLLYKEFLEENWKRSVSRDMWNQTLEFAFKSTDDDTLTFYSEEGSWPGVIDEFVVWHKKTNAMEIDV

SEQ ID NO: 2734 - DNA, 1811 bp, Muscodor strobelii
  misc_feature: SGI EST ID NO. CUFF.6972.1
  misc_feature: Variant of the nucleotide sequence at SEQ ID NO 2732
tcgctgatactggcaggcatgcaaccagtcccttctcctaccctgcccaagattcgatcgtccgttctagtttcagccttgccagcttcgtctaaccttcctacaaattgaataaagacgctccttcctcacctttgtcaacctgagtatcctactccagtttccatctcaagccagcgaaccgccgtcccttatcttcaggcatcaacacagctctcaactgtcgcaccgagtcaagtcaacgggacatccctagatctctattaatacagtatcaatcaacagaacaagttcggttctcgatcacatctgttgcataatcaagatatctccccaacccgccagtggactgtgtggtaccagaagagaacatcctgccaaccccgacgacgtcacattcctgagcgatcccgtcagcacacaagcgctgttcgagacttggcaccacaccacgtcgagcacatcgcctccaaacatcttcccacccacgcgtgcacgatcggcacgatgccaccgctgtcgtcggctcagaaggccgccgtggccaacttcgtcgccatcactggggctaccgagagagctgccagcaagtatcttaagagttctgcatacaagcttaacgaagctgtcgatgcatactttcaaggaagcactggctcgagcaatgcagcagctaataacaaagagacacagctaaacaagctttttgacagtttacggaatgacaaggaggacgcgaaagatacgcttggcgcagactcggccatgagctatctacagaccattggcatcaatatggaagatgcctcactactagctgctatggaattagtgcaagcgccgagtatgggcgagatccaacggagtggatttgtcgctggttggaaggatgctggtgtggacgccaacacgacagcccaagccttacatgttaagaacctagtcgactccatgaagaaggaccgcgacttattcagaaagatctaccgctataccttcgtcgtaggcaaggaacccgctcagcgtgcgttgtcactagagatggctattatgctctgggatatgctattcaagagcccaggttacacctggaagggcaagtcgattaacgtggactggctccttctctataaggagttccttgaggagaactggaaacgatctgtcagccgcgatatgtggaaccagactctagagtttgctttcaagagtacggatgatgatacactcactttctacagcgaggagggttcctggcctggcgtcatcgacgaatttgtggtctggcataagaagacgaacgcgatggagatcgatgtttaggaagcccacgccatcacagatgccactctgataactgtagagccccaaggggttttttatgacaactacaagcatcccacgcggctcagaaagctagagttgagcgtggaagtaaaatatggaggagaagctcctaacttacccgatgaagcgaagggttttcttgagctagtaaagcaggggtacatagacttcacgaaggaacgcgtgaaagaggcacgtcttgctcgaagacaggcgctctatccaccgcaacagccccaatagagatactcgacccacctgggacactcgagcaagaggtatcgcgtgcagaagaatgagttagcgcggcgtcctgccacgctgtagggacgaaacaggcttatatatcagcaagcgaagaagcaagcaaagaaggaggcaaaagaagagtaaattatagtcttgtttaagcttccgtcgttcgtacgataagtgatatgtcaatttatagatgtgaacccgtg

SEQ ID NO: 2735 - DNA, 2241 bp, Muscodor strobelii
  misc_feature: SGI cDNA ID NO. 560552
  misc_feature: Encodes the peptide sequence at SEQ ID NO 2736
atgtctctcttcggctcctcacctacggacgagtcccctgccgcccgaaacgcagcaccagccaacaagtcgcggaactcgctcttcgacgacgacgaccccatgactcgctctacctcggacacgctgttcaacgacgacgatgacagatcgccctgggacatgccgacgccgcgaaagcagcaatctcgcgccgacctgctgcgttccctgctggccaacgtccagatccccgacagctacgtagacgcattcgacgccgccctcgccaacgacggtcgcggtgggcggctgggttcctccggggtcgacaagaccttggaagctgccaaactagacgaggaacaacaatctcacataaagactattctatcgccgaccggtggcgaattatctctaggtcgagacgagttcaacgtgctgctagctcttatcgcgctcgcgcaagagggagacacggtgagcttggactcggtcgatgagcgcaagcgcaatctgcccgtgccccaattattatcatcatccaatgccaacaccaacaccgaaaccaccgactccaacaagcccgtcttccccaacttcgccgccgacctcgccgcaaagccaccacagcagcccgagacaccatccagacagcccattagagctagaaagccatcgatggacaaccccgaagatgacccctggaacacccccgacgtccaccgccaacacaaacatcctcctcccgctttcgcgccccagaccaatggccacgaccaccaagagcccgagaccaatggtgacagctatcatgctttagaagagcccgatgttccctctcgcaccacttccacatttaccaccacttcggtacccagtgccgcagcttcacaatccgccggctccatgcctacacctactgctggtggctgggactatttcggtggaagcactggttcccctagaggaggctttggtggcggtggtgcccagaaccccatcacgagcccattcggaggtaatggtggtggcggcggtggacgtgaacccggtgccaatcccccggccggtcactctcgaaccataagcggtacctcgcgcatcgggagcgccgtcgaagagaacatcaccgtgaacctaatgcccgagaaggaaggcatcttcttgttccagcatcacaactacgaggtctccagtgtcagacggggcagcaaggtcattcgcagatacagcgactttgtctggttgctcgactgcctacacaagcgctatcccttccgcgtcctgcctctcctcccgcctaagcgtgtagctgtcaacggcaaccatctgtccaacgacggcgccttcatcgagaagcggaggcgcggtcttgcgcgatttttaaatgctaccatacgtcatcccgtccttggccaggagcagcttgttgtcatgttcttgactgtgcctacagagctttctgtctggcgtaaacaggctgccatctccgtggtcgatgagtttgccgggcgccctctcccagcaggtctcgaagattcactcccggcgacactcgaggagctcttcgaccgcacgcgatcgggcatcaaacgatcagctgagctctacatctcggcatgtaacgtcatggaccggctcgtaaagcgcaatgagggtgtcgccgcagaccacgcccgcatggctgtttcccttgcatccctcaccgagaccagcggagatacgtacgcgacagacacgaacgacgttcctcttctcaacgacggactggtggctatgagtaagcatctgcgtactacgcagactctcatggaggatgagagtaaagcgtgggacagcggagtgctggaggacctcaagaggcagcgcgatgccctcgttagtgtgagggaaatgttcagccggcgggactcgctcgacaaggacaatattccgtatctggagagacggatccaaaacaatgagaccaagttagctgggttgcggtcgaaacctgacggtgcgctgaagccgggggagattgagaaggttgttgaggctattatcaaggacaaagaatcaatagtcaaccaacacaaccgctcgatatttgtgaaagagtgcataagagatgagctggtcacgttccaacagacgcagtttcacgtcagtaggtggaatcaggactgggcgcaggagagagtcaagtatagtgagatgctggctgataattggaggaggttgcttgatgagcttgagggcatgccgttgggtgattag

SEQ ID NO: 2736 - protein, 746 aa, Muscodor strobelii
  misc_feature: SGI Peptide ID NO. 560552
  misc_feature (358)..(478): Pfam Id: PF00787 Pfam Desc: PX domain
  misc_feature (398)..(478): Pfam Id: PF00787 Pfam Desc: PX domain
  misc_feature (1)..(746): NCBI GI: 171681166 Blast Desc: protein product [Podospora anserina] gi|170940541|emb|CAP65769.1| protein product [Podospora anserina]
  misc_feature (1)..(746): NCBI GI: 46111669 Blast Desc: FG02716.1 [Gibberella zeae PH-1]
  misc_feature (1)..(746): NCBI GI: 256725702 Blast Desc: NECHADRAFT_70226 [Nectria haematococca mpVI 77-13-4]
  misc_feature (1)..(746): NCBI GI: 189041715 Blast Desc: NECHADRAFT_70226 [Nectria haematococca mpVI 77-13-4]
  misc_feature (55)..(746): NCBI GI: 261359273 Blast Desc: sorting nexin mvp-1 [Verticillium albo-atrum VaMs.102]
  misc_feature (1)..(746): NCBI GI: 145608448 Blast Desc: MGG_06628 [Magnaporthe grisea 70-15] gi|145015924|gb|EDK00414.1| MGG_06628 [Magnaporthe grisea 70-15]
  misc_feature (1)..(746): NCBI GI: 164424125 Blast Desc: NCU05715 [Neurospora crassa OR74A] gi|157070384|gb|EAA33665.2| conserved [Neurospora crassa OR74A]
  misc_feature (1)..(746): NCBI GI: 154304280 Blast Desc: BC1G_08410 [Botryotinia fuckeliana B05.10] gi|150854212|gb|EDN29404.1| BC1G_08410 [Botryotinia fuckeliana B05.10]
  misc_feature (1)..(745): NCBI GI: 156059092 Blast Desc: SS1G_03558 [Sclerotinia sclerotiorum 1980] gi|154701345|gb|EDO01084.1| SS1G_03558 [Sclerotinia sclerotiorum 1980]
  misc_feature (1)..(746): NCBI GI: 242761720 Blast Desc: sorting nexin Mvp1 [Talaromyces stipitatus ATCC 10500] gi|218723431|gb|EED22848.1| sorting nexin Mvp1 [Talaromyces stipitatus ATCC 10500]
MSLFGSSPTDESPAARNAAPANKSRNSLFDDDDPMTRSTSDTLFNDDDDRSPWDMPTPRKQQSRADLLRSLLANVQIPDSYVDAFDAALANDGRGGRLGSSGVDKTLEAAKLDEEQQSHIKTILSPTGGELSLGRDEFNVLLALIALAQEGDTVSLDSVDERKRNLPVPQLLSSSNANTNTETTDSNKPVFPNFAADLAAKPPQQPETPSRQPIRARKPSMDNPEDDPWNTPDVHRQHKHPPPAFAPQTNGHDHQEPETNGDSYHALEEPDVPSRTTSTFTTTSVPSAAASQSAGSMPTPTAGGWDYFGGSTGSPRGGFGGGGAQNPITSPFGGNGGGGGGREPGANPPAGHSRTISGTSRIGSAVEENITVNLMPEKEGIFLFQHHNYEVSSVRRGSKVIRRYSDFVWLLDCLHKRYPFRVLPLLPPKRVAVNGNHLSNDGAFIEKRRRGLARFLNATIRHPVLGQEQLVVMFLTVPTELSVWRKQAAISVVDEFAGRPLPAGLEDSLPATLEELFDRTRSGIKRSAELYISACNVMDRLVKRNEGVAADHARMAVSLASLTETSGDTYATDTNDVPLLNDGLVAMSKHLRTTQTLMEDESKAWDSGVLEDLKRQRDALVSVREMFSRRDSLDKDNIPYLERRIQNNETKLAGLRSKPDGALKPGEIEKVVEAIIKDKESIVNQHNRSIFVKECIRDELVTFQQTQFHVSRWNQDWAQERVKYSEMLADNWRRLLDELEGMPLGD

SEQ ID NO: 2737 - DNA, 3024 bp, Muscodor strobelii
  misc_feature: SGI EST ID NO. CUFF.6840.0
  misc_feature: Variant of the nucleotide sequence at SEQ ID NO 2735
gttcgcgtgaaactcaatcgtgacatcaggacaagggacgacaggtcggacttcaggtgtcactggctactttcgctaaatttgtcttttttcctctcatcatcgccatcgaaggagaggagattcccattaagcttgagccatcggcattacttatgtatatatcacggctgtccatgtcgcatccccgctagcttccataccgtccctcaaggccgccgccgcccattcgaagacataccaactcgctcgccaacgagcaactcgactacattgtgacacatcggttcaatatccgatcagacacattcacggtgccatgtctctcttcggctcctcacctacggacgagtcccctgccgcccgaaacgcagcaccagccaacaagtcgcggaactcgctcttcgacgacgacgaccccatgactcgctctacctcggacacgctgttcaacgacgacgatgacagatcgccctgggacatgccgacgccgcgaaagcagcaatctcgcgccgacctgctgcgttccctgctggccaacgtccagatccccgacagctacgtagacgcattcgacgccgccctcgccaacgacggtcgcggtgggcggctgggttcctccggggtcgacaagaccttggaagctgccaaactagacgaggaacaacaatctcacataaagactattctatcgccgaccggtggcgaattatctctaggtcgagacgagttcaacgtgctgctagctcttatcgcgctcgcgcaagagggagacacggtgagcttggactcggtcgatgagcgcaagcgcaatctgcccgtgccccaattattatcatcatccaatgccaacaccaacaccgaaaccaccgactccaacaagcccgtcttccccaacttcgccgccgacctcgccgcaaagccaccacagcagcccgagacaccatccagacagcccattagagctagaaagccatcgatggacaaccccgaagatgacccctggaacacccccgacgtccaccgccaacacaaacatcctcctcccgctttcgcgccccagaccaatggccacgaccaccaagagcccgagaccaatggtgacagctatcatgctttagaagagcccgatgttccctctcgcaccacttccacatttaccaccacttcggtacccagtgccgcagcttcacaatccgccggctccatgcctacacctactgctggtggctgggactatttcggtggaagcactggttcccctagaggaggctttggtggcggtggtgcccagaaccccatcacgagcccattcggaggtaatggtggtggcggcggtggacgtgaacccggtgccaatcccccggccggtcactctcgaaccataagcggtacctcgcgcatcgggagcgccgtcgaagagaacatcaccgtgaacctaatgcccgagaaggaaggcatcttcttgttccagcatcacaactacgaggtctccagtgtcagacggggcagcaaggtcattcgcagatacagcgactttgtctggttgctcgactgcctacacaagcgctatcccttccgcgtcctgcctctcctcccgcctaagcgtgtagctgtcaacggcaaccatctgtccaacgacggcgccttcatcgagaagcggaggcgcggtcttgcgcgatttttaaatgctaccatacgtcatcccgtccttggccaggagcagcttgttgtcatgttcttgactgtgcctacagagctttctgtctggcgtaaacaggctgccatctccgtggtcgatgagtttgccgggcgccctctcccagcaggtctcgaagattcactcccggcgacactcgaggagctcttcgaccgcacgcgatcgggcatcaaacgatcagctgagctctacatctcggcatgtaacgtcatggaccggctcgtaaagcgcaatgagggtgtcgccgcagaccacgcccgcatggctgtttcccttgcatccctcaccgagaccagcggagatacgtacgcgacagacacgaacgacgttcctcttctcaacgacggactggtggctatgagtaagcatctgcgtactacgcagactctcatggaggatgagagtaaagcgtgggacagcggagtgctggaggacctcaagaggcagcgcgatgccctcgttagtgtgagggaaatgttcagccggcgggactcgctcgacaaggacaatattccgtatctggagagacggatccaaaacaatgagaccaagttagctgggttgcggtcgaaacctgacggtgcgctgaagccgggggagattgagaaggttgttgaggctattatcaaggacaaagaatcaatagtcaaccaacacaaccgctcgatatttgtgaaagagtgcataagagatgagctggtcacgttccaacagacgcagtttcacgtcagtaggtggaatcaggactgggcgcaggagagagtcaagtatagtgagatgctggctgataattggaggaggttgcttgatgagcttgagggcatgccgttgggtgattagagatcccccacctggaactagagatatatcgggtggcctggacgagctaatgaggataaggcctggattcgctcacgggtactgtctgttgctcctggagactggggaacgcatggagagtgggttttgagtgaggatggaagtgaggagagtagcagtggaagtgggagcagcgatagtgatagtagcagctggtagtagtgagagcgaggagtggcgaggagtggcgagtagcttcttggggtggtgtgactggagattgacgggtgatgtatattgattgaagaagttgtattattgttgcatgggtggttgaggttgaggttgatacgataccctcgttgtttcgttgttgagagtttgttaagagcttttggtgggagtatatgttattgcgtctggtagtgggacttattttacctattttacctagctgctgatttatatacactgcggcttgcctt

SEQ ID NO: 2738 - DNA, 921 bp, Muscodor strobelii
  misc_feature: SGI cDNA ID NO. 560553
  misc_feature: Reduced expression when VOC is produced
  misc_feature: Encodes the peptide sequence at SEQ ID NO 2739
atgcagcccaggttaccagtccggctggccgctcaatgctgcgcagcctcgatcaacgcgcccgtccgaccatcactcgtgaacctcttcgccgccctctcggtccagtcgtcacagcagtcgcagacgcgcagcgctcacatcctcgccactctgaaggacaacccgggtgcccaccagaagcgcatccgtgtcggtcgcggtccatcgtcgggcaagggcaagacgtcaggaagaggtcacaagggtcagaagcagcatggcaaggtccggccgtggttccagggtggtcagacgcccttgatcttccagaagggtcggctgggatttgagaatatccgcgccgacgtcatgtcagaagtcaacctcgacaaactccaaacctggatcgacgccggccgcatcgatccatcccagcccatcacgcccaaagaactcatccaatcccgcctcgtcggctccatcaaagacggcatcaagctcctcgcccgaggcggcgactccctcaagcagcccgtcgacatcatggtctcgcgcgcctccgcctcagccatcgcagccgtcgagaaggccggtggcaagatattaacccgttactacacgaaacagtccatgcggcgtctagtacagggcaagtcagtcaacactgcgctcccccttcccgtaggagccgagcacgtggagcccgtcctcgagggcatgcgacagaagggcttctcataccgtctgcccgacccgacgtcgcgttgggatatcgagtactaccgcgatccggcgcataggggatacctgagccaccagttacagccgggcgagtcgccgtcgctgttcttcaaggtgccgccgagtgtgattgtcaaggatgcggagaagaagaagaaggtcaagccggaagatgtcaagctttgggagaagttgtag

SEQ ID NO: 2739 - protein, 306 aa, Muscodor strobelii
  misc_feature: SGI Peptide ID NO. 560553
  misc_feature (160)..(193): Pfam Id: PF00256 Pfam Desc: Ribosomal protein L15
  misc_feature (47)..(152): Pfam Id: PF01305 Pfam Desc: Ribosomal protein L15 amino terminal region
  misc_feature (47)..(128): Pfam Id: PF01305 Pfam Desc: Ribosomal protein L15 amino terminal region
  misc_feature (1)..(298): NCBI GI: 116191203 Blast Desc: CHGG_05319 [Chaetomium globosum CBS 148.51] gi|88181232|gb|EAQ88700.1| CHGG_05319 [Chaetomium globosum CBS 148.51]
  misc_feature (1)..(288): NCBI GI: 46111669 Blast Desc: FG02716.1 [Gibberella zeae PH-1]
  misc_feature (1)..(300): NCBI GI: 256725701 Blast Desc: NECHADRAFT_61969 [Nectria haematococca mpVI 77-13-4]
  misc_feature (1)..(300): NCBI GI: 85109404 Blast Desc: NCU05714 [Neurospora crassa OR74A] gi|28924543|gb|EAA33664.1| conserved [Neurospora crassa OR74A]
  misc_feature (19)..(281): NCBI GI: 261359272 Blast Desc: 50S ribosomal protein L15 [Verticillium albo-atrum VaMs.102]
  misc_feature (1)..(244): NCBI GI: 171681168 Blast Desc: protein product [Podospora anserina] gi|170940542|emb|CAP65770.1| protein product [Podospora anserina]
  misc_feature (1)..(281): NCBI GI: 154304282 Blast Desc: BC1G_08411 [Botryotinia fuckeliana B05.10] gi|150854213|gb|EDN29405.1| BC1G_08411 [Botryotinia fuckeliana B05.10]
  misc_feature (1)..(303): NCBI GI: 225682898 Blast Desc: 50S ribosomal subunit protein L15 [Paracoccidioides brasiliensis Pb03] gi|226290349|gb|EEH45833.1| conserved [Paracoccidioides brasiliensis Pb18]
  misc_feature (1)..(281): NCBI GI: 156059088 Blast Desc: SS1G_03556 [Sclerotinia sclerotiorum 1980] gi|154701343|gb|EDO01082.1| SS1G_03556 [Sclerotinia sclerotiorum 1980]
  misc_feature (1)..(283): NCBI GI: 238842705 Blast Desc: 50S ribosomal protein L15 [Microsporum canis CBS 113480]
  misc_feature: Useful for introducing or modulating the production of volatile compounds
MQPRLPVRLAAQCCAASINAPVRPSLVNLFAALSVQSSQQSQTRSAHILATLKDNPGAHQKRIRVGRGPSSGKGKTSGRGHKGQKQHGKVRPWFQGGQTPLIFQKGRLGFENIRADVMSEVNLDKLQTWIDAGRIDPSQPITPKELIQSRLVGSIKDGIKLLARGGDSLKQPVDIMVSRASASAIAAVEKAGGKILTRYYTKQSMRRLVQGKSVNTALPLPVGAEHVEPVLEGMRQKGFSYRLPDPTSRWDIEYYRDPAHRGYLSHQLQPGESPSLFFKVPPSVIVKDAEKKKKVKPEDVKLWEKL

SEQ ID NO: 2740 - DNA, 1261 bp, Muscodor strobelii
  misc_feature: SGI EST ID NO. CUFF.6819.0
  misc_feature: Variant of the nucleotide sequence at SEQ ID NO 2738
gcccagacatagtggaatatcttgaagctctcaaccagatcttgtctgtcgacggtgcccggagccattgacgtctccgacatctcgcaacatatgcaataacgcaatgcagcccaggttaccagtccggctggccgctcaatgctgcgcagcctcgatcaacgcgcccgtccgaccatcactcgtgaacctcttcgccgccctctcggtccagtcgtcacagcagtcgcagacgcgcagcgctcacatcctcgccactctgaaggacaacccgggtgcccaccagaagcgcatccgtgtcggtcgcggtccatcgtcgggcaagggcaagacgtcaggaagaggtcacaagggtcagaagcagcatggcaaggtccggccgtggttccagggtggtcagacgcccttgatcttccagaagggtcggctgggatttgagaatatccgcgccgacgtcatgtcagaagtcaacctcgacaaactccaaacctggatcgacgccggccgcatcgatccatcccagcccatcacgcccaaagaactcatccaatcccgcctcgtcggctccatcaaagacggcatcaagctcctcgcccgaggcggcgactccctcaagcagcccgtcgacatcatggtctcgcgcgcctccgcctcagccatcgcagccgtcgagaaggccggtggcaagatattaacccgttactacacgaaacagtccatgcggcgtctagtacagggcaagtcagtcaacactgcgctcccccttcccgtaggagccgagcacgtggagcccgtcctcgagggcatgcgacagaagggcttctcataccgtctgcccgacccgacgtcgcgttgggatatcgagtactaccgcgatccggcgcataggggatacctgagccaccagttacagccgggcgagtcgccgtcgctgttcttcaaggtgccgccgagtgtgattgtcaaggatgcggagaagaagaagaaggtcaagccggaagatgtcaagctttgggagaagttgtagaggacttgtggtgtgcaatggtggtttagcggacttgcaaggacatatgagggcgacaaacactctattgggtgtgtccatgtacaggttgttgctgtgtaaaatgtacaataaggtgttatatacatgtaaatacggtcagacatcgcatgttagatgacttcaagtgtacagcttggtaaatgatcatctttgtttttaaatactcagcaagctatattaattgcatcgtga

SEQ ID NO: 2741 - DNA, 396 bp, Muscodor strobelii
  misc_feature: SGI cDNA ID NO. 560554
  misc_feature: Elevated expression when VOC is produced
  misc_feature: Encodes the peptide sequence at SEQ ID NO 2742
atggtctcgcgcgcctccgcctcagccatcgcagccgtcgagaaggccggtggcaagatattaacccgttactacacgaaacagtccatgcggcgtctagtacagggcaagtcagtcaacactgcgctcccccttcccgtaggagccgagcacgtggagcccgtcctcgagggcatgcgacagaagggcttctcataccgtctgcccgacccgacgtcgcgttgggatatcgagtactaccgcgatccggcgcataggggatacctgagccaccagttacagccgggcgagtcgccgtcgctgttcttcaaggtgccgccgagtgtgattgtcaaggatgcggagaagaagaagaaggtcaagccggaagatgtcaagctttgggagaagttgtag

SEQ ID NO: 2742 - protein, 131 aa, Muscodor strobelii
  misc_feature: SGI Peptide ID NO. 560554
  misc_feature (1)..(113): NCBI GI: 46111669 Blast Desc: FG02716.1 [Gibberella zeae PH-1]
  misc_feature (1)..(123): NCBI GI: 116191203 Blast Desc: CHGG_05319 [Chaetomium globosum CBS 148.51] gi|88181232|gb|EAQ88700.1| CHGG_05319 [Chaetomium globosum CBS 148.51]
  misc_feature (1)..(128): NCBI GI: 145608446 Blast Desc: MGG_06629 [Magnaporthe grisea 70-15] gi|145015923|gb|EDK00413.1| MGG_06629 [Magnaporthe grisea 70-15]
  misc_feature (1)..(118): NCBI GI: 256725701 Blast Desc: NECHADRAFT_61969 [Nectria haematococca mpVI 77-13-4]
  misc_feature (2)..(125): NCBI GI: 85109404 Blast Desc: NCU05714 [Neurospora crassa OR74A] gi|28924543|gb|EAA33664.1| conserved [Neurospora crassa OR74A]
  misc_feature (1)..(106): NCBI GI: 261359272 Blast Desc: 50S ribosomal protein L15 [Verticillium albo-atrum VaMs.102]
  misc_feature (1)..(128): NCBI GI: 225682898 Blast Desc: 50S ribosomal subunit protein L15 [Paracoccidioides brasiliensis Pb03] gi|226290349|gb|EEH45833.1| conserved [Paracoccidioides brasiliensis Pb18]
  misc_feature (1)..(106): NCBI GI: 154304282 Blast Desc: BC1G_08411 [Botryotinia fuckeliana B05.10] gi|150854213|gb|EDN29405.1| BC1G_08411 [Botryotinia fuckeliana B05.10]
  misc_feature (1)..(128): NCBI GI: 240273882 Blast Desc: 50S ribosomal subunit protein L15 [Ajellomyces capsulatus H143]
  misc_feature (1)..(128): NCBI GI: 261193913 Blast Desc: 50S ribosomal subunit protein L15 [Ajellomyces dermatitidis SLH14081] gi|239588967|gb|EEQ71610.1| 50S ribosomal subunit protein L15 [Ajellomyces dermatitidis SLH14081]
  misc_feature: Useful for introducing or modulating the production of volatile compounds
MVSRASASAIAAVEKAGGKILTRYYTKQSMRRLVQGKSVNTALPLPVGAEHVEPVLEGMRQKGFSYRLPDPTSRWDIEYYRDPAHRGYLSHQLQPGESPSLFFKVPPSVIVKDAEKKKKVKPEDVKLWEKL

SEQ ID NO: 2743 - DNA, 1261 bp, Muscodor strobelii; identical to SEQ ID NO: 2740
  misc_feature: SGI EST ID NO. CUFF.6819.0
  misc_feature: Variant of the nucleotide sequence at SEQ ID NO 2741

SEQ ID NO: 2744 - DNA, 2442 bp, Muscodor strobelii
  misc_feature: SGI cDNA ID NO. 560555
  misc_feature: Encodes the peptide sequence at SEQ ID NO 2745
atgtttttaccaaacggtcgtggcgtagtcatgggcggaggtctccgcccaggcgaatatcgcaattacaccattgacctagagaatcctcagaatagcgcgctaacctcaacccgcttcatgggtgacgatgatgccgacgtgcttgaacctaaagatgctatcgaaaagtccgatagagtgtcatactttatcctcgcgaactttcggcagctgcgcaatgttctggatcgatacgaagaattaatacgaaagagatgggctaagaagaatggggagcagcgaagaaaaatactatgcgaagcttggcctaccatgcccgcgcgccgtcgacctgacatagaagcttatcggcgcaaggttacaacacgctccagggagtgctatttgtggccctctctcaaccaagaggatctttcccacggcaacattctccttcatttcctcaattcaagaggtcgccatgaacctgcttgtttcgctgctgtcgacttagaaagcattcgccttgggaacttttgcgaagctctcacgcccgagtttgtagaaggatattgcatggacttggagagtgaagcgcatgctggatatggttctctacatgtctatcacccttcccccgaaaatagggctagaggtaaatttccaaacacagccgatggtttccagatattagaaattcaagagcacattcttaatttcctggtccatgtttgtagggggatcttgcatgagaaggatcttgacggcgactcgatgaagctggcgcctgtcctgccagaacccccaaatttaatgtctgcacagagcggagagcgggttacggccctcgacttgaccagagaatccccatatctggtgccgcgcaaggttgacctgatgcgtattcattcactcgcgagcacgagacatgccgagtggaaggatcacggttgggcgttgcgagaggatcccgctttctatgctgaagtcgccagagagtggtatgaacaccaaatggagcagatcttagatgcccgtcggaaacctcaatccatgctctcgactgccctcggcagggagaaggtatgggactacgcactagctagcgccattggcgaagtctaccaagggatatatacttgggctttcatcagtcaacagcttcaactaataatgtccttgacgccatccacggctgcgagacaagatgggcatgtcggagcggctgcggaacataaacaagccatgtcacgcctgacatggctgctcgacgagagattcatcatgctcgccagaaaagaggttaaccgtcgtttcaccggcgccagcacaaaccgttcggtatttctaatgtcagatgacaaccacattcagtatcgcggcgcgatcgacgagaaggacgatctgctctggtacataatggagctggcgagcgatgagtccaaagttccacatgatatcttagctgcagagctgaacagaacaatacagggcagaaacatgaaagaacgactcactcctctgctgtcgcaatacatctcagaccttgctcttctctgcgagctgcgtacccaactgcggctcctttctccggttgctgcttctatggatataacagaggaggatattgagcaacataaagaagttatgaattggtgcactgattgggttcgtccgatgcataatctcatgatcgtgacctcgccggcacatgctggcgataagttccttaagctggggaacttgggagagacagcatcgggcaagttctcttaccctgttcataagcgacgcaacaaagagtcaacggttgcgatgcagacggccgaacagaaccttgataagctctgggatgcatacgatcgccatggtatcgactatcatgttcttcagggtgagatgccaacaaaagaagagctgcagcgcacagcagactgggttgaaaccgaaaagccggcgactaaggcggaacacgacgttctgaatattaaccttaactttgaagagagaacaagctcacctgtcaagttccagtctcaggaacctaaagtcaagatcaaaacaaagggtcagcccgctattgcgaccgccgtagagaaagctgaatcggaagccgctcctcagccatctataccactgttccccgtcaagaagcgagcgcaccgcgttttctccacgctcttctaccaaccgaccgccgatacgcagccgggtgaagtggcgtggactgaatttgtacacgccatgggcgcgatcggcttcgtatcggagaagctttacggctccgtctggagattcgtgccgcagggcgcgatcggaggcgtcgatcaggccatcaatttccacgagcctcatccccacgataagttgccgttccgcactgctcgacggtacggccggaggttgaatcggtgttatggactggacggatcttcttttgccttcaaagcggataattaa

SEQ ID NO: 2745 - protein, 813 aa, Muscodor strobelii
  misc_feature: SGI Peptide ID NO. 560555
  misc_feature (46)..(813): NCBI GI: 239614778 Blast Desc: conserved [Ajellomyces dermatitidis ER-3]
  misc_feature (46)..(813): NCBI GI: 261190512 Blast Desc: conserved [Ajellomyces dermatitidis SLH14081] gi|239591088|gb|EEQ73669.1| conserved [Ajellomyces dermatitidis SLH14081]
  misc_feature (25)..(810): NCBI GI: 256720869 Blast Desc: NECHADRAFT_50192 [Nectria haematococca mpVI 77-13-4]
  misc_feature (47)..(809): NCBI GI: 169772749 Blast Desc: [Aspergillus oryzae RIB40] gi|83768704|dbj|BAE58841.1| protein product [Aspergillus oryzae]
  misc_feature (74)..(809): NCBI GI: 119497731 Blast Desc: NFIA_032920 [Neosartorya fischeri NRRL 181] gi|119413787|gb|EAW23726.1| conserved [Neosartorya fischeri NRRL 181]
  misc_feature (7)..(810): NCBI GI: 154292612 Blast Desc: BC1G_14632 [Botryotinia fuckeliana B05.10] gi|150845846|gb|EDN21039.1| BC1G_14632 [Botryotinia fuckeliana B05.10]
  misc_feature (65)..(808): NCBI GI: 85104094 Blast Desc: NCU01053 [Neurospora crassa OR74A] gi|18376176|emb|CAD21293.1| [Neurospora crassa] gi|28923213|gb|EAA32429.1| [Neurospora crassa OR74A]
  misc_feature (65)..(807): NCBI GI: 189208474 Blast Desc: conserved [Pyrenophora tritici-repentis Pt-1C-BFP] gi|187976663|gb|EDU43289.1| conserved [Pyrenophora tritici-repentis Pt-1C-BFP]
  misc_feature (62)..(809): NCBI GI: 189209291 Blast Desc: conserved [Pyrenophora tritici-repentis Pt-1C-BFP] gi|187977071|gb|EDU43697.1| conserved [Pyrenophora tritici-repentis Pt-1C-BFP]
  misc_feature (72)..(812): NCBI GI: 171677159 Blast Desc: protein product [Podospora anserina] gi|170936647|emb|CAP61306.1| protein product [Podospora anserina]
MFLPNGRGVVMGGGLRPGEYRNYTIDLENPQNSALTSTRFMGDDDADVLEPKDAIEKSDRVSYFILANFRQLRNVLDRYEELIRKRWAKKNGEQRRKILCEAWPTMPARRRPDIEAYRRKVTTRSRECYLWPSLNQEDLSHGNILLHFLNSRGRHEPACFAAVDLESIRLGNFCEALTPEFVEGYCMDLESEAHAGYGSLHVYHPSPENRARGKFPNTADGFQILEIQEHILNFLVHVCRGILHEKDLDGDSMKLAPVLPEPPNLMSAQSGERVTALDLTRESPYLVPRKVDLMRIHSLASTRHAEWKDHGWALREDPAFYAEVAREWYEHQMEQILDARRKPQSMLSTALGREKVWDYALASAIGEVYQGIYTWAFISQQLQLIMSLTPSTAARQDGHVGAAAEHKQAMSRLTWLLDERFIMLARKEVNRRFTGASTNRSVFLMSDDNHIQYRGAIDEKDDLLWYIMELASDESKVPHDILAAELNRTIQGRNMKERLTPLLSQYISDLALLCELRTQLRLLSPVAASMDITEEDIEQHKEVMNWCTDWVRPMHNLMIVTSPAHAGDKFLKLGNLGETASGKFSYPVHKRRNKESTVAMQTAEQNLDKLWDAYDRHGIDYHVLQGEMPTKEELQRTADWVETEKPATKAEHDVLNINLNFEERTSSPVKFQSQEPKVKIKTKGQPAIATAVEKAESEAAPQPSIPLFPVKKRAHRVFSTLFYQPTADTQPGEVAWTEFVHAMGAIGFVSEKLYGSVWRFVPQGAIGGVDQAINFHEPHPHDKLPFRTARRYGRRLNRCYGLDGSSFAFKADN

SEQ ID NO: 2746 - DNA, 1020 bp, Muscodor strobelii
  misc_feature: SGI cDNA ID NO. 560556
  misc_feature: Elevated expression when VOC is produced
  misc_feature: Encodes the peptide sequence at SEQ ID NO 2747
atggggaatgaacacacggagtacacgggggaagtcgatgttcctgtagaagctattcaggttatagactcagaggtagcagcgaaacttccaccaggaacagtcgtgtcgagtattctggcccatggtgctagtttctggactaggacggctcgtcttgataccaatcaaaatggtatagaagaagcttattttctcaagacatctttcggggaccgtggtaggatgatgatgtcgggtgaatttcattgcatgtcgaagattcatagtatcatgcccgatttcgtgccaaaacctatcgcatggggatcttataccagcatacctgatgtgcacttcttcttgtgtgaatttcgacccatgacggatgaacttccggatctcgagagcttccctgcgaagatagccgatatgcaccgtgcaggtgtctctttaacaggcaaattcggcttcgatgtgacaacatttcatgggaatattcccattgagcatgggtggtcggacacttgggaagattactttaccagaacaactcgagttctatttgcgctcgagcaggaggctcagggtcccaatgaaaaaatcctacaattgatggtcccattctttgaaaaggttatcccacgcctacttcgacctcttgagactgatggtcgttcgattcgaccgtctcttattcatggcgacctttggcatggcaatgcgtcgatggatggcaacactgatctgcctgtgatattcgatgcggcatctttttatgctcacaatgaatatgagctcggagtctggcgccagccctggaataagatcaagaaaaattaccgaatgcgctatcataaatactatcctaagtcgcaacctgaaggcgattatgacgatcgtaatgcattgtatgccactcgagtcaatatccttgactcaattctttacaaaggtgaaagtagctacagagagatgcttattgctagtatggaggagctcattgggaagtttcctaatggtttagagacccgggactag

SEQ ID NO: 2747 - protein, 339 aa, Muscodor strobelii
  misc_feature: SGI Peptide ID NO. 560556
  misc_feature (46)..(311): Pfam Id: PF03881 Pfam Desc: Fructosamine kinase
  misc_feature (222)..(253): Pfam Id: PF03881 Pfam Desc: Fructosamine kinase
  misc_feature (66)..(321): NCBI GI: 261351976 Blast Desc: conserved [Verticillium albo-atrum VaMs.102]
  misc_feature (22)..(327): NCBI GI: 169765035 Blast Desc: [Aspergillus oryzae RIB40] gi|83764843|dbj|BAE54987.1| protein product [Aspergillus oryzae]
  misc_feature (30)..(318): NCBI GI: 238503680 Blast Desc: conserved [Aspergillus flavus NRRL3357] gi|220690543|gb|EED46892.1| conserved [Aspergillus flavus NRRL3357]
  misc_feature (22)..(302): NCBI GI: 255946231 Blast Desc: Pc20g14050 [Penicillium chrysogenum Wisconsin 54-1255] gi|211588618|emb|CAP86734.1| Pc20g14050 [Penicillium chrysogenum Wisconsin 54-1255]
  misc_feature (22)..(260): NCBI GI: 256734177 Blast Desc: [Nectria haematococca mpVI 77-13-4]
  misc_feature (22)..(274): NCBI GI: 46135869 Blast Desc: FG09450.1 [Gibberella zeae PH-1]
  misc_feature (11)..(336): NCBI GI: 261356063 Blast Desc: conserved [Verticillium albo-atrum VaMs.102]
  misc_feature (30)..(298): NCBI GI: 115385086 Blast Desc: conserved [Aspergillus terreus NIH2624] gi|114196782|gb|EAU38482.1| conserved [Aspergillus terreus NIH2624]
  misc_feature (22)..(298): NCBI GI: 145256231 Blast Desc: An10g00710 [Aspergillus niger CBS 513.88] gi|134078637|emb|CAK40510.1| protein product [Aspergillus niger]
  misc_feature (21)..(304): NCBI GI: 116179188 Blast Desc: CHGG_00222 [Chaetomium globosum CBS 148.51] gi|88184519|gb|EAQ91987.1| CHGG_00222 [Chaetomium globosum CBS 148.51]
  misc_feature: Useful for introducing or modulating the production of volatile compounds
MGNEHTEYTGEVDVPVEAIQVIDSEVAAKLPPGTVVSSILAHGASFWTRTARLDTNQNGIEEAYFLKTSFGDRGRMMMSGEFHCMSKIHSIMPDFVPKPIAWGSYTSIPDVHFFLCEFRPMTDELPDLESFPAKIADMHRAGVSLTGKFGFDVTTFHGNIPIEHGWSDTWEDYFTRTTRVLFALEQEAQGPNEKILQLMVPFFEKVIPRLLRPLETDGRSIRPSLIHGDLWHGNASMDGNTDLPVIFDAASFYAHNEYELGVWRQPWNKIKKNYRMRYHKYYPKSQPEGDYDDRNALYATRVNILDSILYKGESSYREMLIASMEELIGKFPNGLETRD

SEQ ID NO: 2748 - DNA, 1846 bp, Muscodor strobelii
  misc_feature: SGI EST ID NO. CUFF.7020.2
  misc_feature: Variant of the nucleotide sequence at SEQ ID NO 2746
ccggcatctcttcgtaccaaactacaccatttatcgtattacatgggattgcaataggttccaataacgacgctgaacatgattttgggtgtctatttgtaggtagctgaagagcactcaagtccgtgaacttgattttcgtgcctctcctttcatgaggccaacgccttctgagtcgatttcgggccgcaacgcagtggctgaaatgtcgcacccacgattcgctgaagtttcctgcatgtcatcatcaaggtattcagacatgcctcaatctggtctctgtgcatagagcatagcatatacgtatactgctacagccctgagccttgttcaatctgtgcggctcttaccccgcttaacaatctatcacccccgccttctcacctgctgagattgaaaggatttgttgtcactcagcactattgatgcttacgttcaagataatcggcctaccgtcatggggaatgaacacacggagtacacgggggaagtcgatgttcctgtagaagctattcaggttatagactcagaggtagcagcgaaacttccaccaggaacagtcgtgtcgagtattctggcccatggtgctagtttctggactaggacggctcgtcttgataccaatcaaaatggtatagaagaagcttattttctcaagacatctttcggggaccgtggtaggatgatgatgtcgggtgaatttcattgcatgtcgaagattcatagtatcatgcccgatttcgtgccaaaacctatcgcatggggatcttataccagcatacctgatgtgcacttcttcttgtgtgaatttcgacccatgacggatgaacttccggatctcgagagcttccctgcgaagatagccgatatgcaccgtgcaggtgtctctttaacaggcaaattcggcttcgatgtgacaacatttcatgggaatattcccattgagcatgggtggtcggacacttgggaagattactttaccagaacaactcgagttctatttgcgctcgagcaggaggctcagggtcccaatgaaaaaatcctacaattgatggtcccattctttgaaaaggttatcccacgcctacttcgacctcttgagactgatggtcgttcgattcgaccgtctcttattcatggcgacctttggcatggcaatgcgtcgatggatggcaacactgatctgcctgtgatattcgatgcggcatctttttatgctcacaatgaatatgagctcggagtctggcgccagccctggaataagatcaagaaaaattaccgaatgcgctatcataaatactatcctaagtcgcaacctgaaggcgattatgacgatcgtaatgcattgtatgccactcgagtcaatatccttgactcaattctttacaaaggtgaaagtagctacagagagatgcttattgctagtatggaggagctcattgggaagtttcctaatggtttagagacccgggactagtagtgagagaacccagcacaaaactgaatagtctagctagacggaaatactatgcacagtatgtcgaactcatcatatagatattcactatgatcttgtgcaataattcaatggggagaagagtatgaatgtcatgatcatttacttttgatgagcctctccattgagtataccgttatcaacaacttttcctattggtggcctgctaacacccccttagtactgatgacttcaccttcttttccagcaactctcgcagttgccctcttcaatgccacagcgagagatttgaacgctgcttctgccctatgatggtcattgtctcctcgaaggacgtccacgtgtaaagtgattcccgctgtttgactg

SEQ ID NO: 2749 - DNA, 349 bp, Muscodor strobelii
  misc_feature: SGI cDNA ID NO. 560557
  misc_feature: Reduced expression when VOC is produced
  misc_feature: Encodes the peptide sequence at SEQ ID NO 2750
atgctgctcaaagtaatcctggggactatcttggctttcgccatttgctgcgaatgcgctatcacggcgtgcccgaacatcgatgactctctacatgggtatcagacagcgccagggtggtcagcagtgaaggttgcaactgggctccagtctccccgtgatctagtatttgacaatcagggtcgtctgttggttgtccaagaaggtgttggtataagccagcatactatcgatgccgacggatgcatcacagcttccaagctgttgatctcgttgccagatcttaaccacggcatatgcacgaatggacagattctgttcgcaagctcggctacatctgtatttagct

SEQ ID NO: 2750 - protein, 116 aa, Muscodor strobelii
  misc_feature: SGI Peptide ID NO. 560557
  misc_feature (24)..(116): NCBI GI: 169604130 Blast Desc: SNOG_05075 [Phaeosphaeria nodorum SN15] gi|111066346|gb|EAT87466.1| SNOG_05075 [Phaeosphaeria nodorum SN15]
  misc_feature (22)..(111): NCBI GI: 169862683 Blast Desc: CC1G_09518 [Coprinopsis cinerea okayama7#130] gi|116500954|gb|EAU83849.1| CC1G_09518 [Coprinopsis cinerea okayama7#130]
  misc_feature (14)..(116): NCBI GI: 189203559 Blast Desc: conserved [Pyrenophora tritici-repentis Pt-1C-BFP] gi|187985214|gb|EDU50702.1| conserved [Pyrenophora tritici-repentis Pt-1C-BFP]
  misc_feature (23)..(116): NCBI GI: 169862645 Blast Desc: CC1G_09499 [Coprinopsis cinerea okayama7#130] gi|116500935|gb|EAU83830.1| CC1G_09499 [Coprinopsis cinerea okayama7#130]
  misc_feature (24)..(110): NCBI GI: 169862792 Blast Desc: [Coprinopsis cinerea okayama7#130] gi|116500880|gb|EAU83775.1| [Coprinopsis cinerea okayama7#130]
  misc_feature (23)..(116): NCBI GI: 171676354 Blast Desc: protein product [Podospora anserina] gi|170936243|emb|CAP60902.1| protein product [Podospora anserina]
  misc_feature (23)..(116): NCBI GI: 116200510 Blast Desc: CHGG_10800 [Chaetomium globosum CBS 148.51] gi|88175514|gb|EAQ82982.1| CHGG_10800 [Chaetomium globosum CBS 148.51]
  misc_feature (22)..(116): NCBI GI: 116203139 Blast Desc: CHGG_09454 [Chaetomium globosum CBS 148.51] gi|88177972|gb|EAQ85440.1| CHGG_09454 [Chaetomium globosum CBS 148.51]
  misc_feature (23)..(116): NCBI GI: 164423905 Blast Desc: NCU07811 [Neurospora crassa OR74A] gi|157070280|gb|EAA28613.2| [Neurospora crassa OR74A]
  misc_feature (23)..(116): NCBI GI: 169862695 Blast Desc: CC1G_09524 [Coprinopsis cinerea okayama7#130] gi|116500960|gb|EAU83855.1| CC1G_09524 [Coprinopsis cinerea okayama7#130]
  misc_feature: Useful for introducing or modulating the production of volatile compounds
MLLKVILGTILAFAICCECAITACPNIDDSLHGYQTAPGWSAVKVATGLQSPRDLVFDNQGRLLVVQEGVGISQHTIDADGCITASKLLISLPDLNHGICTNGQILFASSATSVFS

SEQ ID NO: 2751 - DNA, 3381 bp, Muscodor strobelii
  misc_feature: SGI cDNA ID NO. 560558
  misc_feature: Reduced expression when VOC is produced
  misc_feature: Encodes the peptide sequence at SEQ ID NO 2752
atggacaactcgacaacaccgcttgccgactacttctggattgccggcatcgagtccatctcctaccatgacttccccgtcacaccgaccgtcagccaggtgaacacaaccatcaccgaggacggcgagcccgaagagccctccgacagccaagcccaagctaccccgctagctcacaggacctccgccagacactcgcggcagggctccaaccacagactctcacgagcctctatcgccaactcgattcagactctggaggagctggacggcaatacgcggagtaacaggagcagtgccaccatcaggcccaatggcgcccccgcaggtctcggtcagggggacggcatggtcctcgacttcgacttcgacaaggccctggtcaagttcgccgccgagcgcgagaacttcctcgaggacttgagcttcacggctggggccaagatgcaggcgaaacccatggtcaacccccgagcggagcggatcaaggctgaggagatggctagcgggaggatgagtccgttgaagagcatccggggtagtatccgcgggagtattcggcggaagatcagcttcagggagatgaacagcgccaagaagcagctcacagtccaaagacctgcttcggtccggacggcgaaacggctcagcaactacaactcggtcatccccccgccgcagccgctcaacctcgaccccgacatgcaccccctcaagcgccgattcgagcccgagctgctcgaccgatacccgccccgcaacgcccaggaggacatgagccgcagaggcagattccccgactacgtgcccatgtttgccttccccaacgacatccagattgtatcgtcggacgagcgcccgcgatccacgtggcacgggtttaccatgacgtcggacgacaactccaagatctacggtgtgacggtaatcatctggactgcgcttaccactgatgtagcagaagatatcgagaagcgatgcgagcaatggcgacagggccacatgagcgaggaggaacgcgagctggcgggcagcttgggatcgcggctggctgccgaacgagcccacctgtcccaactgctggctaagctgccgactgttccctccgggtcttcggcacgtgagagcttggatgaagagatctctgccgtcgaggagaaaatcagcctcatggccgagatgcttcgaccccttaggcacggggctgcttccaagatcgatgggttgacggccggggagagtggcctgtggacgcctcgggcctatggcattctcggccgcgatgctaacagagtagggttctggaaggactggcttcgagcagtcatcgtgcccatgaccgatggaggcattctacgcgttcccccgacctccccgcgagttgggcgatggcaacctctggaacgctatgtggtgaacctgtgcaccgaggctttcagtcccctcagctcgaaaactcaagttgagatgggcgtgcgagagctccgtctctacgctagaacggaggcggcgaatgagatcccaggatctcgcaatatagatctgtatgcgctattcagatgtctgtcgctcgagaacgtcgtcactctctacgagtatgccatgtccgagtctcgaatcattcttctctcctcccacaccgccatgctccatctcgcctctcacgcccttgctagcctactatacccatttgcctgggccagcatcttcatccccatcctccctgcacgactactgtcagctcttgatgcgccttgcccctacattgttggtatcgaacgacgctacgatgacgtggagcttccggacgatgactatgtcctggtcgatctggacaaggatacgatagactcgaccaatcaacctcaccgtctgcccaagcagattcgtcgcaagcttcagtcgctgttgcagctggcagcaccccacgccattcgatacggtgttgcgactggtccgccgccatatgccatcgagtcgtttccttacgatgccttttctgctgagaatggctcgctgttccatgaacgaactttgccaagtactttggcgaagtgggttgctcaaaactcatcttcgtttgcagagccggagtcaaaggacctgttgagagcgccagtgttcaatgcctttgccagtgcgaaacccggcacagctgaacgtccaaccacgagcaaatcaaataagacaggtagtcctccctcgtccgtttctcctgtttcggtcaacttcccgccaataccctcaatgccctcgactcccatctctaagagcgactcgggctttgcactcacagccacgttgcgcgagaagagatcaggtcattttgataaagaggggcgtcgcagctcctctttcggacaaaccccattccatcgacctcatgcgccattcatgaacggccaccaagccaatttgtccatctctgctatttcgatagactcgcaatcgtcatacggtggctttggcggctatgcgccatcgacgtacgcacagtcgacactggcggcgtccacggtcatgcccaatatgctggtacaaccagtcttcaataccgaaacaactgtatgggtagaaggtcattgttttaatctgatgacggcggacaccagcttcacctgctcggtatgcaatgatcgatccgagggagatggctgctacaagtgcacaggctgtaatgcagtctctcacggccgatgcttgggctgcgtaagtctcgtttgtcctgttgcctttgatgccgataagattcgggcatccttcgtacgctgccatgcttccttgctctacacataccgaaagtatcttggtcgaccgaataaagtccaaaagagcaacggtcagctttatgcattcgatatgaacgggttcatcaaaagcttgccgtatgaccaacaggagtacgcagccatgctcaaagacacacaagcatttaatgaatttattcattcgcgagaaacacagcctcagacgaatgctgatattcgtctctttgacgaaatcattcttgctaagagggctcgaggcaagactgggctcagctcaggtctgtctcgtctctctacgattcgagcatcccatggcatatcgagtggtctacccgccaagaacgccaagctgtcgtcgtatctgactgacacctccggccatctgtggcggacggcgtctgtccccatgcctagtgcgaggttccctggcgactatcggacagtgaccacgagaattcctgcgaagctggatcctgcactgatgaaagagccccgggcagttcaaggtgttattcgccctgagcaacggaagacggggctactgaggaaacaagttcctagtatgatgggccctccaatgctctccctccccatacctaaaaatgagggttga

SEQ ID NO: 2752 - protein, 1126 aa, Muscodor strobelii
  misc_feature: SGI Peptide ID NO. 560558
  misc_feature (915)..(985): Pfam Id: PF03455 Pfam Desc: dDENN domain
  misc_feature (417)..(614): Pfam Id: PF02141 Pfam Desc: DENN (AEX-3) domain
  misc_feature (1)..(1113): NCBI GI: 46123813 Blast Desc: FG06284.1 [Gibberella zeae PH-1]
  misc_feature (40)..(1113): NCBI GI: 261353053 Blast Desc: dDENN domain-containing protein [Verticillium albo-atrum VaMs.102]
  misc_feature (1)..(1112): NCBI GI: 145610565 Blast Desc: MGG_01106 [Magnaporthe grisea 70-15] gi|145017929|gb|EDK02208.1| MGG_01106 [Magnaporthe grisea 70-15]
  misc_feature (1)..(1115): NCBI GI: 116204865 Blast Desc: CHGG_10316 [Chaetomium globosum CBS 148.51] gi|88176444|gb|EAQ83912.1| CHGG_10316 [Chaetomium globosum CBS 148.51]
  misc_feature (2)..(1087): NCBI GI: 171689022 Blast Desc: protein product [Podospora anserina] gi|170944473|emb|CAP70584.1| protein product [Podospora anserina]
  misc_feature (99)..(1122): NCBI GI: 85082210 Blast Desc: NCU01659 [Neurospora crassa OR74A] gi|9368957|emb|CAB99187.1| conserved [Neurospora crassa] gi|28917945|gb|EAA27629.1| NCU01659 [Neurospora crassa OR74A]
  misc_feature (2)..(1113): NCBI GI: 156059876 Blast Desc: SS1G_03951 [Sclerotinia sclerotiorum 1980] gi|154701737|gb|EDO01476.1| SS1G_03951 [Sclerotinia sclerotiorum 1980]
  misc_feature (2)..(1120): NCBI GI: 70994802 Blast Desc: dDENN domain protein [Aspergillus fumigatus Af293] gi|66849812|gb|EAL90140.1| dDENN domain protein [Aspergillus fumigatus Af293] gi|159124908|gb|EDP50025.1| dDENN domain protein
  misc_feature (6)..(1111): NCBI GI: 225560448 Blast Desc: conserved [Ajellomyces capsulatus G186AR]
  misc_feature (4)..(1120): NCBI GI: 119501234 Blast Desc: dDENN domain protein [Neosartorya fischeri NRRL 181] gi|119415539|gb|EAW25477.1| dDENN domain protein [Neosartorya fischeri NRRL 181]
  misc_feature: Useful for introducing or modulating the production of volatile compounds
MDNSTTPLADYFWIAGIESISYHDFPVTPTVSQVNTTITEDGEPEEPSDSQAQATPLAHRTSARHSRQGSNHRLSRASIANSIQTLEELDGNTRSNRSSATIRPNGAPAGLGQGDGMVLDFDFDKALVKFAAERENFLEDLSFTAGAKMQAKPMVNPRAERIKAEEMASGRMSPLKSIRGSIRGSIRRKISFREMNSAKKQLTVQRPASVRTAKRLSNYNSVIPPPQPLNLDPDMHPLKRRFEPELLDRYPPRNAQEDMSRRGRFPDYVPMFAFPNDIQIVSSDERPRSTWHGFTMTSDDNSKIYGVTVIIWTALTTDVAEDIEKRCEQWRQGHMSEEERELAGSLGSRLAAERAHLSQLLAKLPTVPSGSSARESLDEEISAVEEKISLMAEMLRPLRHGAASKIDGLTAGESGLWTPRAYGILGRDANRVGFWKDWLRAVIVPMTDGGILRVPPTSPRVGRWQPLERYVVNLCTEAFSPLSSKTQVEMGVRELRLYARTEAANEIPGSRNIDLYALFRCLSLENVVTLYEYAMSESRIILLSSHTAMLHLASHALASLLYPFAWASIFIPILPARLLSALDAPCPYIVGIERRYDDVELPDDDYVLVDLDKDTIDSTNQPHRLPKQIRRKLQSLLQLAAPHAIRYGVATGPPPYAIESFPYDAFSAENGSLFHERTLPSTLAKWVAQNSSSFAEPESKDLLRAPVFNAFASAKPGTAERPTTSKSNKTGSPPSSVSPVSVNFPPIPSMPSTPISKSDSGFALTATLREKRSGHFDKEGRRSSSFGQTPFHRPHAPFMNGHQANLSISAISIDSQSSYGGFGGYAPSTYAQSTLAASTVMPNMLVQPVFNTETTVWVEGHCFNLMTADTSFTCSVCNDRSEGDGCYKCTGCNAVSHGRCLGCVSLVCPVAFDADKIRASFVRCHASLLYTYRKYLGRPNKVQKSNGQLYAFDMNGFIKSLPYDQQEYAAMLKDTQAFNEFIHSRETQPQTNADIRLFDEIILAKRARGKTGLSSGLSRLSTIRASHGISSGLPAKNAKLSSYLTDTSGHLWRTASVPMPSARFPGDYRTVTTRIPAKLDPALMKEPRAVQGVIRPEQRKTGLLRKQVPSMMGPPMLSLPIPKNEG

SEQ ID NO: 2753 - DNA, 4692 bp, Muscodor strobelii
  misc_feature: SGI EST ID NO. CUFF.7409.1
  misc_feature: Variant of the nucleotide sequence at SEQ ID NO 2751
gagatgtgggtgcacccggcgagccttgggcgagagcgaaacatttgatccaaaggccacgacaaaagacacgaccatctcccatctttacccgcatcgcggatcgtccgaccagttcccccccaccgcccccggcgcccgtcgttggagacacaccaccaccgctcatccatccctcctttaacccctggccgccctcctcttttctctcacctccacttctccgtctgtcgtctgcatttgcctggtgtaattctgtggtgctttcttcctcacattcattccctttcttccttccttcctttcgcatttttcctgtgtttggtgtgtttcgcggtgagaggtttagctggttgttgatctgacgcccggcgcactgagcactgggccacactgactgaaccttggggctcttggatccctgacccgggcggcctgtctctggcggtgcacagctcagacgccgcacctcgcagtttttcagagacaaagaaacacacttccgtgctctctctgatgcacggccgcggcctctgactgccccaattttgggctacagagcagaccgactaatgtcaaatctggagccacggacaattgcaccttctttcccctatgtgatgcccatattgcacccctaattccctctccgacccctggaaaacatcgcagtcgccacatatcccaggtacaagctgcccacgcccggcttgtgccagtccgaccatggacaactcgacaacaccgcttgccgactacttctggattgccggcatcgagtccatctcctaccatgacttccccgtcacaccgaccgtcagccaggtgaacacaaccatcaccgaggacggcgagcccgaagagccctccgacagccaagcccaagctaccccgctagctcacaggacctccgccagacactcgcggcagggctccaaccacagactctcacgagcctctatcgccaactcgattcagactctggaggagctggacggcaatacgcggagtaacaggagcagtgccaccatcaggcccaatggcgcccccgcaggtctcggtcagggggacggcatggtcctcgacttcgacttcgacaaggccctggtcaagttcgccgccgagcgcgagaacttcctcgaggacttgagcttcacggctggggccaagatgcaggcgaaacccatggtcaacccccgagcggagcggatcaaggctgaggagatggctagcgggaggatgagtccgttgaagagcatccggggtagtatccgcgggagtattcggcggaagatcagcttcagggagatgaacagcgccaagaagcagctcacagtccaaagacctgcttcggtccggacggcgaaacggctcagcaactacaactcggtcatccccccgccgcagccgctcaacctcgaccccgacatgcaccccctcaagcgccgattcgagcccgagctgctcgaccgatacccgccccgcaacgcccaggaggacatgagccgcagaggcagattccccgactacgtgcccatgtttgccttccccaacgacatccagattgtatcgtcggacgagcgcccgcgatccacgtggcacgggtttaccatgacgtcggacgacaactccaagatctacggtgtgacggtaatcatctggactgcgcttaccactgatgtagcagaagatatcgagaagcgatgcgagcaatggcgacagggccacatgagcgaggaggaacgcgagctggcgggcagcttgggatcgcggctggctgccgaacgagcccacctgtcccaactgctggctaagctgccgactgttccctccgggtcttcggcacgtgagagcttggatgaagagatctctgccgtcgaggagaaaatcagcctcatggccgagatgcttcgaccccttaggcacggggctgcttccaagatcgatgggttgacggccggggagagtggcctgtggacgcctcgggcctatggcattctcggccgcgatgctaacagagtagggttctggaaggactggcttcgagcagtcatcgtgcccatgaccgatggaggcattctacgcgttcccccgacctccccgcgagttgggcgatggcaacctctggaacgctatgtggtgaacctgtgcaccgaggctttcagtcccctcagctcgaaaactcaagttgagatgggcgtgcgagagctccgtctctacgctagaacggaggcggcgaatgagatcccaggatctcgcaatatagatctgtatgcgctattcagatgtctgtcgctcgagaacgtcgtcactctctacgagtatgccatgtccgagtctcgaatcattcttctctcctcccacaccgccatgctccatctcgcctctcacgcccttgctagcctactatacccatttgcctgggccagcatcttcatccccatcctccctgcacgactactgtcagctcttgatgcgccttgcccctacattgttggtatcgaacgacgctacgatgacgtggagcttccggacgatgactatgtcctggtcgatctggacaaggatacgatagactcgaccaatcaacctcaccgtctgcccaagcagattcgtcgcaagcttcagtcgctgttgcagctggcagcaccccacgccattcgatacggtgttgcgactggtccgccgccatatgccatcgagtcgtttccttacgatgccttttctgctgagaatggctcgctgttccatgaacgaactttgccaagtactttggcgaagtgggttgctcaaaactcatcttcgtttgcagagccggagtcaaaggacctgttgagagcgccagtgttcaatgcctttgccagtgcgaaacccggcacagctgaacgtccaaccacgagcaaatcaaataagacaggtagtcctccctcgtccgtttctcctgtttcggtcaacttcccgccaataccctcaatgccctcgactcccatctctaagagcgactcgggctttgcactcacagccacgttgcgcgagaagagatcaggtcattttgataaagaggggcgtcgcagctcctctttcggacaaaccccattccatcgacctcatgcgccattcatgaacggccaccaagccaatttgtccatctctgctatttcgatagactcgcaatcgtcatacggtggctttggcggctatgcgccatcgacgtacgcacagtcgacactggcggcgtccacggtcatgcccaatatgctggtacaaccagtcttcaataccgaaacaactgtatgggtagaaggtcattgttttaatctgatgacggcggacaccagcttcacctgctcggtatgcaatgatcgatccgagggagatggctgctacaagtgcacaggctgtaatgcagtctctcacggccgatgcttgggctgcgtaagtctcgtttgtcctgttgcctttgatgccgataagattcgggcatccttcgtacgctgccatgcttccttgctctacacataccgaaagtatcttggtcgaccgaataaagtccaaaagagcaacggtcagctttatgcattcgatatgaacgggttcatcaaaagcttgccgtatgaccaacaggagtacgcagccatgctcaaagacacacaagcatttaatgaatttattcattcgcgagaaacacagcctcagacgaatgctgatattcgtctctttgacgaaatcattcttgctaagagggctcgaggcaagactgggctcagctcaggtctgtctcgtctctctacgattcgagcatcccatggcatatcgagtggtctacccgccaagaacgccaagctgtcgtcgtatctgactgacacctccggccatctgtggcggacggcgtctgtccccatgcctagtgcgaggttccctggcgactatcggacagtgaccacgagaattcctgcgaagctggatcctgcactgatgaaagagccccgggcagttcaaggtgttattcgccctgagcaacggaagacggggctactgaggaaacaagttcctagtatgatgggccctccaatgctctccctccccatacctaaaaatgagggttgacggtgtattgagggccagtcgaaatgaaggtctaatggtcgataatcttaatcatatatgaggtactgcattactgggagctaagagtttcctaagaggtacttctctgctccgactcgtgttgatgcactagccaaagggaagaaagaagatagaggacggacttgaatatgtacaagatggggaatctagcattgattagcattgtgaggcacgttgtgaacaaaagcaaggtggcatgagcacatacatatgcatggagctgagcatggacccaattcatgggatgaaaggagtggggaaaggggagagtgaatggaacggactggactgaatgaagtgggctgggaatgaaattcaaaagcatagcctgcgtccgtgagcattttgcaggagaaattgattattcttgaacgagtcttggatgaccgtgtgttactcatgatggatatggatgtgagatgctcaatattggattagagaacagcctttttgagacatctgtcccgatgatcatttttttcttgattgtcgggatgtcttggagatggctgaatatgcatcctaaataaacggagcctccaa

SEQ ID NO: 2754 - DNA, 3387 bp, Muscodor strobelii
  misc_feature: SGI cDNA ID NO. 560559
  misc_feature: Encodes the peptide sequence at SEQ ID NO 2755
atggacaactcgacaacaccgcttgccgactacttctggattgccggcatcgagtccatctcctaccatgacttccccgtcacaccgaccgtcagccaggtgaacacaaccatcaccgaggacggcgagcccgaagagccctccgacagccaagcccaagctaccccgctagctcacaggacctccgccagacactcgcggcagggctccaaccacagactctcacgagcctctatcgccaactcgattcagactctggaggagctggacggcaatacgcggagtaacaggagcagtgccaccatcaggcccaatggcgcccccgcaggtctcggtcagggggacggcatggtcctcgacttcgacttcgacaaggccctggtcaagttcgccgccgagcgcgagaacttcctcgaggacttgagcttcacggctggggccaagatgcaggcgaaacccatggtcaacccccgagcggagcggatcaaggctgaggagatggctagcgggaggatgagtccgttgaagagcatccggggtagtatccgcgggagtattcggcggaagatcagcttcagggagatgaacagcgccaagaagcagctcacagtccaaagacctgcttcggtccggacggcgaaacggctcagcaactacaactcggtcatccccccgccgcagccgctcaacctcgaccccgacatgcaccccctcaagcgccgattcgagcccgagctgctcgaccgatacccgccccgcaacgcccaggaggacatgagccgcagaggcagattccccgactacgtgcccatgtttgccttccccaacgacatccagattgtatcgtcggacgagcgcccgcgatccacgtggcacgggtttaccatgacgtcggacgacaactccaagatctacggtgtgacggtaatcatctggactgcgcttaccactgatgtagcagaagatatcgagaagcgatgcgagcaatggcgacagggccacatgagcgaggaggaacgcgagctggcgggcagcttgggatcgcggctggctgccgaacgagcccacctgtcccaactgctggctaagctgccgactgttccctccgggtcttcggcacgtgagagcttggatgaagagatctctgccgtcgaggagaaaatcagcctcatggccgagatgcttcgaccccttaggcacggggctgcttccaagatcgatgggttgacggccggggagagtggcctgtggacgcctcgggcctatggcattctcggccgcgatgctaacagagtagggttctggaaggactggcttcgagcagtcatcgtgcccatgaccgatggaggcattctacgcgttcccccgacctccccgcgagttgggcgatggcaacctctggaacgctatgtggtgaacctgtgcaccgaggctttcagtcccctcagctcgaaaactcaagttgagatgggcgtgcgagagctccgtctctacgctagaacggaggcggcgaatgagatcccaggatctcgcaatatagatctgtatgcgctattcagatgtctgtcgctcgagaacgtcgtcactctctacgagtatgccatgtccgagtctcgaatcattcttctctcctcccacaccgccatgctccatctcgcctctcacgcccttgctagcctactatacccatttgcctgggccagcatcttcatccccatcctccctgcacgactactgtcagctcttgatgcgccttgcccctacattgttggtatcgaacgacgctacgatgacgtggagcttccggacgatgactatgtcctggtcgatctggacaaggatacgatagactcgaccaatcaacctcaccgtctgcccaagcagattcgtcgcaagcttcagtcgctgttgcagctggcagcaccccacgccattcgatacggtgttgcgactggtccgccgccatatgccatcgagtcgtttccttacgatgccttttctgctgagaatggctcgctgttccatgaacgaactttgccaagtactttggcgaagtgggttgctcaaaactcatcttcgtttgcagagccggagtcaaaggacctgttgagagcgccagtgttcaatgcctttgccagtgcgaaacccggcacagctgaacgtccaaccacgagcaaatcaaataagacaggtagtcctccctcgtccgtttctcctgtttcggtcaacttcccgccaataccctcaatgccctcgactcccatctctaagagcgactcgggctttgcactcacagccacgttgcgcgagaagagatcaggtcattttgataaagaggggcgtcgcagctcctctttcggacaaaccccattccatcgacctcatgcgccattcatgaacggccaccaagccaatttgtccatctctgctatttcgatagactcgcaatcgtcatacggtggctttggcggctatgcgccatcgacgtacgcacagtcgacactggcggcgtccacggtcatgcccaatatgctggtacaaccagtcttcaataccgaaacaactgtatgggtagaaggtcattgttttaatctgatgacggcggacaccagcttcacctgctcggtatgcaatgatcgatccgagggagatggctgctacaagtgcacaggctgtaatgcagtctctcacggccgatgcttgggctgcgtaagtctcgtttgtcctgttgcctttgatgccgataagattcgggcatccttcgtacgctgccatgcttccttgctctacacataccgaaagtatcttggtcgaccgaataaagtccaaaagagcaacggtcagctttatgcattcgatatgaacgggttcatcaaaagcttgccgtatgaccaacaggagtacgcagccatgctcaaagacacacaagaactagcatttaatgaatttattcattcgcgagaaacacagcctcagacgaatgctgatattcgtctctttgacgaaatcattcttgctaagagggctcgaggcaagactgggctcagctcaggtctgtctcgtctctctacgattcgagcatcccatggcatatcgagtggtctacccgccaagaacgccaagctgtcgtcgtatctgactgacacctccggccatctgtggcggacggcgtctgtccccatgcctagtgcgaggttccctggcgactatcggacagtgaccacgagaattcctgcgaagctggatcctgcactgatgaaagagccccgggcagttcaaggtgttattcgccctgagcaacggaagacggggctactgaggaaacaagttcctagtatgatgggccctccaatgctctccctccccatacctaaaaatgagggttga

SEQ ID NO: 2755 - protein, 1128 aa, Muscodor strobelii
  misc_feature: SGI Peptide ID NO. 560559
  misc_feature (915)..(987): Pfam Id: PF03455 Pfam Desc: dDENN domain
  misc_feature (417)..(614): Pfam Id: PF02141 Pfam Desc: DENN (AEX-3) domain
  misc_feature (1)..(1115): NCBI GI: 46123813 Blast Desc: FG06284.1 [Gibberella zeae PH-1]
  misc_feature (40)..(1115): NCBI GI: 261353053 Blast Desc: dDENN domain-containing protein [Verticillium albo-atrum VaMs.102]
  misc_feature (1)..(1114): NCBI GI: 145610565 Blast Desc: MGG_01106 [Magnaporthe grisea 70-15] gi|145017929|gb|EDK02208.1| MGG_01106 [Magnaporthe grisea 70-15]
  misc_feature (1)..(1117): NCBI GI: 116204865 Blast Desc: CHGG_10316 [Chaetomium globosum CBS 148.51] gi|88176444|gb|EAQ83912.1| CHGG_10316 [Chaetomium globosum CBS 148.51]
  misc_feature (2)..(1089): NCBI GI: 171689022 Blast Desc: protein product [Podospora anserina] gi|170944473|emb|CAP70584.1| protein product [Podospora anserina]
  misc_feature (99)..(1124): NCBI GI: 85082210 Blast Desc: NCU01659 [Neurospora crassa OR74A] gi|9368957|emb|CAB99187.1| conserved [Neurospora crassa] gi|28917945|gb|EAA27629.1| NCU01659 [Neurospora crassa OR74A]
  misc_feature (2)..(1122): NCBI GI: 70994802 Blast Desc: dDENN domain protein [Aspergillus fumigatus Af293] gi|66849812|gb|EAL90140.1| dDENN domain protein [Aspergillus fumigatus Af293] gi|159124908|gb|EDP50025.1| dDENN domain protein
  misc_feature (6)..(1113): NCBI GI: 225560448 Blast Desc: conserved [Ajellomyces capsulatus G186AR]
  misc_feature (4)..(1122): NCBI GI: 119501234 Blast Desc: dDENN domain protein [Neosartorya fischeri NRRL 181] gi|119415539|gb|EAW25477.1| dDENN domain protein [Neosartorya fischeri NRRL 181]
  misc_feature (7)..(1111): NCBI GI: 261197157 Blast Desc: dDENN domain-containing protein [Ajellomyces dermatitidis SLH14081] gi|239595611|gb|EEQ78192.1| dDENN domain-containing protein [Ajellomyces dermatitidis SLH14081]
MDNSTTPLADYFWIAGIESISYHDFPVTPTVSQVNTTITEDGEPEEPSDSQAQATPLAHRTSARHSRQGSNHRLSRASIANSIQTLEELDGNTRSNRSSATIRPNGAPAGLGQGDGMVLDFDFDKALVKFAAERENFLEDLSFTAGAKMQAKPMVNPRAERIKAEEMASGRMSPLKSIRGSIRGSIRRKISFREMNSAKKQLTVQRPASVRTAKRLSNYNSVIPPPQPLNLDPDMHPLKRRFEPELLDRYPPRNAQEDMSRRGRFPDYVPMFAFPNDIQIVSSDERPRSTWHGFTMTSDDNSKIYGVTVIIWTALTTDVAEDIEKRCEQWRQGHMSEEERELAGSLGSRLAAERAHLSQLLAKLPTVPSGSSARESLDEEISAVEEKISLMAEMLRPLRHGAASKIDGLTAGESGLWTPRAYGILGRDANRVGFWKDWLRAVIVPMTDGGILRVPPTSPRVGRWQPLERYVVNLCTEAFSPLSSKTQVEMGVRELRLYARTEAANEIPGSRNIDLYALFRCLSLENVVTLYEYAMSESRIILLSSHTAMLHLASHALASLLYPFAWASIFIPILPARLLSALDAPCPYIVGIERRYDDVELPDDDYVLVDLDKDTIDSTNQPHRLPKQIRRKLQSLLQLAAPHAIRYGVATGPPPYAIESFPYDAFSAENGSLFHERTLPSTLAKWVAQNSSSFAEPESKDLLRAPVFNAFASAKPGTAERPTTSKSNKTGSPPSSVSPVSVNFPPIPSMPSTPISKSDSGFALTATLREKRSGHFDKEGRRSSSFGQTPFHRPHAPFMNGHQANLSISAISIDSQSSYGGFGGYAPSTYAQSTLAASTVMPNMLVQPVFNTETTVWVEGHCFNLMTADTSFTCSVCNDRSEGDGCYKCTGCNAVSHGRCLGCVSLVCPVAFDADKIRASFVRCHASLLYTYRKYLGRPNKVQKSNGQLYAFDMNGFIKSLPYDQQEYAAMLKDTQELAFNEFIHSRETQPQTNADIRLFDEIILAKRARGKTGLSSGLSRLSTIRASHGISSGLPAKNAKLSSYLTDTSGHLWRTASVPMPSARFPGDYRTVTTRIPAKLDPALMKEPRAVQGVIRPEQRKTGLLRKQVPSMMGPPMLSLPIPKNEG

SEQ ID NO: 2756 - DNA, 4692 bp, Muscodor strobelii; identical to SEQ ID NO: 2753
  misc_feature: SGI EST ID NO. CUFF.7409.1
  misc_feature: Variant of the nucleotide sequence at SEQ ID NO 2754

SEQ ID NO: 2757 - DNA, 753 bp, Muscodor strobelii
  misc_feature: SGI cDNA ID NO. 560560
  misc_feature: Encodes the peptide sequence at SEQ ID NO 2758
atgtcgcaaccactactatttaacccatatcttcgtaaacttcggtgcccacgctgcagaaagaagtgtccaggagaccatgtcgatcttctacacccacctcgacgtatagatggttcatgggcatcgtactgcggcgtctgtggcgttctttgcaacactgaccaagagcttaatgcacatgtgtatgagaatcaccgaggccccctgcctcctcatcgacctgctgtcatccagcatcccgtcatccagcatcctgtcgtcacctccattccccagcgcgaagaccatgatgagcccgatgagagcgaagtagatgtgagtgatgccgacagtgctgctgccgctcctcgcaacaaagctatgagcacatgggctcgtcttggggatattctggagatcatcgaggacaacctgctgccacatgtagccatctttcgtgaattggaggcacttatcaacgcattgaataccgaagggtggactgaagacggtttcgagacttctgtacgcctccacgttatcgagggtcatcttcgcttctggttcccacgccatcaccacatctttgacgacgtccaggtcctcagagcagctttgaacaacgagggctggtttcgaaatgacgatgatgatgcgtatgagcgagacgtcaatggtgggagcgacgacgagactgacgatgaggattttgatagccaggatgacgatgagagcaaagaggacgaagatgaaatgcaggtctcagactga

SEQ ID NO: 2758 - protein, 250 aa, Muscodor strobelii
  misc_feature: SGI Peptide ID NO. 560560
MSQPLLFNPYLRKLRCPRCRKKCPGDHVDLLHPPRRIDGSWASYCGVCGVLCNTDQELNAHVYENHRGPLPPHRPAVIQHPVIQHPVVTSIPQREDHDEPDESEVDVSDADSAAAAPRNKAMSTWARLGDILEIIEDNLLPHVAIFRELEALINALNTEGWTEDGFETSVRLHVIEGHLRFWFPRHHHIFDDVQVLRAALNNEGWFRNDDDDAYERDVNGGSDDETDDEDFDSQDDDESKEDEDEMQVSD

SEQ ID NO: 2759 - DNA, 1119 bp, Muscodor strobelii
  misc_feature: SGI cDNA ID NO. 560561
  misc_feature: Encodes the peptide sequence at SEQ ID NO 2760
atgtcttttccgtgcacccatcccgggtgcgtgcgtgagttttcgtctgcgaatggtctaggcaaacatatgcgaactcacctcccattgcttgactgcccgagctgcgacgccaaaatcaaagggaagcagtcggccctccacctccacttctacgagacgcatacctctgccaatgcccaacgtcaggtcgtaggcggttcaagcttgtggcgctgtacaatctgcggagagactgcgagatctcgccctaagttgttggaacacatgttcctagctcatgctcagagcgtcgccccgaaccctagtgtcgcccaccagtctccggtcatagccccgtctcccgccatgccttcgactctggtcatgccttctactcccattgtacctcaactacccagtacccctgttcagcagcccatcgtccacgcctcccgcgacattgctaagcctgaccctcagccggacgtggctgagcctcaagagctcatggccagtctcccgcgtaacacgccggatgcagactctcctcccaccgtcacgcaggagtatgacgacccctcaatcttcaacaagcttgccacgccagatgagggacattggtcatcctctgttcttctccatgccattaaagcggctctccaagccaccctgcgtccggatctaccggtttttggcgaaatcgatgcactacgcgaagcgctgaatcaagaaggatggtcacccaatggagcctcaacctcgggccgccttgatcggattgaggctgatatcagtagagccttcaacaaagagctcgccatcttcgaattcttctctgagctacgtgtggtgctgaataccaacggatggtacagcaatgacagcgaagatgatgaagagagtgaagaatacaagtgtgagagcgattatgagagcggcgacgacgagcacaatgacaatatgtgcgaagttaaagaagagcatgcgagcgacgacgacgaacacatcaacaatatgtgcgaaggaaacggcaaggatgatcgcgtgggagatttcaatttggccgattatgagggagacggagtgttcaactatctgtttgattatgagggaaaccggtattatgattatgagtaa

SEQ ID NO: 2760 - protein, 372 aa, Muscodor strobelii
  misc_feature: SGI Peptide ID NO. 560561
  misc_feature (3)..(27): Pfam Id: PF00096 Pfam Desc: Zinc finger, C2H2 type
MSFPCTHPGCVREFSSANGLGKHMRTHLPLLDCPSCDAKIKGKQSALHLHFYETHTSANAQRQVVGGSSLWRCTICGETARSRPKLLEHMFLAHAQSVAPNPSVAHQSPVIAPSPAMPSTLVMPSTPIVPQLPSTPVQQPIVHASRDIAKPDPQPDVAEPQELMASLPRNTPDADSPPTVTQEYDDPSIFNKLATPDEGHWSSSVLLHAIKAALQATLRPDLPVFGEIDALREALNQEGWSPNGASTSGRLDRIEADISRAFNKELAIFEFFSELRVVLNTNGWYSNDSEDDEESEEYKCESDYESGDDEHNDNMCEVKEEHASDDDEHINNMCEGNGKDDRVGDFNLADYEGDGVFNYLFDYEGNRYYDYE

SEQ ID NO: 2761 - DNA, 591 bp, Muscodor strobelii
  misc_feature: SGI cDNA ID NO. 560562
  misc_feature: Encodes the peptide sequence at SEQ ID NO 2762
atgttcatctactcacttttagcaatacaggacaaaaaaactggcttcggctccttctacagcagcactgtccctgatggctacaccctcggcgacatcacttggactcggcccattgtcgatggtggcaaggactacaatttcaagggaacggtcgaggaagtattcgctcagatcaatgccgagcgagtcaaacaggggcttgatccccttgacgaccccactgtcaacacgaccgacatcgtaggtcgagatgtctcagaaccggacgggtttgataaagccatctgcaaagtccctctcaaagccggagctttcttgaatcgtattctggatggagcggattatctcagaacggttgcaggcaaatgtggtatgaatggaccgaagatatgcggtcgcatttcctgcagctataactccgctatctattggtgcaatgataacagtcagtattccgaatatccatgcgcgcagtttgctgatggagtcgatcgacttcgtgacccgtgccaattcgacggcaatctctggggtcaagccttttataccgagaactacaacgtttatgtgggacaagatagttgctaa

SEQ ID NO: 2762 - protein, 196 aa, Muscodor strobelii
  misc_feature: SGI Peptide ID NO. 560562
  misc_feature (28)..(196): NCBI GI: 170940149 Blast Desc: protein product [Podospora anserina]
  misc_feature (2)..(196): NCBI GI: 171680404 Blast Desc: protein product [Podospora anserina] gi|170939829|emb|CAP65054.1| protein product [Podospora anserina]
  misc_feature (27)..(196): NCBI GI: 121717032 Blast Desc: conserved [Aspergillus clavatus NRRL 1] gi|119404141|gb|EAW14558.1| conserved [Aspergillus clavatus NRRL 1]
  misc_feature (15)..(196): NCBI GI: 238839568 Blast Desc: [Microsporum canis CBS 113480]
  misc_feature (26)..(196): NCBI GI: 116207534 Blast Desc: [Chaetomium globosum CBS 148.51] gi|88183657|gb|EAQ91125.1| [Chaetomium globosum CBS 148.51]
  misc_feature (26)..(196): NCBI GI: 256723698 Blast Desc: NECHADRAFT_86628 [Nectria haematococca mpVI 77-13-4]
  misc_feature (26)..(196): NCBI GI: 238506391 Blast Desc: conserved [Aspergillus flavus NRRL3357] gi|220689110|gb|EED45461.1| conserved [Aspergillus flavus NRRL3357]
  misc_feature (26)..(189): NCBI GI: 169785397 Blast Desc: [Aspergillus oryzae RIB40] gi|83775907|dbj|BAE66026.1| protein product [Aspergillus oryzae]
  misc_feature (27)..(196): NCBI GI: 169770867 Blast Desc: [Aspergillus oryzae RIB40] gi|83767762|dbj|BAE57901.1| protein product [Aspergillus oryzae]
  misc_feature (27)..(196): NCBI GI: 238486654 Blast Desc: conserved [Aspergillus flavus NRRL3357] gi|220699444|gb|EED55783.1| conserved [Aspergillus flavus NRRL3357]
MFIYSLLAIQDKKTGFGSFYSSTVPDGYTLGDITWTRPIVDGGKDYNFKGTVEEVFAQINAERVKQGLDPLDDPTVNTTDIVGRDVSEPDGFDKAICKVPLKAGAFLNRILDGADYLRTVAGKCGMNGPKICGRISCSYNSAIYWCNDNSQYSEYPCAQFADGVDRLRDPCQFDGNLWGQAFYTENYNVYVGQDSC

SEQ ID NO: 2763 - DNA, 948 bp, Muscodor strobelii
  misc_feature: SGI cDNA ID NO. 560563
  misc_feature: Encodes the peptide sequence at SEQ ID NO 2764
atggcagagcacccgtttctagaaggtaaagcgccgttcataattccatcaattgaagagccgtgctgcacttattataagatatttggagatcttaatacgtgtgattgccttccggttgttatagcgcatggtgggcctggggttgggcatgagtacctgctacccttcaccgaactctggccccaatatggtatgcccgtcatcttctacgatcaaataagctgtgcctcatccactcatctgccacacaaggctggtgataaatcgttctggcaggaacagttatttcaggatgagttagacaacttggttgactacttgaacctatcttcgcgcggattccatctctttggccacagctgggggggcatgttggcctcggcattcgcggctcgtcaacccccgggcctgcaaagactggttctcgcaagtgctcttgcgagcaaagagctctccagagaaggatttcgcctccagcgaaatgattttccaccggatttgcgacaagcagctgaagaggcggaggcaaaaagcgaatttgaaggtgttgcatttaggattgccatgacatactaccaaaggacgcacgtctgccggactgctccgatcccgccggagcttggcgcggcgttcaaaaatttaagtgaagacaatacagtgaatcataccatgaatggccgttcagcggtagatctagacgcatctaacgctacgtggtctgtcattgatcgcctcggtaacatcactgtgccgacacttgtgtactatggtgagtacgatacttcgcaccacgttgcgcaggtgccgttcttgcagaatatctcacaggttcaggcgaaggtcttcatggacagtggacatatgtgtcatttagaaggaagaggaattagagaggaagtaatcaagtctgttggaaatttcttaaactacggtactactagctag

SEQ ID NO: 2764 - protein, 315 aa, Muscodor strobelii
  misc_feature: SGI Peptide ID NO. 560563
  misc_feature (66)..(304): Pfam Id: PF00561 Pfam Desc: alpha/beta hydrolase fold
  misc_feature (101)..(304): Pfam Id: PF00561 Pfam Desc: alpha/beta hydrolase fold
  misc_feature (8)..(309): NCBI GI: 156036178 Blast Desc: SS1G_12775 [Sclerotinia sclerotiorum 1980] gi|154698183|gb|EDN97921.1| SS1G_12775 [Sclerotinia sclerotiorum 1980]
  misc_feature (5)..(305): NCBI GI: 154314339 Blast Desc: BC1G_05263 [Botryotinia fuckeliana B05.10] gi|150848908|gb|EDN24101.1| BC1G_05263 [Botryotinia fuckeliana B05.10]
  misc_feature (23)..(310): NCBI GI: 254406800 Blast Desc: proline imino-peptidase [Streptomyces sviceus ATCC 29083] gi|197716230|gb|EDY60264.1| proline imino-peptidase [Streptomyces sviceus ATCC 29083]
  misc_feature (5)..(310): NCBI GI: 271963655 Blast Desc: Prolyl aminopeptidase [Streptosporangium roseum DSM 43021] gi|270506830|gb|ACZ85108.1| Prolyl aminopeptidase [Streptosporangium roseum DSM 43021]
  misc_feature (7)..(310): NCBI GI: 83593515 Blast Desc: peptidase S33, tricorn interacting factor 1 [Rhodospirillum rubrum ATCC 11170] gi|83576429|gb|ABC22980.1| Peptidase S33, tricorn interacting factor 1 [Rhodospirillum ATCC
  misc_feature (24)..(310): NCBI GI: 260459253 Blast Desc: proline-specific peptidase [Mesorhizobium opportunistum WSM2075] gi|259034807|gb|EEW36063.1| proline-specific peptidase [Mesorhizobium opportunistum WSM2075]
  misc_feature (8)..(310): NCBI GI: 13470803 Blast Desc: proline iminopeptidase [Mesorhizobium loti MAFF303099] gi|14021546|dbj|BAB48158.1| proline iminopeptidase [Mesorhizobium loti MAFF303099]
  misc_feature (5)..(293): NCBI GI: 256376806 Blast Desc: proline-specific peptidase [Actinosynnema mirum DSM 43827] gi|255921109|gb|ACU36620.1| proline-specific peptidase [Actinosynnema mirum DSM 43827]
  misc_feature (24)..(310): NCBI GI: 271501435 Blast Desc: proline-specific peptidase [Dickeya dadantii Ech586] gi|270344990|gb|ACZ77755.1| proline-specific peptidase [Dickeya dadantii Ech586]
  misc_feature (2)..(309): NCBI GI: 270494696 Blast Desc: proline-specific peptidase [Acidovorax avenae subsp. avenae ATCC 19860] gi|270328535|gb|EFA39342.1| proline-specific peptidase [Acidovorax avenae subsp. avenae ATCC 19860]
  misc_feature (25)..(303): SWISSPROT Homolog: EC 3.4.11.5 Prolyl aminopeptidase
MAEHPFLEGKAPFIIPSIEEPCCTYYKIFGDLNTCDCLPVVIAHGGPGVGHEYLLPFTELWPQYGMPVIFYDQISCASSTHLPHKAGDKSFWQEQLFQDELDNLVDYLNLSSRGFHLFGHSWGGMLASAFAARQPPGLQRLVLASALASKELSREGFRLQRNDFPPDLRQAAEEAEAKSEFEGVAFRIAMTYYQRTHVCRTAPIPPELGAAFKNLSEDNTVNHTMNGRSAVDLDASNATWSVIDRLGNITVPTLVYYGEYDTSHHVAQVPFLQNISQVQAKVFMDSGHMCHLEGRGIREEVIKSVGNFLNYGTTS

SEQ ID NO: 2765 - DNA, 872 bp, Muscodor strobelii
  misc_feature: SGI EST ID NO. CUFF.6899.0
  misc_feature: Variant of the nucleotide sequence at SEQ ID NO 2763
ggcatgagtacctgctacccttcaccgaactctggccccaatatggtatgcccgtcatcttctacgatcaaataagctgtgcctcatccactcatctgccacacaaggctggtgataaatcgttctggcaggaacagttatttcaggatgagttagacaacttggttgactacttgaacctatcttcgcgcggattccatctctttggccacagctgggggggcatgttggcctcggcattcgcggctcgtcaacccccgggcctgcaaagactggttctcgcaagtgctcttgcgagcaaagagctctccagagaaggatttcgcctccagcgaaatgattttccaccggatttgcgacaagcagctgaagaggcggaggcaaaaagcgaatttgaaggtgttgcatttaggattgccatgacatactaccaaaggacgcacgtctgccggactgctccgatcccgccggagcttggcgcggcgttcaaaaatttaagtgaagacaatacagtgaatcataccatgaatggccgttcagcggtagatctagacgcatctaacgctacgtggtctgtcattgatcgcctcggtaacatcactgtgccgacacttgtgtactatggtgagtacgatacttcgcaccacgttgcgcaggtgccgttcttgcagaatatctcacaggttcaggcgaaggtcttcatggacagtggacatatgtgtcatttagaaggaagaggaattagagaggaagtaatcaagtctgttggaaatttcttaaactacggtactactagctaggcagaatttcatgcgaaatccccattgcaaattcaatgtcactagttttcagtactagtaagagttgctccg

SEQ ID NO: 2766 - DNA, 1653 bp, Muscodor strobelii
  misc_feature: SGI cDNA ID NO. 560564
  misc_feature: Elevated expression when VOC is produced
  misc_feature: Encodes the peptide sequence at SEQ ID NO 2767
atgcacgtgtcaggccgttctcccggcatggccatcccagcactcgaccagctcaagttcctcactgatccggcagtcttcaacatcatgtataccgagatcgcagccattgccgcctttgtggcgagcgttcgtgctcagcagaaatgcagtctcaccgctgagacaaaaccagctctgacctggtactcttgcaacaagtcttacgcggactgcactgccaattctgcttcggtcaccatcgacgctaactggcgttgggtgcatgaggtcagtggcagcacaaattgctattcaggcaatgtgtgggacaagtccatatgtagcaccgatgaggactgtgcttcagcatgctgtgtcgatggtgccagctatgcgtcgacatacggcgtcactagtagcagcgacgctctgtcgttgcaatttgtcactagcaatgcgaacggcaaaaatgtcggctctcgcctttacctgatgggaaagggtgggactacttacgagagcttcaccctcctcggcaaggagtttagtttcgatgtcgatgtttcaaagctgccctgcggtttgaatggcgctctctacttcgtgtcgatgcctctcgacggacaggctggctctggcaacaacaaagcaggtgctgagtatggcactggttactgcgactcgcagtgcccacgggatcttaagttcatcaatggcttagccaacgttgagggctgggagcctcagtcaaacagcgccaattctggtgtcggtaataacggagcttgctgcccagagatggacatctgggaggcaaactctatttctgctgcctacacggctcatccttgcaagatgaacgacttattcatgtgcgagggcgatgactgcggaggcacctactccggtaccgagaaccgctacacaggcgaatgcgatcccgatggatgcgactttaacagctaccgcatgggtgatactagcttctacggccctggcaagaccgttgacaccaattccaaattcaccgtcgtgacacagttcattgagaacggtggtgtcctggcctctatcaaccgcttttacgtccagaacggcaaggtcattgccaactctcagtccaaggttcccgatgtgaccggcaactcgctgaacccagattactgtgatgctgagcatgaggcatttggtggaacttattccttcggagaccacggaggctgggctggattctccgacgctatctcgaagcccatggtcctcgttatgtctgtctgggacgattacgccgacaacatgttgtggctcgactctacctactctggaaaccaaacctatggcttatctcgcggaacttgcccaaccacctctggcgtccccgccgaggtcgaggcgaacgcccctaactcgaaggttacttactcgaacatccgatttggtgccatcaatagcacttactctgccactgggtccggatctggaacatccccgggtactggtactaccacgacaattagaactagcacgacaagtagtcgtggatccacctcgaccggaaccgtggccgcatacggacagtgcggcggcattggataccagggcgctactgcctgtgtatctggctacacgtgcaagaagagcaatgactactatagccagtgtttgccctag

SEQ ID NO: 2767 - protein, 550 aa, Muscodor strobelii
  misc_feature: SGI Peptide ID NO. 560564
  misc_feature (517)..(545): Pfam Id: PF00734 Pfam Desc: Fungal cellulose binding domain
  misc_feature (48)..(482): Pfam Id: PF00840 Pfam Desc: Glycosyl hydrolase family 7
  misc_feature (30)..(549): NCBI GI: 156712278 Blast Desc: cellulose 1,4-beta-cellobiosidase [Acremonium thermophilum]
  misc_feature (47)..(549): NCBI GI: 85108032 Blast Desc: exoglucanase 1 precursor [Neurospora crassa OR74A] gi|74696551|sp|Q7SA23.1|GUX1A_NEUCR RecName: Full=Exoglucanase 1; AltName: Full=Exocellobiohydrolase 1; AltName: 1; Flags: 1 crassa
  misc_feature (30)..(549): NCBI GI: 50400675 Blast Desc: GUX1_TRIHA RecName: Full=Exoglucanase 1; AltName: Full=Exoglucanase I; AltName: Full=Exocellobiohydrolase I; Short=CBHI; AltName: Full=1,4-beta-cellobiohydrolase; Flags:
  misc_feature (30)..(549): NCBI GI: 194719525 Blast Desc: cellobiohydrolase I [Hypocrea virens]
  misc_feature (30)..(548): NCBI GI: 46107376 Blast Desc: GUXC_FUSOX exoglucanase type C precursor (Exocellobiohydrolase I) (1,4-beta-cellobiohydrolase) (Beta-glucancellobiohydrolase) [Gibberella zeae PH-1] type C type
  misc_feature (30)..(548): NCBI GI: 37732123 Blast Desc: glycoside hydrolase 7 [Gibberella zeae]
  misc_feature (30)..(548): NCBI GI: 46241270 Blast Desc: exoglucanase type C precursor [Gibberella pulicaris] gi|62006156|gb|AAX60000.1| exoglucanase type C precursor [Gibberella pulicaris]
  misc_feature (30)..(549): NCBI GI: 50403723 Blast Desc: GUX1_TRIVI RecName: Full=Exoglucanase 1; AltName: Full=Exoglucanase I; AltName: Full=Exocellobiohydrolase; AltName: Full=1,4-beta-cellobiohydrolase; Flags: Precursor I [Trichoderma
  misc_feature (30)..(548): NCBI GI: 62006162 Blast Desc: exoglucanase type C precursor [Fusarium poae]
  misc_feature (30)..(548): NCBI GI: 62006158 Blast Desc: exoglucanase type C precursor [Fusarium venenatum]
  misc_feature (47)..(549): SWISSPROT Homolog: EC 3.2.1.91 Cellulose 1,4-beta-cellobiosidase
  misc_feature: Useful for introducing or modulating the production of volatile compounds
MHVSGRSPGMAIPALDQLKFLTDPAVFNIMYTEIAAIAAFVASVRAQQKCSLTAETKPALTWYSCNKSYADCTANSASVTIDANWRWVHEVSGSTNCYSGNVWDKSICSTDEDCASACCVDGASYASTYGVTSSSDALSLQFVTSNANGKNVGSRLYLMGKGGTTYESFTLLGKEFSFDVDVSKLPCGLNGALYFVSMPLDGQAGSGNNKAGAEYGTGYCDSQCPRDLKFINGLANVEGWEPQSNSANSGVGNNGACCPEMDIWEANSISAAYTAHPCKMNDLFMCEGDDCGGTYSGTENRYTGECDPDGCDFNSYRMGDTSFYGPGKTVDTNSKFTVVTQFIENGGVLASINRFYVQNGKVIANSQSKVPDVTGNSLNPDYCDAEHEAFGGTYSFGDHGGWAGFSDAISKPMVLVMSVWDDYADNMLWLDSTYSGNQTYGLSRGTCPTTSGVPAEVEANAPNSKVTYSNIRFGAINSTYSATGSGSGTSPGTGTTTTIRTSTTSSRGSTSTGTVAAYGQCGGIGYQGATACVSGYTCKKSNDYYSQCLP

SEQ ID NO: 2768 - DNA, 1989 bp, Muscodor strobelii
  misc_feature: SGI EST ID NO. CUFF.6903.0
  misc_feature: Variant of the nucleotide sequence at SEQ ID NO 2766
tttcccaattgagctatcgtgaatgcattcgagcgttcttgtcgatatccatgctccgatgtggctgacactaattgagtgccagggccgttctcccggcatggccatgtgcgcttttagttcgagggtgaacattatgggataggatgatggaattatatatgaataacgagctcccgctttggattttgtgttcagcccagcactcgaccagctcaagttcctcactgatccggcagtcttcaacatcatgtataccgagatcgcagccattgccgcctttgtggcgagcgttcgtgctcagcagaaatgcagtctcaccgctgagacaaaaccagctctgacctggtactcttgcaacaagtcttacgcggactgcactgccaattctgcttcggtcaccatcgacgctaactggcgttgggtgcatgaggtcagtggcagcacaaattgctattcaggcaatgtgtgggacaagtccatatgtagcaccgatgaggactgtgcttcagcatgctgtgtcgatggtgccagctatgcgtcgacatacggcgtcactagtagcagcgacgctctgtcgttgcaatttgtcactagcaatgcgaacggcaaaaatgtcggctctcgcctttacctgatgggaaagggtgggactacttacgagagcttcaccctcctcggcaaggagtttagtttcgatgtcgatgtttcaaagctgccctgcggtttgaatggcgctctctacttcgtgtcgatgcctctcgacggacaggctggctctggcaacaacaaagcaggtgctgagtatggcactggttactgcgactcgcagtgcccacgggatcttaagttcatcaatggcttagccaacgttgagggctgggagcctcagtcaaacagcgccaattctggtgtcggtaataacggagcttgctgcccagagatggacatctgggaggcaaactctatttctgctgcctacacggctcatccttgcaagatgaacgacttattcatgtgcgagggcgatgactgcggaggcacctactccggtaccgagaaccgctacacaggcgaatgcgatcccgatggatgcgactttaacagctaccgcatgggtgatactagcttctacggccctggcaagaccgttgacaccaattccaaattcaccgtcgtgacacagttcattgagaacggtggtgtcctggcctctatcaaccgcttttacgtccagaacggcaaggtcattgccaactctcagtccaaggttcccgatgtgaccggcaactcgctgaacccagattactgtgatgctgagcatgaggcatttggtggaacttattccttcggagaccacggaggctgggctggattctccgacgctatctcgaagcccatggtcctcgttatgtctgtctgggacgattacgccgacaacatgttgtggctcgactctacctactctggaaaccaaacctatggcttatctcgcggaacttgcccaaccacctctggcgtccccgccgaggtcgaggcgaacgcccctaactcgaaggttacttactcgaacatccgatttggtgccatcaatagcacttactctgccactgggtccggatctggaacatccccgggtactggtactaccacgacaattagaactagcacgacaagtagtcgtggatccacctcgaccggaaccgtggccgcatacggacagtgcggcggcattggataccagggcgctactgcctgtgtatctggctacacgtgcaagaagagcaatgactactatagccagtgtttgccctagactgtgaagatgtctgggtttggacttggtagatgtatatcttccgagtgattactcggtcatgctttgtccggcaaaaggagcgatataagcggatgctatttctaaatttcaatcttcggtgctctcgatagaacttcttgtgtatatttctcacaaacatagagtattac

SEQ ID NO: 2769 - DNA, 3990 bp, Muscodor strobelii
  misc_feature: SGI cDNA ID NO. 560565
  misc_feature: Encodes the peptide sequence at SEQ ID NO 2770
atgcctggtgatgattcccgtcagctagtacggatagggaagagtgcgacagaagatgaaggaaacagagatcatcagtcacagcaatccgtcttcagcattgaaacgccggaggagcttattgcgttccatcaatccgaagtcgaccgtctccgcgaagatgtcaatgcgccgccaagtcagttcgtggccgcgttgctccaattgggtatcgcgctagcagagcatgttgacctgggcgatgccgagccgctacttcgcgaagcgcgacaacagatggacttggattcatccgcatcttatgagattgaatcaatagtatatgttcaaactcttgcatctgtcttacttcacaaagatggatttgatgccgcggctgaactttacaatgatgccttggcaacaatccagcgcactcgcgggcgggaacatccgtggacgctagaattgcaaaacaatctggcgtgtgttcatactgctgccggactctggcacgcgagtaaagaacgtaatgatgtccaaaaggactgttttgacaaggccaggacattattcgaaaagtcgcacaagacgaagttgcacgtgtttggacctgttcatcgcacaacgctgaaagctcgatgtaacatcagcctagtgtcgtttctccgaggagaagactcgggactagaaacagacctaatgatcgcattgcaaaatctcaaggaatcgcatgggccagatgattccgacgctaagcttgttgccaatcaccttgtcagcatttttcggagaataggcaccaaggagcgagcgcaaagcttgagtgctgaatttggggttgatccctctgaatcctttcagtcccatcccttccgggatgcaatgataccagggctgccgactttgcggaaatctactagtcagagcgtcgataatgcgctagaagaagattcactccccgtagagactcttcgtaatgtcctcgatgtcattgatccgcgatggggcaagtggactgttaaaggactcggttggaccagggatacgatctggaaatggaccgggatggacgtatatacgtttgtggaggccattggatttccccagttggcgcagtggagtgtggtcacaagaagagaagttctgcttgaacaggctgccgcgattgggcaatatctggcagtggaactacttcttcagaaaatgcgagaagagaattcttccaagatgatagaggatcatattgacaatctgactcgtgctttccatcgtgccgtcgagtctgggagcggcgatgttgtgcgattattcctcgatcacggagtagatcccatgtccaccgacgaagctggacagtcagctctacataaagctgcggctctgggagcagaagcgccactcgtggaattgttgcgggaaactgatgatataagccttagggacggcggaggaaacactgcgttagatctagcccttggggagaatcacgagggaagtatccgtcttttgatgggaaagaaaagagctctcctcgcaagctcaaaatcaaccgttgaagatgctagcaccaagcaagcagataatgacactgagattggagtctttgatccgtcgctttacacaggattaaatgcaacggtggtcagcttctatgccgacactacccatgcagtcgaggagcatcgtgtctggacacatccagttgaagccgtcgtttctgacactagcctactgcggagcatcatcgaggacgatggcttgacagactcgaaaccggattttacatggatacacattccagcaaacaatatgttctgggcagagactctgatgaagaatatgtccgatatgagtggagaaagagagagatacatgagccttttggcaaaggaagtatgggagaatcagttacatgaatctctacacggtgctgttcacgggagattcatgaagcctttctgcggaaaagtcgggcggagagcgcagaactccgattttgtgttatacatgccttatatacactgggaatccgaaccactgaagatcgaaatggatgaagccatcgcgaagatcgagagggatcttgagtacaacatgaaaaacgttaaaaaattcttcaagaaattcgtccctcgcaaaaagaaggacagaaatcggtctaatggcaacgagaacgacgagcaacagggagagtcggaagaacaacgaagtcccgacattaaacttttggaaacttatctgtatctttctggaatacctcccttgcacgtacgccgaacatttgatcaatttcaatattatatgaacgacgacacagcagcgagagactcagatcaggtcgtatcgcgatattttcagagacggttcgaatatcttaccgtgcctataatgatggtggaccagctttggatgtgggtggtcggtgaagggactatcatcacctgtttccccaaacgatggggcgaagaagggttggtaccggaaatgacagggccagtccttgatactacgaacgttcttgacagtattctcgcacagcttaaagtcaaatacagagagcctgtactatcagtctacgatcttgccgatgtcatacttgcacgatgcctgggacttcattcagataggacacagtgggagaatgagagacacaggtatctcgagatcttcgatcattctatcaactacgttgccgacgaggagattcgacgtttcaactatttcgcagatgggggtagaaagggagaagtagctaaggacaagcaaccaaagcagactggacatgacacagaaaaaccgcaatccagagggctgagacgtgaattcctgctcggcgctagcggcttcggtgatgagtacatggcgaccttggaccaaaccagaaagaccgcgagacatcaacgattcaaggagaaagaaatggaagagattttcgatatttcggatgagattcagcttctcaaagagatcaaggatattcgtgacgagctcaacatcctccggacgctatttgatcaacaacggcaagttgtgaaggcgttcgatcgtgcaagtggccaacgcagcacgggaacggaaatggccggtgctatggcgaggctctctagcattgttgagaagatggacactgatgctcaacgtccttacaaagcactagaagatcttctggatttgaaacagaaacaagcaaatgtggcagaagctagaatcactcgccagtcgggcacaactatcacggtattcaccattgtcactatcatcttcttaccggcctctttcatggccgcattcttcgcacttccaatcgcggaatatccattcgttgacgaattactctctcttgggtatgcggcgaaatggacggtcattgtcacgatcatcaaaatggtgctcaaaacggtattcaagctcatcaagggattttttctgtcgctccaatttattttttggatatctatcggactgatcttttctatccttgggaatcataagagactacttcaatggtcgaagcgctatcgagcagataagaaagaggctgtcgccaagggcgaagagtggagtaggaggagatatgtgctggaatggagcaggaagagagtcgaattcgagaagaaggtcagagtcaacaaactcccgggcgagatcagactcaagatcgcggtcttccatgacatcaaggtctgcatattcggtgaggtcgtctgcggattccgcgggcgtgtcacacaacagatgactatgaagtccgtcaatcagatgttgataaccctattttcgaatatgaaattagatcaagaactattagcaaagaacacatttgaagaaaccattcaatgtgtgatgaggtataacgacgcgctcatgactctcgaggctgcaatagaccagcttctgggtattggctacaagaatcattctcaatcattacatgcccccccctttaactacaacttcgtcgttgtgatggcccttcgtgacttttgttcaacttggaactggccctga

SEQ ID NO: 2770 - protein, 1329 aa, Muscodor strobelii
  misc_feature: SGI Peptide ID NO. 560565
  misc_feature (653)..(1115): NCBI GI: 115492215 Blast Desc: conserved [Aspergillus terreus NIH2624] gi|114197595|gb|EAU39295.1| conserved [Aspergillus terreus NIH2624]
  misc_feature (640)..(1163): NCBI GI: 212531615 Blast Desc: ankyrin repeat protein [Penicillium marneffei ATCC 18224] gi|210071328|gb|EEA25417.1| ankyrin repeat protein [Penicillium marneffei ATCC 18224]
  misc_feature (647)..(1206): NCBI GI: 255941688 Blast Desc: Pc16g13140 [Penicillium chrysogenum Wisconsin 54-1255] gi|211586236|emb|CAP93984.1| Pc16g13140 [Penicillium chrysogenum Wisconsin 54-1255]
  misc_feature (588)..(1120): NCBI GI: 67525725 Blast Desc: AN3320.2 [Aspergillus nidulans FGSC A4] gi|40744108|gb|EAA63288.1| AN3320.2 [Aspergillus nidulans FGSC A4]
  misc_feature (658)..(1120): NCBI GI: 169783090 Blast Desc: [Aspergillus oryzae RIB40] gi|83774751|dbj|BAE64874.1| protein product [Aspergillus oryzae]
  misc_feature (658)..(1174): NCBI GI: 145230782 Blast Desc: An01g12480 [Aspergillus niger] gi|134055776|emb|CAK37300.1| protein product [Aspergillus niger]
  misc_feature (658)..(1120): NCBI GI: 238492835 Blast Desc: ankyrin repeat protein [Aspergillus flavus NRRL3357] gi|220696148|gb|EED52490.1| ankyrin repeat protein [Aspergillus flavus NRRL3357]
  misc_feature (623)..(1100): NCBI GI: 242773540 Blast Desc: ankyrin repeat protein [Talaromyces stipitatus ATCC 10500] gi|218721880|gb|EED21298.1| ankyrin repeat protein [Talaromyces stipitatus ATCC 10500]
  misc_feature (658)..(1115): NCBI GI: 67517003 Blast Desc: AN0782.2 [Aspergillus nidulans FGSC A4] gi|40746268|gb|EAA65424.1| AN0782.2 [Aspergillus nidulans FGSC A4] gi|259488938|tpe|CBF88794.1| TPA: ankyrin repeat protein FGSC
  misc_feature (658)..(1115): NCBI GI: 67517005 Blast Desc: AN0783.2 [Aspergillus nidulans FGSC A4] gi|40746457|gb|EAA65613.1| AN0783.2 [Aspergillus nidulans FGSC A4]
MPGDDSRQLVRIGKSATEDEGNRDHQSQQSVFSIETPEELIAFHQSEVDRLREDVNAPPSQFVAALLQLGIALAEHVDLGDAEPLLREARQQMDLDSSASYEIESIVYVQTLASVLLHKDGFDAAAELYNDALATIQRTRGREHPWTLELQNNLACVHTAAGLWHASKERNDVQKDCFDKARTLFEKSHKTKLHVFGPVHRTTLKARCNISLVSFLRGEDSGLETDLMIALQNLKESHGPDDSDAKLVANHLVSIFRRIGTKERAQSLSAEFGVDPSESFQSHPFRDAMIPGLPTLRKSTSQSVDNALEEDSLPVETLRNVLDVIDPRWGKWTVKGLGWTRDTIWKWTGMDVYTFVEAIGFPQLAQWSVVTRREVLLEQAAAIGQYLAVELLLQKMREENSSKMIEDHIDNLTRAFHRAVESGSGDVVRLFLDHGVDPMSTDEAGQSALHKAAALGAEAPLVELLRETDDISLRDGGGNTALDLALGENHEGSIRLLMGKKRALLASSKSTVEDASTKQADNDTEIGVFDPSLYTGLNATVVSFYADTTHAVEEHRVWTHPVEAVVSDTSLLRSIIEDDGLTDSKPDFTWIHIPANNMFWAETLMKNMSDMSGERERYMSLLAKEVWENQLHESLHGAVHGRFMKPFCGKVGRRAQNSDFVLYMPYIHWESEPLKIEMDEAIAKIERDLEYNMKNVKKFFKKFVPRKKKDRNRSNGNENDEQQGESEEQRSPDIKLLETYLYLSGIPPLHVRRTFDQFQYYMNDDTAARDSDQVVSRYFQRRFEYLTVPIMMVDQLWMWVVGEGTIITCFPKRWGEEGLVPEMTGPVLDTTNVLDSILAQLKVKYREPVLSVYDLADVILARCLGLHSDRTQWENERHRYLEIFDHSINYVADEEIRRFNYFADGGRKGEVAKDKQPKQTGHDTEKPQSRGLRREFLLGASGFGDEYMATLDQTRKTARHQRFKEKEMEEIFDISDEIQLLKEIKDIRDELNILRTLFDQQRQVVKAFDRASGQRSTGTEMAGAMARLSSIVEKMDTDAQRPYKALEDLLDLKQKQANVAEARITRQSGTTITVFTIVTIIFLPASFMAAFFALPIAEYPFVDELLSLGYAAKWTVIVTIIKMVLKTVFKLIKGFFLSLQFIFWISIGLIFSILGNHKRLLQWSKRYRADKKEAVAKGEEWSRRRYVLEWSRKRVEFEKKVRVNKLPGEIRLKIAVFHDIKVCIFGEVVCGFRGRVTQQMTMKSVNQMLITLFSNMKLDQELLAKNTFEETIQCVMRYNDALMTLEAAIDQLLGIGYKNHSQSLHAPPFNYNFVVVMALRDFCSTWNWP

SEQ ID NO: 2771 - DNA, 156 bp, Muscodor strobelii
  misc_feature: SGI EST ID NO. CUFF.6926.0
  misc_feature: Variant of the nucleotide sequence at SEQ ID NO 2769
gaaggcgttcgatcgtgcaagtggccaacgcagcacgggaacggaaatggccggtgctatggcgaggctctctagcattgttgagaagatggacactgatgctcaacgtccttacaaagcactagaagatcttctggatttgaaacagaaacaagc

SEQ ID NO: 2772 - DNA, 1602 bp, Muscodor strobelii
  misc_feature: SGI cDNA ID NO. 560566
  misc_feature: Encodes the peptide sequence at SEQ ID NO 2773
atgagcgactcagagaatgagcgtggtatgccacaggtaatggattgggatacctctagggaatcggctgaagaattatccgaagtctcgtctgaagattcaatcctccatgacgatgatagagtctccgaaaaagaccgaatgactccagatgagattcatgacatcgaatacaatggtttcatctgttcgatgggccgaatcctcgccctacctttgaagattgagcgcgtcccgggccatgcactcaaagccgcctttctcccacaactcacgacgtttggattgcagtacatgcgcaatgagcaggattttattcgtcaccagctcaaacattacgatgtctatgttgaggaatcaatcctggcacggaagccaatctgggctttgaaaaccgcgctagtgcaaggcaagtgtgattcggttcctcattggatgattcgcttacagacaacacttcaccgtctttggatcgataaccttgacgatgaacaacgtgctcaatatcctcactaccttgtccaagatcggttcctgacatctggccaacctggccatgccaaagcccgatatcccatctcctttcattttgattcggaggcgacaatggatgttgcggataatctccgttctactgtagagggcattgaaggcctccattgtatttctcgctacgggtcatggtcccaggccgtcgtaattggatggaatctgaaggctgtgacggaagaagctacccaatgggccgccaacgagttccgtatggaagcccaaagagccctcaacttgattacggtccacgataatttctgcaagtatctccgggacaacaaatccagatacgtcaatccaagccccattggcacgtatctcctcgtctgcgatcagattgaaggcgagcacgcagaaatggcccagaaactgctggtccatttcaccagaacaccaatcaccggcgtttacgactcgctgtttcactttggcaaacatcaaggcattattgtcatcggtgagactaagaaggaactgcaggcgtattttaaaggtctcaaggatagcaaccgattccaaagcctgaagaaaaattcaagccagatacccaatccgtgtaagaggaataaggatggtttccgaatcgggttcaaactcggacgtcgatgcaagatacggccagcacgccccaatggcggagctgaagcaagctcgactcgggacggcaagagccacaaaagagttacacgatcgcaaacagcagcgcatgtgtcatctgacgctgcaaagaaggaagccactgcacgaaaggcgcgccaccgctactattggctggtgttctctataccaactcattatgagtttacggaggaacagaagatccttccaaaaggattctcaaacaggcggccccctatcgctaacctccgcggcaagctgctccgtcagggattgaagacgggtcatgttaaattcagcaaggagtttgagtctttccgtgcccatggtaatctggattctgtttctcgtaggttctacttcaaggcgctcaaaattggtgatcgaaactgggattgtggccatgctgcttatctgcacccggagctttaa

SEQ ID NO: 2773 - protein, 533 aa, Muscodor strobelii
  misc_feature: SGI Peptide ID NO. 560566
  misc_feature (48)..(346): NCBI GI: 119482353 Blast Desc: NFIA_092690 [Neosartorya fischeri NRRL 181] gi|119409359|gb|EAW19308.1| NFIA_092690 [Neosartorya fischeri NRRL 181]
  misc_feature (56)..(356): NCBI GI: 256721149 Blast Desc: [Nectria haematococca mpVI 77-13-4]
  misc_feature (55)..(249): NCBI GI: 256721282 Blast Desc: [Nectria haematococca mpVI 77-13-4]
MSDSENERGMPQVMDWDTSRESAEELSEVSSEDSILHDDDRVSEKDRMTPDEIHDIEYNGFICSMGRILALPLKIERVPGHALKAAFLPQLTTFGLQYMRNEQDFIRHQLKHYDVYVEESILARKPIWALKTALVQGKCDSVPHWMIRLQTTLHRLWIDNLDDEQRAQYPHYLVQDRFLTSGQPGHAKARYPISFHFDSEATMDVADNLRSTVEGIEGLHCISRYGSWSQAVVIGWNLKAVTEEATQWAANEFRMEAQRALNLITVHDNFCKYLRDNKSRYVNPSPIGTYLLVCDQIEGEHAEMAQKLLVHFTRTPITGVYDSLFHFGKHQGIIVIGETKKELQAYFKGLKDSNRFQSLKKNSSQIPNPCKRNKDGFRIGFKLGRRCKIRPARPNGGAEASSTRDGKSHKRVTRSQTAAHVSSDAAKKEATARKARHRYYWLVFSIPTHYEFTEEQKILPKGFSNRRPPIANLRGKLLRQGLKTGHVKFSKEFESFRAHGNLDSVSRRFYFKALKIGDRNWDCGHAAYLHPEL

SEQ ID NO: 2774 - DNA, 1452 bp, Muscodor strobelii
  misc_feature: SGI cDNA ID NO. 560567
  misc_feature: Reduced expression when VOC is produced
  misc_feature: Encodes the peptide sequence at SEQ ID NO 2775
atggccggcaagaaggacagaaagtcggacaagaaagctgtcaagcagcagaagtccgccgctgctgcccccatcgcttctactgcaacgggccagaacccccccgctcagttgatggacctcgtcgagtctttcctctccgaccaaggcttcgacaacgcccaccgcgagttcaagaaacaccgcgcgagcaaaggttggaagggacccaagaaggacaaggagaaggacaaggacaaggccggtgccaaggaacaccactctctcgtcagcgtcttccagacctgggagacgtttgccagcaaggatagtaccccgatcaccgccgccgccaccgtcgaggctatcaccaaggtctccagcagcagcagctcgagcagctctagctccagctcctcgtccgacagcgatagcgacgatgactcggccgacgacgtcgacatgaacgatgctcctgctgccgaatctgaatccgaatcttcctcctccgagtcctcaagcagcgacagctccgactccagcgacagcgacgaggaacccgctgccaagcccaagcccaaggctgctactgctactgctacttccgctgccactgccactgctgcagttccacctccgccctctcgcaagcgcaaggccgaatctgacagcgagagctcctcttccgactccgactctgacgaggacatgtccgactcgagctccgacgacgacaagaagccccaggccaagaagatcaagaccgcctccaactctgcctcttcccccgagtcctccagctccgagtctgactcttcctccgacgacagcgacgacgagagctccgaagacgagggcaatgccaaagccaagactgccgccaagtccatgtccaagtccaagtccaaatccaaagccgagtccgacagcgatagctcttcagactctgactccgactcgtcatcctcctcctcctcctcctctagctccgagtccgaatcggaagacgagatcaaggtcgctgcagcggtgcctttgcctgagtctgactccgactccgactccagctcatccgaagacgaggagcccaaaaacgcgtccaagaacgtaccggcatccgacagctctgcgaccctcgagaaggcttcacccgaattcaaaccgctgtccactgacgcccctctgccacccgacccaagtacctacaaggccaacaaccgtggcaagaatggagcgaatggaggaaagaaggctaacgtccccttttctcgcatcgccaaggatgtcattgttgatcctagactttcttcaaatgcctacgtcgagcatggatacggcgaacaggcccatcgcgacctgatagtgaccaagggcaagggcttcaccaaggagaagaacaagaagaagcgcggtgcttacaagggcggccccttggacgtcaacaccagccggagcttcaagttcgaggactag

SEQ ID NO: 2775 - protein, 483 aa, Muscodor strobelii
  misc_feature: SGI Peptide ID NO. 560567
  misc_feature (391)..(481): Pfam Id: PF05022 Pfam Desc: SRP40, C-terminal domain
  misc_feature (366)..(483): NCBI GI: 256727762 Blast Desc: NECHADRAFT_99421 [Nectria haematococca mpVI 77-13-4]
  misc_feature (365)..(483): NCBI GI: 39979238 Blast Desc: [Neurospora crassa]
  misc_feature (365)..(483): NCBI GI: 85086257 Blast Desc: NCU04047 [Neurospora crassa OR74A] gi|28918756|gb|EAA28426.1| NCU04047 [Neurospora crassa OR74A]
  misc_feature (376)..(483): NCBI GI: 171682244 Blast Desc: protein product [Podospora anserina] gi|170941081|emb|CAP66731.1| protein product [Podospora anserina]
  misc_feature (366)..(483): NCBI GI: 261359378 Blast Desc: [Verticillium albo-atrum VaMs.102]
  misc_feature (430)..(483): NCBI GI: 238839716 Blast Desc: SRP40 [Microsporum canis CBS 113480]
  misc_feature (430)..(483): NCBI GI: 239615361 Blast Desc: conserved [Ajellomyces dermatitidis ER-3]
  misc_feature (430)..(483): NCBI GI: 261190385 Blast Desc: conserved [Ajellomyces dermatitidis SLH14081] gi|239593049|gb|EEQ75630.1| conserved [Ajellomyces dermatitidis SLH14081]
  misc_feature (430)..(483): NCBI GI: 225557680 Blast Desc: conserved [Ajellomyces capsulatus G186AR]
  misc_feature (430)..(483): NCBI GI: 154281201 Blast Desc: [Ajellomyces capsulatus NAm1] gi|150411592|gb|EDN06980.1| [Ajellomyces capsulatus NAm1]
  misc_feature: Useful for introducing or modulating the production of volatile compounds
MAGKKDRKSDKKAVKQQKSAAAAPIASTATGQNPPAQLMDLVESFLSDQGFDNAHREFKKHRASKGWKGPKKDKEKDKDKAGAKEHHSLVSVFQTWETFASKDSTPITAAATVEAITKVSSSSSSSSSSSSSSSDSDSDDDSADDVDMNDAPAAESESESSSSESSSSDSSDSSDSDEEPAAKPKPKAATATATSAATATAAVPPPPSRKRKAESDSESSSSDSDSDEDMSDSSSDDDKKPQAKKIKTASNSASSPESSSSESDSSSDDSDDESSEDEGNAKAKTAAKSMSKSKSKSKAESDSDSSSDSDSDSSSSSSSSSSSESESEDEIKVAAAVPLPESDSDSDSSSSEDEEPKNASKNVPASDSSATLEKASPEFKPLSTDAPLPPDPSTYKANNRGKNGANGGKKANVPFSRIAKDVIVDPRLSSNAYVEHGYGEQAHRDLIVTKGKGFTKEKNKKKRGAYKGGPLDVNTSRSFKFED

SEQ ID NO: 2776 - DNA, 2587 bp, Muscodor strobelii
  misc_feature: SGI EST ID NO. CUFF.6935.0
  misc_feature: Variant of the nucleotide sequence at SEQ ID NO 2774
aacgtcattgattcggaatcgagctataggttgataacaaggtccctggtaaccaaagaaactgatcattcagtctatatcagtagaatcacttgtgttgctcagtatatcaagagcagtctctttggcaagtgccacttatttccttcgcgcctagcttatctctgtcgcattggaccacctccacaaatttttttctgggtggtcgcatcgcaacaagtagcccaacacccgttcgtttacctcccctcgtctctgatgcccaaaacaaccgcggctggacctcccgcgtggctcttcaccaacaatcttgcttcggcttccacgtctcaaccagtgccagacacagcaccagacaccatggccggcaagaaggacagaaagtcggacaagaaagctgtcaagcagcagaagtccgccgctgctgcccccatcgcttctactgcaacgggccagaacccccccgctcagttgatggacctcgtcgagtctttcctctccgaccaaggcttcgacaacgcccaccgcgagttcaagaaacaccgcgcgagcaaaggttggaagggacccaagaaggacaaggagaaggacaaggacaaggccggtgccaaggaacaccactctctcgtcagcgtcttccagacctgggagacgtttgccagcaaggatagtaccccgatcaccgccgccgccaccgtcgaggctatcaccaaggtctccagcagcagcagctcgagcagctctagctccagctcctcgtccgacagcgatagcgacgatgactcggccgacgacgtcgacatgaacgatgctcctgctgccgaatctgaatccgaatcttcctcctccgagtcctcaagcagcgacagctccgactccagcgacagcgacgaggaacccgctgccaagcccaagcccaaggctgctactgctactgctacttccgctgccactgccactgctgcagttccacctccgccctctcgcaagcgcaaggccgaatctgacagcgagagctcctcttccgactccgactctgacgaggacatgtccgactcgagctccgacgacgacaagaagccccaggccaagaagatcaagaccgcctccaactctgcctcttcccccgagtcctccagctccgagtctgactcttcctccgacgacagcgacgacgagagctccgaagacgagggcaatgccaaagccaagactgccgccaagtccatgtccaagtccaagtccaaatccaaagccgagtccgacagcgatagctcttcagactctgactccgactcgtcatcctcctcctcctcctcctctagctccgagtccgaatcggaagacgagatcaaggtcgctgcagcggtgcctttgcctgagtctgactccgactccgactccagctcatccgaagacgaggagcccaaaaacgcgtccaagaacgtaccggcatccgacagctctgcgaccctcgagaaggcttcacccgaattcaaaccgctgtccactgacgcccctctgccacccgacccaagtacctacaaggccaacaaccgtggcaagaatggagcgaatggaggaaagaaggctaacgtccccttttctcgcatcgccaaggatgtcattgttgatcctagactttcttcaaatgcctacgtcgagcatggatacggcgaacaggcccatcgcgacctgatagtgaccaagggcaagggcttcaccaaggagaagaacaagaagaagcgcggtgcttacaagggcggccccttggacgtcaacaccagccggagcttcaagttcgaggactagaagtctgacgacaagaagaccaacaccccgaaggatcctttggacaagagctcgcctgtcactccgactcccacccgtcctactcgacctgcttctgcccctactgctacgaaggagaatgtgaaacccaaccagaaggccaacaaacggaagccatttcgaattgttgggccccgcaaccctcgccttgtcgacaaactcgtccctggtcctacacctgataggtggcaaccgcccccaaagacagatgcatcctcgctgctgaaggctgtccgtgacactgtgcagaaggataatcagcagctcagtggcaactcgggagagaagacgatttgaataatggctttgatggcgaatcaaccgataccttaagacaagatcctattcatctgattgtcatccgagcaacacttggttgtaaatacggattaatcagcatgtaatacttgtacaagaagatcagacgaggatgagatgatatgtcttgccgtgcgatgcgcttttgccatttgccagagttcatttgaagtttgattagaggcgttctatgagcagcattctcatctacatttgcacttgaggtcagatcatatcatcgctggacttttcacttgccatatctttactcatctcgccattgggatgctcttcgtaaacattacaggttctcgcgcttcggagttatgctaaaaggagaaaagagagaagagacatggcgttgtaaatagatacaaatcagaaaacgtgcgtcacttataaggtaataccatcttcg

SEQ ID NO: 2777 - DNA, 795 bp, Muscodor strobelii
  misc_feature: SGI cDNA ID NO. 560568
  misc_feature: Encodes the peptide sequence at SEQ ID NO 2778
atgctcccaataatcttcctatcaggcccaacctcaaccggcaaaggcacactaggcaagatgctcacactgcactaccccatctcccacatctcgctaggcgatctcttccgacaacacaacagcctcttgcaaaccccccaatcccttccctatatcacgcccgaaatcctcattcacatcaccttttctactccgattccaccctctctcctctcagccttcgatccagtaccaatccccttactgctatacaactccatctgtcttggtgagaacccaaatgtccactcttctagaatcctatcagaagctatccttaccttacaatcccaacccgatcccccacgcgccgtcctagtagacggactaggctccatcccccggtataacaacaacttccccctggccatctcaaacctcacatcctcattcagcggtctaaccataaacgtaacctgcccaccctccatcgcgaaagcccggtacttatcacgcggtcgtggagatgaggcaacatttgagagaaggatgaggagttataacgtcgccatgccgcagtttgtgcagtacttgggaagtgagggtgtggggaccgtggtgcaggttgttaatgatgggagtgtaagtattgatcgagtatttcagaatctgagagggaagctggaaagtgaacaagtatggttggatgttgttgggaaaggtgctgctgaacagattgatatgtctgatgtcgtaatggtagagagcagcgacgagggattagacggggacgactgggtagttgttgattga

SEQ ID NO: 2778 - protein, 264 aa, Muscodor strobelii
  misc_feature: SGI Peptide ID NO. 560568
  misc_feature (5)..(222): NCBI GI: 153952882 Blast Desc: adenylate kinase [Clostridium kluyveri DSM 555] gi|219853547|ref|YP_002470669.1| CKR_0204 [Clostridium kluyveri NBRC 12016] gi|189046010|sp|A5N4R8.1|KAD_CLOK5 RecName: kinase;
  misc_feature (2)..(227): NCBI GI: 242775628 Blast Desc: uridylate kinase Ura6 [Talaromyces stipitatus ATCC 10500] gi|218722298|gb|EED21716.1| uridylate kinase Ura6 [Talaromyces stipitatus ATCC 10500]
  misc_feature (2)..(228): NCBI GI: 212532467 Blast Desc: uridylate kinase Ura6 [Penicillium marneffei ATCC 18224] gi|210071754|gb|EEA25843.1| uridylate kinase Ura6 [Penicillium marneffei ATCC 18224]
MLPIIFLSGPTSTGKGTLGKMLTLHYPISHISLGDLFRQHNSLLQTPQSLPYITPEILIHITFSTPIPPSLLSAFDPVPIPLLLYNSICLGENPNVHSSRILSEAILTLQSQPDPPRAVLVDGLGSIPRYNNNFPLAISNLTSSFSGLTINVTCPPSIAKARYLSRGRGDEATFERRMRSYNVAMPQFVQYLGSEGVGTVVQVVNDGSVSIDRVFQNLRGKLESEQVWLDVVGKGAAEQIDMSDVVMVESSDEGLDGDDWVVVD

SEQ ID NO: 2779 - DNA, 107 bp, Muscodor strobelii
  misc_feature: SGI EST ID NO. CUFF.6938.0
  misc_feature: Variant of the nucleotide sequence at SEQ ID NO 2777
tcccgatccacgatcgtttcgcaatgctcccaataatcttcctatcaggcccaacctcaaccggcaaaggcacactaggcaagatgctcacactgcactaccccatc

SEQ ID NO: 2780 - DNA, 2022 bp, Muscodor strobelii
  misc_feature: SGI cDNA ID NO. 560569
  misc_feature: Elevated expression when VOC is produced
  misc_feature: Encodes the peptide sequence at SEQ ID NO 2781
atggaagtcatcggcgctattgcgagtttcattgctatcggacaggcaattggaacagtccctgccctcgtgcgcaggctcgaaaacctgcattcctattacaatctcgtcgaagacagcatcaagcaattgaccgacaatagtatcctagctgaagtctctatacccgaaccatcatatattgctcttctgcgagcgtccgaagacagcaatcataactccaaagctttgcggttaacttggtacaagcagaggaggccgattgaacgtctgtccgcgcgttgtactcgactgcgtgacgatattcaacgagcctacgttatctacttcaaccagagctctcggaaactgtctgtcgccatccatgagacaaccactgttgccagcggactactcttgcaagccctcgatccggcgctcgaagacgatacaagcccaatatcactaagagacatttatctaccagaagagtctacagcagacataaaggtcacaggaagaaacgaccacaagtttccatcgattcacgaagaagaccaggcttcgcaacatcagatatcattagcgaatgttgccatcatgaagtgccacaaattggccttcaagggattcgcatgggagactcatctcaatcttcgactttatccagagtgttacaccaacgatgagatcgacgtacttactcgactcgtatcactcgcggctgaagaggaactagacgccgagcttttcgtccgggctctccagagtccacatttaactgatgacaacgaaatgaaaatcactgaactaatcgatatcatcacgcctaacggtaacactctgctacatattgccggcagtttcaacagagttgaagtggtgcaaagtctgcttgctcgcggcgctcaagtcaacgcactaaatcatgaaggacagaccgctttgatgaaagcgatccatagagaagcgtacgactgcgtccagatcctccttacagctggatgcgatgtgaacattgcagactcgatgggacgtactcctctgatgatggcagctatgtggaatggagaagaaggcgacactattattatccgacttctagacttgggagcgcatgttcatgccgtggattgcaatggggattccgtcatacattacctggctagagagcatttcaacgactcagatagcatcaggcagcgcctcgataggctactagatcacgaggccattgatagaatcgtcaagacaagcagatccatccgttcgcctcttcttgatgcagtagggagaaataaccattatgtagttgagtccatgttgaatcgcggcttggatgcaatcacctttgaaggggaaaacatactccatcgggttgcactaaaaggagacgttagcatgatggagatcattgcagcggctcagattttttgcttagatattcgaacacctagcgattatgaacttaccccattgggagagttcggagatcagcggcaatggtatcagcgagatcctattgagagcacccaatttgacaatctgccaccaactcgcgagagggaagaggcgctcgaagcacttcttcgaagcatcagagacggcaaactgagatttgaaatcgaacaactggaaacagtaatcgacagcctaaggcaaggactgacagagccagccagagaggagctcagggagttgaagcaacagaaactgaacgacaagattgattgggaagccgaaacattccgcgctattgagttggatgtcaggcatgggcgcattgagctcgcgatcgagtcactcttggaatttatcgaagcctcgcgtgagagaatgaaactttcaccgtttgaggagaaagataatgatcccgaatattacgatgcttatatgaacggagagcttgatttggactatgagagtagtgaagaggattatagattcgaagaactcagcgaaagcggagctgagagtgtcggatgtgaagaagttaacaacagtgacgatgatggggagagaatgatattgaagcgtaattga

SEQ ID NO: 2781 - protein, 673 aa, Muscodor strobelii
  misc_feature: SGI Peptide ID NO. 560569
  misc_feature (271)..(303): Pfam Id: PF00023 Pfam Desc: Ankyrin repeat
  misc_feature (304)..(336): Pfam Id: PF00023 Pfam Desc: Ankyrin repeat
  misc_feature (337)..(372): Pfam Id: PF00023 Pfam Desc: Ankyrin repeat
  misc_feature (272)..(465): NCBI GI: 229582572 Blast Desc: Ankyrin [Sulfolobus islandicus Y.N.15.51] gi|228013288|gb|ACP49049.1| Ankyrin [Sulfolobus islandicus Y.N.15.51]
  misc_feature (271)..(415): NCBI GI: 229582572 Blast Desc: Ankyrin [Sulfolobus islandicus Y.N.15.51] gi|228013288|gb|ACP49049.1| Ankyrin [Sulfolobus islandicus Y.N.15.51]
  misc_feature (271)..(440): NCBI GI: 229582572 Blast Desc: Ankyrin [Sulfolobus islandicus Y.N.15.51] gi|228013288|gb|ACP49049.1| Ankyrin [Sulfolobus islandicus Y.N.15.51]
  misc_feature (271)..(388): NCBI GI: 227881039 Blast Desc: ankyrin repeat-containing protein [Halogeometricum borinquense DSM 11551] gi|227847918|gb|EEJ58006.1| ankyrin repeat-containing protein [Halogeometricum borinquense DSM 11551]
  misc_feature (265)..(636): NCBI GI: 256729258 Blast Desc: NECHADRAFT_84042 [Nectria haematococca mpVI 77-13-4]
  misc_feature (272)..(465): NCBI GI: 123482337 Blast Desc: ankyrin repeat protein [Trichomonas vaginalis G3] gi|121906627|gb|EAY11533.1| ankyrin repeat protein, [Trichomonas vaginalis G3]
  misc_feature (272)..(427): NCBI GI: 123426661 Blast Desc: ankyrin repeat protein [Trichomonas vaginalis G3] gi|121888696|gb|EAX94157.1| ankyrin repeat protein, [Trichomonas vaginalis G3]
  misc_feature (265)..(434): NCBI GI: 190571654 Blast Desc: ankyrin repeat domain protein [Wolbachia endosymbiont of Culex quinquefasciatus Pel] gi|213019056|ref|ZP_03334863.1| ankyrin repeat domain protein [Wolbachia endosymbiont of Culex of
  misc_feature (271)..(465): NCBI GI: 154421255 Blast Desc: ankyrin repeat protein [Trichomonas vaginalis G3] gi|121917884|gb|EAY22655.1| ankyrin repeat protein, [Trichomonas vaginalis G3]
  misc_feature (272)..(384): NCBI GI: 281205933 Blast Desc: PPL_06944 [Polysphondylium pallidum PN500]
  misc_feature: Useful for introducing or modulating the production of volatile compounds
MEVIGAIASFIAIGQAIGTVPALVRRLENLHSYYNLVEDSIKQLTDNSILAEVSIPEPSYIALLRASEDSNHNSKALRLTWYKQRRPIERLSARCTRLRDDIQRAYVIYFNQSSRKLSVAIHETTTVASGLLLQALDPALEDDTSPISLRDIYLPEESTADIKVTGRNDHKFPSIHEEDQASQHQISLANVAIMKCHKLAFKGFAWETHLNLRLYPECYTNDEIDVLTRLVSLAAEEELDAELFVRALQSPHLTDDNEMKITELIDIITPNGNTLLHIAGSFNRVEVVQSLLARGAQVNALNHEGQTALMKAIHREAYDCVQILLTAGCDVNIADSMGRTPLMMAAMWNGEEGDTIIIRLLDLGAHVHAVDCNGDSVIHYLAREHFNDSDSIRQRLDRLLDHEAIDRIVKTSRSIRSPLLDAVGRNNHYVVESMLNRGLDAITFEGENILHRVALKGDVSMMEIIAAAQIFCLDIRTPSDYELTPLGEFGDQRQWYQRDPIESTQFDNLPPTREREEALEALLRSIRDGKLRFEIEQLETVIDSLRQGLTEPAREELRELKQQKLNDKIDWEAETFRAIELDVRHGRIELAIESLLEFIEASRERMKLSPFEEKDNDPEYYDAYMNGELDLDYESSEEDYRFEELSESGAESVGCEEVNNSDDDGERMILKRN

SEQ ID NO: 2782 - DNA, 1943 bp, Muscodor strobelii
  misc_feature: SGI EST ID NO. CUFF.6941.0
  misc_feature: Variant of the nucleotide sequence at SEQ ID NO 2780
cgaacaaccatcgctctgtcgtcaggtacaggacgtcgggcgatagagcgttgctgagattcgacatcacgctgcgcactcgaaaaggaataccgcctattctgggtgctgctagtttgatatcagtatagcatggaagtcatcggcgctattgcgagtttcattgctatcggacaggcaattggaacagtccctgccctcgtgcgcagggttcgtgcgtttcgaaatgccagcgaagagttacaagatttaatggaggggctcgaaaacctgcattcctattacaatctcgtcgaagacagcatcaagcaattgaccgacaatagtatcctagctgaagtctctatacccgaaccatcatatattgctcttctgcgaggtaaattggaaatatttctgattgagcttcacgaacttgcaaagaactgttcagcgtccgaagacagcaatcataactccaaagctttgcggttaacttggtacaagcagaggaggccgattgaacgtctgtccgcgcgttgtactcgactgcgtgacgatattcaacgagcctacgttatctacttcaaccagagctctcggaaactgtctgtcgccatccatgagacaaccactgttgccagcggactactcttgcaagccctcgatccggcgctcgaagacgatacaagcccaatatcactaagagacatttatctaccagaagagtctacagcagacataaaggtcacaggaagaaacgaccacaagtttccatcgattcacgaagaagaccaggcttcgcaacatcagatatcattagcgaatgttgccatcatgaagtgccacaaatgtgaatgttatcaacaattcaagtcgccttatagacgctctatttaccaccctttgaaaggtctatggatttcttacggccgcggagcagctgcgcagatttgccaccactgttcgtgcaaaaacgcacaacagaccacttctagggttcgatttagacttccagtgccgctctttcgcgcagtaatcatgggccagttttcattcggttgggcgactggaatttcgatgtcacttcgtccattgactattctggagatggatcatgactgttggtggtttatagcaaacgatcggacggaagagttgactcgacgtcaagatctgtatagtatctgccctacgactgtattcgcggacggggaaagtctacttgaatacgctcgtcgacggcggtcaacctctatgctgttattctacctcgacaattggtcacaagtgcttccgcaaatagtggccttcaagggattcgcatgggagactcatctcaatcttcgactttatccagagtgttacaccaacgatgagatcgacgtacttactcgactcgtatcactcgcggctgaagaggaactagacgccgagcttttcgtccgggctctccagagtccacatttaactgatgacaacgaaatgaaaatcactgaactaatcgatatcatcacgcctaacggtaacactctgctacatattgccggcagtttcaacagagttgaagtggtgcaaagtctgcttgctcgcggcgctcaagtcaacgcactaaatcatgaaggacagaccgctttgatgaaagcgatccatagagaagcgtacgactgcgtccagatcctccttacagctggatgcgatgtgaacattgcagactcgatgggacgtactcctctgatgatggcagctatgtggaatggagaagaaggcgacactattattatccgacttctagacttgggagcgcatgttcatgccgtggattgcaatggggattccgtcatacattacctggctagagagcatttcaacgactcagatagcatcaggcagcgcctcgataggctactagatcacgaggccattgatagaatcgtcaagacaagcagatccatccgttcgcc

SEQ ID NO: 2783 - DNA, 888 bp, Muscodor strobelii
  misc_feature: SGI cDNA ID NO. 560570
  misc_feature: Encodes the peptide sequence at SEQ ID NO 2784
atggcccccgagaataaccctatgaagagaggaggtaccgccgacaccacttccgttccacccaaacgacacaaatcgtccgagactaccacatccactgcccctgcgcatcacggagcccctacaatgtctcaaccaatgttctcgttcggggcatctacgactcctcagacgagtgtcttcgccacgtccgtccaggcatccgaagcgaaggcaggagcttcagtcccttcatccacctctgcaatcgcattttgcaaagctattggcagactctcccaaggagcatttgccgatatgacgatcgtctgcaaagaccaaaagttcaaggtgcataaggtagtgctttctgcacactctagttccctcgagatgcgctgcttcttcgatgactcaatcgccgacccattctttactggtgcagaccgctataagatcgaactcgacgatgtggagatcgacgtggccaagacaatggtgcagtacctctattacttcagatacgattgcccagattcgacgaatgcggtatcaactctggtatttcacgctaaaatgtacgacatcgcatgtcaatatgacatgccacagctgaaagaggacagcaagttgacgttcatgaccaagctggagaacacggaactcagagccggttctctcttgagcaccacgttcctcgatctctctatcgtcatttctacagtctataacagcacaatctcggatggaggacttcgtccgatactagtggacgcctacatcgtccatctacgtgacctccgaatcgtgaagtggtttcagacaattgtccgcgagatcccggatttcggtatcgatatgctgttgaagcctcccaaggccgaaggaggtatctttgggaaacaatag

SEQ ID NO: 2784 - protein, 295 aa, Muscodor strobelii
  misc_feature: SGI Peptide ID NO. 560570
  misc_feature (89)..(199): Pfam Id: PF00651 Pfam Desc: BTB/POZ domain
  misc_feature (92)..(164): Pfam Id: PF00651 Pfam Desc: BTB/POZ domain
  misc_feature (67)..(293): NCBI GI: 46139111 Blast Desc: FG11070.1 [Gibberella zeae PH-1]
  misc_feature (87)..(280): NCBI GI: 240108794 Blast Desc: BTB/POZ domain containing protein [Coccidioides posadasii C735 delta SOWgp]
  misc_feature (97)..(283): NCBI GI: 121698245 Blast Desc: BTB/POZ domain protein [Aspergillus clavatus NRRL 1] gi|119395901|gb|EAW06333.1| BTB/POZ domain protein [Aspergillus clavatus NRRL 1]
  misc_feature (87)..(286): NCBI GI: 119176043 Blast Desc: CIMG_09774 [Coccidioides immitis RS]
  misc_feature (92)..(290): NCBI GI: 46115274 Blast Desc: FG03479.1 [Gibberella zeae PH-1]
  misc_feature (80)..(256): NCBI GI: 116193259 Blast Desc: CHGG_06347 [Chaetomium globosum CBS 148.51] gi|88182260|gb|EAQ89728.1| CHGG_06347 [Chaetomium globosum CBS 148.51]
  misc_feature (97)..(289): NCBI GI: 261194366 Blast Desc: BDBG_06436 [Ajellomyces dermatitidis SLH14081] gi|239588602|gb|EEQ71245.1| BDBG_06436 [Ajellomyces dermatitidis SLH14081]
  misc_feature (92)..(248): NCBI GI: 256725432 Blast Desc: NECHADRAFT_101136 [Nectria haematococca mpVI 77-13-4]
  misc_feature (97)..(281): NCBI GI: 238837775 Blast Desc: BTB/POZ domain-containing protein [Microsporum canis CBS 113480]
  misc_feature (95)..(280): NCBI GI: 258565623 Blast Desc: [Uncinocarpus reesii 1704] gi|237907257|gb|EEP81658.1| [Uncinocarpus reesii 1704]
MAPENNPMKRGGTADTTSVPPKRHKSSETTTSTAPAHHGAPTMSQPMFSFGASTTPQTSVFATSVQASEAKAGASVPSSTSAIAFCKAIGRLSQGAFADMTIVCKDQKFKVHKVVLSAHSSSLEMRCFFDDSIADPFFTGADRYKIELDDVEIDVAKTMVQYLYYFRYDCPDSTNAVSTLVFHAKMYDIACQYDMPQLKEDSKLTFMTKLENTELRAGSLLSTTFLDLSIVISTVYNSTISDGGLRPILVDAYIVHLRDLRIVKWFQTIVREIPDFGIDMLLKPPKAEGGIFGKQ

SEQ ID NO: 2785 - DNA, 1053 bp, Muscodor strobelii
  misc_feature: SGI cDNA ID NO. 560571
  misc_feature: Encodes the peptide sequence at SEQ ID NO 2786
atgcgctcttttgtttcaatcgtcgtagccgtggcgacaacacaagccgcggccctcttcgacatcgacagcaacccgaacgctgtaggaatttgctattcggtatggcatagtctaggttacgataacggggctccgccagatatctcagaaatcgaagcggacaatcaaaatttcgctgcgcaaccgaactggcactggtggggtcgtcctgatggaggatattatgctggtggtaacaccggcgtgttggatcggcatttttcacagatggcaggagcaggtatcgattttattgtcgttgatgctacgaatttggagggatacggcggatacgctgcaggattattcacggagccatcagacacgcttctagcggagatgcaggtccaagccgctgccggaaacccaaccccgaatgtcgtattctgggtcagaacagcttccaccgacgcggatccttcggccgtcggacgattcgtgaatgacagatattacagcaactcagcgtatgccgacttctgggtgaccttcaaaggcaagcctttgatgcttacaaccgacacgctcccgagtgatctttcagagaccttcaccttgcgcaagatgtggggtctacaaggaagtctcgcggagagcgagtggtcattcctccaggattcaccacaaaacgtcgcaatgaccggcggtataccggaacaaatcagcgtctctgtggctaagcaacaaagttatatctctgataaagcaacagctacatctagacaaaacggaggcacgtacgctgcacagtgggctgaagcgtttagtgtccatccggaggtcgtcattctgacttggtggaatgaatggatggcccacaggcaggcagatgacgcgagcggtaacccgcagtttgttgatgagtacgatggagagtattcacgagacatcgagccacaggatccgacgcagccaggaagccatggcagtagctatctgacatggactcaacaatacattgcagcttataaggccaaccaggcaattcccacgggactgatgggatattaa

SEQ ID NO: 2786 - protein, 350 aa, Muscodor strobelii
  misc_feature: SGI Peptide ID NO. 560571
  misc_feature (6)..(348): NCBI GI: 149199415 Blast Desc: LNTAR_07704 [Lentisphaera araneosa HTCC2155] gi|149137493|gb|EDM25910.1| LNTAR_07704 [Lentisphaera araneosa HTCC2155]
  misc_feature (29)..(345): NCBI GI: 284039772 Blast Desc: Slin_4925 [Spirosoma linguale DSM 74] gi|283819065|gb|ADB40903.1| Slin_4925 [Spirosoma linguale DSM 74]
  misc_feature (29)..(337): NCBI GI: 155122508 Blast Desc: MT325_M822R [Paramecium bursaria chlorella virus MT325]
  misc_feature (29)..(337): NCBI GI: 155370918 Blast Desc: FR483_N820R [Paramecium bursaria Chlorella virus FR483] gi|155124238|gb|ABT16105.1| FR483_N820R [Paramecium bursaria Chlorella virus FR483]
  misc_feature (29)..(313): NCBI GI: 255532196 Blast Desc: Phep_2302 [Pedobacter heparinus DSM 2366] gi|255345180|gb|ACU04506.1| Phep_2302 [Pedobacter heparinus DSM 2366]
  misc_feature (29)..(313): NCBI GI: 229537016 Blast Desc: PlimDRAFT_08790 [Planctomyces limnophilus DSM 3776] gi|229474672|gb|EEO64840.1| PlimDRAFT_08790 [Planctomyces limnophilus DSM 3776]
  misc_feature (30)..(340): NCBI GI: 157953579 Blast Desc: AR158_C389R [Paramecium bursaria Chlorella virus AR158] gi|156068227|gb|ABU43934.1| AR158_C389R [Paramecium bursaria Chlorella virus AR158]
  misc_feature (30)..(340): NCBI GI: 157952747 Blast Desc: NY2A_B443R [Paramecium bursaria Chlorella virus NY2A] gi|155122974|gb|ABT14842.1| NY2A_B443R [Paramecium bursaria Chlorella virus NY2A]
  misc_feature (139)..(340): NCBI GI: 9631886 Blast Desc: [Paramecium bursaria Chlorella virus 1] gi|1181481|gb|AAC96686.1| A318R [Paramecium bursaria Chlorella virus 1]
  misc_feature (68)..(338): NCBI GI: 149199409 Blast Desc: LNTAR_07674 [Lentisphaera araneosa HTCC2155] gi|149137487|gb|EDM25904.1| LNTAR_07674 [Lentisphaera araneosa HTCC2155]
MRSFVSIVVAVATTQAAALFDIDSNPNAVGICYSVWHSLGYDNGAPPDISEIEADNQNFAAQPNWHWWGRPDGGYYAGGNTGVLDRHFSQMAGAGIDFIVVDATNLEGYGGYAAGLFTEPSDTLLAEMQVQAAAGNPTPNVVFWVRTASTDADPSAVGRFVNDRYYSNSAYADFWVTFKGKPLMLTTDTLPSDLSETFTLRKMWGLQGSLAESEWSFLQDSPQNVAMTGGIPEQISVSVAKQQSYISDKATATSRQNGGTYAAQWAEAFSVHPEVVILTWWNEWMAHRQADDASGNPQFVDEYDGEYSRDIEPQDPTQPGSHGSSYLTWTQQYIAAYKANQAIPTGLMGY

SEQ ID NO: 2787 - DNA, 1518 bp, Muscodor strobelii
  misc_feature: SGI cDNA ID NO. 560572
  misc_feature: Encodes the peptide sequence at SEQ ID NO 2788
atgcctcttgcccacgtccctggtcctttttggggacgggccacaggctttccgtcatggtattatgccaaaactggagagcggcacctctggctctcgaaacagttccagatgtatggggacagagttcgagtgaccccagataccgtgcttttcaaccatcccgacgctttcaaagacatttatcacataaaatcgaacgtccgacgaagcgacttttatattgcgtttagacgtcatgctcaggatttgaacactctcaactgtggtgatgtcgccatacatgctgcgaaacgcaagttgttaaatacttgcttcactgacaagtcagtgggtgctgcttgtggatttatagctaagcatgcagaccgctggcttcagctcatcgcagaggaggaagatgagcgtccctggtctgtgacaataaaccttaacgagaagatcgacgaactattgttcgatattatgggtgatctttgcttcggcagatcacctgatatcaaagagcacgctgaaaatgcgctgaaagcagttccgcattccgttgtggaatacatgcgattcttctatcctattggtcattcaccgtttctcggtgtcatcaactggcttaaacctcgtggtctcaatcagctcttttccctcctgacgcctgaaacgatacgggcttatgaaacattcattgacgacagcgtaacggaaagtatttcccgttacaaggaagaaacaacaaagcaagaatctgaaaggcgccaagattttttctattttttatgcgaagctcgtaacccggacacggggttggctgcttattctaagactgaactcagagccgaagctagcttgctgattatagccgggactgacactacatctgccattctttcaggaatctttttctatcttactggcgacccgtcgagatgcgaaaagctttatcgtgaaattctcacttccttcgactctgtccacgagattgtacatggcccaacactcttggcgtgtgaatatttgagagcctgtattgacgagaccatgcgtttaacgacatctggcccctcagaagcaccccgactcgtgctagctagcggaacggtcattcgaggagacttttatccagaaggcacaattgtaggcgtaccaatgtactgcatcaatcgcaatcaagacgtctatggagatcctaaggcatttcgcccggagcggtggataccgaaggacacatccgaggcggctcgtaaagaagtgacaaaattaaagcgcggattcaaccctttcttagctggacctggcaattgtgttggacagaaagttgctatgtcagagatgatgatcattgttgctcgaacgctatactgctttgagatgagacgggcacctggatcaacattgggaggtgggcagcctggatccggctgggagaatggtgatccgggagatttccaggtgctagatgcgtatgtctcagtccgtaaaggtcctgaagttcaatttcggaggagatcggggaagatctaa

SEQ ID NO: 2788 - protein, 505 aa, Muscodor strobelii
  misc_feature: SGI Peptide ID NO. 560572
  misc_feature (6)..(483): Pfam Id: PF00067 Pfam Desc: Cytochrome P450
  misc_feature (241)..(451): Pfam Id: PF00067 Pfam Desc: Cytochrome P450
  misc_feature (2)..(501): NCBI GI: 119483816 Blast Desc: benzoate 4-monooxygenase cytochrome P450 [Neosartorya fischeri NRRL 181] gi|119409967|gb|EAW19914.1| benzoate 4-monooxygenase cytochrome P450 [Neosartorya fischeri NRRL 181]
  misc_feature (30)..(501): NCBI GI: 115386118 Blast Desc: [Aspergillus terreus NIH2624] gi|114190598|gb|EAU32298.1| [Aspergillus terreus NIH2624]
  misc_feature (2)..(502): NCBI GI: 256727731 Blast Desc: NECHADRAFT_76848 [Nectria haematococca mpVI 77-13-4]
  misc_feature (2)..(501): NCBI GI: 189189070 Blast Desc: cytochrome P450 67 [Pyrenophora tritici-repentis Pt-1C-BFP] gi|187972480|gb|EDU39979.1| cytochrome P450 67 [Pyrenophora tritici-repentis Pt-1C-BFP]
  misc_feature (40)..(501): NCBI GI: 189204718 Blast Desc: cytochrome P450 67 [Pyrenophora tritici-repentis Pt-1C-BFP] gi|187985793|gb|EDU51281.1| cytochrome P450 67 [Pyrenophora tritici-repentis Pt-1C-BFP]
  misc_feature (2)..(501): NCBI GI: 145608110 Blast Desc: MGG_03375 [Magnaporthe grisea 70-15] gi|145015610|gb|EDK00100.1| MGG_03375 [Magnaporthe grisea 70-15]
  misc_feature (2)..(500): NCBI GI: 46123381 Blast Desc: FG06068.1 [Gibberella zeae PH-1]
  misc_feature (2)..(502): NCBI GI: 154313085 Blast Desc: BC1G_05544 [Botryotinia fuckeliana B05.10] gi|150849629|gb|EDN24822.1| BC1G_05544 [Botryotinia fuckeliana B05.10]
  misc_feature (2)..(501): NCBI GI: 169603764 Blast Desc: SNOG_04890 [Phaeosphaeria nodorum SN15] gi|111066161|gb|EAT87281.1| SNOG_04890 [Phaeosphaeria nodorum SN15]
  misc_feature (2)..(501): NCBI GI: 85092131 Blast Desc: NCU06895 [Neurospora crassa OR74A] gi|28920645|gb|EAA30006.1| conserved [Neurospora crassa OR74A]
  misc_feature (3)..(458): SWISSPROT Homolog: EC 1.14.13.12 Benzoate 4-monooxygenase
MPLAHVPGPFWGRATGFPSWYYAKTGERHLWLSKQFQMYGDRVRVTPDTVLFNHPDAFKDIYHIKSNVRRSDFYIAFRRHAQDLNTLNCGDVAIHAAKRKLLNTCFTDKSVGAACGFIAKHADRWLQLIAEEEDERPWSVTINLNEKIDELLFDIMGDLCFGRSPDIKEHAENALKAVPHSVVEYMRFFYPIGHSPFLGVINWLKPRGLNQLFSLLTPETIRAYETFIDDSVTESISRYKEETTKQESERRQDFFYFLCEARNPDTGLAAYSKTELRAEASLLIIAGTDTTSAILSGIFFYLTGDPSRCEKLYREILTSFDSVHEIVHGPTLLACEYLRACIDETMRLTTSGPSEAPRLVLASGTVIRGDFYPEGTIVGVPMYCINRNQDVYGDPKAFRPERWIPKDTSEAARKEVTKLKRGFNPFLAGPGNCVGQKVAMSEMMIIVARTLYCFEMRRAPGSTLGGGQPGSGWENGDPGDFQVLDAYVSVRKGPEVQFRRRSGKI

SEQ ID NO: 2789 - DNA, 238 bp, Muscodor strobelii
  misc_feature: SGI EST ID NO. CUFF.6974.0
  misc_feature: Variant of the nucleotide sequence at SEQ ID NO 2787
tatagctaagcatgcagaccgctggcttcagctcatcgcagaggaggaagatgagcgtccctggtctgtgacaataaaccttaacgagaagatcgacgaactattgttcgatattatgggtgatctttgcttcggcagatcacctgatatcaaagagcacgctgaaaatgcgctgaaagcagttccgcattccgttgtggaatacatgcgattcttctatcctattggtcattcaccg

SEQ ID NO: 2790 - DNA, 1821 bp, Muscodor strobelii
  misc_feature: SGI cDNA ID NO. 560573
  misc_feature: Encodes the peptide sequence at SEQ ID NO 2791
atgcctacctctattgtagacatccgtgcagttgatgcaacgtcgttccattatgtttttgagcagaatgtcacggtcagacttcaagatggccgtggtctgatccggtgcaatatttatcgaccgcacggctccaaacccgttcctgtccttgtaacgtatgggccttatggtaaagacataccgtacaaagattttcatcccaagtctttctcggaggtgaatcctcaacaccgatccgtccattctgcgtgggagacaccagatccgaggttctggactggtcatggctatgctgtcgttcgtgctgacgagcgaggctctggccagtcgccaggtcttcttgacacaatgtcgcgtggaactacagaagctttttgcgatctaatagagtgggcgtcagaccagccatggtctactggcaagatcggcctcttaggcgtcagttattatgcaggcagccaatggagagtagccgcccggaaaccaaagggcctatgtgcaatgattccttgggagggtatgtcagactactacagagacagatgtcgacatggcggtatcctctccaacggttttatcaagttctggtgggatcgacaagttgtcacaaatcaatggcaagttgatctaacctatcgaatatcaaagactgacggaagacctggcaggaaggctagtaactggggcccggatacgatcgagggtgatttgactgacaccgaactccttacaaaccgtcaagatcaaacgaacgataatcaaaaaaatcaataccgtgatgacacatattatgcctcaaaagaatatgacatgggcgatatcgagatacctttgctctctgtaggaaattggggcggcatcttgcttcatctgagaggaaatatcgaaggctattatcacgcagcttcgaagttcaaatacatgcgcatgatcacgggaagacacgatctgccattctattacgaagaggaagtcgaagttcagcgtagctttttggatgcctttctcagagacgacgacagagtcggttggtcggaagaaggcaaagttgcccctatcgacctggtcatgcgaaaaggaaacctcggcttcaacaatccgaaaagcgaaaaagaatacatccgacgagaagagaacgagtggccgattgcccgcactcagtacaccaagttctatctcacaccatcctttggtcttgattgggacgctcaaccgccaagacagccgaagtctaagctgtcctaccgcgcgcttggcacattgaagaacccgcagtttattcagtttaagaccgagcctttcgctgaagaagtcgagatcacgggccatatcactgcaaaacttcatgtctctgtgacaccagactccgacggtccgactccaagcgatatcgacttgttcgtcacactgcgacacctagatccgagcgggaaagaagtgttctatactgggactgctggcgatccagtaccactcactaagggctggctcagagtctcactgcggaaagtcaatcgcgagagcccaaagcaccgcgaatggcttcctcgtcgagagtacacaagtcgcgacgtgcttccagtgatacagggtgacatttacccagtagacgttgagatctggccaacaaatgtgatagttgagagaggaggaaagatcgtctttgaagtctcgtctggtgacacgcagggatcgggcatttttacgcatgatgatccggtggacagggcgcctgaggtctttcagggcatcaaccacatatgtttcggtccaaacctaatcaactatgtgactctccccatcattccaggtaaatga

SEQ ID NO: 2791 - protein, 606 aa, Muscodor strobelii
  misc_feature: SGI Peptide ID NO. 560573
  misc_feature (30)..(313): Pfam Id: PF02129 Pfam Desc: X-Pro dipeptidyl-peptidase (S15 family)
  misc_feature (330)..(595): Pfam Id: PF08530 Pfam Desc: X-Pro dipeptidyl-peptidase C-terminal non-catalytic domain
  misc_feature (30)..(193): Pfam Id: PF02129 Pfam Desc: X-Pro dipeptidyl-peptidase (S15 family)
  misc_feature (1)..(604): NCBI GI: 46121183 Blast Desc: FG04970.1 [Gibberella zeae PH-1]
  misc_feature (1)..(604): NCBI GI: 39949527 Blast Desc: MGG_08785 [Magnaporthe grisea 70-15] gi|145009337|gb|EDJ94048.1| MGG_08785 [Magnaporthe grisea 70-15]
  misc_feature (1)..(606): NCBI GI: 49409607 Blast Desc: acyl esterase [Aspergillus flavus]
  misc_feature (1)..(604): NCBI GI: 115399826 Blast Desc: ATEG_06324 [Aspergillus terreus NIH2624] gi|114191168|gb|EAU32868.1| ATEG_06324 [Aspergillus terreus NIH2624]
  misc_feature (1)..(603): NCBI GI: 169779757 Blast Desc: [Aspergillus oryzae RIB40] gi|83773082|dbj|BAE63210.1| protein product [Aspergillus oryzae]
  misc_feature (1)..(606): NCBI GI: 70982684 Blast Desc: hydrolase, CocE/NonD family [Aspergillus fumigatus Af293] gi|66844494|gb|EAL84832.1| hydrolase, CocE/NonD family, [Aspergillus fumigatus Af293]
  misc_feature (1)..(606): NCBI GI: 119488382 Blast Desc: X-Pro dipeptidyl-peptidase (S15 family) protein [Neosartorya fischeri NRRL 181] gi|119410852|gb|EAW20797.1| X-Pro dipeptidyl-peptidase (S15 family) protein [Neosartorya fischeri
  misc_feature (1)..(606): NCBI GI: 159122888 Blast Desc: hydrolase, CocE/NonD family, [Aspergillus fumigatus A1163]
  misc_feature (5)..(606): NCBI GI: 169596348 Blast Desc: SNOG_00932 [Phaeosphaeria nodorum SN15] gi|111071307|gb|EAT92427.1| SNOG_00932 [Phaeosphaeria nodorum SN15]
  misc_feature (1)..(604): NCBI GI: 242769618 Blast Desc: hydrolase, CocE/NonD family, [Talaromyces stipitatus ATCC 10500] gi|218725000|gb|EED24417.1| hydrolase, CocE/NonD family, [Talaromyces stipitatus ATCC 10500]
MPTSIVDIRAVDATSFHYVFEQNVTVRLQDGRGLIRCNIYRPHGSKPVPVLVTYGPYGKDIPYKDFHPKSFSEVNPQHRSVHSAWETPDPRFWTGHGYAVVRADERGSGQSPGLLDTMSRGTTEAFCDLIEWASDQPWSTGKIGLLGVSYYAGSQWRVAARKPKGLCAMIPWEGMSDYYRDRCRHGGILSNGFIKFWWDRQVVTNQWQVDLTYRISKTDGRPGRKASNWGPDTIEGDLTDTELLTNRQDQTNDNQKNQYRDDTYYASKEYDMGDIEIPLLSVGNWGGILLHLRGNIEGYYHAASKFKYMRMITGRHDLPFYYEEEVEVQRSFLDAFLRDDDRVGWSEEGKVAPIDLVMRKGNLGFNNPKSEKEYIRREENEWPIARTQYTKFYLTPSFGLDWDAQPPRQPKSKLSYRALGTLKNPQFIQFKTEPFAEEVEITGHITAKLHVSVTPDSDGPTPSDIDLFVTLRHLDPSGKEVFYTGTAGDPVPLTKGWLRVSLRKVNRESPKHREWLPRREYTSRDVLPVIQGDIYPVDVEIWPTNVIVERGGKIVFEVSSGDTQGSGIFTHDDPVDRAPEVFQGINHICFGPNLINYVTLPIIPGK

SEQ ID NO: 2792 - DNA, 2322 bp, Muscodor strobelii
  misc_feature: SGI cDNA ID NO. 560574
  misc_feature: Encodes the peptide sequence at SEQ ID NO 2793
atgggtactttctgcagtactgaaaaaggcgcggatcccgacgagcatgagaaggatccgcatgattctcaaccacatcaacataccctcaggacagttcagttgcgcatacgggacaagatggccaccaaccagcagcaggctgttgcttcgaatgcgcaagtcaacggacaactagaattcaacttccaaaacaccaccagaaatccatccctgaaacccaccaggaaggaagatgaagccatcacgcacatgagaaggatgagggaaaatgacaatgccagcttcagtaaaaagggtctgtcatctactgggcactttctggatattaaggacgtgattcacgagaaggagttatatcagatcgccagaatggcgcccaaaggtgcacatttacacctgcactttaactccacccttcttcctgaagttctcctcggttatgctgcggatatggataacatgttcatatggagcgatctgaatctccacgaaaaagaaaattttgacaaatgcaagatcgagttcagtataaagccgattgggcaaatatggcaagcgttgccacttcacataagacgaaagctagcgacagaaatctctcggggaaagctgggcaaggagagaataaaccaagagctcataggaaaatggcgagagctagaaagcggcgccatacaggaatttggaagggaagaacttcaagcactggaaaaatactacagatcggaattgaaagaccagataaacaaacacggttcaaatttgtttcaccgcaagtacgaacaaaacggccccatgcgatatcagtgttttcgcgagctttgggaaaaggaggcgaagcccaggatacaaaagacctgtgacgagtggctcatcagcaaattagttttcagtaagcagcaaaaggaggaattcttctgcaacgacggtgcctcggtcaatgcctcgttcaaaagggatgtgaaatcagaggtagagacaggaatatcagcatccaggaagaaaatccagaagttgcgaaatgacggagaaaccacggagggagcaaaacagcagttaagggccgaagaagagcagttggatctctttgaagcgtccaagaagcgcatagaggatatgcccagggagcacgatcgcaatcgtgaaagtgcacgcagggcgtgggatgcatttaatggtcgcacgaagatgatgaagggactattcaactatcagatggccttcagagcgtacacaagacagtgcctcgaagcattcgttgaggacaatgtccaatacgctgagattcggccaaacttcatgaagactaatcaggtcttcaatgataacggatgggacaaaatcgacaacgagggaatgatggatatcataatcgatgaatacgagcagttcatgaaagacatcggagatatggattcccacggcaacatgctagatggcgacaaccaccggccgactttcagtggcatgaaggtgatatactgcacaccccgctcattctctaggcagcaggtaaagcatgcgctcgatgagtgtctaaaattcaagatgcgatggccccgatacatcgcaggttttgatctagttggagaagaatcttttcccaagccatttcccttgaaacacttcgagaacgagtttagagaattccagtcacaatgcaatgccgaggggcaaacaattccattcctatttcactgcggcgagactccagacgatttcgaaggcaatctagacacagctctcgagcttaacgcgagaaggattggacatggatatgcattacccgagaaggacgatgttcttgcccggatgaagaagaacaacgtatgtgtcgagtcctgtccgatatccaacatggtattgggtcttgcagagacaatgtcagaacatagcatctacaagctacttgacaaggaaatgcactgtgccttgagcagtgacaacggcaccctcttccagtctacgctatcacacgatttttacgaggttatggcaggtaatgacggcatcaatcttttaggatggaaacaattggcgttgtggagtatagaacattctgtcttcgaccacaactgtgagaaggagagaaaggcgatgaagcaagagtgggaaaagcgctggcaagaatttgtcgctgcgattcttaaacgagacaaaaccacacaggctactatttcttcagaattccgcgaagactctggccagggcgcgaggctgagcaagctacaggcagcgagggatctcaaagcgagaagagaagctggcgtaagaaaaggcatgcaggcttcgacaaatggtacgggcactgaagcttaa

SEQ ID NO: 2793 - protein, 773 aa, Muscodor strobelii
  misc_feature: SGI Peptide ID NO. 560574
  misc_feature (354)..(704): Pfam Id: PF00962 Pfam Desc: Adenosine/AMP deaminase
  misc_feature (488)..(663): Pfam Id: PF00962 Pfam Desc: Adenosine/AMP deaminase
  misc_feature (383)..(713): NCBI GI: 46124089 Blast Desc: FG06422.1 [Gibberella zeae PH-1]
  misc_feature (383)..(717): NCBI GI: 261359376 Blast Desc: conserved [Verticillium albo-atrum VaMs.102]
  misc_feature (377)..(718): NCBI GI: 256725200 Blast Desc: NECHADRAFT_55136 [Nectria haematococca mpVI 77-13-4]
  misc_feature (365)..(718): NCBI GI: 164426717 Blast Desc: NCU04048 [Neurospora crassa OR74A] gi|157071446|gb|EAA28427.2| conserved [Neurospora crassa OR74A]
  misc_feature (383)..(727): NCBI GI: 145611190 Blast Desc: MGG_00601 [Magnaporthe grisea 70-15] gi|145018495|gb|EDK02774.1| MGG_00601 [Magnaporthe grisea 70-15]
  misc_feature (383)..(712): NCBI GI: 256727188 Blast Desc: [Nectria haematococca mpVI 77-13-4]
  misc_feature (389)..(717): NCBI GI: 116202317 Blast Desc: CHGG_09043 [Chaetomium globosum CBS 148.51] gi|88177561|gb|EAQ85029.1| CHGG_09043 [Chaetomium globosum CBS 148.51]
  misc_feature (365)..(718): NCBI GI: 39979239 Blast Desc: related to CECR1 protein [Neurospora crassa]
  misc_feature (383)..(717): NCBI GI: 156064689 Blast Desc: SS1G_00352 [Sclerotinia sclerotiorum 1980] gi|154691214|gb|EDN90952.1| SS1G_00352 [Sclerotinia sclerotiorum 1980]
  misc_feature (383)..(647): NCBI GI: 171682246 Blast Desc: protein product [Podospora anserina] gi|170941082|emb|CAP66732.1| protein product [Podospora anserina]
MGTFCSTEKGADPDEHEKDPHDSQPHQHTLRTVQLRIRDKMATNQQQAVASNAQVNGQLEFNFQNTTRNPSLKPTRKEDEAITHMRRMRENDNASFSKKGLSSTGHFLDIKDVIHEKELYQIARMAPKGAHLHLHFNSTLLPEVLLGYAADMDNMFIWSDLNLHEKENFDKCKIEFSIKPIGQIWQALPLHIRRKLATEISRGKLGKERINQELIGKWRELESGAIQEFGREELQALEKYYRSELKDQINKHGSNLFHRKYEQNGPMRYQCFRELWEKEAKPRIQKTCDEWLISKLVFSKQQKEEFFCNDGASVNASFKRDVKSEVETGISASRKKIQKLRNDGETTEGAKQQLRAEEEQLDLFEASKKRIEDMPREHDRNRESARRAWDAFNGRTKMMKGLFNYQMAFRAYTRQCLEAFVEDNVQYAEIRPNFMKTNQVFNDNGWDKIDNEGMMDIIIDEYEQFMKDIGDMDSHGNMLDGDNHRPTFSGMKVIYCTPRSFSRQQVKHALDECLKFKMRWPRYIAGFDLVGEESFPKPFPLKHFENEFREFQSQCNAEGQTIPFLFHCGETPDDFEGNLDTALELNARRIGHGYALPEKDDVLARMKKNNVCVESCPISNMVLGLAETMSEHSIYKLLDKEMHCALSSDNGTLFQSTLSHDFYEVMAGNDGINLLGWKQLALWSIEHSVFDHNCEKERKAMKQEWEKRWQEFVAAILKRDKTTQATISSEFREDSGQGARLSKLQAARDLKARREAGVRKGMQASTNGTGTEA

SEQ ID NO: 2794 - DNA, 3604 bp, Muscodor strobelii
  misc_feature: SGI EST ID NO. CUFF.7005.1
  misc_feature: Variant of the nucleotide sequence at SEQ ID NO 2792
ggactcttgaaatacctacaccaaggtggggggttgctgtgtgttctttttgcggataagcgctcagggacttgatgagccttacctccggatccagcgactcagcggcccaggtgtttccttcggcgcgcaacaaggcgtaatacaagccaaaaaagatacatgctacacaaagcccacctattattcggaagctgtcttttaagtcctcttccctgtcactgccagtcatagtcgagccgtagcatcaggcaggctttacgacacatcggcctgtgagtcctggcttggccgtctccgtcccacctgctcattccactccgttcgtcattcatcaaatggtcattcacggttgatcgatctcatgccctcctgttccggccatctgaccgctatacggacatgctcgtgctgtcgcgatttaatagatttcatagctgatgcgattctgatgctccctcctttgtctgcgcattctccactgccattccattgaatcagtgacatctctcctcaatcaccccccttattatgtgcctacgccgtactcattcctagttctctttgtccttataattcatagcgctcaatctgaatgtccccatgggtactttctgcagtactgaaaaaggcgcggatcccgacgagcatgagaaggatccgcatgattctcaaccacatcaacataccctcaggacagttcagttgcgcatacgggacaagatggccaccaaccagcagcaggctgttgcttcgaatgcgcaagtcaacggacaactagaattcaacttccaaaacaccaccagaaatccatccctgaaacccaccaggaaggaagatgaagccatcacgcacatgagaaggatgagggaaaatgacaatgccagcttcagtaaaaagggtctgtcatctactgggcactttctggatattaaggacgtgattcacgagaaggagttatatcagatcgccagaatggcgcccaaaggtgcacatttacacctgcactttaactccacccttcttcctgaagttctcctcggttatgctgcggatatggataacatgttcatatggagcgatctgaatctccacgaaaaagaaaattttgacaaatgcaagatcgagttcagtataaagccgattgggcaaatatggcaagcgttgccacttcacataagacgaaagctagcgacagaaatctctcggggaaagctgggcaaggagagaataaaccaagagctcataggaaaatggcgagagctagaaagcggcgccatacaggaatttggaagggaagaacttcaagcactggaaaaatactacagatcggaattgaaagaccagataaacaaacacggttcaaatttgtttcaccgcaagtacgaacaaaacggccccatgcgatatcagtgttttcgcgagctttgggaaaaggaggcgaagcccaggatacaaaagacctgtgacgagtggctcatcagcaaattagttttcagtaagcagcaaaaggaggaattcttctgcaacgacggtgcctcggtcaatgcctcgttcaaaagggatgtgaaatcagaggtagagacaggaatatcagcatccaggaagaaaatccagaagttgcgaaatgacggagaaaccacggagggagcaaaacagcagttaagggccgaagaagagcagttggatctctttgaagcgtccaagaagcgcatagaggatatgcccagggagcacgatcgcaatcgtgaaagtgcacgcagggcgtgggatgcatttaatggtcgcacgaagatgatgaagggactattcaactatcagatggccttcagagcgtacacaagacagtgcctcgaagcattcgttgaggacaatgtccaatacgctgagattcggccaaacttcatgaagactaatcaggtcttcaatgataacggatgggacaaaatcgacaacgagggaatgatggatatcataatcgatgaatacgagcagttcatgaaagacatcggagatatggattcccacggcaacatgctagatggcgacaaccaccggccgactttcagtggcatgaaggtgatatactgcacaccccgctcattctctaggcagcaggtaaagcatgcgctcgatgagtgtctaaaattcaagatgcgatggccccgatacatcgcaggttttgatctagttggagaagaatcttttcccaagccatttcccttgaaacacttcgagaacgagtttagagaattccagtcacaatgcaatgccgaggggcaaacaattccattcctatttcactgcggcgagactccagacgatttcgaaggcaatctagacacagctctcgagcttaacgcgagaaggattggacatggatatgcattacccgagaaggacgatgttcttgcccggatgaagaagaacaacgtatgtgtcgagtcctgtccgatatccaacatggtattgggtcttgcagagacaatgtcagaacatagcatctacaagctacttgacaaggaaatgcactgtgccttgagcagtgacaacggcaccctcttccagtctacgctatcacacgatttttacgaggttatggcaggtaatgacggcatcaatcttttaggatggaaacaattggcgttgtggagtatagaacattctgtcttcgaccacaactgtgagaaggagagaaaggcgatgaagcaagagtgggaaaagcgctggcaagaatttgtcgctgcgattcttaaacgagacaaaaccacacaggctactatttcttcagaattccgcgaagactctggccagggcgcgaggctgagcaagctacaggcagcgagggatctcaaagcgagaagagaagctggcgtaagaaaaggcatgcaggcttcgacaaatgagttgcgaaagtctggctccccgtccgttagacggcatgctctctggcaaaggtgtctcggatgtttaggaatggttaaaggtcaggacacgcagcaccggggtttgtgatacccagattttatcgctttaggcgtctaggatagggcgttgttctcgggtcaggaggtcatatgtcccgttcaatatactacctgtttgcttttttcgtaaaacgatacctgtcgctgcacgaatgctaccagaggagagatatcacattccaaccgagtgtggtctcctgagcatgagatctagttcagtgttcgctgtagtactgcttccgttcaatttttctgcgatgggacgacccatctgcacccgaatttcgctcgctcaagtagacggtggaaaaatggctgatatcagaaaggtgcacaaaggaggctgtgaacaatctcgatgacgagtcatcttcgagactcgggtcgcacatacaatcccatcgtacccgttctatgcgttctgacaaaacaatgcccatccatcatttccacagcgatgtggaggtctgagccgcgttcttggctgcttggcatgcagcactcgatccctgcgcccgctttccacgcgcctcatgacgaacttaggattctcagtggacggtaggacggactagtgggtcaattgtttggcgcactgggcgttcagtgacccctcg

SEQ ID NO: 2795 - DNA, 1650 bp, Muscodor strobelii
  misc_feature: SGI cDNA ID NO. 560575
  misc_feature: Encodes the peptide sequence at SEQ ID NO 2796
atggacaatagcacctgcgactgtgacccagcccgcaacatcactaacaaccctctcctgtggttttcgtccgatatcataggcgacgggccatcaggctggcgtctcgatgttgtcacgcttctcgccgtcattggcgagtcctccattgcggagcatgcccagactatcaccgccagtgtgctctgcttgttgcctcgcctgatacctgctccccaagcactactccgtcccactcgtccacaacgtctgcccgagacaacagccagaatgacgggagtctatagtggtgtggtgctcgacaccgtgggcttcttcgccaacatcattcaccctctcgacgaactaccaccctttgcgttcaaagtcctcgagataaggcacacagaccggaacagtgtcggcggctttgaggtcggacaaatcgccacaaatggtgcttcgtcattctttggaaagctacggagccgtgggcaaagcagcaattccaacaagcggacaaacacaaacctatcccaagcgcgttccatacgtgggcctccccccgacgctttcgacgacgacgatgacgaggaaagcgggaatccgcggatccatggccgggccaccgggctgagtgttgctttttcggacgctgaagccggtgtcgccaacgcaccgacacaaggtatcacacggcgtgcgacaatgaaggaaaaggtgcaagatttcgtagccaatccaacgctggccaacaccaaggctcggccggctatacctgccactctatattctcctatccacatcttggagatattttccgtcgctgttaccttcagcattattggctttgccgttcatttccaagacggaaccgctatcattgctattttcctcatggccatggctagttcaattgttggctgggcttcctggtggcgaccggtgctcatgaatcgaagccatacgaacaaagttcccgaaggcgatgtgatcattcggactcgtgaaggagcattcctgctggtcaagtgcacggaagaggtagctcgtgaactctattccggtaccgaagaatgcgagtatcatgtcaatgggcaggcgtatcgagtgatgatgggagccggtactctattcctgatggtagcggtcattctcatgggcaattgcaaatgggacacgcaaatcttcatcggcgcaagttacattttcctgaatgccgcctactggacgatgggcctgatacccaagcgctatttttgggatctcagccgctatgattggaaagacgtgactccaccagaggctaagaatgctgacaagactacggatgaaaatgaccctcgtgagggcgtcaagagctttacacgaactctatggtttgcgattcgcgagaccaagcggacagcatggattaagagaagtggcgccgcccccatcacccctcagtggaatctttggcttgcggaagcagaggccgctgccaaagagggacacaagaactggccatccgttgctcgcaaagacgagatcatgaagatgcgcgaggatgagatgtttcctagtcccattccggctgcccagtctaacttcgacgctgccgaacaacatgtcccggctgtggaagtgcagtcctctgaaggccgccagccacgcacaggagccttctag

SEQ ID NO: 2796 - protein, 549 aa, Muscodor strobelii
  misc_feature: SGI Peptide ID NO. 560575
  misc_feature (32)..(543): NCBI GI: 256727189 Blast Desc: NECHADRAFT_32631 [Nectria haematococca mpVI 77-13-4]
  misc_feature (32)..(538): NCBI GI: 46124091 Blast Desc: FG06423.1 [Gibberella zeae PH-1]
  misc_feature (34)..(537): NCBI GI: 145611188 Blast Desc: MGG_11548 [Magnaporthe grisea 70-15] gi|145018494|gb|EDK02773.1| MGG_11548 [Magnaporthe grisea 70-15]
  misc_feature (33)..(537): NCBI GI: 171682248 Blast Desc: protein product [Podospora anserina] gi|170941083|emb|CAP66733.1| protein product [Podospora anserina]
  misc_feature (33)..(544): NCBI GI: 85086265 Blast Desc: NCU04049 [Neurospora crassa OR74A] gi|28918758|gb|EAA28428.1| [Neurospora crassa OR74A] gi|39979251|emb|CAE85620.1| [Neurospora crassa]
  misc_feature (33)..(536): NCBI GI: 156064691 Blast Desc: SS1G_00353 [Sclerotinia sclerotiorum 1980] gi|154691215|gb|EDN90953.1| SS1G_00353 [Sclerotinia sclerotiorum 1980]
  misc_feature (84)..(536): NCBI GI: 154322867 Blast Desc: BC1G_00776 [Botryotinia fuckeliana B05.10] gi|150848110|gb|EDN23303.1| BC1G_00776 [Botryotinia fuckeliana B05.10]
  misc_feature (251)..(531): NCBI GI: 238843312 Blast Desc: conserved [Microsporum canis CBS 113480]
  misc_feature (242)..(527): NCBI GI: 121700567 Blast Desc: conserved [Aspergillus clavatus NRRL 1] gi|119396691|gb|EAW07122.1| conserved [Aspergillus clavatus NRRL 1]
  misc_feature (249)..(517): NCBI GI: 239612304 Blast Desc: conserved [Ajellomyces dermatitidis ER-3]
MDNSTCDCDPARNITNNPLLWFSSDIIGDGPSGWRLDVVTLLAVIGESSIAEHAQTITASVLCLLPRLIPAPQALLRPTRPQRLPETTARMTGVYSGVVLDTVGFFANIIHPLDELPPFAFKVLEIRHTDRNSVGGFEVGQIATNGASSFFGKLRSRGQSSNSNKRTNTNLSQARSIRGPPPDAFDDDDDEESGNPRIHGRATGLSVAFSDAEAGVANAPTQGITRRATMKEKVQDFVANPTLANTKARPAIPATLYSPIHILEIFSVAVTFSIIGFAVHFQDGTAIIAIFLMAMASSIVGWASWWRPVLMNRSHTNKVPEGDVIIRTREGAFLLVKCTEEVARELYSGTEECEYHVNGQAYRVMMGAGTLFLMVAVILMGNCKWDTQIFIGASYIFLNAAYWTMGLIPKRYFWDLSRYDWKDVTPPEAKNADKTTDENDPREGVKSFTRTLWFAIRETKRTAWIKRSGAAPITPQWNLWLAEAEAAAKEGHKNWPSVARKDEIMKMREDEMFPSPIPAAQSNFDAAEQHVPAVEVQSSEGRQPRTGAF

SEQ ID NO: 2797 - DNA, 2753 bp, Muscodor strobelii
  misc_feature: SGI EST ID NO. CUFF.6984.0
  misc_feature: Variant of the nucleotide sequence at SEQ ID NO 2795
gtttggaacctggactcaccttcagaacggacaaagccaagatgctgtgtgcatgactgtcctcgctggtcagttgccaagcttgtcgggttccctccagtctccagagtgccttcttcttgtggtcttgcccaggagcgaccccagctccgcctctcagctttagaacccaataaatatcccaaactgcaaaagctttcccacttgtgaggcacaataccttgctttcggcccattcctacaatcacatcactttgcacatttctttataccggagccatcatcactttatttagaggagcaacgatcgcaatactatgtgacatcaccattattaccatattaactgctatacaccccgttctgtatagactaaactactcaacatgccgtacatccaataaactctagtcgaagtgcttctatcgggcctagctagctcgcgctctgtgttattagatcccgatttccacttccagcgagacgaagcttatacgacgcgacaatagagatatacacgtctagcgtaaacctaattgacacgccattgatcgatcgctaaagcctaccaccacgacggtgctccattaaagcaatggacaatagcacctgcgactgtgacccagcccgcaacatcactaacaaccctctcctgtggttttcgtccgatatcataggcgacgggccatcaggctggcgtctcgatgttgtcacgcttctcgccgtcattggcgagtcctccattgcggagcatgcccagactatcaccgccagtgtgctctgcttgttgcctcgcctgatacctgctccccaagcactactccgtcccactcgtccacaacgtctgcccgagacaacagccagaatgacgggagtctatagtggtgtggtgctcgacaccgtgggcttcttcgccaacatcattcaccctctcgacgaactaccaccctttgcgttcaaagtcctcgagataaggcacacagaccggaacagtgtcggcggctttgaggtcggacaaatcgccacaaatggtgcttcgtcattctttggaaagctacggagccgtgggcaaagcagcaattccaacaagcggacaaacacaaacctatcccaagcgcgttccatacgtgggcctccccccgacgctttcgacgacgacgatgacgaggaaagcgggaatccgcggatccatggccgggccaccgggctgagtgttgctttttcggacgctgaagccggtgtcgccaacgcaccgacacaaggtatcacacggcgtgcgacaatgaaggaaaaggtgcaagatttcgtagccaatccaacgctggccaacaccaaggctcggccggctatacctgccactctatattctcctatccacatcttggagatattttccgtcgctgttaccttcagcattattggctttgccgttcatttccaagacggaaccgctatcattgctattttcctcatggccatggctagttcaattgttggctgggcttcctggtggcgaccggtgctcatgaatcgaagccatacgaacaaagttcccgaaggcgatgtgatcattcggactcgtgaaggagcattcctgctggtcaagtgcacggaagaggtagctcgtgaactctattccggtaccgaagaatgcgagtatcatgtcaatgggcaggcgtatcgagtgatgatgggagccggtactctattcctgatggtagcggtcattctcatgggcaattgcaaatgggacacgcaaatcttcatcggcgcaagttacattttcctgaatgccgcctactggacgatgggcctgatacccaagcgctatttttgggatctcagccgctatgattggaaagacgtgactccaccagaggctaagaatgctgacaagactacggatgaaaatgaccctcgtgagggcgtcaagagctttacacgaactctatggtttgcgattcgcgagaccaagcggacagcatggattaagagaagtggcgccgcccccatcacccctcagtggaatctttggcttgcggaagcagaggccgctgccaaagagggacacaagaactggccatccgttgctcgcaaagacgagatcatgaagatgcgcgaggatgagatgtttcctagtcccattccggctgcccagtctaacttcgacgctgccgaacaacatgtcccggctgtggaagtgcagtcctctgaaggccgccagccacgcacaggagccttctagccttttttgttttgctttctaggctcttgcaatctggaactcatcatatacccacgagcggtcgagcgagcgagcgagcgaggaatcagtctagaaaatctagttgatttggattacatctcacatttgatatagaagtgttaggaatttgtgcgaattgggtcatgaaaaggagatatccggctgccatgtttcacggcgatctaattacttttgggccagtcataatattgcattgcgttgataccactaccaccctactggatagtagtcctcgctttagaggtgagagtggtgaaacgaggaggctttcctcagagccacgctggtcattgttcttgggttaaaggagtattacgggtattatatcgcactatctcatagctgcgggccttggttgcatggttgacacatggttggataacatgtgcacgttgaatttctgcgtatagaccttcacggttcatatcgagcatagaatgagactttctgagctccatcatcgagt

SEQ ID NO: 2798 - DNA, 1023 bp, Muscodor strobelii
  misc_feature: SGI cDNA ID NO. 560576
  misc_feature: Encodes the peptide sequence at SEQ ID NO 2799
atgtccatttcaaacacactctcattgatatggacacaaaccactttcaaaccccatcctctgcctgaacatgtcaatctcgttggtcaaacggcaatagtcactggttccaatgttggtcttggcctcgaagccgcgcaggaactcgcccttcacaacgtctcactattgatcctcgcagtacgtgatatatcaaagggcgagaccgccaaagatgctatcctcaagaacccgaaggttacgaaaacatccattgaagtctggccactagatcaggattcgtatgaaagcatgactaccttcggggagcgtgctgctgccctcccacgtctcgacatggtgttactgaatgccggcctcaagttcaaggagcgtcgggagtcgaagacaggacacgaggcgcaggtcgctgtgaatcatttaggcacagctctactgtccctgctgctcctaccttccttgcgtcgtactacacagggtgtgcggaagcgagagggtctaggtccaagtcgactgacttttacatcctccagcgttgcgttttgggttccgggagccgaggtacaaaaacctcaactgctcaagtggctcgacgatcctgcgtcattcccggaagctgaggggagcaatcccaagcgatattgcttatcgaaactacttagcgtattctggatacgcgagctctcttctcttgttcgcaaggacgacgttgtgatgaactatctcaatcccggatattgcatgagcgagtttcatcgctccgatctggacagaagccatggcagctcgtcgagtcgggttgcatggtccgcggcacagggcggctatcagcttgctgatgcgctcgtattgcaccccgacagtcatggatgctatctgagtgagatgaaaatccgccctgaagggaaattcgtggtttcgccagcgggcaagactgtacagaaacaattatggaaggagacagtggctgttctccgggaagaatgtcctggtgcttatcttgacgaattcagccgcgagtaa

SEQ ID NO: 2799 - protein, 340 aa, Muscodor strobelii
  misc_feature: SGI Peptide ID NO. 560576
  misc_feature (21)..(329): NCBI GI: 242773506 Blast Desc: 3-oxoacyl-[acyl-carrier-protein] reductase, [Talaromyces stipitatus ATCC 10500] gi|218721873|gb|EED21291.1| 3-oxoacyl-[acyl-carrier-protein] reductase, [Talaromyces ATCC
  misc_feature (8)..(331): NCBI GI: 154312603 Blast Desc: BC1G_05904 [Botryotinia fuckeliana B05.10] gi|150850005|gb|EDN25198.1| BC1G_05904 [Botryotinia fuckeliana B05.10]
  misc_feature (7)..(322): NCBI GI: 46103007 Blast Desc: FG00073.1 [Gibberella zeae PH-1]
  misc_feature (10)..(331): NCBI GI: 145234989 Blast Desc: An03g02480 [Aspergillus niger] gi|134057819|emb|CAK38214.1| protein product [Aspergillus niger]
  misc_feature (7)..(331): NCBI GI: 121703447 Blast Desc: conserved [Aspergillus clavatus NRRL 1] gi|119398131|gb|EAW08562.1| conserved [Aspergillus clavatus NRRL 1]
  misc_feature (7)..(338): NCBI GI: 46138187 Blast Desc: FG10608.1 [Gibberella zeae PH-1]
  misc_feature (7)..(331): NCBI GI: 256725472 Blast Desc: NECHADRAFT_83140 [Nectria haematococca mpVI 77-13-4]
  misc_feature (7)..(338): NCBI GI: 242768610 Blast Desc: short-chain dehydrogenase, [Talaromyces stipitatus ATCC 10500] gi|218724800|gb|EED24217.1| short-chain dehydrogenase, [Talaromyces stipitatus ATCC 10500]
  misc_feature (7)..(331): NCBI GI: 119497485 Blast Desc: NFIA_023150 [Neosartorya fischeri NRRL 181] gi|119413663|gb|EAW23604.1| conserved [Neosartorya fischeri NRRL 181]
  misc_feature (22)..(326): NCBI GI: 238505799 Blast Desc: short-chain dehydrogenase/reductase family protein, [Aspergillus flavus NRRL3357] gi|220690218|gb|EED46568.1| short-chain dehydrogenase/reductase family protein, [Aspergillus
MSISNTLSLIWTQTTFKPHPLPEHVNLVGQTAIVTGSNVGLGLEAAQELALHNVSLLILAVRDISKGETAKDAILKNPKVTKTSIEVWPLDQDSYESMTTFGERAAALPRLDMVLLNAGLKFKERRESKTGHEAQVAVNHLGTALLSLLLLPSLRRTTQGVRKREGLGPSRLTFTSSSVAFWVPGAEVQKPQLLKWLDDPASFPEAEGSNPKRYCLSKLLSVFWIRELSSLVRKDDVVMNYLNPGYCMSEFHRSDLDRSHGSSSSRVAWSAAQGGYQLADALVLHPDSHGCYLSEMKIRPEGKFVVSPAGKTVQKQLWKETVAVLREECPGAYLDEFSRE

SEQ ID NO: 2800 - DNA, 1404 bp, Muscodor strobelii
  misc_feature: SGI EST ID NO. CUFF.6987.0
  misc_feature: Variant of the nucleotide sequence at SEQ ID NO 2798
cagaggatgtcgggcatcatgtctacccggcgcggcttttgcgggttttgaaatggggcaagacagtaaggggtatctattcacgacagctctggcttgacactgcaactcttcccatcattatgacaagtggctgtataaataagggacttgatcatctcaaaggcttgattttcgatatgttatctcatatttgtgctcattatatctcctccccttctcgctttgaacatacaatcgaaccaacctagaacttagtcaacagcccagcatgtccatttcaaacacactctcattgatatggacacaaaccactttcaaaccccatcctctgcctgaacatgtcaatctcgttggtcaaacggcaatagtcactggttccaatgttggtcttggcctcgaagccgcgcaggaactcgcccttcacaacgtctcactattgatcctcgcagtacgtgatatatcaaagggcgagaccgccaaagatgctatcctcaagaacccgaaggttacgaaaacatccattgaagtctggccactagatcaggattcgtatgaaagcatgactaccttcggggagcgtgctgctgccctcccacgtctcgacatggtgttactgaatgccggcctcaagttcaaggagcgtcgggagtcgaagacaggacacgaggcgcaggtcgctgtgaatcatttaggcacagctctactgtccctgctgctcctaccttccttgcgtcgtactacacagggtgtgcggaagcgagagggtctaggtccaagtcgactgacttttacatcctccagcgttgcgttttgggttccgggagccgaggtacaaaaacctcaactgctcaagtggctcgacgatcctgcgtcattcccggaagctgaggggagcaatcccaagcgatattgcttatcgaaactacttagcgtattctggatacgcgagctctcttctcttgttcgcaaggacgacgttgtgatgaactatctcaatcccggatattgcatgagcgagtttcatcgctccgatctggacagaagccatggcagctcgtcgagtcgggttgcatggtccgcggcacagggcggctatcagcttgctgatgcgctcgtattgcaccccgacagtcatggatgctatctgagtgagatgaaaatccgccctgaagggaaattcgtggtttcgccagcgggcaagactgtacagaaacaattatggaaggagacagtggctgttctccgggaagaatgtcctggtgcttatcttgacgaattcagccgcgagtaacctgaaatcgcatgtcacctatttatcatgtagcatcgtagactatgctttctatgccatactttgtactatgaatgctgtttgacagtctcatataatattgatctttt

SEQ ID NO: 2801 - DNA, 741 bp, Muscodor strobelii
  misc_feature: SGI cDNA ID NO. 560577
  misc_feature: Elevated expression when VOC is produced
  misc_feature: Encodes the peptide sequence at SEQ ID NO 2802
atggtgtcgattaccaaaaacctagggctgcaggtcagcccgcaccatcttgcaatcgtgttcctcttcagcactgcctgccttctcacattgacaactttccctacgtccacattttcctatcttatcagaaccaactatcgtgccgaagatgctggcaccatttcgacaacgtggttggggaacgttggctactgtgtagctacagcttctatcgataacaaaggggccgttgcaaaagagcaagcgagatgctctaggttaagcatagggattgacacagatgcccttatcaaagagcaaacactgccagagtggctcgttggcaccggcaggtcgtcagtcgtagcatcaggcatgacaagatcgcctgccatcatgaatcctttggcaatcattttctgcctcatcagcatctttgcctaccgagcgatcccacgccggccaactggcgcgatgtacgtcgctgccatgggagctagtctcacagctctcttaatattgatcttgtcgtctacgggcgagctcctgttcgcggcatatctcaacgactttggtaattacggcaagacgggaaacagcgaattttcgaccaccctgggaccggcgggtcatgccatcatgctagctgctttttctcaagttgctgcatgcgtggttggattctatacatgcatcggaggaaaatatgagcgcgacggttgggttcgctttgaagaagagaaaacgatggatgtctga

SEQ ID NO: 2802 - protein, 246 aa, Muscodor strobelii
  misc_feature: SGI Peptide ID NO. 560577
  misc_feature: Useful for introducing or modulating the production of volatile compounds
MVSITKNLGLQVSPHHLAIVFLFSTACLLTLTTFPTSTFSYLIRTNYRAEDAGTISTTWLGNVGYCVATASIDNKGAVAKEQARCSRLSIGIDTDALIKEQTLPEWLVGTGRSSVVASGMTRSPAIMNPLAIIFCLISIFAYRAIPRRPTGAMYVAAMGASLTALLILILSSTGELLFAAYLNDFGNYGKTGNSEFSTTLGPAGHAIMLAAFSQVAACVVGFYTCIGGKYERDGWVRFEEEKTMDV

SEQ ID NO: 2803 - DNA, 1637 bp, Muscodor strobelii
  misc_feature: SGI EST ID NO. CUFF.6993.0
  misc_feature: Variant of the nucleotide sequence at SEQ ID NO 2801
caccgatacgcgacgaggaaagagcccgaaggcagcgtgaaatctgcagtcaaatttttcgcgtcacaattccgcacccgatctctgcacgattccgtcgtttgcttacgtataccatgttgtgccatgctgtgcccacgccgtgcagctatgaggatgtaggaacaccgagctgatgaactgagagctgtcgtctccgcgaggtgagcgaatgacaaagctctccagatgccctgcatccgagatgtttcatcatgttgctgtatggtcgatcagcattcgactagctagaaccagtcaaaggccatggtccgtgtactacaaattggtgattccatgacttctaacccatgctgagcccaagaccagagctcgaaccaggaccggggccggggcggacgtggacccgggttggcggaacagtgccggactactcattcagattggtcgtaagttgcagtgatgcaaggaggtccaagcaagggtggttcaactctgcactcaagtagggcctcactcaacatgcaacgcgagttaaccttcggtagatactcttctcgttttccttctgtttcctccaaatcctttgcccttaatactcatatttccttcaggctgtcctttatctcgccagaatctctggacatcaaaatcgtaactgacacataacctgagcactccatcttagtactgctacttcagaatggtgtcgattaccaaaaacctagggctgcaggtcagcccgcaccatcttgcaatcgtgttcctcttcagcactgcctgccttctcacattgacaactttccctacgtccacattttcctatcttatcagaaccaactatcgtgccgaagatgctggcaccatttcgacaacgtggttggggaacgttggctactgtgtagctacagcttctatcgataacaaaggggccgttgcaaaagagcaagcgagatgctctaggttaagcatagggattgacacagatgcccttatcaaagagcaaacactgccagagtggctcgttggcaccggcaggtcgtcagtcgtagcatcaggcatgacaagatcgcctgccatcatgaatcctttggcaatcattttctgcctcatcagcatctttgcctaccgagcgatcccacgccggccaactggcgcgatgtacgtcgctgccatgggagctagtctcacagctctcttaatattgatcttgtcgtctacgggcgagctcctgttcgcggcatatctcaacgactttggtaattacggcaagacgggaaacagcgaattttcgaccaccctgggaccggcgggtcatgccatcatgctagctgctttttctcaagttgctgcatgcgtggttggattctatacatgcatcggaggaaaatatgagcgcgacggttgggttcgctttgaagaagagaaaacgatggatgtctgagtacgcttgctggccaagctctaaaaacagattaatgtatataccttagattctaaaccgccgacggacttgaccacttaccaacgctaattcccatctgccgtgtcttgtgcgtacccaatgcaacacacgaaacaacctgatcaatcctcgatccgtccgaaagagtttaagtctggcatcgtcagaggcg

SEQ ID NO: 2804 - DNA, 687 bp, Muscodor strobelii
  misc_feature: SGI cDNA ID NO. 560578
  misc_feature: Encodes the peptide sequence at SEQ ID NO 2805
atgaagtggacgtggtcagcagcgggccttctcggctcttctctagttgccgcccagtcggacacggcggcttttacggatgcggaaacggggatcgtattccagtccattacaactgaaccaggcatcgactatcgccttgcactaccagcaaacgcgagtgctacggcgccgtacgatgtcattctacagattgtagctccgattaccatcggctgggcgggttgggcctggggcggcgccatgacatataatccgctgacggtcatctgggcgaatgggaatcaggtcacgcactcttctcgacaagccttgggttactacacaccggccatgtacgaagatgccaaatacacagtcttgaaaggaacgggcgtcaacgcaacacacttcaagttcacggcgctgtgcacgggctgcgcgagctggaccgacttcaacggcgacgtaacgacgctcgacggagcgggccaggcgaacttcgcgtttgcgtactcgtctacgccgcccgatgacctcgcgagccccgactcgaacttcggtattcatgactctgttggccactggacacacgatatggccggggcgcggtcggacaagttcagcgcttgggtcgcgtcgaattctgcgaagaagaggacctttagccggagatttcatgccgagaagtctttccgatatctatag

SEQ ID NO: 2805 - protein, 228 aa, Muscodor strobelii
  misc_feature: SGI Peptide ID NO. 560578
  misc_feature (8)..(207): NCBI GI: 116201697 Blast Desc: CHGG_08733 [Chaetomium globosum CBS 148.51] gi|88177251|gb|EAQ84719.1| CHGG_08733 [Chaetomium globosum CBS 148.51]
  misc_feature (19)..(205): NCBI GI: 85098013 Blast Desc: NCU05595 [Neurospora crassa OR74A] gi|28922050|gb|EAA31321.1| [Neurospora crassa OR74A]
  misc_feature (17)..(188): NCBI GI: 171678064 Blast Desc: protein product [Podospora anserina] gi|170937101|emb|CAP61759.1| protein product [Podospora anserina]
  misc_feature (17)..(208): NCBI GI: 39975559 Blast Desc: MGG_00074 [Magnaporthe grisea 70-15] gi|145019091|gb|EDK03370.1| MGG_00074 [Magnaporthe grisea 70-15]
  misc_feature (13)..(192): NCBI GI: 169595930 Blast Desc: SNOG_00712 [Phaeosphaeria nodorum SN15] gi|111071087|gb|EAT92207.1| SNOG_00712 [Phaeosphaeria nodorum SN15]
  misc_feature (6)..(208): NCBI GI: 189203559 Blast Desc: conserved [Pyrenophora tritici-repentis Pt-1C-BFP] gi|187985214|gb|EDU50702.1| conserved [Pyrenophora tritici-repentis Pt-1C-BFP]
  misc_feature (20)..(205): NCBI GI: 85118770 Blast Desc: NCU01873 [Neurospora crassa OR74A] gi|28927314|gb|EAA36268.1| [Neurospora crassa OR74A]
  misc_feature (27)..(205): NCBI GI: 38636436 Blast Desc: related to cellobiose dehydrogenase [Neurospora crassa]
  misc_feature (9)..(205): NCBI GI: 171683013 Blast Desc: protein product [Podospora anserina] gi|170941466|emb|CAP67117.1| protein product [Podospora anserina]
  misc_feature (22)..(205): NCBI GI: 85110321 Blast Desc: NCU08432 [Neurospora crassa OR74A] gi|28881259|emb|CAD70518.1| related to cellobiose dehydrogenase (cdh) [Neurospora crassa] gi|28925081|gb|EAA34166.1| [Neurospora
  misc_feature (25)..(211): SWISSPROT Homolog: EC 1.1.99.18 Cellobiose dehydrogenase (acceptor)
MKWTWSAAGLLGSSLVAAQSDTAAFTDAETGIVFQSITTEPGIDYRLALPANASATAPYDVILQIVAPITIGWAGWAWGGAMTYNPLTVIWANGNQVTHSSRQALGYYTPAMYEDAKYTVLKGTGVNATHFKFTALCTGCASWTDFNGDVTTLDGAGQANFAFAYSSTPPDDLASPDSNFGIHDSVGHWTHDMAGARSDKFSAWVASNSAKKRTFSRRFHAEKSFRYL

SEQ ID NO: 2806 - DNA, 852 bp, Muscodor strobelii
  misc_feature: SGI EST ID NO. CUFF.6999.0
  misc_feature: Variant of the nucleotide sequence at SEQ ID NO 2804
cgtggtcagcagcgggccttctcggctcttctctagttgccgcccagtcggacacggcggcttttacggatgcggaaacggggatcgtattccagtccattacaactgaaccaggcatcgactatcgccttgcactaccagcaaacgcgagtgctacggcgccgtacgatgtcattctacagattgtagctccgattaccatcggctgggcgggttgggcctggggcggcgccatgacatataatccgctgacggtcatctgggcgaatgggaatcaggtcacgcactcttctcgacaagccttgggttactacacaccggccatgtacgaagatgccaaatacacagtcttgaaaggaacgggcgtcaacgcaacacacttcaagttcacggcgctgtgcacgggctgcgcgagctggaccgacttcaacggcgacgtaacgacgctcgacggagcgggccaggcgaacttcgcgtttgcgtactcgtctacgccgcccgatgacctcgcgagccccgactcgaacttcggtattcatgactctgttggccactggacacacgatatggccggggcgcggtcggacaagttcagcgcttgggtcgcgtcgaattctgcgaagaagaggacctttagccggagatttcatgccgagaagtctttccgatatctataggtttggcctgagatgattgatacggagatgaaatgtaatgagtagatgttgatacaagacaacgacaaaatcaatgcttagaagtggatgtatagattaatttttgaacacttacactgtcgattccgaaatcattcaaccgctcgtagcctagagaagacatgtagctatcgat

SEQ ID NO: 2807 - DNA, 723 bp, Muscodor strobelii
  misc_feature: SGI cDNA ID NO. 560579
  misc_feature: Encodes the peptide sequence at SEQ ID NO 2808
atgatttcatcaacccagactggaagcctccggcttctctccctaatcgctcttcattacctatgtggcatcgtgaatgcacagtactacgacgtggacgagggcaacaccaagacacaaggcgtcgctgctgccacgatgaatggggccacgcagcatgatcgaaacgaagttctcgtacagaacaacgagtgggtcttcgacttcttcagtcagcctatttatcacacctacaagcaaggcgccatcatcaacgccaatggcacaacgttcaaggccacgttgggtaacggcttgtccatgtcatgggtggtactgggagcgtgtatgatgcagccgccacattaccacccgcgagccgccaactacatcgcggtcgtgaatggcagcatacaaacctggatgatcacggagaacaacgagccggtcgtgaccaccgtcctccaaaggggacaaatgacgatattccccacgggcagtgtgcacgccatgcagaatctggggtgcgagaacgcaacaatcatcacggcgctaagctcggaaaccccaggcacgcagacgctggtcactgcattgtccaacttgccgccggagctggtgagcgcggcttttggagacgggagcagttcgcagatgaacgggacggttccggctctggccggcggggtgattcccggcgacgtgggatgtttcagagcgtgtaacttggagatgcctcgatag

SEQ ID NO: 2808 - protein, 240 aa, Muscodor strobelii
  misc_feature: SGI Peptide ID NO. 560579
  misc_feature (67)..(212): Pfam Id: PF00190 Pfam Desc: Cupin
  misc_feature (81)..(212): Pfam Id: PF00190 Pfam Desc: Cupin
  misc_feature (51)..(235): NCBI GI: 261361124 Blast Desc: spherulin-1A [Verticillium albo-atrum VaMs.102]
  misc_feature (49)..(238): NCBI GI: 154298989 Blast Desc: [Botryotinia fuckeliana B05.10] gi|150857510|gb|EDN32702.1| [Botryotinia fuckeliana B05.10]
  misc_feature (49)..(237): NCBI GI: 169625162 Blast Desc: SNOG_15850 [Phaeosphaeria nodorum SN15] gi|160705611|gb|EAT76688.2| SNOG_15850 [Phaeosphaeria nodorum SN15]
  misc_feature (15)..(237): NCBI GI: 189192016 Blast Desc: conserved [Pyrenophora tritici-repentis Pt-1C-BFP] gi|187973953|gb|EDU41452.1| conserved [Pyrenophora tritici-repentis Pt-1C-BFP]
  misc_feature (47)..(237): NCBI GI: 261354582 Blast Desc: spherulin-1A [Verticillium albo-atrum VaMs.102]
  misc_feature (49)..(206): NCBI GI: 156058069 Blast Desc: [Sclerotinia sclerotiorum 1980] gi|154702551|gb|EDO02290.1| [Sclerotinia sclerotiorum 1980]
  misc_feature (44)..(201): NCBI GI: 134860 Blast Desc: SR1B_PHYPO RecName: Full=Spherulin-1B; Flags: Precursor gi|161256|gb|AAA29979.1| spherulin 1b precursor [Physarum polycephalum] gi|225883|prf||1402254A spherulin 1a
  misc_feature (54)..(237): NCBI GI: 171689868 Blast Desc: protein product [Podospora anserina] gi|170944896|emb|CAP71007.1| protein product [Podospora anserina]
  misc_feature (42)..(200): NCBI GI: 134858 Blast Desc: SR1A_PHYPO RecName: Full=Spherulin-1A; Flags: Precursor gi|161262|gb|AAA29982.1| spherulin 1a precursor [Physarum polycephalum]
  misc_feature (42)..(200): NCBI GI: 225884 Blast Desc: SR1A_PHYPO RecName: Full=Spherulin-1A; Flags: Precursor gi|161262|gb|AAA29982.1| spherulin 1a precursor [Physarum polycephalum]
MISSTQTGSLRLLSLIALHYLCGIVNAQYYDVDEGNTKTQGVAAATMNGATQHDRNEVLVQNNEWVFDFFSQPIYHTYKQGAIINANGTTFKATLGNGLSMSWVVLGACMMQPPHYHPRAANYIAVVNGSIQTWMITENNEPVVTTVLQRGQMTIFPTGSVHAMQNLGCENATIITALSSETPGTQTLVTALSNLPPELVSAAFGDGSSSQMNGTVPALAGGVIPGDVGCFRACNLEMPR

SEQ ID NO: 2809 - DNA, 1341 bp, Muscodor strobelii
  misc_feature: SGI cDNA ID NO. 560580
  misc_feature: Encodes the peptide sequence at SEQ ID NO 2810
atggcgccttcgcgaaagtctaaggtgcacgtgccgccgccgccgtcgaggactctggtggtggacaacggggcgcacacgatcaaggcgggcttcgtcgcgggcgatgccgtcgacacgccgcgcatcatccccaactgcatcgtccgcgaccgcgaccgcaaggtctacgtcgggtccgagctgcatcagtgcgtcgacttcagcgaggcagcgttccggcgccccgtggagaagggcttcgtcgtcagctgggaggcgcagaaggagatctgggagcgcgagttcctcgacgacaacgcgccccagcactgcgaccccgccgacacgcgcctgctgctggccgagccgtgcaactcgctgcccatcctgcaggccaactgcgaccagatggtgtttgaggagtttggctttgccagctactgccgcgcacaggcaccctctctgaatgcctaccacgacatccaggccgtgttccagacgccccgagaccccgacaagcccccccgactccccgccgagctcgtgctcctcgtcgacagcggccactcccacaccaccgtcaccccgctgctgcacggcaagcccctgcaccccgccgtgcgaagactcgacgtcggcggcaagttcctgaccaactacctcgcccgcctgctctcgctgcgccactacgacatgcgcaacgagacgcacatcgtcaccgagatgaaggaggccgcctgctacgtctcccgagacttccacgccgacctcgaccgctcctggaagggcacccgcggcgagcggcgcgactcctacctcgccggcggcggcgtcgccaaggactacgtgctgcccgacttccacgccaggtcccacggcatcgtccgagacttcgatcccacccaatcctcccgagccagaaagctcgctgctgctgccgagtccagcgaggatgtcttgaccctccgcaacgagcgcttcaccgtccccgagctgctcttcaaccccacagacatcggcatgaaccagcccgggctcgcagatctggtcttacagtctgtgcaggctttgcccattggcttgtggccaggtttactcgccaacattctcgtggtgggcggcaactcgctctttgacggcttcgtcgagcgtctacaactagagatccgcaagctgttccccgacgactgcgtggtccgcgtcgcacgaccacaagaccccattaccagcacgtggcatggtggtgccaacctcgcaaaacatccacacatcgatctactcgcaatcacgaagcaagagtatgaggagaacggcagtgcttttgtcgccaagaggtttgcactcggcatcgagacatga

SEQ ID NO: 2810 - protein, 446 aa, Muscodor strobelii
  misc_feature: SGI Peptide ID NO. 560580
  misc_feature (13)..(441): Pfam Id: PF00022 Pfam Desc: Actin
  misc_feature (1)..(444): NCBI GI: 116201729 Blast Desc: conserved [Chaetomium globosum CBS 148.51] gi|88177267|gb|EAQ84735.1| conserved [Chaetomium globosum CBS 148.51]
  misc_feature (1)..(444): NCBI GI: 171678080 Blast Desc: protein product [Podospora anserina] gi|170937109|emb|CAP61767.1| protein product [Podospora anserina]
  misc_feature (1)..(440): NCBI GI: 261361123 Blast Desc: actin [Verticillium albo-atrum VaMs.102]
  misc_feature (1)..(444): NCBI GI: 39941352 Blast Desc: MGG_05587 [Magnaporthe grisea 70-15] gi|145022258|gb|EDK06278.1| MGG_05587 [Magnaporthe grisea 70-15]
  misc_feature (4)..(444): NCBI GI: 85097980 Blast Desc: NCU05587 [Neurospora crassa OR74A] gi|74616231|sp|Q7S6X6.1|ARP6_NEUCR RecName: Full=Actin-like protein arp-6 gi|28922042|gb|EAA31313.1| NCU05587 [Neurospora
  misc_feature (1)..(446): NCBI GI: 256722454 Blast Desc: NECHADRAFT_34971 [Nectria haematococca mpVI 77-13-4]
  misc_feature (1)..(441): NCBI GI: 156058071 Blast Desc: SS1G_04767 [Sclerotinia sclerotiorum 1980] gi|154702552|gb|EDO02291.1| SS1G_04767 [Sclerotinia sclerotiorum 1980]
  misc_feature (1)..(361): NCBI GI: 154298991 Blast Desc: BC1G_11808 [Botryotinia fuckeliana B05.10] gi|150857511|gb|EDN32703.1| BC1G_11808 [Botryotinia fuckeliana B05.10]
  misc_feature (11)..(441): NCBI GI: 212535864 Blast Desc: actin family protein [Penicillium marneffei ATCC 18224] gi|210070487|gb|EEA24577.1| actin family protein [Penicillium marneffei ATCC 18224]
  misc_feature (3)..(441): NCBI GI: 239608441 Blast Desc: actin-like protein arp6 [Ajellomyces dermatitidis ER-3]
  misc_feature (19)..(322): SWISSPROT Homolog: EC 2.7.10.2 Non-specific protein-tyrosine kinase
MAPSRKSKVHVPPPPSRTLVVDNGAHTIKAGFVAGDAVDTPRIIPNCIVRDRDRKVYVGSELHQCVDFSEAAFRRPVEKGFVVSWEAQKEIWEREFLDDNAPQHCDPADTRLLLAEPCNSLPILQANCDQMVFEEFGFASYCRAQAPSLNAYHDIQAVFQTPRDPDKPPRLPAELVLLVDSGHSHTTVTPLLHGKPLHPAVRRLDVGGKFLTNYLARLLSLRHYDMRNETHIVTEMKEAACYVSRDFHADLDRSWKGTRGERRDSYLAGGGVAKDYVLPDFHARSHGIVRDFDPTQSSRARKLAAAAESSEDVLTLRNERFTVPELLFNPTDIGMNQPGLADLVLQSVQALPIGLWPGLLANILVVGGNSLFDGFVERLQLEIRKLFPDDCVVRVARPQDPITSTWHGGANLAKHPHIDLLAITKQEYEENGSAFVAKRFALGIET

SEQ ID NO: 2811 - DNA, 2634 bp, Muscodor strobelii
  misc_feature: SGI EST ID NO. CUFF.7003.0
  misc_feature: Variant of the nucleotide sequence at SEQ ID NO 2809
ttgacatgctgccacccaaaaaaaagtatcgtccgacagcgcagtgaagcgcacagctcaaatacagagaggcacgtacgccctcgtccctgcatcccggatctgatcctctgcgatggcgccttcgcgaaagtctaaggtgcacgtgccgccgccgccgtcgaggactctggtggtggacaacggggcgcacacgatcaaggcgggcttcgtcgcgggcgatgccgtcgacacgccgcgcatcatccccaactgcatcgtccgcgaccgcgaccgcaaggtctacgtcgggtccgagctgcatcagtgcgtcgacttcagcgaggcagcgttccggcgccccgtggagaagggcttcgtcgtcagctgggaggcgcagaaggagatctgggagcgcgagttcctcgacgacaacgcgccccagcactgcgaccccgccgacacgcgcctgctgctggccgagccgtgcaactcgctgcccatcctgcaggccaactgcgaccagatggtgtttgaggagtttggctttgccagctactgccgcgcacaggcaccctctctgaatgcctaccacgacatccaggccgtgttccagacgccccgagaccccgacaagcccccccgactccccgccgagctcgtgctcctcgtcgacagcggccactcccacaccaccgtcaccccgctgctgcacggcaagcccctgcaccccgccgtgcgaagactcgacgtcggcggcaagttcctgaccaactacctcgcccgcctgctctcgctgcgccactacgacatgcgcaacgagacgcacatcgtcaccgagatgaaggaggccgcctgctacgtctcccgagacttccacgccgacctcgaccgctcctggaagggcacccgcggcgagcggcgcgactcctacctcgccggcggcggcgtcgccaaggactacgtgctgcccgacttccacgccaggtcccacggcatcgtccgagacttcgatcccacccaatcctcccgagccagaaagctcgctgctgctgccgagtccagcgaggatgtcttgaccctccgcaacgagcgcttcaccgtccccgagctgctcttcaaccccacagacatcggcatgaaccagcccgggctcgcagatctggtcttacagtctgtgcaggctttgcccattggcttgtggccaggtttactcgccaacattctcgtggtgggcggcaactcgctctttgacggcttcgtcgagcgtctacaactagagatccgcaagctgttccccgacgactgcgtggtccgcgtcgcacgaccacaagaccccattaccagcacgtggcatggtggtgccaacctcgcaaaacatccacacatcgatctactcgcaatcacgaagcaagagtatgaggagaacggcagtgcttttgtcgccaagaggtttgcactcggcatcgagacatgaagtaccatcttgcagcctgaggtggaacagccagtcactgcgcacaagaaacatgacttccattctgctgattggcatgacagtacactttggcaaatacccaactctagacagcacgcattgcgcatcatcgccaatctccttctcttggttccccgttgggtcgctatcgaggcatctccaagttacacgctctgaaacatcccacgtcgccgggaatcaccccgccggccagagccggaaccgtcccgttcatctgcgaactgctcccgtctccaaaagccgcgctcaccagctccggcggcaagttggacaatgcagtgaccagcgtctgcgtgcctggggtttccgagcttagcgccgtgatgattgttgcgttctcgcaccctaagagaaagagagatccaatggtcagccagccagtctcgatatgtcgacatatgttgtcatctattctctgcgagagacatcacctacccagattctgcatggcgtgcacactgcccgtggggaatatcgtcatttgtcccctttggaggacggtggtcacgaccggctcgttgttctccgtgatcatccaggtttgtatgctgccattcacgaccgcgatgtagttggcggctcgcgggtggtaatgtggcggctgcatcatacacgctcccagtaccacccatgacatggacaagccgttacccaacgtggccttgaacgttgtgccattggcgttgatgatggcgccttgcttgtaggtgtgataaataggctgactgaagaagtcgaagacccactcgttgttctgtacgagaacttcgtttcgatcatgctgcgtggccccattcatcgtggcagcagcgacgccttgtgtcttggtgttgccctcgtccacgtcgtagtactgtgcattcacgatgccacataggtaatgaagagcgattagggagagaagccggaggcttccagtctgggttgatgaaatcatctcgctgccctgtgcgtgtgtggtaggaatcaatacaaatgatgaaaagggagtagatagggtatgttagaggagcagtatgtcaaggtatcttgaggcgataccattaccatctttatagatgcccaccctccttgtttttgaaaagctagtgcaacttggcgaacaaacagtcttcgtatatctattctacatccat

SEQ ID NO: 2812 - DNA, 1113 bp, Muscodor strobelii
  misc_feature: SGI cDNA ID NO. 560581
  misc_feature: Encodes the peptide sequence at SEQ ID NO 2813
atggcgccgtcagtgaccgaagtgatctctagtatcagtgatcgtatccaagtcagagaggcgaaattgaagcaagcgtacgatgctacaagccattcgtcttataaatacacccaatatcttccagtatatgatgaagaaacaaaattcccacccacagaaccgttcgacttcgtagaccgcggcctcgcagccgacaaagcgaaacctcatctactcaacgacccgaacatcaaggtcacaagactaacacctcgcgtcggcaccgagatcagcggcctacaactctcgcagcttaccaatgagcagaaagacgagttggcattgctgattgccgaaaggggcgttgtcgttttcaggggacaggacttcaaagacatcgggatcgagaagcagaaagagtttgggcgatactttgggcgtctgcatgtgcacccggtgggagcccatgtcgacggcgccatcgaattccacaacatttacctagggccggacaacctctaccgagcgcaattccaatccaactctttgacaacaacaagctatcactctgacgtatcttatgaacatcagccaccgggcatcacgcttctgacccttctctccgtgccggagacgggaggcgacacggcgtgggtgtcgcaggtagccgcttatgagcgtctctcagacccgatcaagaagctactcgaaggcttgcgtgcagagcacagtgggttcccgcaggcggaacatgcgagccgtgatgggaagtttgtgaggagagagccggtgaagagcgaccatcctattgttcgcgttcatccggctacgggcgaaaaggcactatatgtcaattcaggcttcaccaagcgcatcgtcgggttgaggagggaggagtcggatgcattgcttcagcttctgtttcagcatatcgcaaggagtcaggacgttcaagtacgtgtcaaatgggacgaccagacggtgtcgctgtgggataaccgggtgacggctcacacggccatctcggactatgatgtacgggaggaagctgagggcctgcgccacgggttccggatcacgacgcttgctgagcggcctgtgggcgtcgatggtcttgagtctgtgtggtag

SEQ ID NO: 2813 - protein, 370 aa, Muscodor strobelii
  misc_feature: SGI Peptide ID NO. 560581
  misc_feature (79)..(362): Pfam Id: PF02668 Pfam Desc: Taurine catabolism dioxygenase TauD, TfdA family
  misc_feature (25)..(370): NCBI GI: 67527662 Blast Desc: AN4108.2 [Aspergillus nidulans FGSC A4] gi|40740179|gb|EAA59369.1| AN4108.2 [Aspergillus nidulans FGSC A4] gi|259481301|tpe|CBF74691.1| TPA: conserved [Aspergillus FGSC
  misc_feature (22)..(370): NCBI GI: 171680986 Blast Desc: protein product [Podospora anserina] gi|170940451|emb|CAP65678.1| protein product [Podospora anserina]
  misc_feature (33)..(370): NCBI GI: 256721781 Blast Desc: NECHADRAFT_97607 [Nectria haematococca mpVI 77-13-4]
  misc_feature (1)..(361): NCBI GI: 169855207 Blast Desc: CC1G_12351 [Coprinopsis cinerea okayama7#130] gi|116504657|gb|EAU87552.1| CC1G_12351 [Coprinopsis cinerea okayama7#130]
  misc_feature (1)..(361): NCBI GI: 169856084 Blast Desc: CC1G_05841 [Coprinopsis cinerea okayama7#130] gi|116504257|gb|EAU87152.1| CC1G_05841 [Coprinopsis cinerea okayama7#130]
  misc_feature (1)..(362): NCBI GI: 169856094 Blast Desc: CC1G_05846 [Coprinopsis cinerea okayama7#130] gi|116504262|gb|EAU87157.1| CC1G_05846 [Coprinopsis cinerea okayama7#130]
  misc_feature (1)..(360): NCBI GI: 261360723 Blast Desc: alpha-ketoglutarate-dependent sulfonate dioxygenase [Verticillium albo-atrum VaMs.102]
  misc_feature (1)..(360): NCBI GI: 67523489 Blast Desc: AN2200.2 [Aspergillus nidulans FGSC A4] gi|40744701|gb|EAA63857.1| AN2200.2 [Aspergillus nidulans FGSC A4] gi|259487584|tpe|CBF86370.1| TPA: taurine dioxygenase FGSC
  misc_feature (1)..(362): NCBI GI: 169860364 Blast Desc: CC1G_04130 [Coprinopsis cinerea okayama7#130] gi|116502139|gb|EAU85034.1| CC1G_04130 [Coprinopsis cinerea okayama7#130]
  misc_feature (1)..(361): NCBI GI: 170103989 Blast Desc: [Laccaria bicolor S238N-H82] gi|164642090|gb|EDR06348.1| [Laccaria bicolor S238N-H82]
  misc_feature (78)..(338): SWISSPROT Homolog: EC 1.14.11.17 Taurine dioxygenase
MAPSVTEVISSISDRIQVREAKLKQAYDATSHSSYKYTQYLPVYDEETKFPPTEPFDFVDRGLAADKAKPHLLNDPNIKVTRLTPRVGTEISGLQLSQLTNEQKDELALLIAERGVVVFRGQDFKDIGIEKQKEFGRYFGRLHVHPVGAHVDGAIEFHNIYLGPDNLYRAQFQSNSLTTTSYHSDVSYEHQPPGITLLTLLSVPETGGDTAWVSQVAAYERLSDPIKKLLEGLRAEHSGFPQAEHASRDGKFVRREPVKSDHPIVRVHPATGEKALYVNSGFTKRIVGLRREESDALLQLLFQHIARSQDVQVRVKWDDQTVSLWDNRVTAHTAISDYDVREEAEGLRHGFRITTLAERPVGVDGLESVW

SEQ ID NO: 2814 - DNA, 2218 bp, Muscodor strobelii
  misc_feature: SGI EST ID NO. CUFF.7112.0
  misc_feature: Variant of the nucleotide sequence at SEQ ID NO 2812
gatttctccagctcacattccaaagccacctggccagagtcactgactaatttttgtgtagggtgctctatgcgacgcggccgccgatctcgagaaatgcactgaaccgaatgttacctcatgtaatgatcactatgtgtgcagaaacgtgccggtgttacattgatccattactttgcatcgacgaaactacaaatagggcagacgcattcgtttcatgatgctcagtatgaagcctctttcatcatgtcggcggagtatcatccgctccgattcgtcatttgagacagtgtcaccatgcagccttgcaaagattgaatcgagtaactttcaggagggtaagcgcatatcaataattctcctcgataatttcaaggtacaaattacgacacggcaagaagatgagcggaacgagaacagtggtctctacaatcgtttatgcatcggataccccattctcagctagtcccagaaattgaaatcactcttcacatctcctagagttctcctatcgcgccatcatgatacggcctcgtatcatcgtgtcctgctacctcggtattgtctcttgtctctgatgaacgcgatatacgccatattggtctggtagaaatggcatcatcgagggttgagatgagccatctgcggggttcgcatcgcccatcaccttccgtcttgcgtgatgtaacaacgtgcgatcaagactacaagaatgatacgaaagaataatataaaattagtatcgaactgaggatcatatttgaatctcgcatcttctcaacaagcaactgaatcgacctccacgaaatggcgccgtcagtgaccgaagtgatctctagtatcagtgatcgtatccaagtcagagaggcgaaattgaagcaagcgtacgatgctacaagccattcgtctgtgagttgtataatcaataactgtgcatagccaatgacatgagtacgagctcattcggctgaaatagtataaatacacccaatatcttccagtatatgatgaagaaacaaaattcccacccacagaaccgttcgacttcgtagaccgcggcctcgcagccgacaaagcgaaacctcatctactcaacgacccgaacatcaaggtcacaagactaacacctcgcgtcggcaccgagatcagcggcctacaactctcgcagcttaccaatgagcagaaagacgagttggcattgctgattgccgaaaggggcgttgtcgttttcaggggacaggacttcaaagacatcgggatcgagaagcagaaagagtttgggcgatactttgggcgtctgcatgtgcacccggtgggagcccatgtcgacggcgccatcgaattccacaacatttacctagggccggacaacctctaccgagcgcaattccaatccaactctttgacaacaacaagctatcactctgacgtatcttatgaacatcagccaccgggcatcacgcttctgacccttctctccgtgccggagacgggaggcgacacggcgtgggtgtcgcaggtagccgcttatgagcgtctctcagacccgatcaagaagctactcgaaggcttgcgtgcagagcacagtgggttcccgcaggcggaacatgcgagccgtgatgggaagtttgtgaggagagagccggtgaagagcgaccatcctattgttcgcgttcatccggctacgggcgaaaaggcactatatgtcaattcaggcttcaccaagcgcatcgtcgggttgaggagggaggagtcggatgcattgcttcagcttctgtttcagcatatcgcaaggagtcaggacgttcaagtacgtgtcaaatgggacgaccagacggtgtcgctgtgggataaccgggtgacggctcacacggccatctcggactatgatgtacgggaggaagctgagggcctgcgccacgggttccggatcacgacgcttgctgagcggcctgtgggcgtcgatggtcttgagtctgtgtggtagtgagagctagatgctggatgttcaccttgcttgttgggcgatgggcagtcatttcacttctatccgtgttttctatggtgtgttgtcgttggtaagacgcaactctgagcttgactgcaaggaagtagtactgtttagtaagaagctttccgtgtgatgaaattgagatctcagattgtaccctcattctggaaaccttgagttgcttaacgatggtttattgaactcaaa

SEQ ID NO: 2815 - DNA, 1479 bp, Muscodor strobelii
  misc_feature: SGI cDNA ID NO. 560582
  misc_feature: Encodes the peptide sequence at SEQ ID NO 2816
atggcacttagcgaccacgatcatcagcacacgcgcgaccactccgaatcatccgatccaaattcgagcttatttgacttgctgtcaaacactataatcctacatcaaactattccctacctcccgatctcgtctatcctcaccgtagccgcgacctctaaatctttccgcgagctacttcaaaataccccgggcgtgtataggcatttggatttgacgcgaatcaaatctgcccagttcgacattgatgctatcgatcacggcggggagatttggcgaaatgtgcaacttgacgaaaacctaacagaagatgacttttattccggcccgttgaggggagtcttgtcaagccttcggaggcgcaatgtactacaagatgtccgtactctaattctcgacggtctttccgtcacctctgaattctgtcacgagatcctcgtcgatccgtcgctacgcattcgcatcctctcacttcgcgaggtgaagaacctcaatgagcgaaagctcatgcaatcgcttcgtttcgcgtgtcgctcgactcgtccgaatgacatgcctcgcttgagaggattgtacatattcggaaaacgagatgttgctattgtgcccggaaaggcatctcaaggactgaacacgcaggtcgctgtgccatcgcggagcacaaacatcagtatcggctggaaccacaagtcccagcagaccttgaaagaaacgatagagagcgaaggcgaggactggtacagccgtaagggccgaatgataagcaagcacgttgccgacggttgggctgagacgctcttagactgtcgggagtcgctaaactttgatgctttgctatgtactgggcctcgtcaccagaattcgcctgcctttggcaaaatccctgttacaccagtcaatggaaccggtaacaatgcgtggggagtggctacatttgcgctcggtggatgtgcttcgtgtggcactgctcccgagggcttcacaacgtacggcaaatcacgtacggaggacctcccactcttatcacccgttcccttgcattcgtctagtatcaaagcaaccatctgtccggcgccggaaggcgcagggcatcagcagggattcgtgccacgatgtcttgagtgcattcgtgagaggtactgcttcagctgcaaccaatggtggtgcgaagcttgctaccaagtgccgagtcgtgaggagctggctgcgcagcacgtccaaatcgtcgaccagaccaacggattgatagaccacgaattggctgctccagaggcacccaaagtcaagcccaatagcccaaagataactcggagttgctgggaatgcgagcacaattgcctcgaatgtattgctgaaacgcagaagaggtgtcaggcttgtggtggtggttattgcattatccactacgaaggttccacggccaccttgtgcgattggtgctctatgcgacgcggccgccgatctcgagaaatgcactga

SEQ ID NO: 2816 - protein, 492 aa, Muscodor strobelii
  misc_feature: SGI Peptide ID NO. 560582
  misc_feature (7)..(487): NCBI GI: 46127505 Blast Desc: FG08130.1 [Gibberella zeae PH-1]
  misc_feature (21)..(492): NCBI GI: 145615426 Blast Desc: MGG_13121 [Magnaporthe grisea 70-15] gi|145022256|gb|EDK06276.1| MGG_13121 [Magnaporthe grisea 70-15]
  misc_feature (22)..(393): NCBI GI: 171678088 Blast Desc: protein product [Podospora anserina] gi|170937113|emb|CAP61771.1| protein product [Podospora anserina]
  misc_feature (70)..(472): NCBI GI: 116201737 Blast Desc: CHGG_08753 [Chaetomium globosum CBS 148.51] gi|88177271|gb|EAQ84739.1| CHGG_08753 [Chaetomium globosum CBS 148.51]
  misc_feature (14)..(441): NCBI GI: 261361125 Blast Desc: conserved [Verticillium albo-atrum VaMs.102]
  misc_feature (19)..(492): NCBI GI: 189204828 Blast Desc: conserved [Pyrenophora tritici-repentis Pt-1C-BFP] gi|187985848|gb|EDU51336.1| conserved [Pyrenophora tritici-repentis Pt-1C-BFP]
  misc_feature (22)..(492): NCBI GI: 259483705 Blast Desc: TPA: conserved [Aspergillus nidulans FGSC A4]
  misc_feature (22)..(492): NCBI GI: 212535934 Blast Desc: conserved [Penicillium marneffei ATCC 18224] gi|210070522|gb|EEA24612.1| conserved [Penicillium marneffei ATCC 18224]
  misc_feature (22)..(413): NCBI GI: 169610391 Blast Desc: SNOG_08296 [Phaeosphaeria nodorum SN15] gi|111063452|gb|EAT84572.1| SNOG_08296 [Phaeosphaeria nodorum SN15]
  misc_feature (22)..(487): NCBI GI: 240110158 Blast Desc: CPC735_061900 [Coccidioides posadasii C735 delta SOWgp]
MALSDHDHQHTRDHSESSDPNSSLFDLLSNTIILHQTIPYLPISSILTVAATSKSFRELLQNTPGVYRHLDLTRIKSAQFDIDAIDHGGEIWRNVQLDENLTEDDFYSGPLRGVLSSLRRRNVLQDVRTLILDGLSVTSEFCHEILVDPSLRIRILSLREVKNLNERKLMQSLRFACRSTRPNDMPRLRGLYIFGKRDVAIVPGKASQGLNTQVAVPSRSTNISIGWNHKSQQTLKETIESEGEDWYSRKGRMISKHVADGWAETLLDCRESLNFDALLCTGPRHQNSPAFGKIPVTPVNGTGNNAWGVATFALGGCASCGTAPEGFTTYGKSRTEDLPLLSPVPLHSSSIKATICPAPEGAGHQQGFVPRCLECIRERYCFSCNQWWCEACYQVPSREELAAQHVQIVDQTNGLIDHELAAPEAPKVKPNSPKITRSCWECEHNCLECIAETQKRCQACGGGYCIIHYEGSTATLCDWCSMRRGRRSREMH

SEQ ID NO: 2817 - DNA, 2321 bp, Muscodor strobelii
  misc_feature: SGI EST ID NO. CUFF.7132.0
  misc_feature: Variant of the nucleotide sequence at SEQ ID NO 2815
atttgtttcaaattgaccttgtatttttccctcctccttctattgacgggttctcgttttgattataccatgacatctcttctgattttatccgacctcatctcgagtctaattcgccaagcggtgaggaaaagcgacacgtagcaaagcaatacaaagtagtaagattccaagacgtgccaatgcaacgatcctaccgctttcacctgccaagcttgtctacgctgtacgacaaccgcttcccgccgccctccaatggcactcggaactgaccatccatcatcctgccccctccgcagaggacgcagatggaccagaggtggccgtttccaagccggcccagcacaaatagtcatcctacacgaaatcattataagcaataatatccccacaactgtctcctcttcgctgctgtggtagggatcctcgggaccctctttgcatagctctagaccccaacaggactggggtcctagccatcccagacttgtatccaaatcaacaagatccccaagcttcttgggcctctcgatatagatgtagtaggaggcgtcagccgcctgtcctattctcctcaggtacacagcaatatatcatctagcttttctctccctaagcaaatgtgctagtgcttgaaatcagtctcgccgctctctcttgatttcaatcaaggttgtatttgcctcacagagaggacgaaggacgaggacatctaaccagctacttcgccgtctttctatacgattcagcgcgcgccgggcgccactgacgtgtccctgaccacgacgcgatttcccgccccgtgccgtctcctttgttgctactactgtagtgaacatcacaaactactctattgtcgttttaccaattgttaagcaataggtttgcatgtaatggcacttagcgaccacgatcatcagcacacgcgcgaccactccgaatcatccgatccaaattcgagcttatttgacttgctgtcaaacactataatcctacatcaaactattccctacctcccgatctcgtctatcctcaccgtagccgcgacctctaaatctttccgcgagctacttcaaaataccccgggcgtgtataggcatttggatttgacgcgaatcaaatctgcccagttcgacattgatgctatcgatcacggcggggagatttggcgaaatgtgcaacttgacgaaaacctaacagaagatgacttttattccggcccgttgaggggagtcttgtcaagccttcggaggcgcaatgtactacaagatgtccgtactctaattctcgacggtctttccgtcacctctgaattctgtcacgagatcctcgtcgatccgtcgctacgcattcgcatcctctcacttcgcgaggtgaagaacctcaatgagcgaaagctcatgcaatcgcttcgtttcgcgtgtcgctcgactcgtccgaatgacatgcctcgcttgagaggattgtacatattcggaaaacgagatgttgctattgtgcccggaaaggcatctcaaggactgaacacgcaggtcgctgtgccatcgcggagcacaaacatcagtatcggctggaaccacaagtcccagcagaccttgaaagaaacgatagagagcgaaggcgaggactggtacagccgtaagggccgaatgataagcaagcacgttgccgacggttgggctgagacgctcttagactgtcgggagtcgctaaactttgatgctttgctatgtactgggcctcgtcaccagaattcgcctgcctttggcaaaatccctgttacaccagtcaatggaaccggtaacaatgcgtggggagtggctacatttgcgctcggtggatgtgcttcgtgtggcactgctcccgagggcttcacaacgtacggcaaatcacgtacggaggacctcccactcttatcacccgttcccttgcattcgtctagtatcaaagcaaccatctgtccggcgccggaaggcgcagggcatcagcagggattcgtgccacgatgtcttgagtgcattcgtgagaggtactgcttcagctgcaaccaatggtggtgcgaagcttgctaccaagtgccgagtcgtgaggagctggctgcgcagcacgtccaaatcgtcgaccagaccaacggattgatagaccacgaattggctgctccagaggcacccaaagtcaagcccaatagcccaaagataactcggagttgctgggaatgcgagcacaattgcctcgaatgtattgctgaaacgcagaagaggtgtcaggcttgtggtggtggttattgcattatccactacgaaggttccacggccaccttg

SEQ ID NO: 2818 - DNA, 2376 bp, Muscodor strobelii
  misc_feature: SGI cDNA ID NO. 560583
  misc_feature: Reduced expression when VOC is produced
  misc_feature: Encodes the peptide sequence at SEQ ID NO 2819
atggacgaaccggccacaatcaagtggtctaggaccttcgttgcagctggaccggcgaagtcagaccttccgggggacaagatcatcctcccacagtcggccctcgaacagctactcgccgcatctgcccagtcttcatcgacatcctaccatgctccctcgacattcacttcctacgacagccagaacccctacgcctcggctgacggccgccaagcccatgcctactacgcagactcaaaccagcagctgccacatccgctcatgtttcgtctcgtcaaccaggccaatggaaacatggtgtatgcaggcatccaggaattctcagccccgtacggcagggtcctcttcagttcctatctgatggacgccctcggcatcagccccgacgatctggccaatgaccccgccagcggctcctccagcgactctaagagtgtctctaaggaagacgcaatgagcgttgacaccaccgatgccgagaacggtagtgacagcagcagtggcagcgatgccagcttgccgtacgggcttcgcatcaccgtccatgcccaccagcttccgaaaggcacctatgttcggctgcggccccttgaggctgggtacgatcctgacgactggaaggctttgcttgagcgacagctgcgtgctagctacacgacattgaccaaaggctcattcctatcagtccgtggtgtcaagggtgaaacgttccgtttcctcatagacaagttcgaacccgagggcgatggcatttgcgttgtcgacactgacctcgtgaccgacatcgaggctctcaacgaggagcaggccagggaaacgatgaagcagatcatggccaaggcacagaaagcgccgggcacgaaagatggtagctcggttggacaagagattgatatttggaaacccattgacggtcaagtgctaccgggagactatgtcgactacgaactgccggcctgggcacggtcgcgtggtctcgagattgagttgagccaattggatgacgagtatggcgtcgacctatttgtcagcccgaagtcgacccgccagcgagcttcaccccgggatgacgaacatgtcttcaatgctttcaccttcgcggaaccaggagtcaaacgcatcacaatcgcgtcaagcaatgtcgagctagaggaagcggaggctttgctcatctctgttcacggatacacatctgagacgagttctgccgaaagagaccaacgcccacgctcatttcagctccgtgccagaagtgctcccgcttccaatggcgacgctgctctgttgaacacacagacggatggtgaggagcatggatctgacgaagagcaatgcaagaattgtcagcaatgggtacccaaacgaacaatggttctgcacgagaacttctgtcttcgcaacaacgtcacgtgcccgcaatgcaagactgtcttccaaaagtcatcagacgaatggaaacaacactggcattgcccccatgacactggatatggttcttcagagttggccagagtcaaacacgatagtgtataccacaacgagcgacagtgtccatcctgtccattcgtcaccaactcgatcccggatctggccaggcatcgaacctcgatatgtcccggcaagatcatactctgcaagttctgtcatcttgaagtccctcaggagggagacccgtttaacccaacagccgagagtatcctgtctggcctctcagaacacgagctggctgacggggcacgcacaactgattgccatttatgctcgaagatcattcgtctccgcgatatggatacacatctgaagcatcacgaacttgaaaaagcgcacagagccaagcctgaagtatgtcgcaacgccaactgtggtcgtactataaacggagttggaaagaacggtgctgtaggttctgggacgcagatggggcagggaccaggaaatgatcttggcctctgtgccatttgtttctcgccactttacgtcagtctacatgaccccgagggcaaagcattgaaacggcggatcgaacgcaagtatctctcgcagatgatgacagggtgcggcaagaaatggtgtaacaacgagtggtgcaagacgggacgggccaactcgcagctcgaagccaagggatcgacagtccaagtcgtgctgcccatgatcaagcccatgcttgataccttcaatgatgtccggacccccatgttcttttgcgtcgacgagaccaatcacaagaagagagtacttgccgaggtgctggcagcggagaaggtttgggatttggaatggtgcatcgcgggttgcgaggccgagggtgcccacatggaaaaggcacgagagtggctcatgaattgggctccaactcgtgaatcatcgtga

SEQ ID NO: 2819 - protein, 791 aa, Muscodor strobelii
  misc_feature: SGI Peptide ID NO. 560583
  misc_feature (6)..(788): NCBI GI: 156056841 Blast Desc: SS1G_04151 [Sclerotinia sclerotiorum 1980] gi|154701937|gb|EDO01676.1| SS1G_04151 [Sclerotinia sclerotiorum 1980]
  misc_feature (7)..(788): NCBI GI: 85097960 Blast Desc: NCU05582 [Neurospora crassa OR74A] gi|28922037|gb|EAA31308.1| conserved [Neurospora crassa OR74A]
  misc_feature (3)..(788): NCBI GI: 171678090 Blast Desc: protein product [Podospora anserina] gi|170937114|emb|CAP61772.1| protein product [Podospora anserina]
  misc_feature (2)..(788): NCBI GI: 261361126 Blast Desc: conserved [Verticillium albo-atrum VaMs.102]
  misc_feature (7)..(788): NCBI GI: 116201739 Blast Desc: CHGG_08754 [Chaetomium globosum CBS 148.51] gi|88177272|gb|EAQ84740.1| CHGG_08754 [Chaetomium globosum CBS 148.51]
  misc_feature (6)..(788): NCBI GI: 154301107 Blast Desc: BC1G_10526 [Botryotinia fuckeliana B05.10] gi|150856274|gb|EDN31466.1| BC1G_10526 [Botryotinia fuckeliana B05.10]
  misc_feature (1)..(788): NCBI GI: 46127503 Blast Desc: FG08129.1 [Gibberella zeae PH-1]
  misc_feature (3)..(788): NCBI GI: 189204830 Blast Desc: conserved [Pyrenophora tritici-repentis Pt-1C-BFP] gi|187985849|gb|EDU51337.1| conserved [Pyrenophora tritici-repentis Pt-1C-BFP]
  misc_feature (6)..(788): NCBI GI: 226283447 Blast Desc: conserved [Paracoccidioides brasiliensis Pb01]
  misc_feature (3)..(788): NCBI GI: 239609072 Blast Desc: ubiquitin fusion degradation protein [Ajellomyces dermatitidis ER-3]
  misc_feature: Useful for introducing or modulating the production of volatile compounds
MDEPATIKWSRTFVAAGPAKSDLPGDKIILPQSALEQLLAASAQSSSTSYHAPSTFTSYDSQNPYASADGRQAHAYYADSNQQLPHPLMFRLVNQANGNMVYAGIQEFSAPYGRVLFSSYLMDALGISPDDLANDPASGSSSDSKSVSKEDAMSVDTTDAENGSDSSSGSDASLPYGLRITVHAHQLPKGTYVRLRPLEAGYDPDDWKALLERQLRASYTTLTKGSFLSVRGVKGETFRFLIDKFEPEGDGICVVDTDLVTDIEALNEEQARETMKQIMAKAQKAPGTKDGSSVGQEIDIWKPIDGQVLPGDYVDYELPAWARSRGLEIELSQLDDEYGVDLFVSPKSTRQRASPRDDEHVFNAFTFAEPGVKRITIASSNVELEEAEALLISVHGYTSETSSAERDQRPRSFQLRARSAPASNGDAALLNTQTDGEEHGSDEEQCKNCQQWVPKRTMVLHENFCLRNNVTCPQCKTVFQKSSDEWKQHWHCPHDTGYGSSELARVKHDSVYHNERQCPSCPFVTNSIPDLARHRTSICPGKIILCKFCHLEVPQEGDPFNPTAESILSGLSEHELADGARTTDCHLCSKIIRLRDMDTHLKHHELEKAHRAKPEVCRNANCGRTINGVGKNGAVGSGTQMGQGPGNDLGLCAICFSPLYVSLHDPEGKALKRRIERKYLSQMMTGCGKKWCNNEWCKTGRANSQLEAKGSTVQVVLPMIKPMLDTFNDVRTPMFFCVDETNHKKRVLAEVLAAEKVWDLEWCIAGCEAEGAHMEKAREWLMNWAPTRESS

SEQ ID NO: 2820 - DNA, 597 bp, Muscodor strobelii
  misc_feature: SGI cDNA ID NO. 560584
  misc_feature: Encodes the peptide sequence at SEQ ID NO 2821
atgcctgttcacgcccggagcgacagcagtctggaacgtccggatctcgtcgtcgcgcagatggaaatcgataaagaggtcgtcgagactatgattgagacgtctggtcgagctggcatcgacttttgtctaaacgcggctcccgcgaatactatatcatcgcgactgtatcaatatgtaactcatctgatagtgaacgagagcgaagctgcgaaactctcgggacgtagagtggaagaagtgaatgagcattcatggtcagctattgcacgagagtttctcgatattggcgtccagaacttggtcatcacactcgggcatcggggcgcttactctgccaatgcgctgggacacggtcgatgctttgcctacgacgttaaggtggaagatactaccggtgcaggagacacgttcaccggagcatatgcttctgagtacctacgtcagaagtcaatgcaacaatgggacatcaagagcgcggtgattcgcgccgacaaagctgcagccatctcggttcaatcgtttggagctcagaaaggaattccgtgggccgacgagattgaagcttttggcgcctctccgaaacccgataggtaa

SEQ ID NO: 2821 - protein, 198 aa, Muscodor strobelii
  misc_feature: SGI Peptide ID NO. 560584
  misc_feature (54)..(184): Pfam Id: PF00294 Pfam Desc: pfkB family carbohydrate kinase
  misc_feature (52)..(192): NCBI GI: 171687705 Blast Desc: protein product [Podospora anserina] gi|170943814|emb|CAP69466.1| protein product [Podospora anserina]
  misc_feature (11)..(188): NCBI GI: 171688398 Blast Desc: protein product [Podospora anserina] gi|170944161|emb|CAP70271.1| protein product [Podospora anserina]
  misc_feature (13)..(188): NCBI GI: 256727462 Blast Desc: [Nectria haematococca mpVI 77-13-4]
  misc_feature (12)..(187): NCBI GI: 164429494 Blast Desc: NCU04339 [Neurospora crassa OR74A] gi|157073499|gb|EAA27084.2| conserved [Neurospora crassa OR74A]
  misc_feature (14)..(188): NCBI GI: 46139645 Blast Desc: FG11337.1 [Gibberella zeae PH-1]
  misc_feature (11)..(187): NCBI GI: 169615423 Blast Desc: SNOG_10869 [Phaeosphaeria nodorum SN15] gi|160702957|gb|EAT81368.2| SNOG_10869 [Phaeosphaeria nodorum SN15]
  misc_feature (13)..(188): NCBI GI: 156059554 Blast Desc: SS1G_03789 [Sclerotinia sclerotiorum 1980] gi|154701576|gb|EDO01315.1| SS1G_03789 [Sclerotinia sclerotiorum 1980]
  misc_feature (14)..(187): NCBI GI: 256721270 Blast Desc: NECHADRAFT_44621 [Nectria haematococca mpVI 77-13-4]
  misc_feature (4)..(190): NCBI GI: 261359878 Blast Desc: ribokinase [Verticillium albo-atrum VaMs.102]
  misc_feature (14)..(188): NCBI GI: 116196630 Blast Desc: CHGG_04913 [Chaetomium globosum CBS 148.51] gi|88180826|gb|EAQ88294.1| CHGG_04913 [Chaetomium globosum CBS 148.51]
  misc_feature (6)..(190): SWISSPROT Homolog: EC 2.7.1.15 Ribokinase
MPVHARSDSSLERPDLVVAQMEIDKEVVETMIETSGRAGIDFCLNAAPANTISSRLYQYVTHLIVNESEAAKLSGRRVEEVNEHSWSAIAREFLDIGVQNLVITLGHRGAYSANALGHGRCFAYDVKVEDTTGAGDTFTGAYASEYLRQKSMQQWDIKSAVIRADKAAAISVQSFGAQKGIPWADEIEAFGASPKPDR

SEQ ID NO: 2822 - DNA, 2346 bp, Muscodor strobelii
  misc_feature: SGI EST ID NO. CUFF.7017.0
  misc_feature: Variant of the nucleotide sequence at SEQ ID NO 2820
cttacttgccacggcattcatagctatgccgttgcacacacacgagatctcgacaacacactatgtgaatgacaaagagaatagcgtgcccttttcgttattttggaaaatgcagaactcaagcttaatcagatattcatattgcttggatagtcgcgtctgttgtccgcactccaggtccgtggtaagcgcgcggctcaatggggcgcgtgaaacgcaaacgatgttatgccgtacaacacttttgccgtctaacggtggaccaaactattgacactaacaacgtttatccgaacccctcgccatcaatctcgtgcccttcgtctgcactatactaccgtatgcagaatgtttcaaaggactatcagtattataggcgggctagatgccgaccttataatggtcacagaccaactacctagaccaggtgaatgtgttctggcaagccagtatttggaggccttagctggcaagggggtcaacacagccatcgcgacatacaggtcatgtcatagaaaccctcagaaactcgacagaaatttggacggccgcaccatgaaagaagcatcaccaatggaaccagaggaagaagacgtcagagtaaagatgataggcgccgttggtgatgatcaatacggaccgcgattcatcaccgagctgcaaagcaacggcatcgacgcaagtggtgtcatggcagtacccgacatgggatcaagtgtgtgcttcgtcatgattgatagccagacgcgagagaaccgatgcctgttcacgcccggagcgacagcagtctggaacgtccggatctcgtcgtcgcgcagatggaaatcgataaagaggtcgtcgagactatgattgagacgtctggtcgagctggcatcgacttttgtctaaacgcggctcccgcgaatactatatcatcgcgactgtatcaatatgtaactcatctgatagtgaacgagagcgaagctgcgaaactctcgggacgtagagtggaagaagtgaatgagcattcatggtcagctattgcacgagagtttctcgatattggcgtccagaacttggtcatcacactcgggcatcggggcgcttactctgccaatgcgctgggacacggtcgatgctttgcctacgacgttaaggtggaagatactaccggtgcaggagacacgttcaccggagcatatgcttctgagtacctacgtcagaagtcaatgcaacaatgggacatcaagagcgcggtgattcgcgccgacaaagctgcagccatctcggttcaatcgtttggagctcagaaaggaattccgtgggccgacgagattgaagcttttggcgcctctccgaaacccgataggtaacctgtggcttgcatgactcctttcctgtgttctgttcaacggagctacgccgtatcatttttgcggcgtgttgagatccgccaagccccgtcaagagatgacggtactcgatggaaagtacagctagagagatatgttagcgaggggagaggaattgagagtgcgattctgttgctcacgactttagagagcggttcttataagcccctgataataaatgtagacaaaaagatcctcaattagcccctcgcagtgacagggcggatcctgcacgaccaacgtggtcagtcagtaattcgatgacgaagaccacagcgttgccctcatttcccctagcgatgagatatgttagcttatatctcctcaattgcaactcgtttcgaaattgagcgacttgcgttcgattatgggaactagcaaatgaagtcagatggcaaggccacctgctgcgagctcgaaggtccggcctccgttgcgcttatgctgcaaggcggcggcagagttcgaaagagaaaaatactcggaaggacgccgcatcaaatccatccttcaattctggtctccatttcgttcatctggacagatcttccaagccttcaaacactagacctgatcaatcggtaaagtcgcgataccgaccgagctgaaatgcaatgctgatcctcggcagcaggctgcagattttgaggggggccgctctcactgcgtttatgatcacatagagtgaaaccaaaactcttggtcggatgaatcggtgaccctgcgtctgcatcctacaataccattgtcaaccaatgatatcaatagatagagtcgcattgcccctatcgtcgcactgcggcctaatccttcgaaggtaagctttcgagcgactaaaaggtagcatctcccatgcagtgtgcaacatcgcaatctcgttacgcttgttctttgtcgtcttatttttcatcagcgtgtctgacgatgttatctcgctcgttgttggtgatcc

SEQ ID NO: 2823 - DNA, 1563 bp, Muscodor strobelii
  misc_feature: SGI cDNA ID NO. 560585
  misc_feature: Elevated expression when VOC is produced
  misc_feature: Encodes the peptide sequence at SEQ ID NO 2824
atggtccgttccctaactctcgccactctcggcgccgtctcgccagccttggtggctgctgttgattatgtctcgcatcctgagagaacggatgccgtcaaggaggcttttcaaatctcgtgggatggctatatggactatgcgtttcccaatgacactctgattcccattgccaagacgtatcttaacgatcgcaatggatggggcgccagcgcagttgacgctctttccaccgccttgatcatggggaagaacgatattgtcaaggagatcgtcgatcacatcaagacgatcaactacaataagaccgttcccgatcagacctcagtgtcgctcttcgagactaccattcgctacctcggaggaatgctttcaggacatgatttccttaatggtccattcaaaggagttgtcagcgatgatgatgtcaaggctatcttggacaagtctgttgaactggccgaggctctcagcattgctttcgatacgccgagtggcgtaccgctgaacgacttaaccttcaatggccctgatggcccggtcgcttctggtgacacaaacggccttgccaccatcggcaccctggttctcgagtggactcacttgagtgatctcacgggcgacgacaagtacgccgagctcagtcagaagggagagtcttatcttctaaacgtcaaaaaccctgaagttggcgaaccataccccggtctggttggtaccaacgtctacgtcgacaatggaacgttcgccgacggcactggaggctggaatggcggtaccgattctttctacgagtatcttatcaagatgtatctttatgacccatcacgcttcggggaatacaaagatcgatggaccgccgctgtcgactccacgatcaaatacttgacttcgcacccgacaactcggcccgatctcactttcgttgcctactatactggggctggcaaggacaagttgagattcctctcatctcatttggcttgcttcaatggtggcaacatcatcctaggtggcttgaccttggacaagcaggaatacattgactacggtctagagctcgtgaacggctgtcacgatacctacgcgagcaccgagactggcatcggacctgagtccttcaagtggcaggataacagcattgccacgaacgtgtctaacaatggcgccgcgccaagcgaccaagccgctttctacaggaaatctggattctggattgacagctcctactatatccagcgacccgaggtcgtagagagctattactacgcctaccgcgctaccggtgacaccaagtaccaagattgggcgtgggatgcttttgtgaacatcaacaagaccactcgcgctggtgccggtttcgcaggtctcaccaatgtcaacgccccgaacggcggcagcttcgatgaccagcagcagactttctggtttgccgagttcctcaagtattcctacctcatccaggcccccgatgccgagtatcaggtcaacgccaaccatgacaaccaatgggtcttcaacaccgaggcgcatcctgtcaaggttgctggtactcccagctaa

SEQ ID NO: 2824 - protein, 520 aa, Muscodor strobelii
  misc_feature: SGI Peptide ID NO. 560585
  misc_feature (36)..(515): Pfam Id: PF01532 Pfam Desc: Glycosyl hydrolase family 47
  misc_feature (23)..(517): NCBI GI: 116202481 Blast Desc: CHGG_09125 [Chaetomium globosum CBS 148.51] gi|88177643|gb|EAQ85111.1| CHGG_09125 [Chaetomium globosum CBS 148.51]
  misc_feature (28)..(519): NCBI GI: 154324112 Blast Desc: BC1G_00455 [Botryotinia fuckeliana B05.10] gi|150842684|gb|EDN17877.1| BC1G_00455 [Botryotinia fuckeliana B05.10]
  misc_feature (28)..(519): NCBI GI: 156057473 Blast Desc: SS1G_04468 [Sclerotinia sclerotiorum 1980] gi|154702253|gb|EDO01992.1| SS1G_04468 [Sclerotinia sclerotiorum 1980]
  misc_feature (1)..(519): NCBI GI: 39973719 Blast Desc: MGG_00994 [Magnaporthe grisea 70-15] gi|145018049|gb|EDK02328.1| MGG_00994 [Magnaporthe grisea 70-15]
  misc_feature (28)..(516): NCBI GI: 85096844 Blast Desc: mannosyl-oligosaccharide alpha-1,2-mannosidase precursor [Neurospora crassa OR74A] gi|28921820|gb|EAA31096.1| mannosyl-oligosaccharide alpha-1,2-mannosidase precursor crassa
  misc_feature (28)..(517): NCBI GI: 171682148 Blast Desc: protein product [Podospora anserina] gi|170941033|emb|CAP66683.1| protein product [Podospora anserina]
  misc_feature (28)..(520): NCBI GI: 189188152 Blast Desc: mannosyl-oligosaccharide 1,2-alpha-mannosidase precursor [Pyrenophora tritici-repentis Pt-1C-BFP] gi|187972021|gb|EDU39520.1| mannosyl-oligosaccharide precursor
  misc_feature (4)..(516): NCBI GI: 169770371 Blast Desc: [Aspergillus oryzae RIB40] gi|22128342|dbj|BAC07247.1| 1,2-alpha-mannosidase [Aspergillus oryzae] gi|83767514|dbj|BAE57653.1| protein product [Aspergillus oryzae]
  misc_feature (4)..(515): NCBI GI: 115492233 Blast Desc: mannosyl-oligosaccharide alpha-1,2-mannosidase precursor [Aspergillus terreus NIH2624] gi|114197604|gb|EAU39304.1| mannosyl-oligosaccharide precursor
  misc_feature (10)..(518): NCBI GI: 2133260 Blast Desc: mannosyl-oligosaccharide alpha-1,2-mannosidase precursor [Aspergillus terreus NIH2624] gi|114197604|gb|EAU39304.1| mannosyl-oligosaccharide precursor
  misc_feature (25)..(516): SWISSPROT Homolog: EC 3.2.1.113 Mannosyl-oligosaccharide 1,2-alpha-mannosidase
  misc_feature: Useful for introducing or modulating the production of volatile compounds
MVRSLTLATLGAVSPALVAAVDYVSHPERTDAVKEAFQISWDGYMDYAFPNDTLIPIAKTYLNDRNGWGASAVDALSTALIMGKNDIVKEIVDHIKTINYNKTVPDQTSVSLFETTIRYLGGMLSGHDFLNGPFKGVVSDDDVKAILDKSVELAEALSIAFDTPSGVPLNDLTFNGPDGPVASGDTNGLATIGTLVLEWTHLSDLTGDDKYAELSQKGESYLLNVKNPEVGEPYPGLVGTNVYVDNGTFADGTGGWNGGTDSFYEYLIKMYLYDPSRFGEYKDRWTAAVDSTIKYLTSHPTTRPDLTFVAYYTGAGKDKLRFLSSHLACFNGGNIILGGLTLDKQEYIDYGLELVNGCHDTYASTETGIGPESFKWQDNSIATNVSNNGAAPSDQAAFYRKSGFWIDSSYYIQRPEVVESYYYAYRATGDTKYQDWAWDAFVNINKTTRAGAGFAGLTNVNAPNGGSFDDQQQTFWFAEFLKYSYLIQAPDAEYQVNANHDNQWVFNTEAHPVKVAGTPS

SEQ ID NO: 2825 - DNA, 11290 bp, Muscodor strobelii
  misc_feature: SGI EST ID NO. CUFF.7372.1
  misc_feature: Variant of the nucleotide sequence at SEQ ID NO 2823
gccgtctctcgaatgctttgacatagactgggctcttcatcttaatacagatcttgatcaagcagtatgagcagcggagtagcaagataaccgcaatctaaccttggttggaaggcaatgccgagccgccatcgtctattacgttgcatttaaaagactcatccggcgttcgtgtcctcacctgaagctcggtcagcaccttggtatttattttcttgctagcgattgagatgttgcagttcgaatttcgactgttgccgttgcaggtcagctgttgcagtcccgctctgccgaccgttcaatctcgccaatctcgccacaaaacatcgtcaaatatacatgagtaggcataaaagccacctgtagcaacttttaatatcattcatctctgcacaacgttccggatacttcgtgtatatcctttatgctattgatcgtctcgcttcaagttcaatacccgaatgcggagtgaatatctcctagattcctttcgcagaaccaactaattccgccactgcacccggacgtcttcactcaactagttgctctcatgctatcgtgaaaatagtggcgggcatgatgcgaatttggcattaacatgcgactagacggtatggctgggatggcgactagaccctggtggagccaagatcgtcatgctgcattagaggttaagaaaatcagattgtatgcagtgtcgcgacatagcttagatgcataagcggcgagagatattggttccacatggtggatggccagaagggaacggtttgaacgtcgagagaagacacgtcatggaatgagatcacagaggaaacagcagtcgtagaagatcttgtcggattagctgtttgatatcagtaagcccgggtgcaccaaatatctaggcaagatctcgacactccattgaccgacctgcattgggcacgtctaagtcgcgacgtcaactccagagaagtgtaaaacgacatccacagaacaacgatctgtgggtagtcttggagcgcgaccattcggccgtcagaactcagcaagatcttcatctctctcatccactgacacaacacaaagatcaaaatgaatatccaagcccggcatccttaccctggcggcctttgccccgttcttcgccatcgccggctacgagtagtgtttctgatgcgtgatagcatgcataaattccaactcacctcctggctcccacgactatgatacctggtgtggaaagtagcctggttcaccgtacaacttgaaccaggttcaatgccagtttgctggacctatatagccaacttctgtagcaacagcctgagacccaactactcttgctaagcgaaaggaatgcttgaggcgaggtcaatagtgagaagttgaattgatgctcgcgcatgtcgcttgattggactaccagcagtggagagagctaggcgagagctggaaacggagattgatatcgtacccgcatgcttaggacgggtcatgacgatgctcctaacatcgactcatctcccctttattagatcagaaaaacccctatagcaaagtacttgatgctcatatcgtgtctgttactcattctaacattctatacgcgtaagaatagcaacagtcgttcaagtcgacgatttgtcatgggagagaaagcggaatgagctgtgttcgatttgaagaactaagtacaacagctaaatccgatgtcagcaacgcctggcattatacacaggacggttatcagattgaatagatagttgctgacctcgtatcatgcaccactaagcccgtgtcgtcagctgcgtcagcttcccgctcaatccatgtacatatagtcgagaccacgagcacatacgcgctcgaggcatacagaaaagggagcaaagtggtgattcaccattgctcccaaacctgacggggcataacggtccgcataatgtcccagtgtctgagcgcgctctgggcatgccatttcgccagcttctccgtttcatttgcctgaagagccccaacctcttcgcgcgtcaagaatgccgagtcgggaacttcgaatcgagggacgagctgttgtttccgagaaagactttgaaggtagtcattttcgactggctgccggaatgtcactttaccctcgaactttgtacaaaagatcatgacattgtcaaagtcgcgaccagtctctgcaagcttttctgcagatggcgcctcattctctctgaagacccgacacgatgggaagatatccttgatggtgttcactacgatgcttagaggtgcaagtgtaaagtcgccggcataattctgcgtcgattagtaaggtgtagaaatggagtctgcatccgttcacttacaattactatcacgccggcttggcttagcatctggttcaaaccctccaggaaattactagtgaagagttcgacaggctcggcgccgccggtaaagacgtcgtgcacgatatagtcgtaatgaccctgtaggttcgggccattgagctgactccaagagatgacatcctcgaccacggcggtatggtttgaagggaggccaaaatacttgatagcaaaattgtagacaacgggatcgatctcaacaattgttgtatcgatgccatgtgcaatcaaagccgagggcgtggttccaatgcccaaaccactgagccatgattagactggggagatgggaaagttgaaggatggtcagaactcacatattgagggcgtgagctttgcggtctggcaccttcgtaggcactttcacgagacgtatggcttccagctgcgtgaatacggagtacaccggctcggccacgatgtttctcccgagtttcgtccactcgccgcccaagagactgtggtcacaacgcataacgcgaaacccatcgcgatagctatcaagaaccgagatatagcccgtgttagactcccatcgatcgactaaggaccagccatgatcattaagtgtcgcatttagtgaatttgttgcgtagtcagtcatcagatgaggattatagaatgcggcatgcagaacgccagggatggcatattgcagcagtctcgaacgacccatgatggtgtaagtggcggccaggaccagttccaagcccatgcgagtctgtaggagcccgacgccgatctgctcaaatagtcggcggaacagggttgtctcggagtacttgaagagggcaaaggaggaaatgcccggcaatgagctagcaacactcttaggaatccagctcaggtcggcatcctcgaggatgtctgcaatacaggcagtgctgacgactgtcatgggatagagagtcaaggcttccgtcacggtagggccgaattcaatgggaacaaaactactcagtttgaacaagaaatgctgcataacaggcacatacacagcgataagaggaagcagggcaataggcttgaagggcaacatctgcctaagagctacgttgcctccccatccggtgaaaagtccgatgagcacgacccagtcatgcaatcgattggcagcgatctggccgtagacgggtgacagagtcaggacagagacgttagcatagacggcagcgagagtaacgagagctgcagctttgccgtagacggtagcctgggcggccaaggtacgagaccaagtctcctgctgggcctggcgagcgagactcttgagctcattctcgaagctctccttggtctcggaaggatgctgaaggggagccgactgagtggctttcttcttggaggccggcttcttaggagccatggtgaagtgagactatacggtgcgcacccaactagctaacggataagtgaacgactagtaagggtagagagtatcatgacatttccaaaagacaaggcgcagagattaagcagaacatgaaatctatcataagtgtgattcgtctctcaacagccagctgctggaggtagttttgtttggtgagggccaattgaggacacaggacagagaatgcagtcgcaaacgtcgttgtgtttcaaacaggtgtacggaggctcttgaccctgctccgactcgcttaatgaggagatggaggctaaggtaggattagggaaaattggaatgcgtggcgcgtaggtacctatgaattgcgtacggggtcccactaagccacaggtaagaggcgctcagcaggtggctccaggggctagtcgcactgaaaccacccgaccttacccaacctacatacctacagcgtcatcggcctaaatttcccactgcttaaaggttacctgtagtttcacgacatacattacaccttgagatgcatcgttgactgtgagttgggactgtgacatccacacgctccatcagtaccgcgcgatggcattcgacgatgacgacgatgatttcggggcggaccccgagttcctgtctgccctcgcgtcgtctgcctcgctgcccaccaacaacgcatccagccagccccgatcgcagccacttcctcgtgcacaaccagcgtctcgcacgccgcagagaatccaacagccgactccccaacgcctcgacaagccgcccccgtctatatctactactactgcgtctgcctccggctccaagatcgtccagcccacaccgcaggcgctgccccaacgcgggtcgggctcgtcgatcctcgtgtcgccgcggcagaagggcaacccggtgctggcggcgctgcgatcggtggcgtgggagtacagcgacatccccgcggactacgggctgggcacgacgacgtgcgcgctgttcctcagcctcaagtaccaccggctgcacccggagtacgtctacacgcgcatccgcagtctgcagggccgctacagcctgcgcgtgctgctggccctcgtcgacatccccaaccacgaggactccctgcgcgagctggccaagacgagcctcgtcaacagcgtcaccctcgtgctgtgctggagcgcccaggaggccgcccgctacctcgagctctacaagtcgtacgagcacgccaccttcgccgccatcaagggccagcagcccaccagctacgccgagaagctcgtcgagttcgtcaccgtgccccgcggcatcaacaaggccgacgccctctccctcgtcagcgccttcgggagcatccgcaacgccgtcaacgccgagcccgagcaggtcgccttcatcggcggctggggcgagaagaaggtcaagcgctggtgccacgtcgtcgacgagcccttccgcgtccagcacgccgccaagcgccgcctcctcaccactgccgacggcaactccgtcctagaccaagctctgccactcggccgcgtgcctctgcgcgacatggccactctctccgcaaacacgtccagggccagtgccaactccaccccacagccccaacttcaaagtcagaatcgatctcaacctcaacctcaacctcaacgcactcgtgacagtgcgtcctcctctgctcgacgagctgtttctgatgtccacatggacgacgaagaagaggctatactagctgcagccattgaagcgtcgaagcagacggccgctcaagagtctgggtatgcccaagcgcctcctgcttcggccgcttcctctagtgcgcgcaaggatgacgaactcagcgatggcattgccgccgcgttggcacgtctccgagagaaaggctgatcttgtccatgaatggcaacatggtacctacggtagatcactcttcgagccgcaaccatccacactgcagcatctcgcagcgtcgatcagcccatgcctgttcgcgcagatcaaatgttcgctctcagaataacgtgaaacacaccgggtcactataggtgcacgataggtacatgtacagtgtatgcaagcaacaccgatatcaagtgctcgcttcgtgctattccatattcgccatgtatgtctgtctagacacatgcacttaaccatacgtacgttgtagtggaatgtagaggttctctatctgatgaatgtcagcatcgagtggcacgttacgtgcattacataggccaaggcgacgaccaggaagacggtgctcggctcgcatcttcgtcgaccaactgcgccaatatgcgtcaaatatttcgctcggtctctttaacttgcctacatgtattgagtgggttatgacaatctccaaatcgtcagatcccggctgcgtacctgacgatgtgaatgcatggacaaggatcatatctcgatgatcccgggactcgatgggcaaattgcccagatcagcatgccacccaactgacggtaactacagacggctatggaacttatcaataagtaatggctcacttccagctacgtaatatcgcaaggcaggcggtcaaatatatagcaatttggcgaatagaagcgctgaaattcatctgctagaactactagtatgctgccgatgtgttgtgtgagagaaaacaaagttgcatgtctgtacgtactaaataatgccattcgaactcgaccactgctcaatctgcgcggtacatgcccgagcgagaattctcgaatttttgttacttgtcagactgccttgtagggcaggtaagcagacgacctagaatgccgctatcgactttgccggcaaattcgcgcatcctcttcattgcgctccagtgcatacacgatgtgtcgtgcccccttccattcgtcggggaggactacgcgaggctcgtcgtcctccgtgctacatctgtatgtttgataggcaatcattagctcatctgatcctatcagccctcatccaccagcaaatttgaacatgcaaaagtgcccttatactcggttgtgggtgtgttcatgtctactagttctacgcattcgaagctcaagtatcgtgctaattcgctcgtaggaacacagagcttgcagtagctgtgcttaccccgcatgagcaaagactcaagatcgccgcttggcttgctggctgtggactcccccgcataaccccggcagctgcccaaccaaaaacatgtcagggatctttccaggacgagcagggcagcccagacgcacgcgagaacaagatccagccgagcacccgacagaatgaggtgcggtcagagtgcctcgtctgggtaggcgtatgtagagaaggcatcctcccatgttgtgctcacgtcgtgcccgcaatctggtatgactgggcctcaaagaaggaatcggtcaaatagcgaatgttaatgaggacaacgtaaaatgggagatgagggactgccatcatcggcccttttccgtgaacttgcaagtggacgcgctcctgattatccaccgcgctgccgctcgttgtcattgtccaagatggcctcaccgtcacgacttgcaaatagaaagccttggccatcttcatttggaaggttgtatgaacagggcgagcttattctcgtcatgttgccagcgcggtcacttggccccatccaccactgccaagccaagaaccaggggaacgagctgcacggagagagagacaaaggaaatgaaggaggaaaaaaagttggccgggcgcgtgtgattgaccgcaaagcttggtggcccatgtccttctgttcctgtcctagcagcgagggtggcgttcgctcccgcgatggcttgcaccgggtgggttcgccctcgcaatatctttctttcaagtgccgaactatgcacctgcatgtcatctatctcgtactgccttcatcgcctgtctccgggccgcgaagcacgcagagacgagtttccacggcatcagcatgggcttcactcagtcgatggacaaagtcctggtggtcgagccacatgcgagacaatagatatggaattggagaattccccaacgcgcacctccttcttggcatgcctcgtgcctgggtcgtctgttgatcgtcaagtcgcactgcagctacccataccttctccttgtctgtcctgttccgttattagtcaggacccccggcctgctcaggtgatcgccatagatagcctttgaggctagtgaggctcagggatgatggattctatcttctcggtgttacattgcaactgataagttccctccacgcttctcggaacccgatggctacctattcctatcgggtctgccaccagtcgcgagcactcgttcgttcgcagctgtgaccatcctgactgctgacatggctagccctgctttaccaaccaggcctagtcggatctacccattcgtggatgtgtccaatgacggcgagggagagcgacctcgggaacgtcgtcatggactggcgagctgcgacatggcaccttcaagcacgcccatgacttccgtcacgtaccatactcatacgggcaagcgccaacagcaaaagctggggtgagtaggccgccttggacccaaacgacacatccaccatgccttggcacggcgtatcataacattccatccatatagcattacggacggaacgtcgatccccaatatatatataagacacccacatatccctcccttctgggccgctcgtcagccttctgcttcattcttcccgtcgcaggcttaattttggctcgggacataattagcctgtccgtccattgggctgcgattatcctcctccctcccttttttggttaatatttaatcatggtccgttccctaactctcgccactctcggcgccgtctcgccagccttggtggctgctgttgattatgtctcgcatcctgagagaacggatgccgtcaaggaggcttttcaaatctcgtgggatggctatatggactatgcgtttcccaatgacactctgattcccattgccaagacgtatcttaacgatcgcaatggatggggcgccagcgcagttgacgctctttccaccgccttgatcatggggaagaacgatattgtcaaggagatcgtcgatcacatcaagacgatcaactacaataagaccgttcccgatcagacctcagtgtcgctcttcgagactaccattcgctacctcggaggaatgctttcaggacatgatttccttaatggtccattcaaaggagttgtcagcgatgatgatgtcaaggctatcttggacaagtctgttgaactggccgaggctctcagcattgctttcgatacgccgagtggcgtaccgctgaacgacttaaccttcaatggccctgatggcccggtcgcttctggtgacacaaacggccttgccaccatcggcaccctggttctcgagtggactcacttgagtgatctcacgggcgacgacaagtacgccgagctcagtcagaagggagagtcttatcttctaaacgtcaaaaaccctgaagttggcgaaccataccccggtctggttggtaccaacgtctacgtcgacaatggaacgttcgccgacggcactggaggctggaatggcggtaccgattctttctacgagtatcttatcaagatgtatctttatgacccatcacgcttcggggaatacaaagatcgatggaccgccgctgtcgactccacgatcaaatacttgacttcgcacccgacaactcggcccgatctcactttcgttgcctactatactggggctggcaaggacaagttgagattcctctcatctcatttggcttgcttcaatggtggcaacatcatcctaggtggcttgaccttggacaagcaggaatacattgactacggtctagagctcgtgaacggctgtcacgatacctacgcgagcaccgagactggcatcggacctgagtccttcaagtggcaggataacagcattgccacgaacgtgtctaacaatggcgccgcgccaagcgaccaagccgctttctacaggaaatctggattctggattgacagctcctactatatccagcgacccgaggtcgtagagagctattactacgcctaccgcgctaccggtgacaccaagtaccaagattgggcgtgggatgcttttgtgaacatcaacaagaccactcgcgctggtgccggtttcgcaggtctcaccaatgtcaacgccccgaacggcggcagcttcgatgaccagcagcagactttctggtttgccgagttcctcaagtattcctacctcatccaggcccccgatgccgagtatcaggtcaacgccaaccatgacaaccaatgggtcttcaacaccgaggcgcatcctgtcaaggttgctggtactcccagctaaagttgactactattactcgagtatagcttacttgcatggctaggcgtttatagtgcttgttggcgacacggttaatgatgaattgtcttgaaactatcttcttatggtcctatttgtcgcttatgtgatcacctgtcatgattatcttcctggcacgcaaacacgtaaaggcgcgtagagtacctaactggaacacatcgtacagcggcccctatccgcctctttccagatcattggcggcatgcttgacaccatacggagcgcgaaaggaccatccctcaatgaccttgtgactagtgttaccggatgataaatatgacaattgccttgacatggcacgcgcttacgcatactttcaactccaccgatatcgatcatgtaaattcaaatcaatgctgttccaaataccgctaaatcccagttttctcccttgcctctatcactccaaatgaccacttccgcctaccggccgaaatgataatgcaaatcaactggtaactctccatgcagaccgtccgactccagttcctgcggtggtgatggtaattcctctagtttcggctcttgggtgaagtgtgggggtctgtagggctgtatcgtagctgatgcgggctcttcacttcggtatagagtgcgagaggtgtttcgatggcgtatttggaaggctagatatgcgatggcgagggccagtaggcttaagccgagtcccagtccaacgccgagcccaaccctcagatcatgattacttgtttggtttttcttatttgccggtggcgaggaggttgtcgtgtcgactgtggtggcgctagtagaagttgttgttgagtcagacggtatactgtttggtatcccagcagctttgaatatgctcgtggctactgggatcgtgatgaaggaagtagtctcggtgcaacatgtcgcattctgtccgcagcagtactcgcctgagactttgtcgttggatttgcagagtgctaggtcttggtagaagtttgaaaatgctcgttgtgtgtcagaagttgcgagtggagatgattagagtaggcatcgctcactatatccttggcaatagttattgcatggagattcccttttggcgtggtttcatgttagtgatttttttccggataaaacagttctgtcaactcgcca

SEQ ID NO: 2826 - DNA, 1305 bp, Muscodor strobelii
  misc_feature: SGI cDNA ID NO. 560586
  misc_feature: Encodes the peptide sequence at SEQ ID NO 2827
atggcattcgacgatgacgacgatgatttcggggcggaccccgagttcctgtctgccctcgcgtcgtctgcctcgctgcccaccaacaacgcatccagccagccccgatcgcagccacttcctcgtgcacaaccagcgtctcgcacgccgcagagaatccaacagccgactccccaacgcctcgacaagccgcccccgtctatatctactactactgcgtctgcctccggctccaagatcgtccagcccacaccgcaggcgctgccccaacgcgggtcgggctcgtcgatcctcgtgtcgccgcggcagaagggcaacccggtgctggcggcgctgcgatcggtggcgtgggagtacagcgacatccccgcggactacgggctgggcacgacgacgtgcgcgctgttcctcagcctcaagtaccaccggctgcacccggagtacgtctacacgcgcatccgcagtctgcagggccgctacagcctgcgcgtgctgctggccctcgtcgacatccccaaccacgaggactccctgcgcgagctggccaagacgagcctcgtcaacagcgtcaccctcgtgctgtgctggagcgcccaggaggccgcccgctacctcgagctctacaagtcgtacgagcacgccaccttcgccgccatcaagggccagcagcccaccagctacgccgagaagctcgtcgagttcgtcaccgtgccccgcggcatcaacaaggccgacgccctctccctcgtcagcgccttcgggagcatccgcaacgccgtcaacgccgagcccgagcaggtcgccttcatcggcggctggggcgagaagaaggtcaagcgctggtgccacgtcgtcgacgagcccttccgcgtccagcacgccgccaagcgccgcctcctcaccactgccgacggcaactccgtcctagaccaagctctgccactcggccgcgtgcctctgcgcgacatggccactctctccgcaaacacgtccagggccagtgccaactccaccccacagccccaacttcaaagtcagaatcgatctcaacctcaacctcaacctcaacgcactcgtgacagtgcgtcctcctctgctcgacgagctgtttctgatgtccacatggacgacgaagaagaggctatactagctgcagccattgaagcgtcgaagcagacggccgctcaagagtctgggtatgcccaagcgcctcctgcttcggccgcttcctctagtgcgcgcaaggatgacgaactcagcgatggcattgccgccgcgttggcacgtctccgagagaaaggctga

SEQ ID NO: 2827 - protein, 434 aa, Muscodor strobelii
  misc_feature: SGI Peptide ID NO. 560586
  misc_feature (95)..(162): Pfam Id: PF03834 Pfam Desc: DNA repair protein rad10
  misc_feature (52)..(434): NCBI GI: 261359652 Blast Desc: mating-type switching protein swi10 [Verticillium albo-atrum VaMs.102]
  misc_feature (7)..(432): NCBI GI: 46134239 Blast Desc: FG09259.1 [Gibberella zeae PH-1]
  misc_feature (17)..(433): NCBI GI: 154304059 Blast Desc: BC1G_09665 [Botryotinia fuckeliana B05.10] gi|150854300|gb|EDN29492.1| BC1G_09665 [Botryotinia fuckeliana B05.10]
  misc_feature (43)..(433): NCBI GI: 156030615 Blast Desc: SS1G_14403 [Sclerotinia sclerotiorum 1980] gi|154700794|gb|EDO00533.1| SS1G_14403 [Sclerotinia sclerotiorum 1980]
  misc_feature (52)..(434): NCBI GI: 145610669 Blast Desc: MGG_11455 [Magnaporthe grisea 70-15] gi|145018048|gb|EDK02327.1| MGG_11455 [Magnaporthe grisea 70-15]
  misc_feature (52)..(297): NCBI GI: 116202479 Blast Desc: CHGG_09124 [Chaetomium globosum CBS 148.51] gi|88177642|gb|EAQ85110.1| CHGG_09124 [Chaetomium globosum CBS 148.51]
  misc_feature (39)..(291): NCBI GI: 256727739 Blast Desc: NECHADRAFT_33938 [Nectria haematococca mpVI 77-13-4]
  misc_feature (7)..(280): NCBI GI: 171682146 Blast Desc: protein product [Podospora anserina] gi|170941032|emb|CAP66682.1| protein product [Podospora anserina]
  misc_feature (53)..(295): NCBI GI: 85096839 Blast Desc: mating-type switching protein swi10 [Neurospora crassa OR74A] gi|28921819|gb|EAA31095.1| mating-type switching protein swi10 [Neurospora crassa OR74A]
  misc_feature (74)..(313): NCBI GI: 169607321 Blast Desc: SNOG_06717 [Phaeosphaeria nodorum SN15] gi|160701389|gb|EAT85368.2| SNOG_06717 [Phaeosphaeria nodorum SN15]
MAFDDDDDDFGADPEFLSALASSASLPTNNASSQPRSQPLPRAQPASRTPQRIQQPTPQRLDKPPPSISTTTASASGSKIVQPTPQALPQRGSGSSILVSPRQKGNPVLAALRSVAWEYSDIPADYGLGTTTCALFLSLKYHRLHPEYVYTRIRSLQGRYSLRVLLALVDIPNHEDSLRELAKTSLVNSVTLVLCWSAQEAARYLELYKSYEHATFAAIKGQQPTSYAEKLVEFVTVPRGINKADALSLVSAFGSIRNAVNAEPEQVAFIGGWGEKKVKRWCHVVDEPFRVQHAAKRRLLTTADGNSVLDQALPLGRVPLRDMATLSANTSRASANSTPQPQLQSQNRSQPQPQPQRTRDSASSSARRAVSDVHMDDEEEAILAAAIEASKQTAAQESGYAQAPPASAASSSARKDDELSDGIAAALARLREKG

SEQ ID NO: 2828 - DNA, 11290 bp, Muscodor strobelii; identical to SEQ ID NO: 2825
  misc_feature: SGI EST ID NO. CUFF.7372.1
  misc_feature: Variant of the nucleotide sequence at SEQ ID NO 2826

SEQ ID NO: 2829 - DNA, 1761 bp, Muscodor strobelii
  misc_feature: SGI cDNA ID NO. 560587
  misc_feature: Encodes the peptide sequence at SEQ ID NO 2830
atggctcctaagaagccggcctccaagaagaaagccactcagtcggctccccttcagcatccttccgagaccaaggagagcttcgagaatgagctcaagagtctcgctcgccaggcccagcaggagacttggtctcgtaccttggccgcccaggctaccgtctacggcaaagctgcagctctcgttactctcgctgccgtctatgctaacgtctctgtcctgactctgtcacccgtctacggccagatcgctgccaatcgattgcatgactgggtcgtgctcatcggacttttcaccggatggggaggcaacgtagctcttaggcagatgttgcccttcaagcctattgccctgcttcctcttatcgctgtgtatgtgcctgttatgcagcatttcttgttcaaactgagtagttttgttcccattgaattcggccctaccgtgacggaagccttgactctctatcccatgacagtcgtcagcactgcctgtattgcagacatcctcgaggatgccgacctgagctggattcctaagagtgttgctagctcattgccgggcatttcctcctttgccctcttcaagtactccgagacaaccctgttccgccgactatttgagcagatcggcgtcgggctcctacagactcgcatgggcttggaactggtcctggccgccacttacaccatcatgggtcgttcgagactgctgcaatatgccatccctggcgttctgcatgccgcattctataatcctcatctgatgactgactacgcaacaaattcactaaatgcgacacttaatgatcatggctggtccttagtcgatcgatgggagtctaacacgggctatatctcggttcttgatagctatcgcgatgggtttcgcgttatgcgttgtgaccacagtctcttgggcggcgagtggacgaaactcgggagaaacatcgtggccgagccggtgtactccgtattcacgcagctggaagccatacgtctcgtgaaagtgcctacgaaggtgccagaccgcaaagctcacgccctcaatattggtttgggcattggaaccacgccctcggctttgattgcacatggcatcgatacaacaattgttgagatcgatcccgttgtctacaattttgctatcaagtattttggcctcccttcaaaccataccgccgtggtcgaggatgtcatctcttggagtcagctcaatggcccgaacctacagggtcattacgactatatcgtgcacgacgtctttaccggcggcgccgagcctgtcgaactcttcactagtaatttcctggagggtttgaaccagatgctaagccaagccggcgtgatagtaattaattatgccggcgactttacacttgcacctctaagcatcgtagtgaacaccatcaaggatatcttcccatcgtgtcgggtcttcagagagaatgaggcgccatctgcagaaaagcttgcagagactggtcgcgactttgacaatgtcatgatcttttgtacaaagttcgagggtaaagtgacattccggcagccagtcgaaaatgactaccttcaaagtctttctcggaaacaacagctcgtccctcgattcgaagttcccgactcggcattcttgacgcgcgaagaggttggggctcttcaggcaaatgaaacggagaagctggcgaaatggcatgcccagagcgcgctcagacactgggacattatgcggaccgttatgccccgtcaggtttgggagcaatggtga

SEQ ID NO: 2830 - protein, 586 aa, Muscodor strobelii
  misc_feature: SGI Peptide ID NO. 560587
  misc_feature (1)..(586): NCBI GI: 256727125 Blast Desc: NECHADRAFT_32447 [Nectria haematococca mpVI 77-13-4]
  misc_feature (3)..(586): NCBI GI: 85095859 Blast Desc: NCU04698 [Neurospora crassa OR74A] gi|28921639|gb|EAA30925.1| conserved [Neurospora crassa OR74A]
  misc_feature (1)..(586): NCBI GI: 39951280 Blast Desc: MGG_01296 [Magnaporthe grisea 70-15] gi|145020890|gb|EDK05019.1| MGG_01296 [Magnaporthe grisea 70-15]
  misc_feature (23)..(586): NCBI GI: 116202227 Blast Desc: CHGG_08998 [Chaetomium globosum CBS 148.51] gi|88177516|gb|EAQ84984.1| CHGG_08998 [Chaetomium globosum CBS 148.51]
  misc_feature (1)..(586): NCBI GI: 46136019 Blast Desc: FG09525.1 [Gibberella zeae PH-1]
  misc_feature (1)..(586): NCBI GI: 156036434 Blast Desc: SS1G_12906 [Sclerotinia sclerotiorum 1980] gi|154698311|gb|EDN98049.1| SS1G_12906 [Sclerotinia sclerotiorum 1980]
  misc_feature (22)..(586): NCBI GI: 171682040 Blast Desc: protein product [Podospora anserina] gi|170940979|emb|CAP66629.1| protein product [Podospora anserina]
  misc_feature (58)..(586): NCBI GI: 145237904 Blast Desc: An07g05160 [Aspergillus niger] gi|134076076|emb|CAK39435.1| protein product [Aspergillus niger]
  misc_feature (58)..(586): NCBI GI: 67536986 Blast Desc: AN4663.2 [Aspergillus nidulans FGSC A4] gi|40741515|gb|EAA60705.1| AN4663.2 [Aspergillus nidulans FGSC A4] gi|259482502|tpe|CBF77046.1| TPA: spermine/spermidine family
  misc_feature (58)..(586): NCBI GI: 240109708 Blast Desc: CPC735_032130 [Coccidioides posadasii C735 delta SOWgp]
MAPKKPASKKKATQSAPLQHPSETKESFENELKSLARQAQQETWSRTLAAQATVYGKAAALVTLAAVYANVSVLTLSPVYGQIAANRLHDWVVLIGLFTGWGGNVALRQMLPFKPIALLPLIAVYVPVMQHFLFKLSSFVPIEFGPTVTEALTLYPMTVVSTACIADILEDADLSWIPKSVASSLPGISSFALFKYSETTLFRRLFEQIGVGLLQTRMGLELVLAATYTIMGRSRLLQYAIPGVLHAAFYNPHLMTDYATNSLNATLNDHGWSLVDRWESNTGYISVLDSYRDGFRVMRCDHSLLGGEWTKLGRNIVAEPVYSVFTQLEAIRLVKVPTKVPDRKAHALNIGLGIGTTPSALIAHGIDTTIVEIDPVVYNFAIKYFGLPSNHTAVVEDVISWSQLNGPNLQGHYDYIVHDVFTGGAEPVELFTSNFLEGLNQMLSQAGVIVINYAGDFTLAPLSIVVNTIKDIFPSCRVFRENEAPSAEKLAETGRDFDNVMIFCTKFEGKVTFRQPVENDYLQSLSRKQQLVPRFEVPDSAFLTREEVGALQANETEKLAKWHAQSALRHWDIMRTVMPRQVWEQW

SEQ ID NO: 2831 - DNA, 11286 bp, Muscodor strobelii
  misc_feature: SGI EST ID NO. CUFF.7371.0
  misc_feature: Variant of the nucleotide sequence at SEQ ID NO 2829
tggcgagttgacagaactgttttatccggaaaaaaatcactaacatgaaaccacgccaaaagggaatctccatgcaataactattgccaaggatatagtgagcgatgcctactctaatcatctccactcgcaacttctgacacacaacgagcattttcaaacttctaccaagacctagcactctgcaaatccaacgacaaagtctcaggcgagtactgctgcggacagaatgcgacatgttgcaccgagactacttccttcatcacgatcccagtagccacgagcatattcaaagctgctgggataccaaacagtataccgtctgactcaacaacaacttctactagcgccaccacagtcgacacgacaacctcctcgccaccggcaaataagaaaaaccaaacaagtaatcatgatctgagggttgggctcggcgttggactgggactcggcttaagcctactggccctcgccatcgcatatctagccttccaaatacgccatcgaaacacctctcgcactctataccgaagtgaagagcccgcatcagctacgatacagccctacagacccccacacttcacccaagagccgaaactagaggaattaccatcaccaccgcaggaactggagtcggacggtctgcatggagagttaccagttgatttgcattatcatttcggccggtaggcggaagtggtcatttggagtgatagaggcaagggagaaaactgggatttagcggtatttggaacagcattgatttgaatttacatgatcgatatcggtggagttgaaagtatgcgtaagcgcgtgccatgtcaaggcaattgtcatatttatcatccggtaacactagtcacaaggtcattgagggatggtcctttcgcgctccgtatggtgtcaagcatgccgccaatgatctggaaagaggcggataggggccgctgtacgatgtgttccagttaggtactctacgcgcctttacgtgtttgcgtgccaggaagataatcatgacaggtgatcacataagcgacaaataggaccataagaagatagtttcaagacaattcatcattaaccgtgtcgccaacaagcactataaacgcctagccatgcaagtaagctatactcgagtaatagtagtcaactttagctgggagtaccagcaaccttgacaggatgcgcctcggtgttgaagacccattggttgtcatggttggcgttgacctgatactcggcatcgggggcctggatgaggtaggaatacttgaggaactcggcaaaccagaaagtctgctgctggtcatcgaagctgccgccgttcggggcgttgacattggtgagacctgcgaaaccggcaccagcgcgagtggtcttgttgatgttcacaaaagcatcccacgcccaatcttggtacttggtgtcaccggtagcgcggtaggcgtagtaatagctctctacgacctcgggtcgctggatatagtaggagctgtcaatccagaatccagatttcctgtagaaagcggcttggtcgcttggcgcggcgccattgttagacacgttcgtggcaatgctgttatcctgccacttgaaggactcaggtccgatgccagtctcggtgctcgcgtaggtatcgtgacagccgttcacgagctctagaccgtagtcaatgtattcctgcttgtccaaggtcaagccacctaggatgatgttgccaccattgaagcaagccactgcatgcgtgcattagtcatggtcatagatcgagccgaggaggcataggagacttacaatgagatgagaggaatctcaacttgtccttgccagccccagtatagtaggcaacgaaagtgagatcgggccgagttgtcgggtgcgaagtcaagtatttgatcgtggagtcgacagcggcggtccatcgatctttgtattccccgaagcgtgatgggtcataaagatacatcttgataagatactcgtagaaagaatcggtaccgccattccagcctccagtgccgtcggcgaacgttccattgtcgacgtagacgttggtaccaaccagaccggggtatggttcgccaacttcagggtttttgacgtttagaagataagactctcccttctgactgagctcggcgtacttgtcgtcgcccgtgagatcactcaagtgagtccactcgagaaccagggtgccgatggtggcaaggccgtttgtgtcaccagaagcgaccgggccatcagggccattgaaggttaagtcgttcagcggtacgccactcggcgtatcgaaagcaatgctgagagcctcggccagttcaacagacttgtccaagatagccttgacatcatcatcgctgacaactcctttgaatggaccattaaggaaatcatgtcctgaaacgtagatgagcttaggcaacgaggcggcgtatatggatgtctcaattcacctgaaagcattcctccgaggtagcgaatggtagtctcgaagagcgacactgaggtctgatcgggaacggtcttattgtagttgatcgtcttgatgtgatcgacgatctccttgacaatatcgttcttccccatgatcaaggcggtggaaagagcgtcaactgcgctggcgccccatccattgctttccaatccgtcagttttctagatcatgatacacatccaagttgagcattgcataccgatcgttaagatacgtcttggcaatgggaatcagagtgtcattgggaaacgcatagtccatatagccatcccacgagatttgaaaagcctccttgacggcatccgttctctcaggatgcgagacataatcaacagcagccaccaaggctggcgagacggcgccgagagtggcgagagttagggaacggaccatgattaaatattaaccaaaaaagggagggaggaggataatcgcagcccaatggacggacaggctaattatgtcccgagccaaaattaagcctgcgacgggaagaatgaagcagaaggctgacgagcggcccagaagggagggatatgtgggtgtcttatatatatattggggatcgacgttccgtccgtaatgctatatggatggaatgttatgatacgccgtgccaaggcatggtggatgtgtcgtttgggtccaaggcggcctactcaccccagcttttgctgttggcgcttgcccgtatgagtatggtacgtgacggaagtcatgggcgtgcttgaaggtgccatgtcgcagctcgccagtccatgacgacgttcccgaggtcgctctccctcgccgtcattggacacatccacgaatgggtagatccgactaggcctggttggtaaagcagggctagccatgtcagcagtcaggatggtcacagctgcgaacgaacgagtgctcgcgactggtggcagacccgataggaataggtagccatcgggttccgagaagcgtggagggaacttatcagttgcaatgtaacaccgagaagatagaatccatcatccctgagcctcactagcctcaaaggctatctatggcgatcacctgagcaggccgggggtcctgactaataacggaacaggacagacaaggagaaggtatgggtagctgcagtgcgacttgacgatcaacagacgacccaggcacgaggcatgccaagaaggaggtgcgcgttggggaattctccaattccatatctattgtctcgcatgtggctcgaccaccaggactttgtccatcgactgagtgaagcccatgctgatgccgtggaaactcgtctctgcgtgcttcgcggcccggagacaggcgatgaaggcagtacgagatagatgacatgcaggtgcatagttcggcacttgaaagaaagatattgcgagggcgaacccacccggtgcaagccatcgcgggagcgaacgccaccctcgctgctaggacaggaacagaaggacatgggccaccaagctttgcggtcaatcacacgcgcccggccaactttttttcctccttcatttcctttgtctctctctccgtgcagctcgttcccctggttcttggcttggcagtggtggatggggccaagtgaccgcgctggcaacatgacgagaataagctcgccctgttcatacaaccttccaaatgaagatggccaaggctttctatttgcaagtcgtgacggtgaggccatcttggacaatgacaacgagcggcagcgcggtggataatcaggagcgcgtccacttgcaagttcacggaaaagggccgatgatggcagtccctcatctcccattttacgttgtcctcattaacattcgctatttgaccgattccttctttgaggcccagtcataccagattgcgggcacgacgtgagcacaacatgggaggatgccttctctacatacgcctacccagacgaggcactctgaccgcacctcattctgtcgggtgctcggctggatcttgttctcgcgtgcgtctgggctgccctgctcgtcctggaaagatccctgacatgtttttggttgggcagctgccggggttatgcgggggagtccacagccagcaagccaagcggcgatcttgagtctttgctcatgcggggtaagcacagctactgcaagctctgtgttcctacgagcgaattagcacgatacttgagcttcgaatgcgtagaactagtagacatgaacacacccacaaccgagtataagggcacttttgcatgttcaaatttgctggtggatgagggctgataggatcagatgagctaatgattgcctatcaaacatacagatgtagcacggaggacgacgagcctcgcgtagtcctccccgacgaatggaagggggcacgacacatcgtgtatgcactggagcgcaatgaagaggatgcgcgaatttgccggcaaagtcgatagcggcattctaggtcgtctgcttacctgccctacaaggcagtctgacaagtaacaaaaattcgagaattctcgctcgggcatgtaccgcgcagattgagcagtggtcgagttcgaatggcattatttagtacgtacagacatgcaactttgttttctctcacacaacacatcggcagcatactagtagttctagcagatgaatttcagcgcttctattcgccaaattgctatatatttgaccgcctgccttgcgatattacgtagctggaagtgagccattacttattgataagttccatagccgtctgtagttaccgtcagttgggtggcatgctgatctgggcaatttgcccatcgagtcccgggatcatcgagatatgatccttgtccatgcattcacatcgtcaggtacgcagccgggatctgacgatttggagattgtcataacccactcaatacatgtaggcaagttaaagagaccgagcgaaatatttgacgcatattggcgcagttggtcgacgaagatgcgagccgagcaccgtcttcctggtcgtcgccttggcctatgtaatgcacgtaacgtgccactcgatgctgacattcatcagatagagaacctctacattccactacaacgtacgtatggttaagtgcatgtgtctagacagacatacatggcgaatatggaatagcacgaagcgagcacttgatatcggtgttgcttgcatacactgtacatgtacctatcgtgcacctatagtgacccggtgtgtttcacgttattctgagagcgaacatttgatctgcgcgaacaggcatgggctgatcgacgctgcgagatgctgcagtgtggatggttgcggctcgaagagtgatctaccgtaggtaccatgttgccattcatggacaagatcagcctttctctcggagacgtgccaacgcggcggcaatgccatcgctgagttcgtcatccttgcgcgcactagaggaagcggccgaagcaggaggcgcttgggcatacccagactcttgagcggccgtctgcttcgacgcttcaatggctgcagctagtatagcctcttcttcgtcgtccatgtggacatcagaaacagctcgtcgagcagaggaggacgcactgtcacgagtgcgttgaggttgaggttgaggttgagatcgattctgactttgaagttggggctgtggggtggagttggcactggccctggacgtgtttgcggagagagtggccatgtcgcgcagaggcacgcggccgagtggcagagcttggtctaggacggagttgccgtcggcagtggtgaggaggcggcgcttggcggcgtgctggacgcggaagggctcgtcgacgacgtggcaccagcgcttgaccttcttctcgccccagccgccgatgaaggcgacctgctcgggctcggcgttgacggcgttgcggatgctcccgaaggcgctgacgagggagagggcgtcggccttgttgatgccgcggggcacggtgacgaactcgacgagcttctcggcgtagctggtgggctgctggcccttgatggcggcgaaggtggcgtgctcgtacgacttgtagagctcgaggtagcgggcggcctcctgggcgctccagcacagcacgagggtgacgctgttgacgaggctcgtcttggccagctcgcgcagggagtcctcgtggttggggatgtcgacgagggccagcagcacgcgcaggctgtagcggccctgcagactgcggatgcgcgtgtagacgtactccgggtgcagccggtggtacttgaggctgaggaacagcgcgcacgtcgtcgtgcccagcccgtagtccgcggggatgtcgctgtactcccacgccaccgatcgcagcgccgccagcaccgggttgcccttctgccgcggcgacacgaggatcgacgagcccgacccgcgttggggcagcgcctgcggtgtgggctggacgatcttggagccggaggcagacgcagtagtagtagatatagacgggggcggcttgtcgaggcgttggggagtcggctgttggattctctgcggcgtgcgagacgctggttgtgcacgaggaagtggctgcgatcggggctggctggatgcgttgttggtgggcagcgaggcagacgacgcgagggcagacaggaactcggggtccgccccgaaatcatcgtcgtcatcgtcgaatgccatcgcgcggtactgatggagcgtgtggatgtcacagtcccaactcacagtcaacgatgcatctcaaggtgtaatgtatgtcgtgaaactacaggtaacctttaagcagtgggaaatttaggccgatgacgctgtaggtatgtaggttgggtaaggtcgggtggtttcagtgcgactagcccctggagccacctgctgagcgcctcttacctgtggcttagtgggaccccgtacgcaattcataggtacctacgcgccacgcattccaattttccctaatcctaccttagcctccatctcctcattaagcgagtcggagcagggtcaagagcctccgtacacctgtttgaaacacaacgacgtttgcgactgcattctctgtcctgtgtcctcaattggccctcaccaaacaaaactacctccagcagctggctgttgagagacgaatcacacttatgatagatttcatgttctgcttaatctctgcgccttgtcttttggaaatgtcatgatactctctacccttactagtcgttcacttatccgttagctagttgggtgcgcaccgtatagtctcacttcaccatggctcctaagaagccggcctccaagaagaaagccactcagtcggctccccttcagcatccttccgagaccaaggagagcttcgagaatgagctcaagagtctcgctcgccaggcccagcaggagacttggtctcgtaccttggccgcccaggctaccgtctacggcaaagctgcagctctcgttactctcgctgccgtctatgctaacgtctctgtcctgactctgtcacccgtctacggccagatcgctgccaatcgattgcatgactgggtcgtgctcatcggacttttcaccggatggggaggcaacgtagctcttaggcagatgttgcccttcaagcctattgccctgcttcctcttatcgctgtgtatgtgcctgttatgcagcatttcttgttcaaactgagtagttttgttcccattgaattcggccctaccgtgacggaagccttgactctctatcccatgacagtcgtcagcactgcctgtattgcagacatcctcgaggatgccgacctgagctggattcctaagagtgttgctagctcattgccgggcatttcctcctttgccctcttcaagtactccgagacaaccctgttccgccgactatttgagcagatcggcgtcgggctcctacagactcgcatgggcttggaactggtcctggccgccacttacaccatcatgggtcgttcgagactgctgcaatatgccatccctggcgttctgcatgccgcattctataatcctcatctgatgactgactacgcaacaaattcactaaatgcgacacttaatgatcatggctggtccttagtcgatcgatgggagtctaacacgggctatatctcggttcttgatagctatcgcgatgggtttcgcgttatgcgttgtgaccacagtctcttgggcggcgagtggacgaaactcgggagaaacatcgtggccgagccggtgtactccgtattcacgcagctggaagccatacgtctcgtgaaagtgcctacgaaggtgccagaccgcaaagctcacgccctcaatattggtttgggcattggaaccacgccctcggctttgattgcacatggcatcgatacaacaattgttgagatcgatcccgttgtctacaattttgctatcaagtattttggcctcccttcaaaccataccgccgtggtcgaggatgtcatctcttggagtcagctcaatggcccgaacctacagggtcattacgactatatcgtgcacgacgtctttaccggcggcgccgagcctgtcgaactcttcactagtaatttcctggagggtttgaaccagatgctaagccaagccggcgtgatagtaattaattatgccggcgactttacacttgcacctctaagcatcgtagtgaacaccatcaaggatatcttcccatcgtgtcgggtcttcagagagaatgaggcgccatctgcagaaaagcttgcagagactggtcgcgactttgacaatgtcatgatcttttgtacaaagttcgagggtaaagtgacattccggcagccagtcgaaaatgactaccttcaaagtctttctcggaaacaacagctcgtccctcgattcgaagttcccgactcggcattcttgacgcgcgaagaggttggggctcttcaggcaaatgaaacggagaagctggcgaaatggcatgcccagagcgcgctcagacactgggacattatgcggaccgttatgccccgtcaggtttgggagcaatggtgaatcaccactttgctcccttttctgtatgcctcgagcgcgtatgtgctcgtggtctcgactatatgtacatggattgagcgggaagctgacgcagctgacgacacgggcttagtggtgcatgatacgagctgttgtacttagttcttcaaatcgaacacagctcattccgctttctctcccatgacaaatcgtcgacttgaacgactgttgctattcttacgcgtatagaatgttagaatgagtaacagacacgatatgagcatcaagtactttgctataggggtttttctgatctaataaaggggagatgagtcgatgttaggagcatcgtcatgacccgtcctaagcatgcgggtacgatatcaatctccgtttccagctctcgcctagctctctccactgctggtagtccaatcaagcgacatgcgcgagcatcaattcaacttctcactattgacctcgcctcaagcattcctttcgcttagcaagagtagttgggtctcaggctgttgctacagaagttggctatataggtccagcaaactggcattgaacctggttcaagttgtacggtgaaccaggctactttccacaccaggtatcatagtcgtgggagccaggaggtgagttggaatttatgcatgctatcacgcatcagaaacactactcgtagccggcgatggcgaagaacggggcaaaggccgccagggtaaggatgccgggcttggatattcattttgatctttgtgttgtgtcagtggatgagagagatgaagatcttgctgagttctgacggccgaatggtcgcgctccaagactacccacagatcgttgttctgtggatgtcgttttacacttctctggagttgacgtcgcgacttagacgtgcccaatgcaggtcggtcaatggagtgtcgagatcttgcctagatatttggtgcacccgggcttactgatatcaaacagctaatccgacaagatcttctacgactgctgtttcctctgtgatctcattccatgacgtgtcttctctcgacgttcaaaccgttcccttctggccatccaccatgtggaaccaatatctctcgccgcttatgcatctaagctatgtcgcgacactgcatacaatctgattttcttaacctctaatgcagcatgacgatcttggctccaccagggtctagtcgccatcccagccataccgtctagtcgcatgttaatgccaaattcgcatcatgcccgccactattttcacgatagcatgagagcaactagttgagtgaagacgtccgggtgcagtggcggaattagttggttctgcgaaaggaatctaggagatattcactccgcattcgggtattgaacttgaagcgagacgatcaatagcataaaggatatacacgaagtatccggaacgttgtgcagagatgaatgatattaaaagttgctacaggtggcttttatgcctactcatgtatatttgacgatgttttgtggcgagattggcgagattgaacggtcggcagagcgggactgcaacagctgacctgcaacggcaacagtcgaaattcgaactgcaacatctcaatcgctagcaagaaaataaataccaaggtgctgaccgagcttcaggtgaggacacgaacgccggatgagtcttttaaatgcaacgtaatagacgatggcggctcggcattgccttccaaccaaggttagattgcggttatcttgctactccgctgctcatactgcttgatcaagatctgtattaagatgaagagcccagtctatgtcaaagcattcgagagacggc

SEQ ID NO: 2832 - DNA, 1569 bp, Muscodor strobelii
  misc_feature: SGI cDNA ID NO. 560588
  misc_feature: Encodes the peptide sequence at SEQ ID NO 2833
atgaggcagagaagcctgatccctcttgtttttgtgttgattgctcgcgccactgctgatttccaagatcgctgtcttgccttcgaaccacaacgtcacgtggataagtcgacgctaaatgttctggaatatgtcctagcaggttcaaatgtgacgtttccggacaacgatccgacgtgtagtcgaggcagccaggtcgcaaatgttgctctgtgccgagttgcattatctgtgcaaacgaccaatcgatcaggcattgtgtatgagctctggttgccggaggagtggaacggacgcaccttggcaactggtaacggaggcatcgatgggtcatttggtaccaacaacggtcataatggcacgacgggcgaggccttctatcgaaataaagatgtcgtcattgattatgcatcgagggcactccatatctctgtccaagtgggacggtctcttgcggcgacattctacgagacagacatcggcaagtcttactacattggttgttccttaggaggacgacagggtatcggcagcgccgagatgtttcccgaagacttcgatggcatcgtagcaggggcgccagctgttgacttcaatgatctatattcatggagggccagcttctataccgtgacgggagctattgggtctacagacttcataagccccgacacgtggaagaccacgatccacaatgagattctcagacaatgcgacacgatcgatggagtggctgatggaattgtcgaagatccgacgttgtgtcattgggaccccgagagtttactgtgtgactcaagcgcccggaatacaacggcgtgtcttagcagtgctcaagtcgagactgtaaagactatattctctcactacctttggcccgacggtacacttttgtatcctcgaatgaatccaggtagtgagatattagctgccgatggtctatattctggtaaaccgttcagtccttctgccgactggttccgatttgtcgtgctggaagatccatcgtgggatccatccacttactcaaagaaagatgccatacttgcagctcaaaagaatccggcaaatataagaacatggccttcccggttaactccgttccaagatcgcggaggcaagttgatatcttatcacggacagcaagatcagcaaatttccagtttcaactcattgcgcttctggaaacaccttgtagacggtatgtatggtgaggcaaatgggctgactgagttttaccgtttgttccgcatcccaggcatgaatcactgtagtggtggtcctggggcgtggtcgattggtcagggcggtagtgcgccagcgtacgccattccctttgatgggctacacaatgtgctggccgctgttgttgattgggtcgaaaaagacgtggctccggagcacctaataggaaccaagtttacgaatgatagtgttgcggccggcatcatgtatcagcatcgccattgccgatttccgtatagaagcacatatcgagggagtggtgatcccaaagtcatgaacaattgggattgtcttgaatctggacatgatctcttcttcagctaa

SEQ ID NO: 2833 - protein, 522 aa, Muscodor strobelii
  misc_feature: SGI Peptide ID NO. 560588
  misc_feature (72)..(514): Pfam Id: PF07519 Pfam Desc: Tannase and feruloyl esterase
  misc_feature (112)..(514): Pfam Id: PF07519 Pfam Desc: Tannase and feruloyl esterase
  misc_feature (72)..(111): Pfam Id: PF07519 Pfam Desc: Tannase and feruloyl esterase
  misc_feature (9)..(491): NCBI GI: 39959829 Blast Desc: MGG_09404 [Magnaporthe grisea 70-15] gi|145014369|gb|EDJ98937.1| MGG_09404 [Magnaporthe grisea 70-15]
  misc_feature (5)..(492): NCBI GI: 238502223 Blast Desc: feruloyl esterase B precursor, [Aspergillus flavus NRRL3357] gi|220691155|gb|EED47503.1| feruloyl esterase B precursor, [Aspergillus flavus NRRL3357]
  misc_feature (9)..(481): NCBI GI: 189188378 Blast Desc: feruloyl esterase B precursor [Pyrenophora tritici-repentis Pt-1C-BFP] gi|187972134|gb|EDU39633.1| feruloyl esterase B precursor [Pyrenophora tritici-repentis Pt-1C-BFP]
  misc_feature (5)..(512): NCBI GI: 256728384 Blast Desc: NECHADRAFT_87768 [Nectria haematococca mpVI 77-13-4]
  misc_feature (10)..(512): NCBI GI: 46110503 Blast Desc: FG02133.1 [Gibberella zeae PH-1]
  misc_feature (21)..(513): NCBI GI: 115388175 Blast Desc: ATEG_02415 [Aspergillus terreus NIH2624] gi|114195677|gb|EAU37377.1| ATEG_02415 [Aspergillus terreus NIH2624]
  misc_feature (21)..(513): NCBI GI: 261356620 Blast Desc: feruloyl esterase B [Verticillium albo-atrum VaMs.102]
  misc_feature (1)..(513): NCBI GI: 255932209 Blast Desc: Pc12g08300 [Penicillium chrysogenum Wisconsin 54-1255] gi|74271753|dbj|BAE44304.1| ferulic acid esterase [Penicillium chrysogenum] gi|211582280|emb|CAP80457.1| Pc12g08300 [Penicillium
  misc_feature (21)..(513): NCBI GI: 169769242 Blast Desc: [Aspergillus oryzae RIB40] gi|83766949|dbj|BAE57089.1| protein product [Aspergillus oryzae]
  misc_feature (21)..(513): NCBI GI: 238501692 Blast Desc: feruloyl esterase, [Aspergillus flavus NRRL3357] gi|220692317|gb|EED48664.1| feruloyl esterase, [Aspergillus flavus NRRL3357]
  misc_feature (18)..(513): SWISSPROT Homolog: EC 3.1.1.73 Feruloyl esterase
MRQRSLIPLVFVLIARATADFQDRCLAFEPQRHVDKSTLNVLEYVLAGSNVTFPDNDPTCSRGSQVANVALCRVALSVQTTNRSGIVYELWLPEEWNGRTLATGNGGIDGSFGTNNGHNGTTGEAFYRNKDVVIDYASRALHISVQVGRSLAATFYETDIGKSYYIGCSLGGRQGIGSAEMFPEDFDGIVAGAPAVDFNDLYSWRASFYTVTGAIGSTDFISPDTWKTTIHNEILRQCDTIDGVADGIVEDPTLCHWDPESLLCDSSARNTTACLSSAQVETVKTIFSHYLWPDGTLLYPRMNPGSEILAADGLYSGKPFSPSADWFRFVVLEDPSWDPSTYSKKDAILAAQKNPANIRTWPSRLTPFQDRGGKLISYHGQQDQQISSFNSLRFWKHLVDGMYGEANGLTEFYRLFRIPGMNHCSGGPGAWSIGQGGSAPAYAIPFDGLHNVLAAVVDWVEKDVAPEHLIGTKFTNDSVAAGIMYQHRHCRFPYRSTYRGSGDPKVMNNWDCLESGHDLFFS

SEQ ID NO: 2834 - DNA, 1614 bp, Muscodor strobelii
  misc_feature: SGI EST ID NO. CUFF.7026.0
  misc_feature: Variant of the nucleotide sequence at SEQ ID NO 2832
caacaacggtcataatggcacgacgggcgaggccttctatcgaaataaagatgtcgtcattgattatgcatcgagggcactccatatctctgtccaagtgggacggtctcttgcggcgacattctacgagacagacatcggcaagtcttactacattggttgttccttaggaggacgacagggtatcggcagcgccgagatgtttcccgaagacttcgatggcatcgtagcaggggcgccagctgttgacttcaatgatctatattcatggagggccagcttctataccgtgacgggagctattgggtctacagacttcataagccccgacacgtggaagaccacgatccacaatgagattctcagacaatgcgacacgatcgatggagtggctgatggaattgtcgaagatccgacgttgtgtcattgggaccccgagagtttactgtgtgactcaagcgcccggaatacaacggcgtgtcttagcagtgctcaagtcgagactgtaaagactatattctctcactacctttggcccgacggtacacttttgtatcctcgaatgaatccaggtagtgagatattagctgccgatggtctatattctggtaaaccgttcagtccttctgccgactggttccgatttgtcgtgctggaagatccatcgtgggatccatccacttactcaaagaaagatgccatacttgcagctcaaaagaatccggcaaatataagaacatggccttcccggttaactccgttccaagatcgcggaggcaagttgatatcttatcacggacagcaagatcagcaaatttccagtttcaactcattgcgcttctggaaacaccttgtagacggtatgtatggtgaggcaaatgggctgactgagttttaccgtttgttccgcatcccaggcatgaatcactgtagtggtggtcctggggcgtggtcgattggtcagggcggtagtgcgccagcgtacgccattccctttgatgggctacacaatgtgctggccgctgttgttgattgggtcgaaaaagacgtggctccggagcacctaataggaaccaagtttacgaatgatagtgttgcggccggcatcatgtatcagcatcgccattgccgatttccgtatagaagcacatatcgagggagtggtgatcccaaagtcatgaacaattgggattgtcttgaatctggacatgatctcttcttcagctaaggtgattatgcgagcatcaaatagttacgtaaatttgaactggatgttaatttatcacgaggatcaattcaagatattgtagagagtgatgatactgatcttagttaaacctgccgaacctcttgcttttaccaccaccccgacgacactataatacacgtattcaaggcaatcctattgcaaaccttctgatcactactctaaacatgttttggattgctgaaccatctcccacgactcctagcaagttgtgcgcatctgcattggctcggatcaccccgtgacggagagagtgaagggatgcagagcgacagagatagatctgcgccttattgatgactgatatgttttgattgctgcagagctaaaaggtggtgtgaagtttc

SEQ ID NO: 2835 - DNA, 1017 bp, Muscodor strobelii
  misc_feature: SGI cDNA ID NO. 560589
  misc_feature: Encodes the peptide sequence at SEQ ID NO 2836
atgatgttccttggcaatgttgcattcttggcatctctcgccagtgctgcgtccctaagcagacgggcgtctcctctcaacgtcgagctcaacgtcattgacaccagtgtcaaggcctctatcaccaacactggtgctgaagacttgaaagttcttaagactggcacgattctcgattctgctcctgttgagaaagttcaggtcttccaaggctccaagaaggttgacttcactggtatccgccttcgcctccaaaactccgaatacgccgaggaagcgttccagactatctctgctggtcaaacaattgaggttacatttgacgctgccgagcttcacgacctatcagcaggtggtgacttcgacattgttgccgatggtgtcttatcctacgcagctgccgatagcacccagattgacggtgttgtgagctactccagcaataccgtcactgccaacattgatgcagccaaggccgtcgaatctcgctcgaacttcatcaagcgaactgccgtacagagtggttcttgcacgggctccaagctcactgctaccaacaccgccattagcaactgtcgtactcttgctgctgctgcctcctcagccgctcttagcaacacagctaaggtccaggagtacttcaaatcgacctcagtcggctcaactgttgccggtgtcttcgccaaggtaatcacagagtgcagcagcaccagctccggttactctgacacctactgcactgatgtctacggcgcatgctcgagcaatgtcttagcatacaccgtgccatctctgagcatcattgtgaactgccctctgtacttcagtgcgctgcctgccatcactagcacatgccacggtcaggatcaggctactaccaccattcatgagactactcacttgacccaggtcaagggaacccaggatctcggatacggctattccgccgccacttctttgtcgtcatccagcgccctgaacaacgcagactcttatgctctgtttgccaatggttag

SEQ ID NO: 2836 - protein, 338 aa, Muscodor strobelii
  misc_feature: SGI Peptide ID NO. 560589
  misc_feature (1)..(337): Pfam Id: PF02102 Pfam Desc: Deuterolysin metalloprotease (M35) family
  misc_feature (1)..(338): Pfam Id: PF02102 Pfam Desc: Deuterolysin metalloprotease (M35) family
  misc_feature (1)..(337): NCBI GI: 85077806 Blast Desc: NCU05071 [Neurospora crassa OR74A] gi|28917104|gb|EAA26824.1| conserved [Neurospora crassa OR74A]
  misc_feature (1)..(337): NCBI GI: 261352695 Blast Desc: metalloproteinase [Verticillium albo-atrum VaMs.102]
  misc_feature (1)..(337): NCBI GI: 256733382 Blast Desc: NECHADRAFT_36693 [Nectria haematococca mpVI 77-13-4]
  misc_feature (18)..(337): NCBI GI: 169598740 Blast Desc: SNOG_02177 [Phaeosphaeria nodorum SN15] gi|111069269|gb|EAT90389.1| SNOG_02177 [Phaeosphaeria nodorum SN15]
  misc_feature (21)..(337): NCBI GI: 145583577 Blast Desc: metallo-endopeptidase [Hypocrea lixii]
  misc_feature (4)..(336): NCBI GI: 39943414 Blast Desc: MGG_10927 [Magnaporthe grisea 70-15] gi|149209331|ref|XP_001522040.1| MGCH7_ch7g157 [Magnaporthe grisea 70-15] gi|86196112|gb|EAQ70750.1| MGCH7_ch7g157 grisea
  misc_feature (21)..(337): NCBI GI: 169614750 Blast Desc: SNOG_10522 [Phaeosphaeria nodorum SN15] gi|111060796|gb|EAT81916.1| SNOG_10522 [Phaeosphaeria nodorum SN15]
  misc_feature (19)..(337): NCBI GI: 261353957 Blast Desc: neutral protease [Verticillium albo-atrum VaMs.102]
  misc_feature (21)..(337): NCBI GI: 157400017 Blast Desc: metalloendopeptidase [Trichoderma hamatum]
  misc_feature (1)..(336): NCBI GI: 46127823 Blast Desc: FG08289.1 [Gibberella zeae PH-1]
  misc_feature (34)..(337): SWISSPROT Homolog: EC 3.4.24.39 Deuterolysin
MMFLGNVAFLASLASAASLSRRASPLNVELNVIDTSVKASITNTGAEDLKVLKTGTILDSAPVEKVQVFQGSKKVDFTGIRLRLQNSEYAEEAFQTISAGQTIEVTFDAAELHDLSAGGDFDIVADGVLSYAAADSTQIDGVVSYSSNTVTANIDAAKAVESRSNFIKRTAVQSGSCTGSKLTATNTAISNCRTLAAAASSAALSNTAKVQEYFKSTSVGSTVAGVFAKVITECSSTSSGYSDTYCTDVYGACSSNVLAYTVPSLSIIVNCPLYFSALPAITSTCHGQDQATTTIHETTHLTQVKGTQDLGYGYSAATSLSSSSALNNADSYALFANG

SEQ ID NO: 2837 - DNA, 448 bp, Muscodor strobelii
  misc_feature: SGI EST ID NO. CUFF.7042.0
  misc_feature: Variant of the nucleotide sequence at SEQ ID NO 2835
ctcgctcgaacttcatcaagcgaactgccgtacagagtggttcttgcacgggctccaagctcactgctaccaacaccgccattagcaactgtcgtactcttgctgctgctgcctcctcagccgctcttagcaacacagctaaggtccaggagtacttcaaatcgacctcagtcggctcaactgttgccggtgtcttcgccaaggtaatcacagagtgcagcagcaccagctccggttactctgacacctactgcactgatgtctacggcgcatgctcgagcaatgtcttagcatacaccgtgccatctctgagcatcattgtgaactgccctctgtacttcagtgcgctgcctgccatcactagcacatgccacggtcaggatcaggctactaccaccattcatgagactactcacttgacccaggtcaagggaacccaggatctcgg

SEQ ID NO: 2838 - DNA, 1932 bp, Muscodor strobelii
  misc_feature: SGI cDNA ID NO. 560590
  misc_feature: Elevated expression when VOC is produced
  misc_feature: Encodes the peptide sequence at SEQ ID NO 2839
atgccgacgactgtcagcaaggtgaaggcacgtccaaaggctcgagctctaacagaggtagccaaggaactaccgccaaccaagcccaagcgaactatcaacatccagattgtgccacagcaagcctcacaatcaaaggagttgcagctggcgcgacctcctgatcgaagtcttgttcacaaacttgagcagctagagagtgacaccgaagatcttcgtcatgctcggaaccagcttacacgcagactggatgatgcatctgaggagctttccctcaagacgcacgagaacaaagagattgtgcgaacgctcaatcaggagaggagctctaaagatctcattttcagggagcttgaggaacaaagaaggcttttcgacgaataccggagcaattttgagcttcagagagtcttacttcttgaaacagagaaagaacgcgatgaactcaaaaaggctcagagcgaagctgagaagaagcttcttgattttgagatcagcatttctctaccagggaaacagaagaaagaggagcacgacaacctggaacttcaactcaaagacttacaaaccacaacacatactctcgaacaaaaggtggccataggcgagaagaaacttaaaaccatgacaacagaacgcgacgacctacaaacactatcgagcaattatatagatcagatcaatctcctgaagaacaccaatcaacaagctagcgagagtgacaaacaagccgttgatgcacgccaaaaagagcttcaatcgagcctcgatgggactcgcgaagagaatcggggcctccaagagacaatcaaaggtcttgaagaggcaatcaagggacttgaaggagagatcgtcgtgttcaaaacgcagatcacggagcttagagctggaaaagcaagcatggagaagatcttggctgccgagcaagccaataaagaacagacgaagaagaatttacaagcagagaatgacaagctgcaaaaaacacttgacgatactagggatgaacttcgagagcagctacataccagcaaagaagagttcgagaagcaacttgaggacacccgagtcaacatggccacacaactagcagccagtgaggaggaattgttcaaacatctggagttgagcaaagcagagaaggacgagttgcaacagaagatcagggctagtgaagcttccaagtcacaggtcgagggacagctacaagccaccaaggaagatctcgccctagcaatcgcatctgccaagacggagatggacaaattacaggcggaatttcaagcggattcgagtgacaagcaatctaggatcgatggactggtgaccgaagtcgccggttctaagaaggctaatctctctcttgcatcacagcgactagaactagagcgcaaagttgcggaagttagcgtcacactggccaccgttcaaacggagctcggcactctacgcgatacgtacaacactgtgcaggcagacaacgagcagctcaaggcacagtccgccgagctcaattctagagctgcagatctcgagaagctccggtccgagcatgcagatctcaacgagaagtctaagagcttacaaattgatctcgataaggctcaggcagaccaagccatgcttcaggccgaaaaagataagctcgagacccttgccaaggaacttgaagctggttcacctgcgctcctcaggctcaacgaagaaaagttgacgctcgaacggcagcttgacaaagcaaggattgatctgcagagcgaggcagacaagatctccgtgctcgagaagttcagtgcggatctcgaggcgcgacttgcaattctactagggggagagcggcgggctcaagagcgagaacgagagacttacggtgcaactacgcgagttgcaaacgaactcccgtctcgcgccacgctcccccagccgcagtag

SEQ ID NO: 2839 - protein, 643 aa, Muscodor strobelii
  misc_feature: SGI Peptide ID NO. 560590
  misc_feature (107)..(611): NCBI GI: 171681188 Blast Desc: protein product [Podospora anserina] gi|170940552|emb|CAP65780.1| protein product [Podospora anserina]
  misc_feature: Useful for introducing or modulating the production of volatile compounds
MPTTVSKVKARPKARALTEVAKELPPTKPKRTINIQIVPQQASQSKELQLARPPDRSLVHKLEQLESDTEDLRHARNQLTRRLDDASEELSLKTHENKEIVRTLNQERSSKDLIFRELEEQRRLFDEYRSNFELQRVLLLETEKERDELKKAQSEAEKKLLDFEISISLPGKQKKEEHDNLELQLKDLQTTTHTLEQKVAIGEKKLKTMTTERDDLQTLSSNYIDQINLLKNTNQQASESDKQAVDARQKELQSSLDGTREENRGLQETIKGLEEAIKGLEGEIVVFKTQITELRAGKASMEKILAAEQANKEQTKKNLQAENDKLQKTLDDTRDELREQLHTSKEEFEKQLEDTRVNMATQLAASEEELFKHLELSKAEKDELQQKIRASEASKSQVEGQLQATKEDLALAIASAKTEMDKLQAEFQADSSDKQSRIDGLVTEVAGSKKANLSLASQRLELERKVAEVSVTLATVQTELGTLRDTYNTVQADNEQLKAQSAELNSRAADLEKLRSEHADLNEKSKSLQIDLDKAQADQAMLQAEKDKLETLAKELEAGSPALLRLNEEKLTLERQLDKARIDLQSEADKISVLEKFSADLEARLAILLGGERRAQERERETYGATTRVANELPSRATLPQPQ

SEQ ID NO: 2840 - DNA, 4207 bp, Muscodor strobelii
  misc_feature: SGI EST ID NO. CUFF.7059.0
  misc_feature: Variant of the nucleotide sequence at SEQ ID NO 2838
cgcctggctaagaccaccgaagcgcgagctatgtatggcgaagagacaccttgtcttccggcgggtgtctctggccggctctgtcgccgctgatgacctgcgatgacccattgggaaacgtaccaccgcttgattgggcgcctcagagtgactcaggcaagataaaccaacaaagacctcagcgctggatccctgccaagtcagggaccagtgacagacacagtcaggccaggttgcagtcgaattcattgggcacgcgttctcttgcgacatggtggctgacacttctctgtgtattctgcctgctgcgcagcggactacatcattcgatgcactcccctcagcctctttcggtcttcttgcgtctgaacctactctagcaacaactaagtaacaacaagaaagactatccaatccttctgcgcttcacgctccactctgtactagaccttcagcaaactatacgaaatgatcaactgcaaacaaaacttcaactctcttcactcaacccttgcagaacaactaccagatggcgtccagacctatccttcatcactatgcatccaggttcaacctgagtacgacaagtaacagcaccacgaccaacaccactacaaacaccacccacagcaacaaccatctcgcgcctgttcccacatcaatggcacaatcttctagtagaccaagaggcagaactccgtccatgcctggtgaatttcccacatgggcggagagccctccaacacaacggtcgagatctcgaccctctccgctgtccgtaacctcggatgagacggaatcatcatatatactagcccctgctcagtccaacccgcccaaggggatcctcaaaaaattccaatggacgtcagaaccaagaagaccgacttgctgcacgattttacagagtgccacagcggacggatcaaatcaatcattcgcccacacctccccactcgcctggctacttcaccgatagcacatatcctgattatgatgagacagatactaactcggctgcatctgaactgtccattaatacccaggctacaagtgtggtatcagattacagcgatgcaaagcagaagagaccctcagtccagatcaaacatgctaggcctgtacacatgccgacgactgtcagcaaggtgaaggcacgtccaaaggctcgagctctaacagaggtagccaaggaactaccgccaaccaagcccaagcgaactatcaacatccagattgtgccacagcaagcctcacaatcaaaggagttgcagctggcgcgacctcctgatcgaagtcttgttcacaaacttgagcagctagagagtgacaccgaagatcttcgtcatgctcggaaccagcttacacgcagactggatgatgcatctgaggagctttccctcaagacgcacgagaacaaagagattgtgcgaacgctcaatcaggagaggagctctaaagatctcattttcagggagcttgaggaacaaagaaggcttttcgacgaataccggagcaattttgagcttcagagagtcttacttcttgaaacagagaaagaacgcgatgaactcaaaaaggctcagagcgaagctgagaagaagcttcttgattttgagatcagcatttctctaccagggaaacagaagaaagaggagcacgacaacctggaacttcaactcaaagacttacaaaccacaacacatactctcgaacaaaaggtggccataggcgagaagaaacttaaaaccatgacaacagaacgcgacgacctacaaacactatcgagcaattatatagatcagatcaatctcctgaagaacaccaatcaacaagctagcgagagtgacaaacaagccgttgatgcacgccaaaaagagcttcaatcgagcctcgatgggactcgcgaagagaatcggggcctccaagagacaatcaaaggtcttgaagaggcaatcaagggacttgaaggagagatcgtcgtgttcaaaacgcagatcacggagcttagagctggaaaagcaagcatggagaagatcttggctgccgagcaagccaataaagaacagacgaagaagaatttacaagcagagaatgacaagctgcaaaaaacacttgacgatactagggatgaacttcgagagcagctacataccagcaaagaagagttcgagaagcaacttgaggacacccgagtcaacatggccacacaactagcagccagtgaggaggaattgttcaaacatctggagttgagcaaagcagagaaggacgagttgcaacagaagatcagggctagtgaagcttccaagtcacaggtcgagggacagctacaagccaccaaggaagatctcgccctagcaatcgcatctgccaagacggagatggacaaattacaggcggaatttcaagcggattcgagtgacaagcaatctaggatcgatggactggtgaccgaagtcgccggttctaagaaggctaatctctctcttgcatcacagcgactagaactagagcgcaaagttgcggaagttagcgtcacactggccaccgttcaaacggagctcggcactctacgcgatacgtacaacactgtgcaggcagacaacgagcagctcaaggcacagtccgccgagctcaattctagagctgcagatctcgagaagctccggtccgagcatgcagatctcaacgagaagtctaagagcttacaaattgatctcgataaggctcaggcagaccaagccatgcttcaggccgaaaaagataagctcgagacccttgccaaggaacttgaagctggttcacctgcgctcctcaggctcaacgaagaaaagttgacgctcgaacggcagcttgacaaagcaaggattgatctgcagagcgaggcagacaagatctccgtgctcgagaagttcagtgcggatctcgaggcgcgacttgcaattctactagggggagagcggcgggctcaagagcgagaacgagagacttacggtgcaactacgcgagttgcaaacgaactcccgtctcgcgccacgctcccccagccgcagtagctcccgggctccaagcaaggacaaaagacatggacgctcaccttctagtagcttcgtttttgtgcgtagtccaactgatcgcggaggtggagtgtttatcaccacgagagaggcactggccaaagagaaagaaggataaagaatgatgggaaatcaggcagccgaagaagctcgagaggtctgcgatggagtttctgcatggccgattgacgataaatgactaacaattatgatgacgatactgtgttcgcgtcatgtagcacacaggcaagagggcacgtgatgatccttccttttgtaactctttttcctgggctgttttcttttcgttttagtcattggatactcatgttcgatcaatttattattattcattgctcgggtcgtacatgtattgagatggaaaatgtaaaggaagattggaaaatgtggccacgatcagtctcacatacatgtatgcgtttagtccactttctcgatgttcttccctttcttaacatacttgtcgttgcgcgcaagacttattccgtcgccgcacagagtcaaatgatgttgtatcttgtccggttctagacgcgggagttgcaccgctttcgggtgatacggatagattacgcgcttggatcctcagcaatgagataaagcagacgcagtgcgcacaagcgattgttctgattgtagcgagcataggtttcatctttctctcattgccagtcgtcggggattagctaggaacacggaaaagcatgacatagaaactcaatagacacactaaaaacattggaatgtcaaagtcttgtttaccacaatctctacaacatcctcttccccacggccgtgactgcgctagattagacggcattgaacggagtgtccagcgtgctgcatgcaaggaaaaatatagcgccatgtggacagcgtggcagcaaagccggaaatcgagaagcatcccacatgaatatcaaccttcgctaccaagctaccaagacaccatctgcagcttccgaatgcctatgatacaggcgagccaggcacgaatactacatggctgacctaactgcatccagtacagtcgcgagccaataagaatgcttgtatgccgccgaatgcggtaagctaccttctcccggccagatgcggtacggcag

SEQ ID NO: 2841 - DNA, 1863 bp, Muscodor strobelii
  misc_feature: SGI cDNA ID NO. 560591
  misc_feature: Encodes the peptide sequence at SEQ ID NO 2842
atgcacgtcaacgccatgatcgcggacgccgagaggaccggccagccgtccttctctttcgagtatttcccgcccaagacagcccagggtgtgcagaacctatacgaccgcatggagcgaatgtacgacttcgggcccaagttcatcgacatcacctggggcgctggaggccgcatcgccgagctcacctgcgacatggtcttgcaggctcagacatttctcggtctcgagacctgcatgcatctgacctgcacagatatgggcgaggataaggtcaatgacgcgctgcagagagcttacaaggccggttgcacaaacatcttggctctgcgcggtgatccgcccagagagcaagaaaagtgggaggctacagagggcggcttccaatacgcgagagatctcgtcgctcatatccgcaagaagtacggcaaccacttctccatcggcgttgctggatatcccgagggctgtgacgacaacaaggacgaagagtcattgctcgaccacttgaaggagaaggttgacatgggcggcagcttcattgtcacgcagatgttttatgatgccgataactttgtgcggtgggtaggaaaggtccgagaacgaggcatcaatgtccccatcatccccggtatcatgcccatcgccacctatgccagcttcatacgacgggccaaccatatgaactgcaagatccccgatgagtggatggcagtgctggacccaatcaagaacgacgatgccgcggtccgagacgctggcaagactctggtggccaacctgtgccgtaagatcatgactgccggtattgcccatctgcacttttacaccatgaatcttgccaacgcaacgcgcatggtcctggaggaactagactggacgcccagctctatggccccacgccagcaaaacctcccttggaaacaatctctcggcctcaggcgccgcgacgaagatgtgcgtccgatcttttggagaaatcgcaacaagtcgtacatctcaagaacattggaatgggacgagtttccgaacggtagatggggtgattctcggtctccggcctttggtgagctggacgcatatggtattggactcaccggaacgaacgattccaaccgcaagaaatggggtgagccaagttctatcaaagacgtatcgaatattttcgtccgctacctcaagggtgaactagactcactcccgtggagcgaagcaccaatggctaccgagtccaatccgattaaagatgctctcatcgagttgaattcgcgcggtcttctcactatcaactctcagcctgcagtgaatggcctcaaatccactgatcctacccatggttgggggccgccaaatggttacgtctaccagaaggcgtacctagagctattggtacacccctctctatttgatgaggtaatccgcagaattgaaggcaacgatgatctgtcatactacgccgtccaccaatcaggaacgttttcatcgaacgctccttcagaggggccgaacgctgtcacatggggagtgttccctggcaaagaaattgtacaacccaccattgtggaaagcgtaagtttccttgcatggaaggatgaagccttccgacttggaatcgactgggcacattgtcacgacgcaaacagccccagtcgcatcttaatcgagtctatgatgaacgactgggctctcatcaacatagtcaacaacgatttccacgactcgaagaccatctttgatctatttgacgggttggcaatcaaagatttcgacgtcccagtctctgcaccgcggacgaatggcgtcaatggaactcaccaccagactaacggtgtaactacaaacggcgtggccacagcacactaa

SEQ ID NO: 2842 - protein, 620 aa, Muscodor strobelii
  misc_feature: SGI Peptide ID NO. 560591
  misc_feature (6)..(292): Pfam Id: PF02219 Pfam Desc: Methylenetetrahydrofolate reductase
  misc_feature (16)..(584): NCBI GI: 50545621 Blast Desc: YALI0B00572p [Yarrowia lipolytica] gi|49646215|emb|CAG82563.1| YALI0B00572p [Yarrowia lipolytica]
  misc_feature (7)..(581): NCBI GI: 71021057 Blast Desc: UM04612.1 [Ustilago maydis 521] gi|46100189|gb|EAK85422.1| UM04612.1 [Ustilago maydis 521]
  misc_feature (1)..(581): NCBI GI: 170087860 Blast Desc: [Laccaria bicolor S238N-H82] gi|164650353|gb|EDR14594.1| [Laccaria bicolor S238N-H82]
  misc_feature (1)..(619): NCBI GI: 116196022 Blast Desc: conserved [Chaetomium globosum CBS 148.51] gi|88180522|gb|EAQ87990.1| conserved [Chaetomium globosum CBS 148.51]
  misc_feature (1)..(615): NCBI GI: 256727013 Blast Desc: [Nectria haematococca mpVI 77-13-4]
  misc_feature (1)..(617): NCBI GI: 46136113 Blast Desc: FG09572.1 [Gibberella zeae PH-1]
  misc_feature (1)..(608): NCBI GI: 171690602 Blast Desc: protein product [Podospora anserina] gi|170945249|emb|CAP71360.1| protein product [Podospora anserina]
  misc_feature (1)..(611): NCBI GI: 85104388 Blast Desc: methylenetetrahydrofolate reductase 1 [Neurospora crassa OR74A] gi|28923286|gb|EAA32493.1| methylenetetrahydrofolate reductase 1 [Neurospora crassa OR74A]
  misc_feature (6)..(619): NCBI GI: 145613335 Blast Desc: MGG_01728 [Magnaporthe grisea 70-15] gi|145020428|gb|EDK04557.1| MGG_01728 [Magnaporthe grisea 70-15]
  misc_feature (1)..(619): NCBI GI: 238839741 Blast Desc: methylenetetrahydrofolate reductase 1 [Microsporum canis CBS 113480]
  misc_feature (17)..(589): SWISSPROT Homolog: EC 1.5.1.20 Methylenetetrahydrofolate reductase (NAD(P)H)
MHVNAMIADAERTGQPSFSFEYFPPKTAQGVQNLYDRMERMYDFGPKFIDITWGAGGRIAELTCDMVLQAQTFLGLETCMHLTCTDMGEDKVNDALQRAYKAGCTNILALRGDPPREQEKWEATEGGFQYARDLVAHIRKKYGNHFSIGVAGYPEGCDDNKDEESLLDHLKEKVDMGGSFIVTQMFYDADNFVRWVGKVRERGINVPIIPGIMPIATYASFIRRANHMNCKIPDEWMAVLDPIKNDDAAVRDAGKTLVANLCRKIMTAGIAHLHFYTMNLANATRMVLEELDWTPSSMAPRQQNLPWKQSLGLRRRDEDVRPIFWRNRNKSYISRTLEWDEFPNGRWGDSRSPAFGELDAYGIGLTGTNDSNRKKWGEPSSIKDVSNIFVRYLKGELDSLPWSEAPMATESNPIKDALIELNSRGLLTINSQPAVNGLKSTDPTHGWGPPNGYVYQKAYLELLVHPSLFDEVIRRIEGNDDLSYYAVHQSGTFSSNAPSEGPNAVTWGVFPGKEIVQPTIVESVSFLAWKDEAFRLGIDWAHCHDANSPSRILIESMMNDWALINIVNNDFHDSKTIFDLFDGLAIKDFDVPVSAPRTNGVNGTHHQTNGVTTNGVATAH

SEQ ID NO: 2843 - DNA, 3052 bp, Muscodor strobelii
  misc_feature: SGI EST ID NO. CUFF.7103.0
  misc_feature: Variant of the nucleotide sequence at SEQ ID NO 2841
caaaaacccgtgatgactgcaacagactaccagtaccttaaccttgaggatgtctcccttgcctttttgatgtgcatatcaacccattgaacttcctccattcgcacgtcgaatctggctgggctagaataataataattccaacttcctcccttcctttccccttcctactctcctccacctcacttcccgtcacccccatctactccgtgcattgtgaccccagctccgtgccaccatccctccgtggttccggtgctcggctttcttcccttcgttaactgttcaccctccgcggaccacctcgaggataacccaattggctgggatcctacctaaggagcttcctgcctttcatacctgatcgttcatatgacgattggggtccgctaggtgtcttaccgagttgaaccccctccgaatgctccctcatcgcattctatagccctcctacttagacaccgccgccaagatgcacgtcaacgccatgatcgcggacgccgagaggaccggccagccgtccttctctttcgagtatttcccgcccaagacagcccagggtgtgcagaacctatacgaccgcatggagcgaatgtacgacttcgggcccaagttcatcgacatcacctggggcgctggaggccgcatcgccgagctcacctgcgacatggtcttgcaggctcagacatttctcggtctcgagacctgcatgcatctgacctgcacagatatgggcgaggataaggtcaatgacgcgctgcagagagcttacaaggccggttgcacaaacatcttggctctgcgcggtgatccgcccagagagcaagaaaagtgggaggctacagagggcggcttccaatacgcgagagatctcgtcgctcatatccgcaagaagtacggcaaccacttctccatcggcgttgctggatatcccgagggctgtgacgacaacaaggacgaagagtcattgctcgaccacttgaaggagaaggttgacatgggcggcagcttcattgtcacgcagatgttttatgatgccgataactttgtgcggtgggtaggaaaggtccgagaacgaggcatcaatgtccccatcatccccggtatcatgcccatcgccacctatgccagcttcatacgacgggccaaccatatgaactgcaagatccccgatgagtggatggcagtgctggacccaatcaagaacgacgatgccgcggtccgagacgctggcaagactctggtggccaacctgtgccgtaagatcatgactgccggtattgcccatctgcacttttacaccatgaatcttgccaacgcaacgcgcatggtcctggaggaactagactggacgcccagctctatggccccacgccagcaaaacctcccttggaaacaatctctcggcctcaggcgccgcgacgaagatgtgcgtccgatcttttggagaaatcgcaacaagtcgtacatctcaagaacattggaatgggacgagtttccgaacggtagatggggtgattctcggtctccggcctttggtgagctggacgcatatggtattggactcaccggaacgaacgattccaaccgcaagaaatggggtgagccaagttctatcaaagacgtatcgaatattttcgtccgctacctcaagggtgaactagactcactcccgtggagcgaagcaccaatggctaccgagtccaatccgattaaagatgctctcatcgagttgaattcgcgcggtcttctcactatcaactctcagcctgcagtgaatggcctcaaatccactgatcctacccatggttgggggccgccaaatggttacgtctaccagaaggcgtacctagagctattggtacacccctctctatttgatgaggtaatccgcagaattgaaggcaacgatgatctgtcatactacgccgtccaccaatcaggaacgttttcatcgaacgctccttcagaggggccgaacgctgtcacatggggagtgttccctggcaaagaaattgtacaacccaccattgtggaaagcgtaagtttccttgcatggaaggatgaagccttccgacttggaatcgactgggcacattgtcacgacgcaaacagccccagtcgcatcttaatcgagtctatgatgaacgactgggctctcatcaacatagtcaacaacgatttccacgactcgaagaccatctttgatctatttgacgggttggcaatcaaagatttcgacgtcccagtctctgcaccgcggacgaatggcgtcaatggaactcaccaccagactaacggtgtaactacaaacggcgtggccacagcacactaaacttgcattacgaatttaacgacacggcgtatctgtaaattgtacattttcaacaagcataaggctacaacaggccgacaggtgttttactgaattcaacaagcatgtacttagaggcgtttaggattttcaacaaaagggtttcgggtacagcgggcagatcgaattggcggggacaatactctcagggatgagggcaaaatgaggttaaaaggctgcatcaaatatctcaacgatacgatacccggaacaaatgaggcatggtgttttttgctttttttgtggtggcgaaacaccaataggattgaggcgagtgaggtggaacaagacaacgacagacctcaaccgtctgtaggcgagagtgggggacatatcccagtgcgcattggcttctctaaaaggcaagaaatcttgagcattggaatcaaatagtcagagttgcggcacttgatgaacgcaggacgcagtttacgtgacaagaatataaaaaacctgtcgtggaaacctgctaccacacatctgaacttttcttttttcctcgagagtgcatcggttatgacgtgtcactcaatgtgatccaggttaaacagcgattgatatctgacaccggcataacttctctaaaacttgcgaccctctcctatgagattgatagcgaggcccttagttgcaagaattgctgccattaatacgagttcgaggcgaagcttgtggtaa

SEQ ID NO: 2844 - DNA, 1149 bp, Muscodor strobelii
  misc_feature: SGI cDNA ID NO. 560592
  misc_feature: Encodes the peptide sequence at SEQ ID NO 2845
atgtttgctatcagatcagtgctcatgacctattcgacggtggagcacggtatctggcttgtgagagatttgcctttcactggacgagccaagcgcaattcgctaagtcagctcgccgacgacatcgaggtgcagcgtattcacaaacagccgccgtcactctctgttccagatatcaatgacgatgcagccgaacgggaacgtaagcggcagacggctagtcatggtcgatcccagagttcgactatcgcttctgagtcttgctcggaggataaagagcgccatctttcaacagacgcaaacacctcgcgatctgatgcacagcaccaagataatgagactgcactaccattattcccaggtggcacctccgcctctgggtacacgacggcgcaattgcctgatctgaatgatacgcggccttcagtttctgacatcttctcgggtgtggatgatgtctttgcaaatgcagaagtactcaactcgccttacattccatcttcgggagaatctagcagtatctcattgccattcttcgacgtaaattcgatgctgccaatatttggttcatcatctccagcgaccccttcgctctccgaggattccgacttgcccatttctgtggactcatactatcttcccatgaacgagatgactctcatgcgtggtcttcttcgcatagccaaccgtctgaattgtaacgcacaaacggcatgtataagccgcatctggaatctagaaacaacatcgccgtttgttgatggaacacagacggcattgacgatacaacaattacctccgacatggcagccaacgttttcacagcgctcaataccacatcaccctgtcatagatctctttccttggcctgctgttcgagatcgtatccttctattgctgagcctgccagatgaagctcgcccggcagttgcaactggccccttagctgtagtccaattggcctatgacctcgaagattcctcggaaggagctcggatttggggagacgaagtcacttcatgggagatcggccaggccctttttgaacgctggtggtttatatttgacaggaaagtcattgaacagagtaattactggcgaagaatgagaggcgcaccagcattgacgatgaaaagcgagcgatcatga

SEQ ID NO: 2845 - protein, 382 aa, Muscodor strobelii
  misc_feature: SGI Peptide ID NO. 560592
  misc_feature (45)..(378): NCBI GI: 256727012 Blast Desc: NECHADRAFT_33721 [Nectria haematococca mpVI 77-13-4]
  misc_feature (45)..(375): NCBI GI: 46136111 Blast Desc: FG09571.1 [Gibberella zeae PH-1]
  misc_feature (209)..(377): NCBI GI: 261199386 Blast Desc: conserved [Ajellomyces dermatitidis SLH14081] gi|239594302|gb|EEQ76883.1| conserved [Ajellomyces dermatitidis SLH14081]
  misc_feature (209)..(377): NCBI GI: 239615464 Blast Desc: conserved [Ajellomyces dermatitidis ER-3]
  misc_feature (209)..(377): NCBI GI: 226280711 Blast Desc: conserved [Paracoccidioides brasiliensis Pb01]
  misc_feature (209)..(377): NCBI GI: 226286587 Blast Desc: conserved [Paracoccidioides brasiliensis Pb18]
  misc_feature (218)..(379): NCBI GI: 258565589 Blast Desc: [Uncinocarpus reesii 1704] gi|237907240|gb|EEP81641.1| [Uncinocarpus reesii 1704]
  misc_feature (209)..(379): NCBI GI: 225557605 Blast Desc: conserved [Ajellomyces capsulatus G186AR]
  misc_feature (218)..(379): NCBI GI: 119190013 Blast Desc: CIMG_05054 [Coccidioides immitis RS]
  misc_feature (218)..(379): NCBI GI: 240111006 Blast Desc: CPC735_068410 [Coccidioides posadasii C735 delta SOWgp]
MFAIRSVLMTYSTVEHGIWLVRDLPFTGRAKRNSLSQLADDIEVQRIHKQPPSLSVPDINDDAAERERKRQTASHGRSQSSTIASESCSEDKERHLSTDANTSRSDAQHQDNETALPLFPGGTSASGYTTAQLPDLNDTRPSVSDIFSGVDDVFANAEVLNSPYIPSSGESSSISLPFFDVNSMLPIFGSSSPATPSLSEDSDLPISVDSYYLPMNEMTLMRGLLRIANRLNCNAQTACISRIWNLETTSPFVDGTQTALTIQQLPPTWQPTFSQRSIPHHPVIDLFPWPAVRDRILLLLSLPDEARPAVATGPLAVVQLAYDLEDSSEGARIWGDEVTSWEIGQALFERWWFIFDRKVIEQSNYWRRMRGAPALTMKSERS

SEQ ID NO: 2846 - DNA, 1856 bp, Muscodor strobelii
  misc_feature: SGI EST ID NO. CUFF.7115.0
  misc_feature: Variant of the nucleotide sequence at SEQ ID NO 2844
tgaactaatattcttaatgaaatagcatctggaatctagaaacaacatcgccgtttgttgatggaacacagacggcattgacgatacaacaattacctccgacatggcagccaacgttttcacagcgctcaataccacatcaccctgtcatagatctctttccttggcctgctgttcgagatcgtatccttctattgctgagcctgccagatgaagctcgcccggcagttgcaactggccccttagctgtagtccaattggcctatgacctcgaagattcctcggaaggagctcggatttggggaggtgacccatggtacgtaactaggatgttcatctaagactcttttgccaagactaacttctattgtagtaggcatagcttttattgctggcataatcctgctccccggcctatagatcctaggcatgctgtgtgagatagctgaactgacgtgccattatgaatagacgaagtcacttcatgggagatcggccaggccctttttgaacgctggtggtttatatttgacaggaaagtcattgaacagagtaattactggcgaagaatgagaggcgcaccagcattgacgatgaaaagcgagcgatcatgaggatcatctaccgtacgaatatcgacgctgcgtggctaaattattgcctaagtgcactatcccagggccacaggccgtagatgctcacgagcatacaatttgaagagcgatggaatgctctcgccctggcagttgagcggaacatcgcagcccccggggtacacttcgcatcgatctggctgaatagacagttctttcacgttccgaaaacggccatgaatgcagcagggagaattccttcgtaaggaactcgctcctcgaactgttggttgaagcgacgaagagtgaacaaagagtgaacgaacactgtcaatggttctcgcaatttgggcccattagactcgaggtcgtttcggcgtcaagctgcattattattccagaatctgctacgaaactgtgctttcgaccgcaatcacgccatgagccataaaacaacttagaaggcattatgtggtagagctagcaaaatgttaaggagaatagcaacggtgaagttggcgcggcttacatgagtgatagtgaaactgtattgaagtcaataaggtccttcatacccaacacgggtctatcacaaaagcgatatttaatttggtacgaagaaatggcctatttagcaggggaaataccggaaatattctagtttagccccgatacttgagaaggatgaagacatgagatggctttcggcgcttctaaacggaacgattgtcgaggactgtcaattgacgttagttgtgcatatagtctttgcccgaaagctgaactgtctcatctcgtgttattgccgaatagagcccgcttttcacttcagttcctatcctcttaaccccatcttgtaagatgtcagatgttctgcccaagaatcataagcaggctgcctgccaagccgtgaacgacgtacataagatattcaagcatagactaccacatctgaccttctgaccaaatgaaagctttaaagagtattaccgaaccttttgcggcagaacaataacgcccccggcactatgagaaatgtctgttgttatctttgaaccagacacatccatggaaacatagtaagttacttccccgatttgctcgaagagggctcttaagattcttttcgattcatagtcaacaacatacttgagcccatagtagtttctaagtagcaatataggcaagcaccaagttcgattctcttgtatttgcaaatttggccgtgccggagaggtatgatgtctgatgtatatatgccgt

SEQ ID NO: 2847 - DNA, 858 bp, Muscodor strobelii
  misc_feature: SGI cDNA ID NO. 560593
  misc_feature: Encodes the peptide sequence at SEQ ID NO 2848
atggcccaccaattgtggagtgaagctcccgagctcgccagcgcatctaattatccagaagtgtactatcctgtcgagcctccaggcacacaccaaaatgtgggatatcagctgcgtcaacagcatcacgaaaacaatccgtcttctggtatacccctcaagatgttcgatcaaacaacaattgcggacacgccgaaatccacatatcccacaagcacttccaattatacgttcgacggtcgatcaatggaccatatcctagcgacgcatgaacccccacgagaatcatcgagacgaatttgcggcgttcctttcttagtattcgtgctgtctacggctattgcagcattattggtagcaacggttgggcttgcggctggtaccggaatccagtcaaatcgtgcaaatgacgcagaagcgaagctagctcagttcatcgccaattctaccaccaaagcgatagatggaggttgttcggcagaccctagtgcagtttcaggaagcacttatacatcagactttaataataaaccgactttcaaaatttactgcaacaacgatgcaccaaaccccccattactctctttgttcgtcgccaacattcaggattgtatggacgcatgtggattttactcgtcttacattcccggcaatttcccaaaagctccgaacaattctaattccacgtgttctggaataagtttcattccaaattggacaaatcggacatatgcacaggaacatgctggaaacgcccctggcaattgttatttgaaacctggaccgcaaaacacgaccgctttgacatcagcgagtgggactgacgccgtccatgccgcgatccttgcaacaagctga

SEQ ID NO: 2848 - protein, 285 aa, Muscodor strobelii
  misc_feature: SGI Peptide ID NO. 560593
  misc_feature (94)..(282): NCBI GI: 39952173 Blast Desc: MGG_01729 [Magnaporthe grisea 70-15] gi|145020426|gb|EDK04555.1| MGG_01729 [Magnaporthe grisea 70-15]
  misc_feature (13)..(281): NCBI GI: 85104713 Blast Desc: NCU05256 [Neurospora crassa OR74A] gi|28923367|gb|EAA32557.1| [Neurospora crassa OR74A]
  misc_feature (94)..(282): NCBI GI: 256730164 Blast Desc: NECHADRAFT_82880 [Nectria haematococca mpVI 77-13-4]
  misc_feature (95)..(282): NCBI GI: 116196348 Blast Desc: CHGG_04772 [Chaetomium globosum CBS 148.51] gi|88180685|gb|EAQ88153.1| CHGG_04772 [Chaetomium globosum CBS 148.51]
  misc_feature (51)..(282): NCBI GI: 171690310 Blast Desc: protein product [Podospora anserina] gi|170945103|emb|CAP71214.1| protein product [Podospora anserina]
  misc_feature (66)..(282): NCBI GI: 116203223 Blast Desc: [Chaetomium globosum CBS 148.51] gi|88178014|gb|EAQ85482.1| [Chaetomium globosum CBS 148.51]
  misc_feature (154)..(282): NCBI GI: 170940286 Blast Desc: protein product [Podospora anserina]
  misc_feature (180)..(259): NCBI GI: 169623887 Blast Desc: SNOG_15190 [Phaeosphaeria nodorum SN15] gi|160705064|gb|EAT77415.2| SNOG_15190 [Phaeosphaeria nodorum SN15]
  misc_feature (150)..(268): NCBI GI: 169611775 Blast Desc: SNOG_09002 [Phaeosphaeria nodorum SN15] gi|111062074|gb|EAT83194.1| SNOG_09002 [Phaeosphaeria nodorum SN15]
MAHQLWSEAPELASASNYPEVYYPVEPPGTHQNVGYQLRQQHHENNPSSGIPLKMFDQTTIADTPKSTYPTSTSNYTFDGRSMDHILATHEPPRESSRRICGVPFLVFVLSTAIAALLVATVGLAAGTGIQSNRANDAEAKLAQFIANSTTKAIDGGCSADPSAVSGSTYTSDFNNKPTFKIYCNNDAPNPPLLSLFVANIQDCMDACGFYSSYIPGNFPKAPNNSNSTCSGISFIPNWTNRTYAQEHAGNAPGNCYLKPGPQNTTALTSASGTDAVHAAILATS

SEQ ID NO: 2849 - DNA, 1472 bp, Muscodor strobelii
  misc_feature: SGI EST ID NO. CUFF.7092.0
  misc_feature: Variant of the nucleotide sequence at SEQ ID NO 2847
aagactttcaaacacgaatctcttttcggtaccacacttagcctatcatctcttgaatcatctgctacaagtcctactcgacgtgccttgggaaatactggcgaatccttctctttcacaacatttatcggtattactccccagccctatcgtcagcactggagagcatctcgacatctcaagtttatcaactctctacatctcctctaactgatattgattcctctctacacacatctgggcttctcatcactgtagggcaaaatggcccaccaattgtggagtgaagctcccgagctcgccagcgcatctaattatccagaagtgtactatcctgtcgagcctccaggcacacaccaaaatgtgggatatcagctgcgtcaacagcatcacgaaaacaatccgtcttctggtatacccctcaagatgttcgatcaaacaacaattgcggacacgccgaaatccacatatcccacaagcacttccaattatacgttcgacggtcgatcaatggaccatatcctagcgacgcatgaacccccacgagaatcatcgagacgaatttgcggcgttcctttcttagtattcgtgctgtctacggctattgcagcattattggtagcaacggttgggcttgcggctggtaccggaatccagtcaaatcgtgcaaatgacgcagaagcgaagctagctcagttcatcgccaattctaccaccaaagcgatagatggaggttgttcggcagaccctagtgcagtttcaggaagcacttatacatcagactttaataataaaccgactttcaaaatttactgcaacaacgatgcaccaaaccccccattactctctttgttcgtcgccaacattcaggattgtatggacgcatgtggattttactcgtcttacattcccggcaatttcccaaaagctccgaacaattctaattccacgtgttctggaataagtttcattccaaattggacaaatcggacatatgcacaggaacatgctggaaacgcccctggcaattgttatttgaaacctggaccgcaaaacacgaccgctttgacatcagcgagtgggactgacgccgtccatgccgcgatccttgcaacaagctgatgtcaacatttaactcgaaagcaccgatgtgcaaatattattaattaaacatgtaccattatgggatatacccaatcacgattgaaacgataccatttatgaggtgctctactatgtagcacctacaagctgtcggtccgataacctgtatataatattcatcggctttgacctagataggatagacatggggactcaggttaattgtgtcgtcaatgagacttgaaaccaacataattgacccaggcttttactcgtgctcaattcttcaagtatgatatatgagaccttgtatgtatatgcaggactttgaagagtgttcattcaagcccgcgaacacctgccccaaa

SEQ ID NO: 2850 - DNA, 429 bp, Muscodor strobelii
  misc_feature: SGI cDNA ID NO. 560594
  misc_feature: Encodes the peptide sequence at SEQ ID NO 2851
atgagctcggaagcccggctcttcaccttcagccaggagacgaaagaccagctgcgcaggttccgcctcgggacttccagagccagcggtccgcaagccgtcatctacatgatcgacaagaagacacatgagatccgccaagatgacgacaaagtaacctacaaatccctcgaggagatcgcagaggacttgcccgacaactcgccgcggtacatcttactaagctatcccctaactcttccgtctggtcgtctgtcggttccctacgtgctgctgtactacctgcccaccacgtgcaacgccgagagccgaatgatgtatgccggcgctaaagagctgatgcggaatacgagcgaggtcggtagggtgattgatattgagagtgctgaggatttagaggatatccctaagaaactcggtgctgagtga

SEQ ID NO: 2851 - protein, 142 aa, Muscodor strobelii
  misc_feature: SGI Peptide ID NO. 560594
  misc_feature (12)..(140): Pfam Id: PF00241 Pfam Desc: Cofilin/tropomyosin-type actin-binding protein
  misc_feature (1)..(141): NCBI GI: 145603278 Blast Desc: MGG_06152 [Magnaporthe grisea 70-15] gi|145011541|gb|EDJ96197.1| MGG_06152 [Magnaporthe grisea 70-15]
  misc_feature (2)..(141): NCBI GI: 164423297 Blast Desc: NCU10777 [Neurospora crassa OR74A] gi|157070033|gb|EDO64952.1| conserved [Neurospora crassa OR74A]
  misc_feature (1)..(142): NCBI GI: 46136519 Blast Desc: FG09775.1 [Gibberella zeae PH-1]
  misc_feature (1)..(139): NCBI GI: 256727534 Blast Desc: [Nectria haematococca mpVI 77-13-4]
  misc_feature (1)..(140): NCBI GI: 213515032 Blast Desc: YDR063W [Salmo salar] gi|209731888|gb|ACI66813.1| YDR063W [Salmo salar]
  misc_feature (5)..(141): NCBI GI: 171683537 Blast Desc: protein product [Podospora anserina] gi|170941728|emb|CAP67382.1| protein product [Podospora anserina]
  misc_feature (1)..(139): NCBI GI: 156049519 Blast Desc: SS1G_08466 [Sclerotinia sclerotiorum 1980] gi|154692865|gb|EDN92603.1| SS1G_08466 [Sclerotinia sclerotiorum 1980]
  misc_feature (2)..(139): NCBI GI: 169621536 Blast Desc: SNOG_13978 [Phaeosphaeria nodorum SN15] gi|160704278|gb|EAT78603.2| SNOG_13978 [Phaeosphaeria nodorum SN15]
  misc_feature (3)..(142): NCBI GI: 119192548 Blast Desc: CIMG_00651 [Coccidioides immitis RS]
  misc_feature (3)..(142): NCBI GI: 239611968 Blast Desc: GMF family protein [Ajellomyces dermatitidis ER-3]
MSSEARLFTFSQETKDQLRRFRLGTSRASGPQAVIYMIDKKTHEIRQDDDKVTYKSLEEIAEDLPDNSPRYILLSYPLTLPSGRLSVPYVLLYYLPTTCNAESRMMYAGAKELMRNTSEVGRVIDIESAEDLEDIPKKLGAE

SEQ ID NO: 2852 - DNA, 2233 bp, Muscodor strobelii
  misc_feature: SGI EST ID NO. CUFF.7128.1
  misc_feature: Variant of the nucleotide sequence at SEQ ID NO 2850
atcttcgcaatcctaaccgtctctcccacctacacactctctcaagcccggccgataaactgttgcacgtttgacctaattctatatagaatatattcatattaattctcctacctaactcctcgcatacactcgctccgtcaagatgagctcggaagcccggctcttcaccttcagccaggagacgaaagaccagctgcgcaggttccgcctcgggacttccagagccagcggtccgcaagccgtcatctacatgatcgacaagaagacacatgagatccgccaagatgacgacaaagtaacctacaaatccctcgaggagatcgcagaggacttgcccgacaactcgccgcggtacatcttactaagctatcccctaactcttccgtctggtcgtctgtcggttccctacgtgctgctgtactacctgcccaccacgtgcaacgccgagagccgaatgatgtatgccggcgctaaagagctgatgcggaatacgagcgaggtcggtagggtgattgatattgagagtgctgaggatttagaggatatccctaagaaactcggtgctgagtgaagattgagattgtcgccgggagtcgggccatgcgatattgccatctgctgcttttctaacttgggcaaggcataaatagttgatcgcaaatgactatgccgccaggaagaatatcagatgaattcaggatttgatcaatgatcgttgattttacttttcttcttcttctaattacatatgcgtagtatctagtcccccaacgatacctcctcacccagttgtgacgctaaacccctaacaacacctttaagagccttacacgcagggctatcgggataatgatcaaagaagctttctccataatcgcaagccatccctatcctcggatcgaggggcacctcccccaggaaggggatgcccatctctttggccaatgcagcaccgccgcccgtcgtaggcttgaatatctgactctcgttcgtgcacttcggacacacgaacccactcatattttccacgagacctaggactttaatcccggccttcctgcagaagtcgatctccttcctgacgtcgaggagtgatacctcctgtggcgtggtaaccatgatggcgccgtctataccgctttctttcaagaaactattaacgctgagatgttcatcgctagtccccggtggggtgtctactaataaaaagtccatctcgccccattcgacttccttcagaaacttcttgatgaggccgttcttcttgggcccacgccagattacggcgtcgtcccggttgggcagcatgaactggatgctcatgacgcctaagttgtcagcgacccagacgggcgataggccggtgttgctgatgtggatcctctcgtcctcgacgcccatcatttttgggatactcggcccgcatatgtcagtgtccatgatccccaccgtgcggttttcgtcggtggcaaaggcgtgggataggagggaggtgaaggtgctcttgccgacgccgcccttgccggagaggatgaggatcttgtggcggatggcggcgaggcgggcagtgatgacggggatgtcgggatcggggccttttggggcggatgcgcaaatggcttggttgggacagccagcgcaggagtcggcggtgccggcagcttcggattcggggccggggcagtgttcgggctccggggcgacgagctcggggcgggcttttagagggttggcgatgacatcctcgacgcgctcgggctcctcgagggagggcgccatggtctctgtcgctgtctcgttgcggtgaggtatgaccgtagatgcagatattggcgtgtattaccaggtgtggatacggtcggccttgacgcctcgtatgaggagagtagtggaagtcaagtaacagggtgatgggaagtctgcttaacaatcatatgtgggtggatggatattcaatatgtgggcttgggaaaatggaaatgtgatgaccaaatgcagagtaacgggtttgatattgtgctgtctattcgtttgtaaatcgagtgcgtgcttatactcggatactctctcttcacgttaccttgcaaattacagattaagatttggagagttcagatggtaaatatgtagaactacatgcgacgatgcgaccaaaaaggatccgttgtcggcacggcacggcggttgaaaatcaaagcggatgttggcagattggatatgaatggtgggg

SEQ ID NO: 2853 - DNA, 4098 bp, Muscodor strobelii
  misc_feature: SGI cDNA ID NO. 560595
  misc_feature: Encodes the peptide sequence at SEQ ID NO 2854
atgcccactatccacgaggacgaagtaatggatttcatcaactgggatgctgccggagccagcatagcttctgacattcctgtcaattcgaagggcgaggaaaacattgccaatatcgccgaagcacctttcgctacacttccaacggaagatcccagtatggatcttgcttttggtgatgtcgaaggagacgattggtcgtactgggcccttcaacacttcgagtcttctcaattgcagcaaaatcttgatgcacaagcatcagaaaccgtccagcctattgccacccagatgtactgggagtcacccgaagttccttgcaccaattgctctttaggaggctactcatgcaaaaggattcgggaaggtaaatataagggttattgtactagctgcgtggcactccggcgagggtgtagttttggtcccgccacgaacaatctttcctccgaagctggcgaaacattcccggcgaatccatggcctatgatgggcgataggccggaaacatcgattctgcacgaggatgacctcggggcgatggtcgagccacgacctttgtcaaaccctgcagtagcaacgatggaagaaagttctgcttcagcacatacccagttggcacccaagattggtgctcggttctcccgcgagtccgtcaaagtcctgaagaactggcttaacacgcatagtcgccacccatatccaacagatgaggagaaagaaagtctacagaaagttactggactaaacaagacacaaatcacaaactggttggcaaatgctcgaagacggggaaagatacagcctacccgggcaacatccccgcacatcggtcgaggatacgcacaggctattgacattccgcaacggagaggctctggcctattcgagaacatgaatccgctccagcgttgggagaactcgccaccggaaaacgaaccggcatcggttagggatattgcccgtgccgtctctgcgtccggttcatattcggcaacatctggctctggacgaaacagccctaacgtgtggaatacatcagatgatggctctaaccggtctctttgtaaccagtcatctgctagtagtttgggaacttcacattcgagtggtggctcttatgcctctgcgtattccaaccagtctcatggctcttcagtaccatcatttgtccgaagcaacaggggccgccgcagacggagacgagcacctccgaagcgggccgaagaccaactgggccagctagttaaaacttatcagtgcactttctgtactgagacatttaggacaaagcatgactggcagcgccatgaaaaatccttgcatctatcacttgagcggtggatctgctcaccggatggacccagagttgtcaatgccgaaaatggagggaaaagttgcgtattttgtggtgaagcaaaccctgacgaggcacatgtcgagtcacacaacttctcaggctgtatagaacgttcgcaagaggaaagaacattctacagaaaagatcatctacgacagcatctacgactagtacaccaagtcaaatttcttccctggacaatggacaagtggcgcatatcatctcctgagattcgctcaaggtgtggtttctgtgggactgtgcttgatagttggacgatccgcactgatcatcttgccgaacatttcaagactggtaataccatggctgactggaaaggtgattggggtttcgaagccccagttttggagatggttgagaactctatacccccatacttgattcacgacgaaagacagtcgcctcatcccatccaagcatctcaaccgcctacatcgacaccgaccagtgcttatgatttgcttcaatatgaattacaatggtggattgcaaacaagcaggaagaagttggacacataccaactgatcatgatatccaacgagaagcctgtcgtataatttacggggctgaagtcatgctgaaaggcgttggcttgtcatctccctcttggctttgtgatttgatcatgtctaatcaggacgtgaagcgtcaagcagctttccatccccgcgctccgggggataattgtctgtcatctctacgcatcaatggtaaatctgatatatttgaaggctgcgaatttgaaagggaactccaagaatttgtccacgctcgtttattactcggcctgaccgcaatggaccacgaactgcaagatgaagcctgccgtattctaggacgaacagaggagaaatcaacccatccttccgacgaacttgctaattggttcattcgtatgattaatgcatcatcaaattggcttcaagatttccgacaacgcgctcatctcccacggagcgaggacgttggggattggtttaaaagatcgacagatccgacaactatagactctactattcataactatagtagacttgatgcggaactcggagattatttccaagcccaaaaggctttgggcatcgagccaacagatgccgagttacaagccaaagcgcgatacataatatacgaggtagatgacccgtggaatcaaacagctgcagacgatccccagtggctcatcaacttcaagcatagacagtcgtccgtagtgtctgtcccaacttcgactagagatcatttacgtaccatgggtcagtcaggaccagtcaccttagcgcaaccatccacatcggccaagggatcaccaacaagtagtggccgttcacccgcagggtccagcacgaattccatcaagtctagcgcgagcttcttacacgatgcaaactgttacagacgcctagctattgccctgaaccgctttgtattagcagccatgtcccccaataatcccaacagccatgttcctacggatgaagagatccaacaccaagcacggtggataatctacgacgacgacgatccttggaattacactgctgctgacaatgcagagtggctgcaacgattcaaagtcgacgtaggcatactccccgcaggatctggtcctggcttgggtgccactaaagtcgaatggaatctcaaagacggtggcacgggctttgcgccgccatatgttactccaaacccggcagcagttattgagccgttgcgcaagaacccacagatatatctccgtgacgaggcgaagccgttcgaatcagaagctagcactgcgaaccacttcttgcaaaacctgaccaagcgttatcccgctcccgctaagatattttgttcgagggaattagagcacgggctaacggaatttgttaagcgcgaagtacaaaccaagggtgtctttcctagcgatgacacgcttcaagagcgcgctcgcagcattatggcaatgcagaagacgccgtgcgatgacgcagtgcttctaggcaagttcaaagcatccctggggcagaatggattggcgaacgcgccagcgccagtgacaagcgactttgatttgagtttcttgtcgggtgtcccctttaccatgccgccggtttcaacggtaccggagacgacgctcgcgtcgcaattggcagtagacccgtcgttcctactacccacggaaaacagcttatcaacagatatggatcttgaccttaatttcaccgaacaagagctcaacgagattttgcaggatacaagttactcggataacataccgctagacctgacacaagcgcactcccagagctcggaagcccggctcttcaccttcagccaggagacgaaagaccagctgcgcaggttccgcctcgggacttccagagccagcggtccgcaagccgtcatctacatgatcgacaagaagacacatgagatccgccaagatgacgacaaagtaacctacaaatccctcgaggagatcgcagaggacttgcccgacaactcgccgcggtacatcttactaagctatcccctaactcttccgtctggtcgtctgtcggttccctacgtgctgctgtactacctgcccaccacgtgcaacgccgagagccgaatgatgtatgccggcgctaaagagctgatgcggaatacgagcgaggtcggtagggtgattgatattgagagtgctgaggatttagaggatatccctaagaaactcggtgctgagtga

SEQ ID NO: 2854 - protein, 1365 aa, Muscodor strobelii
  misc_feature: SGI Peptide ID NO. 560595
  misc_feature (419)..(442): Pfam Id: PF00096 Pfam Desc: Zinc finger, C2H2 type
  misc_feature (1235)..(1363): Pfam Id: PF00241 Pfam Desc: Cofilin/tropomyosin-type actin-binding protein
  misc_feature (7)..(1149): NCBI GI: 46136101 Blast Desc: FG09566.1 [Gibberella zeae PH-1]
  misc_feature (1)..(1126): NCBI GI: 85104716 Blast Desc: NCU05257 [Neurospora crassa OR74A] gi|28923368|gb|EAA32558.1| [Neurospora crassa OR74A]
  misc_feature (11)..(1127): NCBI GI: 261352319 Blast Desc: conserved [Verticillium albo-atrum VaMs.102]
  misc_feature (11)..(1160): NCBI GI: 145613331 Blast Desc: MGG_01730 [Magnaporthe grisea 70-15] gi|145020425|gb|EDK04554.1| MGG_01730 [Magnaporthe grisea 70-15]
  misc_feature (231)..(1125): NCBI GI: 116196350 Blast Desc: CHGG_04773 [Chaetomium globosum CBS 148.51] gi|88180686|gb|EAQ88154.1| CHGG_04773 [Chaetomium globosum CBS 148.51]
  misc_feature (107)..(1130): NCBI GI: 156061905 Blast Desc: SS1G_03098 [Sclerotinia sclerotiorum 1980] gi|154700499|gb|EDO00238.1| SS1G_03098 [Sclerotinia sclerotiorum 1980]
  misc_feature (1)..(1138): NCBI GI: 154311764 Blast Desc: BC1G_06341 [Botryotinia fuckeliana B05.10] gi|150850852|gb|EDN26045.1| BC1G_06341 [Botryotinia fuckeliana B05.10]
  misc_feature (1)..(967): NCBI GI: 171688628 Blast Desc: protein product [Podospora anserina] gi|170944276|emb|CAP70386.1| protein product [Podospora anserina]
  misc_feature (54)..(1127): NCBI GI: 256721107 Blast Desc: NECHADRAFT_97913 [Nectria haematococca mpVI 77-13-4]
  misc_feature (206)..(991): NCBI GI: 256727987 Blast Desc: NECHADRAFT_95238 [Nectria haematococca mpVI 77-13-4]
MPTIHEDEVMDFINWDAAGASIASDIPVNSKGEENIANIAEAPFATLPTEDPSMDLAFGDVEGDDWSYWALQHFESSQLQQNLDAQASETVQPIATQMYWESPEVPCTNCSLGGYSCKRIREGKYKGYCTSCVALRRGCSFGPATNNLSSEAGETFPANPWPMMGDRPETSILHEDDLGAMVEPRPLSNPAVATMEESSASAHTQLAPKIGARFSRESVKVLKNWLNTHSRHPYPTDEEKESLQKVTGLNKTQITNWLANARRRGKIQPTRATSPHIGRGYAQAIDIPQRRGSGLFENMNPLQRWENSPPENEPASVRDIARAVSASGSYSATSGSGRNSPNVWNTSDDGSNRSLCNQSSASSLGTSHSSGGSYASAYSNQSHGSSVPSFVRSNRGRRRRRRAPPKRAEDQLGQLVKTYQCTFCTETFRTKHDWQRHEKSLHLSLERWICSPDGPRVVNAENGGKSCVFCGEANPDEAHVESHNFSGCIERSQEERTFYRKDHLRQHLRLVHQVKFLPWTMDKWRISSPEIRSRCGFCGTVLDSWTIRTDHLAEHFKTGNTMADWKGDWGFEAPVLEMVENSIPPYLIHDERQSPHPIQASQPPTSTPTSAYDLLQYELQWWIANKQEEVGHIPTDHDIQREACRIIYGAEVMLKGVGLSSPSWLCDLIMSNQDVKRQAAFHPRAPGDNCLSSLRINGKSDIFEGCEFERELQEFVHARLLLGLTAMDHELQDEACRILGRTEEKSTHPSDELANWFIRMINASSNWLQDFRQRAHLPRSEDVGDWFKRSTDPTTIDSTIHNYSRLDAELGDYFQAQKALGIEPTDAELQAKARYIIYEVDDPWNQTAADDPQWLINFKHRQSSVVSVPTSTRDHLRTMGQSGPVTLAQPSTSAKGSPTSSGRSPAGSSTNSIKSSASFLHDANCYRRLAIALNRFVLAAMSPNNPNSHVPTDEEIQHQARWIIYDDDDPWNYTAADNAEWLQRFKVDVGILPAGSGPGLGATKVEWNLKDGGTGFAPPYVTPNPAAVIEPLRKNPQIYLRDEAKPFESEASTANHFLQNLTKRYPAPAKIFCSRELEHGLTEFVKREVQTKGVFPSDDTLQERARSIMAMQKTPCDDAVLLGKFKASLGQNGLANAPAPVTSDFDLSFLSGVPFTMPPVSTVPETTLASQLAVDPSFLLPTENSLSTDMDLDLNFTEQELNEILQDTSYSDNIPLDLTQAHSQSSEARLFTFSQETKDQLRRFRLGTSRASGPQAVIYMIDKKTHEIRQDDDKVTYKSLEEIAEDLPDNSPRYILLSYPLTLPSGRLSVPYVLLYYLPTTCNAESRMMYAGAKELMRNTSEVGRVIDIESAEDLEDIPKKLGAE

SEQ ID NO: 2855 - DNA, 5597 bp, Muscodor strobelii
  misc_feature: SGI EST ID NO. CUFF.7108.0
  misc_feature: Variant of the nucleotide sequence at SEQ ID NO 2853
cgacctcaaggacagcccgtatcacttaagtgaaggcgtatttgctacatataacaagatagataacatggcaaaatggcccagtgtcgcaacttaccttctttacctgcccgtactgtaattgtacatcagacggaaaagtgcagaacaaataatataagtatcatatttcatcatcctagcacaacgcagcaaaggcggcgtttggttctatgcctgttaataatcaggaccaggcaagtcattgtcgacactgagttcaacctcgctgtcgttatacgcggccctgcagccttagatgtaccgcgagaatgtacaccatactcaagatacatgtaatagcatcttgaattttgaatccacaagaactattgcgtattagtcctacgagaaacgaatcagcttcatcctgttattcatacattaccatggatggcacttcatagcaatgttcgattcccgtctagtttacgacttaattgatacttttcattgataaaaaagtgttgttggccagtaaacgagtgattggaccaaggagtaaatgtttgacattggctgcggaatatctgatcgcgaagcaatctaggtaaatgtcatctcgtcgagacccaaccaaaaccttctttagaaggagaacagcaagcactcatttagcactctcggacttaactatagtctaatgttagccctgcaatatcaaatctgcaatcagtttgatgattttacgaatgcatctgaaacacgcgaaagagatacagaacattatactcggtccggagtcaatatcatcaggtaatatcttaaaccaactccgagctacggagaaaagcgttgcccaatcggcaacggcgatacctagcttatcctatgactcttaacactaggtgacatttggagaatacgactaatgagcattatgagcctcacagtcgagcagtcaattatgtcgagaccattctgcctgtcaagatgtagagtcttacgcatacttaaagattttgtcgacaacctgcgcgttcaggaattggtcgtcgaagaggcgtcggtgatatcttctgggtagatgtttctggaaactgatgaggacgagtcaaggtaggtctagaatgccaagaatcagacacccgctagagttggatacgcccttcatgtcatcctaagggcgcaccatccccacaaatggccatcgtcatccctgcactatgtcaactgtctgcagctcgtccattgaccttcgcttgagacgcgtggagcagccgaacgcaagaatgactcctcgtctgacatctccagtctctgcagcctactctaccagccaggctagattgcagactcggtgggctgcagatcttcttataccccaatgccgataagtgtgcaggcaagttgaccgcttccaaaccataattaatcatcttgcatgagagttggttgtggatcatgacagactgtttttggaggatctattagaagtcgagacaccatcgcttacataccctttattattctcttccatctcagtatttctagtgatcctgctgtttcctccccgcttacgccctgtgcttgtcttgtgtatccacccgcccacccagttattgagagacctgtaatcaatcctataccacagtaggcgagggctgaccaaacggtcgtccattacgcccttcggtcaagatgcccactatccacgaggacgaagtaatggatttcatcaactgggatgctgccggagccagcatagcttctgacattcctgtcaattcgaagggcgaggaaaacattgccaatatcgccgaagcacctttcgctacacttccaacggaagatcccagtatggatcttgcttttggtgatgtcgaaggagacgattggtcgtactgggcccttcaacacttcgagtcttctcaattgcagcaaaatcttgatgcacaagcatcagaaaccgtccagcctattgccacccagatgtactgggagtcacccgaagttccttgcaccaattgctctttaggaggctactcatgcaaaaggattcgggaaggtaaatataagggttattgtactagctgcgtggcactccggcgagggtgtagttttggtcccgccacgaacaatctttcctccgaagctggcgaaacattcccggcgaatccatggcctatgatgggcgataggccggaaacatcgattctgcacgaggatgacctcggggcgatggtcgagccacgacctttgtcaaaccctgcagtagcaacgatggaagaaagttctgcttcagcacatacccagttggcacccaagattggtgctcggttctcccgcgagtccgtcaaagtcctgaagaactggcttaacacgcatagtcgccacccatatccaacagatgaggagaaagaaagtctacagaaagttactggactaaacaagacacaaatcacaaactggttggcaaatgctcgaagacggggaaagatacagcctacccgggcaacatccccgcacatcggtcgaggatacgcacaggctattgacattccgcaacggagaggctctggcctattcgagaacatgaatccgctccagcgttgggagaactcgccaccggaaaacgaaccggcatcggttagggatattgcccgtgccgtctctgcgtccggttcatattcggcaacatctggctctggacgaaacagccctaacgtgtggaatacatcagatgatggctctaaccggtctctttgtaaccagtcatctgctagtagtttgggaacttcacattcgagtggtggctcttatgcctctgcgtattccaaccagtctcatggctcttcagtaccatcatttgtccgaagcaacaggggccgccgcagacggagacgagcacctccgaagcgggccgaagaccaactgggccagctagttaaaacttatcagtgcactttctgtactgagacatttaggacaaagcatgactggcagcgccatgaaaaatccttgcatctatcacttgagcggtggatctgctcaccggatggacccagagttgtcaatgccgaaaatggagggaaaagttgcgtattttgtggtgaagcaaaccctgacgaggcacatgtcgagtcacacaacttctcaggctgtatagaacgttcgcaagaggaaagaacattctacagaaaagatcatctacgacagcatctacgactagtacaccaagtcaaatttcttccctggacaatggacaagtggcgcatatcatctcctgagattcgctcaaggtgtggtttctgtgggactgtgcttgatagttggacgatccgcactgatcatcttgccgaacatttcaagactggtaataccatggctgactggaaaggtgattggggtttcgaagccccagttttggagatggttgagaactctatacccccatacttgattcacgacgaaagacagtcgcctcatcccatccaagcatctcaaccgcctacatcgacaccgaccagtgcttatgatttgcttcaatatgaattacaatggtggattgcaaacaagcaggaagaagttggacacataccaactgatcatgatatccaacgagaagcctgtcgtataatttacggggctgaagtcatgctgaaaggcgttggcttgtcatctccctcttggctttgtgatttgatcatgtctaatcaggacgtgaagcgtcaagcagctttccatccccgcgctccgggggataattgtctgtcatctctacgcatcaatggtaaatctgatatatttgaaggctgcgaatttgaaagggaactccaagaatttgtccacgctcgtttattactcggcctgaccgcaatggaccacgaactgcaagatgaagcctgccgtattctaggacgaacagaggagaaatcaacccatccttccgacgaacttgctaattggttcattcgtatgattaatgcatcatcaaattggcttcaagatttccgacaacgcgctcatctcccacggagcgaggacgttggggattggtttaaaagatcgacagatccgacaactatagactctactattcataactatagtagacttgatgcggaactcggagattatttccaagcccaaaaggctttgggcatcgagccaacagatgccgagttacaagccaaagcgcgatacataatatacgaggtagatgacccgtggaatcaaacagctgcagacgatccccagtggctcatcaacttcaagcatagacagtcgtccgtagtgtctgtcccaacttcgactagagatcatttacgtaccatgggtcagtcaggaccagtcaccttagcgcaaccatccacatcggccaagggatcaccaacaagtagtggccgttcacccgcagggtccagcacgaattccatcaagtctagcgcgagcttcttacacgatgcaaactgttacagacgcctagctattgccctgaaccgctttgtattagcagccatgtcccccaataatcccaacagccatgttcctacggatgaagagatccaacaccaagcacggtggataatctacgacgacgacgatccttggaattacactgctgctgacaatgcagagtggctgcaacgattcaaagtcgacgtaggcatactccccgcaggatctggtcctggcttgggtgccactaaagtcgaatggaatctcaaagacggtggcacgggctttgcgccgccatatgttactccaaacccggcagcagttattgagccgttgcgcaagaacccacagatatatctccgtgacgaggcgaagccgttcgaatcagaagctagcactgcgaaccacttcttgcaaaacctgaccaagcgttatcccgctcccgctaagatattttgttcgagggaattagagcacgggctaacggaatttgttaagcgcgaagtacaaaccaagggtgtctttcctagcgatgacacgcttcaagagcgcgctcgcagcattatggcaatgcagaagacgccgtgcgatgacgcagtgcttctaggcaagttcaaagcatccctggggcagaatggattggcgaacgcgccagcgccagtgacaagcgactttgatttgagtttcttgtcgggtgtcccctttaccatgccgccggtttcaacggtaccggagacgacgctcgcgtcgcaattggcagtagacccgtcgttcctactacccacggaaaacagcttatcaacagatatggatcttgaccttaatttcaccgaacaagagctcaacgagattttgcaggatacaagttactcggataacataccgctagacctgacacaaggttcgtacgatcacttagctgatggttcgggaacgtcctcttgatcttattttatacccaaagatgtcgagatagttgcttcgctggatgcgagacgggaggagtggcggtactcttaactccatgtatgtctattgacccatggacgggcttcgctgaaacaataatgcctataatccctacgtaaagcaaaggcagagacggatcgtgaatatataggtaattaagtgaaaaataataccactcttcatttaaa

SEQ ID NO: 2856 - DNA, 1020 bp, Muscodor strobelii
  misc_feature: SGI cDNA ID NO. 560596
  misc_feature: Encodes the peptide sequence at SEQ ID NO 2857
atggcgccctccctcgaggagcccgagcgcgtcgaggatgtcatcgccaaccctctaaaagcccgccccgagctcgtcgccccggagcccgaacactgccccggccccgaatccgaagctgccggcaccgccgactcctgcgctggctgtcccaaccaagccatttgcgcatccgccccaaaaggccccgatcccgacatccccgtcatcactgcccgcctcgccgccatccgccacaagatcctcatcctctccggcaagggcggcgtcggcaagagcaccttcacctccctcctatcccacgcctttgccaccgacgaaaaccgcacggtggggatcatggacactgacatatgcgggccgagtatcccaaaaatgatgggcgtcgaggacgagaggatccacatcagcaacaccggcctatcgcccgtctgggtcgctgacaacttaggcgtcatgagcatccagttcatgctgcccaaccgggacgacgccgtaatctggcgtgggcccaagaagaacggcctcatcaagaagtttctgaaggaagtcgaatggggcgagatggactttttattagtagacaccccaccggggactagcgatgaacatctcagcgttaatagtttcttgaaagaaagcggtatagacggcgccatcatggttaccacgccacaggaggtatcactcctcgacgtcaggaaggagatcgacttctgcaggaaggccgggattaaagtcctaggtctcgtggaaaatatgagtgggttcgtgtgtccgaagtgcacgaacgagagtcagatattcaagcctacgacgggcggcggtgctgcattggccaaagagatgggcatccccttcctgggggaggtgcccctcgatccgaggatagggatggcttgcgattatggagaaagcttctttgatcattatcccgatagccctgcgtgtaaggctcttaaaggtgttgttaggggtttagcgtcacaactgggtgaggaggtatcgttgggggactag

SEQ ID NO: 2857 - protein, 339 aa, Muscodor strobelii
  misc_feature: SGI Peptide ID NO. 560596
  misc_feature (1)..(337): NCBI GI: 156049681 Blast Desc: conserved [Sclerotinia sclerotiorum 1980] gi|154692946|gb|EDN92684.1| conserved [Sclerotinia sclerotiorum 1980]
  misc_feature (1)..(337): NCBI GI: 154303713 Blast Desc: BC1G_08741 [Botryotinia fuckeliana B05.10] gi|150854535|gb|EDN29727.1| BC1G_08741 [Botryotinia fuckeliana B05.10]
  misc_feature (1)..(332): NCBI GI: 256726959 Blast Desc: [Nectria haematococca mpVI 77-13-4]
  misc_feature (1)..(332): NCBI GI: 85105790 Blast Desc: protein NBP35 [Neurospora crassa OR74A] gi|74616760|sp|Q7S8Z0.1|NBP35_NEUCR RecName: Full=Cytosolic Fe-S cluster assembly factor NBP35; AltName: Full=Nucleotide-binding
  misc_feature (1)..(335): NCBI GI: 39975845 Blast Desc: conserved [Magnaporthe grisea 70-15] gi|145011542|gb|EDJ96198.1| conserved [Magnaporthe grisea 70-15]
  misc_feature (1)..(332): NCBI GI: 46136517 Blast Desc: FG09774.1 [Gibberella zeae PH-1] gi|121810857|sp|Q4HZ34.1|NBP35_GIBZE RecName: Full=Cytosolic Fe-S cluster assembly factor NBP35; AltName: Full=Nucleotide-binding
  misc_feature (1)..(332): NCBI GI: 116194462 Blast Desc: conserved [Chaetomium globosum CBS 148.51] gi|121784535|sp|Q2H317.1|NBP35_CHAGB RecName: Full=Cytosolic Fe-S cluster assembly factor NBP35; AltName: Full=Nucleotide-binding
  misc_feature (1)..(334): NCBI GI: 240106313 Blast Desc: cytosolic Fe-S cluster assembling factor NBP35, [Coccidioides posadasii C735 delta SOWgp]
  misc_feature (1)..(334): NCBI GI: 119191876 Blast Desc: conserved [Coccidioides immitis RS] gi|121937550|sp|Q1EAU8.1|NBP35_COCIM RecName: Full=Cytosolic Fe-S cluster assembly factor NBP35; AltName: Full=Nucleotide-binding
  misc_feature (1)..(333): NCBI GI: 258573377 Blast Desc: protein NBP35 [Uncinocarpus reesii 1704] gi|237901136|gb|EEP75537.1| protein NBP35 [Uncinocarpus reesii 1704]
MAPSLEEPERVEDVIANPLKARPELVAPEPEHCPGPESEAAGTADSCAGCPNQAICASAPKGPDPDIPVITARLAAIRHKILILSGKGGVGKSTFTSLLSHAFATDENRTVGIMDTDICGPSIPKMMGVEDERIHISNTGLSPVWVADNLGVMSIQFMLPNRDDAVIWRGPKKNGLIKKFLKEVEWGEMDFLLVDTPPGTSDEHLSVNSFLKESGIDGAIMVTTPQEVSLLDVRKEIDFCRKAGIKVLGLVENMSGFVCPKCTNESQIFKPTTGGGAALAKEMGIPFLGEVPLDPRIGMACDYGESFFDHYPDSPACKALKGVVRGLASQLGEEVSLGD

SEQ ID NO: 2858 - DNA, 3579 bp, Muscodor strobelii
  misc_feature: SGI cDNA ID NO. 560597
  misc_feature: Encodes the peptide sequence at SEQ ID NO 2859
atggcttctccccccgagcccagccaggctccgccgatatcgacggcagtggaccatcaccaacttttgcactccctgaacactctgtcgctttcgacgtcgccaaccaactcgggcgaccgtctctcaaccgcaacgtcttctgccccagatgcccaacgaagctccactccggagcgccgacgctcctccgtctcccccaacgcccgtctgccttctcgcagtccttcagcttccagggcccctgacctgccctccaatggccagagcctgcttcgcaaggcatctacgaactcacttcgctcggccaatggcgccacccctaagcgtgccccctcgcgccgtggcagcgctgcctttctgtcgccaaccaccgcaaaaccacctgcgaatgggctcaccaactacactgaagatgtgaaggagaagcctattcccactgctacttccgtggctggtgactatttcgccaaagagctggctctcttacacggcgacgcttctgatcggtctgcggaaaccattgtcattctgcatgatgactgctatggccaccgtttctctcggccgcgcagcaccaagacacttctcagcaccatcgtcgagcgaccggaaagaatacaggccagcgttttgggcgtgtccatggcttatgttcgcatgggcgagcgacattgcgaagggaagcaccctatacacccagatctggatcccaccactctttccaatattcccttccgcatccacaagacagctcgaaaggttgctatcacttctacggccgtcaccaacgtccatggcaccaagtggatggacgagctgaaggccatgtgcgatggtgcagaggcaaaactggctacgaacagcaacgagctccgacgatcagacgcgaaccgtggccctgttgcagcgcccccgcaacagcttcaccagggagatctctatctctgttctgaatcgctaaatgcttttgaaggcgcactgggtgcaacttgcgaagccgtggatgctgtcttctccaacactccccataaacggactttcgtagccgtacgaccacccggccatcactgttctgcggacttcccatctggcttctgttgggtaaacaatgttcatgtaggaattatgcatggcattcttaatcacggccttacacatgcggccatcatcgacttcgacctccaccatggtgatgggtcgcaggctattgcttggcagcacaataaacgaggactagccaaaaatgccgccgcctggaagaagacttctatcggctatttcagtgtccatgacatcaactcgtacccctgcgagtatggcgatgaagaaaaagtcaaaaacgccagcttgtgtatcgacaacgcgcatggtcaaaatatatggaacgtgcatctccaggaatggaaaacggatgtcgagttctggaaattgtatcagtccagatactccgtcctcctggaaaagactcgcaactacctgcgatcacagacagaacgattccgtgcttcgggtcaggtgcccaaagctgctatctttctgtctgccggcttcgatgcgagtgagtgggaaggctccggaatgcaacgccacaaagtcaatgtccctacggagttctatgctcgcctcacgcgagatgtcgttctcattgcatctgaagagggcctcagtgtagatggcagggtcatcagcgtactagaaggaggttatagtgaccgagccttgtgtaccggagttctaagtcatgtgagtggtttggccggaacagaccctattttccctaaagaagaagggtcatcctttggccttggcaatgagatgggcagtaagattggctcgtttagtagacgaagcacgctgaatgagagcgagttgaagtcgctgaaagctttcgggttcccctatgacccaaactggtggtctagcgcagagcttgatcgcttcgatgcggcgaaactgccctctcagccggagccgaagaagccacgaaacgttgcgccggggaattattcctcgccgacacaatcatcgaatgccaagatgaccgaggtggccaaggttcgccgtagtttgtcgggcctttcctcctcccagcagactatcgtctctcgtccaccgacgccaccgccgcctgatgttccctggaccgcttccgctcttgcactcagcaagttgctcatacctaacagccgacaagttgatagctgctcccactcggagctgaataccgaagcgatgaaagccagaaaagagcgccactcaatacagcccattgtgaatcgaaaccccagtgatgcttcggctgtttcgggtgcaccgacaaggatgtctcttcgagagaggaaaccggtaagctatctcgacgatgacgagagctcatcacggcgcaagacattcggggctcaaagtgtcccgtctactcccaaggcttctcgtggtgtaccaccacaaccccgacaagtgagtcgaagacttagtgcagcttcgactctaagtacggtaccagacataccggcctctacttctgctacttctgaagcgactagtcctagtaactcaccggatggaccacccgaagcatccatgagcgtgcgccctcaggcttctgctcctcctagtgcgcggaaaggtcgtccggcggcgcctagaaaggatagcggccgtgctcctcgtgctcctcgcaaaacaaaatccgcagttacgaaggctggacccgccaccagcactgcagagtcatctctacctcaaccgcgaaatacgaacaccacaacggtacccaattcggaacagcatttgcccccgacgcatccgccaacttcgagcaatggagatctcgacgccatcaccaatgggatgaagaaaatcaagatcaatgtcttgtcaaaagagcaaaaggaggcgagggcgaaagccaaggcggcagctctcaacaatcaaggggagaaagtatcgtctgcaccagattcgtcgagtccaatggttaagcagccattatcgacccctttcactaatgagtttccaaaggatccattgcaagcgagcattgaggatcttacagctttaagcactacgtccggagttgaagcaactcagttgaactcggatcatattgtgacaccgaggacaactcagggtgcagtgataccaatgcctccgacagtgacaaccccgactgagcctagccctacgactccattcatgtcgagtcctttcgctccgcctccaaccgactcaatgcaagactcggacctgttcgtgccttatcaacctgatgggcctccggccgccgctgttcctatccaagggcgcattcagatactagaacccaatacgggaactccagcaaagagcgatattataaagcctcctcactcccacgcttctttcatgcccgtcagcccgatacgaaaaggccatgatttcactacaacatcaaacattcctttctcaccgcgaccagtccaggagactcggtcgatgtcgagagacaatgtccctgtgctggtgcagcagatacccaaacctgagactaattctttcgatccttcccacgttcccgaggcgcctggcgatggatag

SEQ ID NO: 2859 - protein, 1192 aa, Muscodor strobelii
  misc_feature: SGI Peptide ID NO. 560597
  misc_feature (173)..(592): Pfam Id: PF00850 Pfam Desc: Histone deacetylase domain
  misc_feature (90)..(1151): NCBI GI: 171683391 Blast Desc: protein product [Podospora anserina] gi|170941655|emb|CAP67309.1| protein product [Podospora anserina]
  misc_feature (85)..(1032): NCBI GI: 164424452 Blast Desc: NCU07018 [Neurospora crassa OR74A] gi|157070517|gb|EAA32603.2| conserved [Neurospora crassa OR74A]
  misc_feature (12)..(1155): NCBI GI: 256729643 Blast Desc: NECHADRAFT_123200 [Nectria haematococca mpVI 77-13-4]
  misc_feature (66)..(1151): NCBI GI: 156049139 Blast Desc: SS1G_08276 [Sclerotinia sclerotiorum 1980] gi|154692675|gb|EDN92413.1| SS1G_08276 [Sclerotinia sclerotiorum 1980]
  misc_feature (90)..(1153): NCBI GI: 116194728 Blast Desc: CHGG_03962 [Chaetomium globosum CBS 148.51] gi|88179875|gb|EAQ87343.1| CHGG_03962 [Chaetomium globosum CBS 148.51]
  misc_feature (5)..(1151): NCBI GI: 154317068 Blast Desc: BC1G_03436 [Botryotinia fuckeliana B05.10] gi|150844853|gb|EDN20046.1| BC1G_03436 [Botryotinia fuckeliana B05.10]
  misc_feature (7)..(1160): NCBI GI: 145603450 Blast Desc: MGG_06043 [Magnaporthe grisea 70-15] gi|145011678|gb|EDJ96334.1| MGG_06043 [Magnaporthe grisea 70-15]
  misc_feature (18)..(1152): NCBI GI: 46122517 Blast Desc: FG05636.1 [Gibberella zeae PH-1]
  misc_feature (21)..(853): NCBI GI: 239615258 Blast Desc: histone deacetylase HosB [Ajellomyces dermatitidis ER-3]
  misc_feature (21)..(853): NCBI GI: 261192522 Blast Desc: histone deacetylase HosB [Ajellomyces dermatitidis SLH14081] gi|239589543|gb|EEQ72186.1| histone deacetylase HosB [Ajellomyces dermatitidis SLH14081]
MASPPEPSQAPPISTAVDHHQLLHSLNTLSLSTSPTNSGDRLSTATSSAPDAQRSSTPERRRSSVSPNARLPSRSPSASRAPDLPSNGQSLLRKASTNSLRSANGATPKRAPSRRGSAAFLSPTTAKPPANGLTNYTEDVKEKPIPTATSVAGDYFAKELALLHGDASDRSAETIVILHDDCYGHRFSRPRSTKTLLSTIVERPERIQASVLGVSMAYVRMGERHCEGKHPIHPDLDPTTLSNIPFRIHKTARKVAITSTAVTNVHGTKWMDELKAMCDGAEAKLATNSNELRRSDANRGPVAAPPQQLHQGDLYLCSESLNAFEGALGATCEAVDAVFSNTPHKRTFVAVRPPGHHCSADFPSGFCWVNNVHVGIMHGILNHGLTHAAIIDFDLHHGDGSQAIAWQHNKRGLAKNAAAWKKTSIGYFSVHDINSYPCEYGDEEKVKNASLCIDNAHGQNIWNVHLQEWKTDVEFWKLYQSRYSVLLEKTRNYLRSQTERFRASGQVPKAAIFLSAGFDASEWEGSGMQRHKVNVPTEFYARLTRDVVLIASEEGLSVDGRVISVLEGGYSDRALCTGVLSHVSGLAGTDPIFPKEEGSSFGLGNEMGSKIGSFSRRSTLNESELKSLKAFGFPYDPNWWSSAELDRFDAAKLPSQPEPKKPRNVAPGNYSSPTQSSNAKMTEVAKVRRSLSGLSSSQQTIVSRPPTPPPPDVPWTASALALSKLLIPNSRQVDSCSHSELNTEAMKARKERHSIQPIVNRNPSDASAVSGAPTRMSLRERKPVSYLDDDESSSRRKTFGAQSVPSTPKASRGVPPQPRQVSRRLSAASTLSTVPDIPASTSATSEATSPSNSPDGPPEASMSVRPQASAPPSARKGRPAAPRKDSGRAPRAPRKTKSAVTKAGPATSTAESSLPQPRNTNTTTVPNSEQHLPPTHPPTSSNGDLDAITNGMKKIKINVLSKEQKEARAKAKAAALNNQGEKVSSAPDSSSPMVKQPLSTPFTNEFPKDPLQASIEDLTALSTTSGVEATQLNSDHIVTPRTTQGAVIPMPPTVTTPTEPSPTTPFMSSPFAPPPTDSMQDSDLFVPYQPDGPPAAAVPIQGRIQILEPNTGTPAKSDIIKPPHSHASFMPVSPIRKGHDFTTTSNIPFSPRPVQETRSMSRDNVPVLVQQIPKPETNSFDPSHVPEAPGDG

SEQ ID NO: 2860 - DNA, 4300 bp, Muscodor strobelii
  misc_feature: SGI EST ID NO. CUFF.7121.0
  misc_feature: Variant of the nucleotide sequence at SEQ ID NO 2858
cgcatctagaagataggaaaagcgtgttgcgcgccttgtcaagaaacatcttttcgcaacatcaagactcctttccaatttcaagctgtccgcccttggtattcgtagactgaattgggagcctgtctgccatacggattctagcaaagaaacttgctttgcagaacaggtgcgctgcgcattgcgccactcgcttgttgaaaacatagcgctatcaaaacaaacgtgaagccatcaccaacgtcacgccaaccacgagttcgttgcatgtttccctcacccgcgtcatggcttctccccccgagcccagccaggctccgccgatatcgacggcagtggaccatcaccaacttttgcactccctgaacactctgtcgctttcgacgtcgccaaccaactcgggcgaccgtctctcaaccgcaacgtcttctgccccagatgcccaacgaagctccactccggagcgccgacgctcctccgtctcccccaacgcccgtctgccttctcgcagtccttcagcttccagggcccctgacctgccctccaatggccagagcctgcttcgcaaggcatctacgaactcacttcgctcggccaatggcgccacccctaagcgtgccccctcgcgccgtggcagcgctgcctttctgtcgccaaccaccgcaaaaccacctgcgaatgggctcaccaactacactgaagatgtgaaggagaagcctattcccactgctacttccgtggctggtgactatttcgccaaagagctggctctcttacacggcgacgcttctgatcggtctgcggaaaccattgtcattctgcatgatgactgctatggccaccgtttctctcggccgcgcagcaccaagacacttctcagcaccatcgtcgagcgaccggaaagaatacaggccagcgttttgggcgtgtccatggcttatgttcgcatgggcgagcgacattgcgaagggaagcaccctatacacccagatctggatcccaccactctttccaatattcccttccgcatccacaagacagctcgaaaggttgctatcacttctacggccgtcaccaacgtccatggcaccaagtggatggacgagctgaaggccatgtgcgatggtgcagaggcaaaactggctacgaacagcaacgagctccgacgatcagacgcgaaccgtggccctgttgcagcgcccccgcaacagcttcaccagggagatctctatctctgttctgaatcgctaaatgcttttgaaggcgcactgggtgcaacttgcgaagccgtggatgctgtcttctccaacactccccataaacggactttcgtagccgtacgaccacccggccatcactgttctgcggacttcccatctggcttctgttgggtaaacaatgttcatgtaggaattatgcatggcattcttaatcacggccttacacatgcggccatcatcgacttcgacctccaccatggtgatgggtcgcaggctattgcttggcagcacaataaacgaggactagccaaaaatgccgccgcctggaagaagacttctatcggctatttcagtgtccatgacatcaactcgtacccctgcgagtatggcgatgaagaaaaagtcaaaaacgccagcttgtgtatcgacaacgcgcatggtcaaaatatatggaacgtgcatctccaggaatggaaaacggatgtcgagttctggaaattgtatcagtccagatactccgtcctcctggaaaagactcgcaactacctgcgatcacagacagaacgattccgtgcttcgggtcaggtgcccaaagctgctatctttctgtctgccggcttcgatgcgagtgagtgggaaggctccggaatgcaacgccacaaagtcaatgtccctacggagttctatgctcgcctcacgcgagatgtcgttctcattgcatctgaagagggcctcagtgtagatggcagggtcatcagcgtactagaaggaggttatagtgaccgagccttgtgtaccggagttctaagtcatgtgagtggtttggccggaacagaccctattttccctaaagaagaagggtcatcctttggccttggcaatgagatgggcagtaagattggctcgtttagtagacgaagcacgctgaatgagagcgagttgaagtcgctgaaagctttcgggttcccctatgacccaaactggtggtctagcgcagagcttgatcgcttcgatgcggcgaaactgccctctcagccggagccgaagaagccacgaaacgttgcgccggggaattattcctcgccgacacaatcatcgaatgccaagatgaccgaggtggccaaggttcgccgtagtttgtcgggcctttcctcctcccagcagactatcgtctctcgtccaccgacgccaccgccgcctgatgttccctggaccgcttccgctcttgcactcagcaagttgctcatacctaacagccgacaagttgatagctgctcccactcggagctgaataccgaagcgatgaaagccagaaaagagcgccactcaatacagcccattgtgaatcgaaaccccagtgatgcttcggctgtttcgggtgcaccgacaaggatgtctcttcgagagaggaaaccggtaagctatctcgacgatgacgagagctcatcacggcgcaagacattcggggctcaaagtgtcccgtctactcccaaggcttctcgtggtgtaccaccacaaccccgacaagtgagtcgaagacttagtgcagcttcgactctaagtacggtaccagacataccggcctctacttctgctacttctgaagcgactagtcctagtaactcaccggatggaccacccgaagcatccatgagcgtgcgccctcaggcttctgctcctcctagtgcgcggaaaggtcgtccggcggcgcctagaaaggatagcggccgtgctcctcgtgctcctcgcaaaacaaaatccgcagttacgaaggctggacccgccaccagcactgcagagtcatctctacctcaaccgcgaaatacgaacaccacaacggtacccaattcggaacagcatttgcccccgacgcatccgccaacttcgagcaatggagatctcgacgccatcaccaatgggatgaagaaaatcaagatcaatgtcttgtcaaaagagcaaaaggaggcgagggcgaaagccaaggcggcagctctcaacaatcaaggggagaaagtatcgtctgcaccagattcgtcgagtccaatggttaagcagccattatcgacccctttcactaatgagtttccaaaggatccattgcaagcgagcattgaggatcttacagctttaagcactacgtccggagttgaagcaactcagttgaactcggatcatattgtgacaccgaggacaactcagggtgcagtgataccaatgcctccgacagtgacaaccccgactgagcctagccctacgactccattcatgtcgagtcctttcgctccgcctccaaccgactcaatgcaagactcggacctgttcgtgccttatcaacctgatgggcctccggccgccgctgttcctatccaagggcgcattcagatactagaacccaatacgggaactccagcaaagagcgatattataaagcctcctcactcccacgcttctttcatgcccgtcagcccgatacgaaaaggccatgatttcactacaacatcaaacattcctttctcaccgcgaccagtccaggagactcggtcgatgtcgagagacaatgtccctgtgctggtgcagcagatacccaaacctgagactaattctttcgatccttcccacgttcccgaggcgcctggcgatggatagcctagtttcctctgatttcgccctcgaaaggccattggctcctttccttttcttgtgtatagtccttcaagatttgtttcggagcgagacatatcgttcatctggatacttgtggaagaaggatggacagctatcgtccaacgctggatatattgcttttgaagttatagtcttgtttagttctgttgctgtagagttagctgctcttcgtgccttgtcgtgttacgatacccactttcctaccttttgtagtgaactgcttaattcaaacgcttctttgttctcatttaatatcatcttgttgttcccaatttacatctagtcgcatgacccgatgacgaattatcgatgatgaattacctcgaagttttcttacggtaagaaacacaatggttatgtgatatgatacgaaagtgtgtaggccgggtagacgc

SEQ ID NO: 2861 - DNA, 246 bp, Muscodor strobelii
  misc_feature: SGI cDNA ID NO. 560598
  misc_feature: Encodes the peptide sequence at SEQ ID NO 2862
atgcctctcgtagttcccggcatcaccagcacctcgggtgacaagaccgaagaatggagcaacaagctcgtcggcaagacggtgtctgacgactcgcacagcgaaacgaatttctgcaagcaggatctcccccagaagtgccgtgtcattcaacccggtatgatggtcacaaaggactttgttcccgatagactgaacgtacacgtcaaggacgatggcactgtcagccatgtccaacacggttga

SEQ ID NO: 2862 - protein, 81 aa, Muscodor strobelii
  misc_feature: SGI Peptide ID NO. 560598
  misc_feature (1)..(81): NCBI GI: 46116458 Blast Desc: FG04071.1 [Gibberella zeae PH-1]
  misc_feature (1)..(81): NCBI GI: 261357733 Blast Desc: conserved [Verticillium albo-atrum VaMs.102]
  misc_feature (1)..(81): NCBI GI: 256723109 Blast Desc: NECHADRAFT_61639 [Nectria haematococca mpVI 77-13-4]
  misc_feature (1)..(81): NCBI GI: 171688300 Blast Desc: protein product [Podospora anserina] gi|170944112|emb|CAP70222.1| protein product [Podospora anserina]
  misc_feature (1)..(81): NCBI GI: 85105725 Blast Desc: NCU08677 [Neurospora crassa OR74A] gi|28923618|gb|EAA32790.1| [Neurospora crassa OR74A]
  misc_feature (1)..(81): NCBI GI: 242767737 Blast Desc: conserved [Talaromyces stipitatus ATCC 10500] gi|218724623|gb|EED24040.1| conserved [Talaromyces stipitatus ATCC 10500]
  misc_feature (1)..(81): NCBI GI: 145239285 Blast Desc: An08g01700 [Aspergillus niger] gi|134076795|emb|CAK39850.1| protein product [Aspergillus niger]
  misc_feature (1)..(80): NCBI GI: 156052831 Blast Desc: [Sclerotinia sclerotiorum 1980] gi|154704361|gb|EDO04100.1| [Sclerotinia sclerotiorum 1980]
  misc_feature (1)..(81): NCBI GI: 259488399 Blast Desc: TPA: conserved [Aspergillus nidulans FGSC A4]
  misc_feature (1)..(81): NCBI GI: 67521642 Blast Desc: AN1278.2 [Aspergillus nidulans FGSC A4] gi|40746715|gb|EAA65871.1| AN1278.2 [Aspergillus nidulans FGSC A4]
MPLVVPGITSTSGDKTEEWSNKLVGKTVSDDSHSETNFCKQDLPQKCRVIQPGMMVTKDFVPDRLNVHVKDDGTVSHVQHG

SEQ ID NO: 2863 - DNA, 810 bp, Muscodor strobelii
  misc_feature: SGI EST ID NO. CUFF.7118.0
  misc_feature: Variant of the nucleotide sequence at SEQ ID NO 2861
gtggatttatcactaggtgacgtcactgccagtgaatgcggttgcctatgtcaactgcacgagcgtataaagaatcatcaatgccctggctactgtaaattccatgttgcaatcattcccatctgcaagtttaacacattcgcaatcgaccaacacctgtttcagcatagctacctacctcaaaccagtatttcagcaactccgcaggaattgccgaacatgcctctcgtagttcccggcatcaccagcacctcgggtgacaagaccgaagaatggagcaacaagctcgtcggcaagacggtgtctgacgactcgcacagcgaaacgaatttctgcaagcaggatctcccccagaagtgccgtgtcattcaacccggtatgatggtcacaaaggactttgttcccgatagactgaacgtacacgtcaaggacgatggcactgtcagccatgtccaacacggttgagctggtccatgtacgcctacgacgaccatgattctacgagttaataatgaagatcgggctgcggggaaactagcataagagcaatgagtagaagtttgcttcggttgaggtcgctggtagaccgaacttgttttactatgagcctcaacgcgggggatgagcatcctacctcatctaggtaggaggagtgaagacagtattacgttaataagagacctataatccatcccatcaccgagtaaagtctggtcattgacatcgcgcactgaatgtttatcttagcttggccttgtttctcgttgttgtgtagacaggcgagccagttaatgtctggccataaaagac

SEQ ID NO: 2864 - DNA, 492 bp, Muscodor strobelii
  misc_feature: SGI cDNA ID NO. 560599
  misc_feature: Encodes the peptide sequence at SEQ ID NO 2865
atgagatactcccgaaaaaagggctctctagaagccatgaaactgcccgatcgctgcacgctctacgtcctcgaaggcgaacccttattcttccaatacgacaccgcgaccctgctcccgcacctgaagctcgtccatcggtttcccggcgcattcccgacgattcgcatagaccgcggtgcgatccgattcgttctgagcggcgcgacgctcatggcgcctgggttgacaagcgccggtggaagactgccgagcggggttcttacggagagaagtgaggatggggctggggagggtttggatgaggatcagaggtggacgagggagttggagaagggtgagcctgttgttgttagtgccgagggcaagaaggaggcttgtgctgttggcttcttggtcatgggtacgaaggagtgtaaggagaaggggaagggaccggtcattgatgaggcgcattaccttggtgatgggttatggagactgaatccttag

SEQ ID NO: 2865 - protein, 163 aa, Muscodor strobelii
  misc_feature: SGI Peptide ID NO. 560599
  misc_feature (53)..(154): Pfam Id: PF01472 Pfam Desc: PUA domain
  misc_feature (6)..(162): NCBI GI: 171688298 Blast Desc: protein product [Podospora anserina] gi|170944111|emb|CAP70221.1| protein product [Podospora anserina]
  misc_feature (6)..(161): NCBI GI: 85105729 Blast Desc: NCU08678 [Neurospora crassa OR74A] gi|28923619|gb|EAA32791.1| NCU08678 [Neurospora crassa OR74A]
  misc_feature (6)..(161): NCBI GI: 261357734 Blast Desc: translation machinery-associated protein [Verticillium albo-atrum VaMs.102]
  misc_feature (6)..(161): NCBI GI: 256723110 Blast Desc: [Nectria haematococca mpVI 77-13-4]
  misc_feature (6)..(162): NCBI GI: 154315035 Blast Desc: BC1G_04859 [Botryotinia fuckeliana B05.10] gi|150848397|gb|EDN23590.1| BC1G_04859 [Botryotinia fuckeliana B05.10]
  misc_feature (6)..(162): NCBI GI: 39941048 Blast Desc: MGG_05436 [Magnaporthe grisea 70-15] gi|145022087|gb|EDK06107.1| MGG_05436 [Magnaporthe grisea 70-15]
  misc_feature (6)..(161): NCBI GI: 46116460 Blast Desc: FG04072.1 [Gibberella zeae PH-1]
  misc_feature (13)..(162): NCBI GI: 156052833 Blast Desc: SS1G_06584 [Sclerotinia sclerotiorum 1980] gi|154704362|gb|EDO04101.1| SS1G_06584 [Sclerotinia sclerotiorum 1980]
  misc_feature (6)..(162): NCBI GI: 116196810 Blast Desc: CHGG_05003 [Chaetomium globosum CBS 148.51] gi|88180916|gb|EAQ88384.1| CHGG_05003 [Chaetomium globosum CBS 148.51]
  misc_feature (6)..(162): NCBI GI: 119173685 Blast Desc: conserved [Coccidioides immitis RS] gi|240111894|gb|EER30039.1| PUA domain containing protein [Coccidioides posadasii C735 delta SOWgp]
MRYSRKKGSLEAMKLPDRCTLYVLEGEPLFFQYDTATLLPHLKLVHRFPGAFPTIRIDRGAIRFVLSGATLMAPGLTSAGGRLPSGVLTERSEDGAGEGLDEDQRWTRELEKGEPVVVSAEGKKEACAVGFLVMGTKECKEKGKGPVIDEAHYLGDGLWRLNP

SEQ ID NO: 2866 - DNA, 936 bp, Muscodor strobelii
  misc_feature: SGI EST ID NO. CUFF.7125.0
  misc_feature: Variant of the nucleotide sequence at SEQ ID NO 2864
catcaaaccactcctatcaacaccacaaatcgctgcgcaacgtgtgcaattcttcaagatgtttaagaaagacatatcaacagcgcccaaatccaaactcaagtcctcagtgcagcgcacactgcggtcctccctcctcacagcgtaccccctcctaaatccgtacatcgatgagatactcccgaaaaaagggctctctagaagccatgaaactgcccgatcgctgcacgctctacgtcctcgaaggcgaacccttattcttccaatacgacaccgcgaccctgctcccgcacctgaagctcgtccatcggtttcccggcgcattcccgacgattcgcatagaccgcggtgcgatccgattcgttctgagcggcgcgacgctcatggcgcctgggttgacaagcgccggtggaagactgccgagcggggttcttacggagagaagtgaggatggggctggggagggtttggatgaggatcagaggtggacgagggagttggagaagggtgagcctgttgttgttagtgccgagggcaagaaggaggcttgtgctgttggcttcttggtcatgggtacgaaggagtgtaaggagaaggggaagggaccggtcattgatgaggcgcattaccttggtgatgggttatggagactgaatccttagatggcgttgtgggatagggggggttcgtggatggcaggcaggcgcaagatctccatgtcattcggcttcatttcacggcgaaactacgctcaatatcttgtgatttgagcggagagatgtggtggactggatatctacacttagatcggcggacttgatagatctcgaccgacacgtctaagagcttctaaagagtgaaggtcaacaacattggattgttggtcaataagctacagaaaacatagtcagccacacaattcatcatgacgacaag

SEQ ID NO: 2867 - DNA, 258 bp, Muscodor strobelii
  misc_feature: SGI cDNA ID NO. 560600
  misc_feature: Reduced expression when VOC is produced
  misc_feature: Encodes the peptide sequence at SEQ ID NO 2868
atgccttcttctaacgtcccaatcgacatccaagaaatcttggccaaaaagccggtcaacttctctatcaaaacaagtggaggtcgttatgaatgttccatccatcccaacagagcctcacttgacaagtcaagaacaaagttggctgctgcatccacgtcggatccggtcccgggcgttactcgcacgggctccgatctttcgatctcgagcacttcgtcaagttcaacggctagctcaacgaagagtggtcattaa

SEQ ID NO: 2868 - protein, 85 aa, Muscodor strobelii
  misc_feature: SGI Peptide ID NO. 560600
  misc_feature: Useful for introducing or modulating the production of volatile compounds
MPSSNVPIDIQEILAKKPVNFSIKTSGGRYECSIHPNRASLDKSRTKLAAASTSDPVPGVTRTGSDLSISSTSSSSTASSTKSGH

SEQ ID NO: 2869 - DNA, 2368 bp, Muscodor strobelii
  misc_feature: SGI EST ID NO. CUFF.7164.0
  misc_feature: Variant of the nucleotide sequence at SEQ ID NO 2867
ggggtattgttgccgggtggttgatcttaaaagcatacgagtctttcaaagttccatttgaaccgcgcatgtggccgagacatgtgctttcgatctccaattctcgttgtgttcttatccagaccacgttctcttatccggttatgctagatgttgtggctggaactttgttgtgctggtgggaaatgctcgtgacacctgctcagaagatcaagggtagaatcaagtgcttgatacgcatttactacttgtatttgaattatatgcccagtgcatggtcaacatgaggtcaagacgagtgtactaagtggtttataattgtagtcatttaattgcaaccataggtattacctataaaatgtaaggatgctggaatcaacatgctcggaagtctcgtggagtatggctatcggacggacaattcgccaaaccgatgcgcctcgccccaagaatgatcccatctcggccgaatttttgggcatcttttagcacgactagtttcaccccttaaagaccttctagaaacaaaatggaagttgagaaatacatgcgcgtaccacgtgtttgggacgcatgcaacggcatgcgcgatcacgagccgatcagcagaggagatatcacccatcagctccggctcttgagatacgtctacattttgaactttttatttcaagttgctgatatctagatctccgtcatttcaagtcaatcaattgaatttccacgacagtgcgtgacatcataaaaagccggccctcgcggttagtaaagagccgaagcaaacggacgtccgagagccggaaatatcaacgttgaaatgcgatagagtcgatagttgtttgaacaccatcctattacccaacacaagagtcggaaaatcatagccatgtgtaaggagaagtagatagaacatgatagtagtagcgactctctaaacgcacgatcgcttgtagggtccatatataacataggtaaatcacatggcaataacttccagccggatatagaggactagagtgtgtgtacgagcttgtggggttcgtgcgagttttagtacgggtatcttccgatatcccattgccgacatcaacggcgaattacatcctgagtttgtcatccacgaaaatgcaaggaccagtattgtacttgtcctcaatcaacaagcccaccactacagtgagatggggcggatccggtccgcctcgtctagcaaaatacctcactacataccggtctgcaactaactaatatcttaggctgttgaggacccttttccctagttcgtgaatagcaaactttggcacgagacggaaccttacctatcggccctataatcataacttataaatcccactggtctcatcgcattcccgtatctctctctttttctccttttgacactacctcacatacaaccgccgtaatctacaggaatccaacgtctactacccttcttcaaagtctccccactcaaaaagctctgattgatcattcaaaattcctaaatttaagcaatacacgtctaaataaagtcaaacaaccattcacaatgccttcttctaacgtcccaatcgacatccaagaaatcttggccaaaaagccggtcaacttctctatcaaaacaagtggaggtcgttatgaatgttccatccatcccaacagagcctcacttgacaagtcaagaacaaagttggctgctgcatccacgtcggatccggtcccgggcgttactcgcacgggctccgatctttcgatctcgagcacttcgtcaagttcaacggctagctcaacgaagagtggtcattaagaaagaccggtcatttgaattctgtcaagcttaatcaccacatgacgcagcgaccgagatggtcccatatcttcctacgaacgagcccttcccaacagctcgtcttgctaaagccagttctactaagttgcagaaatccattctacacggaatctggagttcctctgatttgagtaggattggtcaaagacggattaatcatatgggcaattcaagtttctctgtcgtgccatgcattgtcaataaggttaatggcaatgcgaatgtatataaaccaccaatcttcttggttttcatgtttagcgttttgtttttagaaggcaactatagaagatgccgacgatgcaacgttagaagccataggccgttgacagacaattgaacgaataattagacctaatattggctgccagagacatgctatgagggtagtatgcaactggtaaaaactatcagagtctgccacacacactacaatcaacaaagctattcatacttggagctagtgatatgatatgtacctattttgctcaacgctttgcttcatccattggacccggg

SEQ ID NO: 2870 - DNA, 792 bp, Muscodor strobelii
  misc_feature: SGI cDNA ID NO. 560601
  misc_feature: Encodes the peptide sequence at SEQ ID NO 2871
atgtcgtcggcctcagcagctcccccggccgctgagccatccctagcaccacccgtccccgacaaacagccatccgacacacagaagcccctcccagcagcacccaaggagtcttccttcccagtgccccgtctgcgcctgcgcatcgacgacatcaccaacccgggagccgccatattcatcgacaacacaaaatcccacctcctgccacactccgtagcccaggtacaaaagcatctctacgaccagccctcgaccccagggttccacatccccccaacccgctccgtcaccctctacatccacgacttcgacggcgtcgcctacaccaccggcaaagacctcgacccagaacaccacaaggagatccacctctccaccaagtacctcaattccatatccgctgatcgtcgcgcccacgaaatcgaaggcgtaatcgtccacgagctcgtccactgctaccagcacaacggcgtcaacgctgcgcccggcggcctgatagagggagtcgccgactgggtgcgcctgcaagctgggttggcgccgcctcactggcacagaggggatgagctcaagggcgcttgggacgctggctatcagcataccgcctatttcttgcagtatctcgaggagcgcttcggacgcggcaccgttcgtaggttgaacgagggcctcagggggcgtaagtacgagaccaagcctttctggaccggcatattgggccggcccgttgagcagctctgggaggattacaaaaagtccatggatggcggcgagaagcccggggagtag

SEQ ID NO: 2871 - protein, 263 aa, Muscodor strobelii
  misc_feature: SGI Peptide ID NO. 560601
  misc_feature (42)..(251): Pfam Id: PF04450 Pfam Desc: Plant Basic Secretory Protein
  misc_feature (21)..(262): NCBI GI: 39944346 Blast Desc: MGG_04184 [Magnaporthe grisea 70-15] gi|145014921|gb|EDJ99489.1| MGG_04184 [Magnaporthe grisea 70-15]
  misc_feature (38)..(255): NCBI GI: 156062422 Blast Desc: SS1G_01327 [Sclerotinia sclerotiorum 1980] gi|154696663|gb|EDN96401.1| SS1G_01327 [Sclerotinia sclerotiorum 1980]
  misc_feature (23)..(255): NCBI GI: 154302141 Blast Desc: BC1G_09751 [Botryotinia fuckeliana B05.10] gi|150855525|gb|EDN30717.1| BC1G_09751 [Botryotinia fuckeliana B05.10]
  misc_feature (40)..(259): NCBI GI: 261352300 Blast Desc: PBSP domain-containing protein [Verticillium albo-atrum VaMs.102]
  misc_feature (32)..(256): NCBI GI: 46123625 Blast Desc: FG06190.1 [Gibberella zeae PH-1]
  misc_feature (18)..(260): NCBI GI: 116196036 Blast Desc: CHGG_04616 [Chaetomium globosum CBS 148.51] gi|88180529|gb|EAQ87997.1| CHGG_04616 [Chaetomium globosum CBS 148.51]
  misc_feature (8)..(253): NCBI GI: 171690586 Blast Desc: protein product [Podospora anserina] gi|170945241|emb|CAP71352.1| protein product [Podospora anserina]
  misc_feature (40)..(240): NCBI GI: 164423823 Blast Desc: NCU07694 [Neurospora crassa OR74A] gi|157070246|gb|EAA33044.2| conserved [Neurospora crassa OR74A]
  misc_feature (43)..(257): NCBI GI: 169605759 Blast Desc: SNOG_05906 [Phaeosphaeria nodorum SN15] gi|111065850|gb|EAT86970.1| SNOG_05906 [Phaeosphaeria nodorum SN15]
  misc_feature (1)..(262): NCBI GI: 70995774 Blast Desc: PBSP domain protein [Aspergillus fumigatus Af293] gi|66850277|gb|EAL90604.1| PBSP domain protein [Aspergillus fumigatus Af293] gi|159131395|gb|EDP56508.1| PBSP domain protein
MSSASAAPPAAEPSLAPPVPDKQPSDTQKPLPAAPKESSFPVPRLRLRIDDITNPGAAIFIDNTKSHLLPHSVAQVQKHLYDQPSTPGFHIPPTRSVTLYIHDFDGVAYTTGKDLDPEHHKEIHLSTKYLNSISADRRAHEIEGVIVHELVHCYQHNGVNAAPGGLIEGVADWVRLQAGLAPPHWHRGDELKGAWDAGYQHTAYFLQYLEERFGRGTVRRLNEGLRGRKYETKPFWTGILGRPVEQLWEDYKKSMDGGEKPGE

SEQ ID NO: 2872 - DNA, 3465 bp, Muscodor strobelii
  misc_feature: SGI EST ID NO. CUFF.7289.0
  misc_feature: Variant of the nucleotide sequence at SEQ ID NO 2870
catcatcaacccatctaggagcgaagactaacacacgaacaactataaagtcgcaatgctcttatctatgaagaatctagtcaattgctttgtctgatatatgcagtctcccgatcctgatattcttagaggctcgtagacatccgatcctgtttcacggcgtcgggagctcactttcggcaatcgtcaacttgtcgaatcatctcacgatacctacctactcactcacagagacacacctcgaatcttagatgcttgtacacatagacctccttgattgttgtgactattctcgtacttgactttccccatccacatttacccccttcttagatatctctgagagaatcccaacacctagatgcccctccctccaaacaccacgcccgctccaacatccatcttcgaaccagccatgtcgtcggcctcagcagctcccccggccgctgagccatccctagcaccacccgtccccgacaaacagccatccgacacacagaagcccctcccagcagcacccaaggagtcttccttcccagtgccccgtctgcgcctgcgcatcgacgacatcaccaacccgggagccgccatattcatcgacaacacaaaatcccacctcctgccacactccgtagcccaggtacaaaagcatctctacgaccagccctcgaccccagggttccacatccccccaacccgctccgtcaccctctacatccacgacttcgacggcgtcgcctacaccaccggcaaagacctcgacccagaacaccacaaggagatccacctctccaccaagtacctcaattccatatccgctgatcgtcgcgcccacgaaatcgaaggcgtaatcgtccacgagctcgtccactgctaccagcacaacggcgtcaacgctgcgcccggcggcctgatagagggagtcgccgactgggtgcgcctgcaagctgggttggcgccgcctcactggcacagaggggatgagctcaagggcgcttgggacgctggctatcagcataccgcctatttcttgcagtatctcgaggagcgcttcggacgcggcaccgttcgtaggttgaacgagggcctcagggggcgtaagtacgagaccaagcctttctggaccggcatattgggccggcccgttgagcagctctgggaggattacaaaaagtccatggatggcggcgagaagcccggggagtagcacgactttcgaggatttgagccgatgtgaaagacgaggcgcatagcttcgatgacatgggtgcattgctgtcctggtagatgatgggcataagtagagagggatcgtcctagtagagtgtctctactcgtgtggcattagcaagcatggcgttagtcacattgcaggtagaacgtcgaatggtataatcagatctgtattcttttaaggcaaaaatcccatacaatgggaccgctctccacacacagtcctcgcggttttcagaaatccaagactgatgagagccatcccaagtccatgcttaccaccaacgccttgccagagaagtgaataagggacgagtctaaaaacacaatgtagatacccaaggaaaacatggtaaacatggtacctcccgagatagactaggcatgcattggtgggttaggctccatctcactgacaacgctaccgacgtccgtccacgccggtgtcatgatgccgtcgacttcgctcatgacgtcgtacgacttggtggagacggcctcgtccgcgatgtcctcgccggaaccggccaaagaagccgagtcggtcggcgtcagctctccggtactgataacctcggcctcgctgacggtagccggagtctggggtagtggtgagtagaagttggcattttcggaggcaccttcagcccaggcctggatagagctgtatgctgcgtggcttgcctcgtcctggtgaagctctgcgtctgaaggttcggatgcgtactctgtctgagcttgtgacggctgtggtgcaggctcgttgacttcgacgatggtggggatctttgggctaggggctgtctgttgaggtgataaagcagcgaatcgcgaaggctcattgtcaccaagatctgtcgcactgtagatatctgatacgatctcgtccttctcgggatccatcaaactgttctcaaatacaatatcttcatcgataccatgctcatcggcgaatgggtttgtgtagatggagtggttaagcccacgcagtccatctcctcctcgacgtcggatcagaccgtcgctattctggacttcgtggccgctttgatacacaaaagctcccttctcattttcatcttgactcaagaagtcatcaaaacttgaaccccgggtagaggagcgagggcgttctttttctgagtagctttcccgcttagcatcctcacgctccttttccatctgcgactcgcgcacggcattccaaaacatcagctcttcccgttgacgtcgaagactctcgggatcagcatccacatcgggaaggtttaggccccgcgacaacaaaaatccttcggcatcctcgggacggttgaagaggttctcgcgttcttgcggactgatgctgtctccgaaagcgtgcagagcaatggcgatgcgacgtctgagatcgctggccattcgctgaagctcgggagactcatagatagcgatagcggcggcgacagcgaccgagacggccactacgccaactgttgcagcaactccgttaataggcggcatgattgtggatgaatgacgacggcaaaggtggggttatggagcagctgattgcagcagcgggtgcttggtgatagtgaaagcccaactttggagaagagtgagagtaggaaagcagcaataatgagtctttaggaaatacagagaggctgaaagcagatgcaagttgcaagtgccatgatatgcagtagtaaatgcagcacaaaacatgaaaacagcagaggcgacgggagcttgcgtggttgcttcacatcttcgccatctgagggtcaccaggcaggcgtctttgattcgcaattgattggcagctgaggcgtggacgtggggtaaggagatcgattccacattcggggtttaatggacttacccttggcggcgagaggaacaggcatgactctcgctgtgtctctggtaggtctgctcaatctagatgaatgaggatgataaagagaagagatggactgcgtctgtaggagaagagggtaaagaagatttgagagtgtactgtaatccgtagatgtgaccgcagatacctggattggagaatggtcatgcaggtacctggagacagggaggggcttaaggctcaatgttgattggggtgagtaatgtcacgggtcaactgaggtgagcatgggaaggtcgtctccgaagtctccacatgccctctgctgagtgtagataaaatcacacagcacttggtgcaattgtgttgtgctaacagaaaaaaag

SEQ ID NO: 2873 - DNA, 3342 bp, Muscodor strobelii
  misc_feature: SGI cDNA ID NO. 560602
  misc_feature: Encodes the peptide sequence at SEQ ID NO 2874
atggccgagagactcaccgatgaccaggtcggcgccctgctggcgacgctgaagaaagatgtggccatcgacgccaaggtcaacgccgtcgccaacaccaagtccgccatcaagcagcacaacgtccccgactcctgcgtcgcacctctcttcgacgccctccgcctcgcctctacctcgcagcatgccgccctcgtcaacgccggcttcacagccctcaaccacctgctcacgcgcctctcccgccaggagcccaagtatctcgccaaggaggccaagcagaccctgccgctcattgttgacaagatgggcgaccagaaggacaagttccgcgctctgtccgtccaggccatggccaccatgtacgagcacgtccccgccgatgccgagcgcttcgtgcgcaacgttgccatggtcggcaagaacccgagggccaaggaatccgccctgcagtggttgcttcagatgcacaaggaacacggcttgcagtttcggacttatgtcccaaccctgatggagctattggaggacgcagacggcatggtgcgcgatgccgccaaagccacagtcatcgatctgttcagggaagcaccgaatgccgcaaagtcggacttgaagagacagctcaagaatttcaaagtgcgcccggctatagaaggagccattgtcaaagaattgaaccccacgtcctccaaggcagatcccgagtccagaccggcttctgccatgcagacgcgccccaaccttgcggctagtgtttcgtcccatgcgagcgagcggccaacaacaccagcaccggagagcaaagcggaagcggtcgatcccatttacgtcaacacgcaccgagagctcgacgaaatcatcaaaagcatgcaccagtggttcgaggggaaagagtcagagcaaaactggttgaaacgagaacagagtataacgaagctgcgaaagctcatcgccggcaatgcgtcgaccgacttccccgatctcatggtctcaggctgtcgcggcctgctagacggtatcctcaagggtgtgaactcgctacgaaccagcctttcgaaagaatcctgcgccctagtccaagaccttgccaatgccttcgggtcaagcattgatcccatggtggaattactcatgcaaacattcatcaaactgtgcgcagctacaaagaagattgcatctcagcttgcaaacacgactatcgaaactatcatcggcaggacgacgtataccccaaggattatgcagcatatatggggagcttgtcaggacaagaacgtacaaccgaggatgtatgcgaccggatggctgaaaatcctcttgaagaaggaggcacaccacaagaaccatctggagcacggtggtggcatggacttggttgacaagtgcattaagaaaggactagccgaccctaatccaggtgttcgcgagaagatgcgcgcgacatattggtgttttgcggggatatggccagcaagggctgaggccatcatggacggacttgatgccacggcacagaagttgctccaaaaagacccaaataaccctaattcgccaaagaagcccgagacggcgtccgtccgcccgggacttgggttttctaagagcaccatgagcagcactaagccatcactgagagagaccatgatggcacaaaagaaggccttgtctaacacaagaaatttaccagcgagaccagggtctgcaatggccaagatttcgcctgtcaggacggtctcgggtacgtcaaatgcgtctgcggcctcgtctgcgactgccccagctactcgtccgcgccccgagtctgcaatgaagtctcacggtggcatgtcagttgcgcccatgcgcccagctaggaggcgaccagagatcgcggcgcgaccggctaccgcgggtccgtactcagttagaagccaagatggaccatctctcgaacgagcgagtccgccggagaagaagacaagtactgtgaacccaaagacgatatcaggctctcctagaaggacagctcctagacctcgtcctggccatgcagctactgctagtgagtccagcgtgactgtgccttcaccttccaagacaccagttaagaaaccggttgctcctccacgcacaagcccggcgaaagcaaagactacgctaggccatttcccttccagcagtcccgccaaggctgacgaaaacctcacatttgttgtgccaagtattgagagtctcaaagagagtctgcagccgtcttcgccgagtcctgccgtcccggctatgccagcctcaccagacgctgtttcgcctgtcgtcggctctcctccggcggattcttcccctcggcctgttaccgttgagacatcggagacagagaacgatgaaaacgatgaaaacgtgattcctctgaccacgccaacgctaacgccttcgaagccactgcaagtttatgaagatccattcactgagggccaatcaaccccgcgccctgtatccaaaggctcaccagagcgacccgtgcttgaagacataccggtcaacgaggatgcggccaagctccctccgaacacatcggaaacaaatggggatggaatgttctcctctcctgagaaatcacgcatgaactcgcgcttacttgacagtggaattacccgtgtcaaagctcagactctggatgttcacggcttccgaaaactacagagtctcatccgtgagaataatctccctttcggcgctaccaagttcgagagccttttggtgggtctctttgagtacatcgaggctcctctcgacaatctcagtccccaaaaggtacaggatgtgaaggctcaggtccttgccacggttaaactcctcctcaaaatggacagtgatagttttcagcctcatgtttcacgtggccttgaggcattgctgcgcgcgcgtagcgcgtacgatgcacgaacacacattgttagtggtcttgagctcctagcagatgagctggtgcgtattggcgatgcggcagagattaccgtgacgatgacgcaggcattaagtcagatggatcttgatacggcgggataccgcagtctgagtatggggttacatgtgctcaaggaactcatcgagtccaaaccatccttcgttcctaacgagggcgaagtcgtgcgtctcacgactctcgcgagccggtgtctggagagcaaagagagcggtgtccgtatggatgccgtgcagctttgcgttgccctacatacgagacttggtgatgcgcagttttgggagtgcatgaaatccgtcaaggaggaccctaagagtctgatcacgtactatgtcgtcaagcgtcagcgggagacggcaaagactgctgcttgctag

SEQ ID NO: 2874 - protein, 1113 aa, Muscodor strobelii
  misc_feature: SGI Peptide ID NO. 560602
  misc_feature (1)..(1106): NCBI GI: 261352299 Blast Desc: STU1 [Verticillium albo-atrum VaMs.102]
  misc_feature (4)..(1106): NCBI GI: 256727436 Blast Desc: NECHADRAFT_32798 [Nectria haematococca mpVI 77-13-4]
  misc_feature (1)..(1108): NCBI GI: 116196038 Blast Desc: CHGG_04617 [Chaetomium globosum CBS 148.51] gi|121927626|sp|Q2H0S9.1|STU1_CHAGB RecName: Full=Protein STU1 gi|88180530|gb|EAQ87998.1| CHGG_04617 [Chaetomium globosum CBS
  misc_feature (4)..(1113): NCBI GI: 46123627 Blast Desc: FG06191.1 [Gibberella zeae PH-1] gi|121933694|sp|Q4I9B7.1|STU1_GIBZE RecName: Full=Protein STU1
  misc_feature (1)..(1106): NCBI GI: 145607347 Blast Desc: MGG_04185 [Magnaporthe grisea 70-15] gi|145014922|gb|EDJ99490.1| MGG_04185 [Magnaporthe grisea 70-15]
  misc_feature (1)..(1111): NCBI GI: 85106950 Blast Desc: NCU07693 [Neurospora crassa OR74A] gi|74616926|sp|Q7S9L2.1|STU1_NEUCR RecName: Full=Protein stu-1 gi|28923881|gb|EAA33043.1| conserved [Neurospora crassa OR74A]
  misc_feature (1)..(1113): NCBI GI: 171690584 Blast Desc: protein product [Podospora anserina] gi|170945240|emb|CAP71351.1| protein product [Podospora anserina]
  misc_feature (1)..(1106): NCBI GI: 156062420 Blast Desc: SS1G_01326 [Sclerotinia sclerotiorum 1980] gi|154696662|gb|EDN96400.1| SS1G_01326 [Sclerotinia sclerotiorum 1980]
  misc_feature (13)..(1103): NCBI GI: 242775099 Blast Desc: conserved [Talaromyces stipitatus ATCC 10500] gi|218722195|gb|EED21613.1| conserved [Talaromyces stipitatus ATCC 10500]
  misc_feature (13)..(1103): NCBI GI: 240277195 Blast Desc: HEAT repeat protein [Ajellomyces capsulatus H143]
MAERLTDDQVGALLATLKKDVAIDAKVNAVANTKSAIKQHNVPDSCVAPLFDALRLASTSQHAALVNAGFTALNHLLTRLSRQEPKYLAKEAKQTLPLIVDKMGDQKDKFRALSVQAMATMYEHVPADAERFVRNVAMVGKNPRAKESALQWLLQMHKEHGLQFRTYVPTLMELLEDADGMVRDAAKATVIDLFREAPNAAKSDLKRQLKNFKVRPAIEGAIVKELNPTSSKADPESRPASAMQTRPNLAASVSSHASERPTTPAPESKAEAVDPIYVNTHRELDEIIKSMHQWFEGKESEQNWLKREQSITKLRKLIAGNASTDFPDLMVSGCRGLLDGILKGVNSLRTSLSKESCALVQDLANAFGSSIDPMVELLMQTFIKLCAATKKIASQLANTTIETIIGRTTYTPRIMQHIWGACQDKNVQPRMYATGWLKILLKKEAHHKNHLEHGGGMDLVDKCIKKGLADPNPGVREKMRATYWCFAGIWPARAEAIMDGLDATAQKLLQKDPNNPNSPKKPETASVRPGLGFSKSTMSSTKPSLRETMMAQKKALSNTRNLPARPGSAMAKISPVRTVSGTSNASAASSATAPATRPRPESAMKSHGGMSVAPMRPARRRPEIAARPATAGPYSVRSQDGPSLERASPPEKKTSTVNPKTISGSPRRTAPRPRPGHAATASESSVTVPSPSKTPVKKPVAPPRTSPAKAKTTLGHFPSSSPAKADENLTFVVPSIESLKESLQPSSPSPAVPAMPASPDAVSPVVGSPPADSSPRPVTVETSETENDENDENVIPLTTPTLTPSKPLQVYEDPFTEGQSTPRPVSKGSPERPVLEDIPVNEDAAKLPPNTSETNGDGMFSSPEKSRMNSRLLDSGITRVKAQTLDVHGFRKLQSLIRENNLPFGATKFESLLVGLFEYIEAPLDNLSPQKVQDVKAQVLATVKLLLKMDSDSFQPHVSRGLEALLRARSAYDARTHIVSGLELLADELVRIGDAAEITVTMTQALSQMDLDTAGYRSLSMGLHVLKELIESKPSFVPNEGEVVRLTTLASRCLESKESGVRMDAVQLCVALHTRLGDAQFWECMKSVKEDPKSLITYYVVKRQRETAKTAAC

SEQ ID NO: 2875 - DNA, 4426 bp, Muscodor strobelii
  misc_feature: SGI EST ID NO. CUFF.7134.0
  misc_feature: Variant of the nucleotide sequence at SEQ ID NO 2873
tagctgtcagggaccagcagggaaggcccatgtcggatgccgtgggatgctgcggcaacaacagcggaggtgatgcgttgtattttgttttcatttggtgttgttgattactccatgcctttttgcttgaatccgctccaatccagcacccaacccgctaatccgcagctgtgctccccaattcggctctccacttttcaaggtatctgctgttcatcaggctccgggaaacacactctgggtacgaccggtaactgccagattgttgactcccgattgaattgcccatcccacaaacctcatcataattacacataccttcaattcgcatagactggctgttgaaagttcagtacctaaaaccccgagttatcatctccatatatcctctccaactgtcatattggaatcttgcgcgttgctttctcgattcgtgttccaatttctccgccttgcaacccgtcgccgctccggtaacctggacggctccaacgcccctattttgagattggttggttgcattgacgaccctcttcgcgacagcgctccggccccgcgcactttgacgttttgacattttgacatcccacataaggccggccctctctcctgaggaccatggccgagagactcaccgatgaccaggtcggcgccctgctggcgacgctgaagaaagatgtggccatcgacgccaaggtcaacgccgtcgccaacaccaagtccgccatcaagcagcacaacgtccccgactcctgcgtcgcacctctcttcgacgccctccgcctcgcctctacctcgcagcatgccgccctcgtcaacgccggcttcacagccctcaaccacctgctcacgcgcctctcccgccaggagcccaagtatctcgccaaggaggccaagcagaccctgccgctcattgttgacaagatgggcgaccagaaggacaagttccgcgctctgtccgtccaggccatggccaccatgtacgagcacgtccccgccgatgccgagcgcttcgtgcgcaacgttgccatggtcggcaagaacccgagggccaaggaatccgccctgcagtggttgcttcagatgcacaaggaacacggcttgcagtttcggacttatgtcccaaccctgatggagctattggaggacgcagacggcatggtgcgcgatgccgccaaagccacagtcatcgatctgttcagggaagcaccgaatgccgcaaagtcggacttgaagagacagctcaagaatttcaaagtgcgcccggctatagaaggagccattgtcaaagaattgaaccccacgtcctccaaggcagatcccgagtccagaccggcttctgccatgcagacgcgccccaaccttgcggctagtgtttcgtcccatgcgagcgagcggccaacaacaccagcaccggagagcaaagcggaagcggtcgatcccatttacgtcaacacgcaccgagagctcgacgaaatcatcaaaagcatgcaccagtggttcgaggggaaagagtcagagcaaaactggttgaaacgagaacagagtataacgaagctgcgaaagctcatcgccggcaatgcgtcgaccgacttccccgatctcatggtctcaggctgtcgcggcctgctagacggtatcctcaagggtgtgaactcgctacgaaccagcctttcgaaagaatcctgcgccctagtccaagaccttgccaatgccttcgggtcaagcattgatcccatggtggaattactcatgcaaacattcatcaaactgtgcgcagctacaaagaagattgcatctcagcttgcaaacacgactatcgaaactatcatcggcaggacgacgtataccccaaggattatgcagcatatatggggagcttgtcaggacaagaacgtacaaccgaggatgtatgcgaccggatggctgaaaatcctcttgaagaaggaggcacaccacaagaaccatctggagcacggtggtggcatggacttggttgacaagtgcattaagaaaggactagccgaccctaatccaggtgttcgcgagaagatgcgcgcgacatattggtgttttgcggggatatggccagcaagggctgaggccatcatggacggacttgatgccacggcacagaagttgctccaaaaagacccaaataaccctaattcgccaaagaagcccgagacggcgtccgtccgcccgggacttgggttttctaagagcaccatgagcagcactaagccatcactgagagagaccatgatggcacaaaagaaggccttgtctaacacaagaaatttaccagcgagaccagggtctgcaatggccaagatttcgcctgtcaggacggtctcgggtacgtcaaatgcgtctgcggcctcgtctgcgactgccccagctactcgtccgcgccccgagtctgcaatgaagtctcacggtggcatgtcagttgcgcccatgcgcccagctaggaggcgaccagagatcgcggcgcgaccggctaccgcgggtccgtactcagttagaagccaagatggaccatctctcgaacgagcgagtccgccggagaagaagacaagtactgtgaacccaaagacgatatcaggctctcctagaaggacagctcctagacctcgtcctggccatgcagctactgctagtgagtccagcgtgactgtgccttcaccttccaagacaccagttaagaaaccggttgctcctccacgcacaagcccggcgaaagcaaagactacgctaggccatttcccttccagcagtcccgccaaggctgacgaaaacctcacatttgttgtgccaagtattgagagtctcaaagagagtctgcagccgtcttcgccgagtcctgccgtcccggctatgccagcctcaccagacgctgtttcgcctgtcgtcggctctcctccggcggattcttcccctcggcctgttaccgttgagacatcggagacagagaacgatgaaaacgatgaaaacgtgattcctctgaccacgccaacgctaacgccttcgaagccactgcaagtttatgaagatccattcactgagggccaatcaaccccgcgccctgtatccaaaggctcaccagagcgacccgtgcttgaagacataccggtcaacgaggatgcggccaagctccctccgaacacatcggaaacaaatggggatggaatgttctcctctcctgagaaatcacgcatgaactcgcgcttacttgacagtggaattacccgtgtcaaagctcagactctggatgttcacggcttccgaaaactacagagtctcatccgtgagaataatctccctttcggcgctaccaagttcgagagccttttggtgggtctctttgagtacatcgaggctcctctcgacaatctcagtccccaaaaggtacaggatgtgaaggctcaggtccttgccacggttaaactcctcctcaaaatggacagtgatagttttcagcctcatgtttcacgtggccttgaggcattgctgcgcgcgcgtagcgcgtacgatgcacgaacacacattgttagtggtcttgagctcctagcagatgagctggtgcgtattggcgatgcggcagagattaccgtgacgatgacgcaggcattaagtcagatggatcttgatacggcgggataccgcagtctgagtatggggttacatgtgctcaaggaactcatcgagtccaaaccatccttcgttcctaacgagggcgaagtcgtgcgtctcacgactctcgcgagccggtgtctggagagcaaagagagcggtgtccgtatggatgccgtgcagctttgcgttgccctacatacgagacttggtgatgcgcagttttgggagtgcatgaaatccgtcaaggaggaccctaagagtctgatcacgtactatgtcgtcaagcgtcagcgggagacggcaaagactgctgcttgctagagcatttggcacttttgctttcttccagcttttctgacgtggggatttgcgtccgtggtctatggagtactggctgcgatttcgcggcattgttgaatgttggtacaatggatgtctgcgacgggtagtttttgtccaagtatgccacactcacaggctgtcaatttcaagggcttatagttttgagctttgttcttgttattcgtctttcctgttagttcatagttgtggcgttggggagaaaaaggcggtaggcatatggcattgggatacaaatttatatacccctttcctgtttatgctatacacagtggtcttctctgctcttctgctcgtcacccttgttagggataaggaaagaaaattgtattcgttggtgcttaggtctttgtagttggtaacctcggagcggttgcttgccattctgtttgttcatgaataatacaaatttaatagttgacttgag

SEQ ID NO: 2876 - DNA, 798 bp, Muscodor strobelii
  misc_feature: SGI cDNA ID NO. 560603
  misc_feature: Elevated expression when VOC is produced
  misc_feature: Encodes the peptide sequence at SEQ ID NO 2877
atgcatctccatcacgggctgacaataccgagcggcttggttctaagcttgttggttcttcctacctttgcagctgagcctttcccatgggcaacatgcgtacgcgaaaatgctgaggccatcgccgtcaacgcaacttgcgcccgacttcaaatattgcgatcatacttgctgagcccctatagacaaatcgactcgttgagtcagctcgagtactgcttcaccagttctggatgcactcctgaggaggctgcggcggaagtaagacaaatcgcagaaaactgcgctgagaatcatgaatcgcatgagcttcgtcggtggaacgaggacgccataccaagcataacaacgatgcccctacgacgagcaacagattccccaaccgcaacgacctcgcccgcttcccttgagtctccaagtccctgcagcacatctcactccttcgggacgacggtatgcccaatcacgacgatagatggcaaagtctcggatttgccatgcacctcgacgaccgtcgcgacgctccggtgcgcagcgacaaacgtctgcaacaaggacggctcgtgccgatttcgccatgatgagttaacgccctctggcgtcgtgataacgattctcctgtcgctcgttgcgggactgacgttcgccatcattctgttcttctacgtgagagagaagcttgccatccggaaggttcgcagagatgaggcggtcatggaggctacggtgaaacagaaagctgcggtagcggcgagtcgcgaacagaattattcagatgttaatccgttgttgggttga

SEQ ID NO: 2877 - protein, 265 aa, Muscodor strobelii
  misc_feature: SGI Peptide ID NO. 560603
  misc_feature (23)..(248): NCBI GI: 46116456 Blast Desc: FG04070.1 [Gibberella zeae PH-1]
  misc_feature (33)..(248): NCBI GI: 256723187 Blast Desc: NECHADRAFT_104641 [Nectria haematococca mpVI 77-13-4]
  misc_feature (22)..(232): NCBI GI: 85105742 Blast Desc: NCU08681 [Neurospora crassa OR74A] gi|28923622|gb|EAA32794.1| [Neurospora crassa OR74A]
  misc_feature: Useful for introducing or modulating the production of volatile compounds
MHLHHGLTIPSGLVLSLLVLPTFAAEPFPWATCVRENAEAIAVNATCARLQILRSYLLSPYRQIDSLSQLEYCFTSSGCTPEEAAAEVRQIAENCAENHESHELRRWNEDAIPSITTMPLRRATDSPTATTSPASLESPSPCSTSHSFGTTVCPITTIDGKVSDLPCTSTTVATLRCAATNVCNKDGSCRFRHDELTPSGVVITILLSLVAGLTFAIILFFYVREKLAIRKVRRDEAVMEATVKQKAAVAASREQNYSDVNPLLG

SEQ ID NO: 2878 - DNA, 1511 bp, Muscodor strobelii
  misc_feature: SGI EST ID NO. CUFF.7167.1
  misc_feature: Variant of the nucleotide sequence at SEQ ID NO 2876
gcgggtttgagttaaatgaatgaatggtggtgtaggattggcacacgaacgccgcaatgatacgtcagaaataatctgggtgatatatctggagccacgaaatctcattgtgctttcttcgatctctcgacccctctttcgtcagatttgtttgcttcttgactcacaagtgttacagactgtcggtgaaaatcgacgttgcaaattgccgtgtccacctcttgtgattgtagagaacattacatcttcagggaaacgttcgattgcataatatcagacatactaccgacgcgctgctgcatcattcctcgcttctgtcatacaacttatagatacggcgaacctcagcttcttctgaatcatgcatctccatcacgggctgacaataccgagcggcttggttctaagcttgttggttcttcctacctttgcagctgagcctttcccatgggcaacatgcgtacgcgaaaatgctgaggccatcgccgtcaacgcaacttgcgcccgacttcaaatattgcgatcatacttgctgagcccctatagacaaatcgactcgttgagtcagctcgagtactgcttcaccagttctggatgcactcctgaggaggctgcggcggaagtaagacaaatcgcagaaaactgcgctgagaatcatgaatcgcatgagcttcgtcggtggaacgaggacgccataccaagcataacaacgatgcccctacgacgagcaacagattccccaaccgcaacgacctcgcccgcttcccttgagtctccaagtccctgcagcacatctcactccttcgggacgacggtatgcccaatcacgacgatagatggcaaagtctcggatttgccatgcacctcgacgaccgtcgcgacgctccggtgcgcagcgacaaacgtctgcaacaaggacggctcgtgccgatttcgccatgatgagttaacgccctctggcgtcgtgataacgattctcctgtcgctcgttgcgggactgacgttcgccatcattctgttcttctacgtgagagagaagcttgccatccggaaggttcgcagagatgaggcggtcatggaggctacggtgaaacagaaagctgcggtagcggcgagtcgcgaacagaattattcagatgttaatccgttgttgggttgagagagtccggtggcgtatggaagttttgaggatgctatggtatatctatcttgttatgacggtagcacagtcaagttcctgatatgtaagcggcgaccaatgtttcaggctgcatcgcagaaatacttctatgttttggcgatgtgacgtttggagagatataacttcggagcgcaatgtattatgaagtactgatgatattaccaatagcgatttctttttctgcttgatggtggataacttgaaaccgcctccgaaacggccgtctatatctgaggacaaagtgagcaagtcatgaccgactttgacattgtgaaagaaaggcaaaaagcacagtgaaaaaggcaaaaat

SEQ ID NO: 2879 - DNA, 1122 bp, Muscodor strobelii
  misc_feature: SGI cDNA ID NO. 560604
  misc_feature: Encodes the peptide sequence at SEQ ID NO 2880
atgggtgctcacgacgagcgtaagctggaggccgccacgcccgcgccgccggcccagagcattcaccctgcattctacattgctctttggattgctttaagttcaagcgtcattctcttcaacaaatgggtgcttttcagcgccaagttcgattatcccttgttcttgacaacatggcacatggcattcgctactttgatgacacaactcatggccaaattcactactacacttgactcgcgacacaaggtacccatgaacacccagacttacatgaaggctattgttcccattggaatcatgttcagcttgagtctgatctgtggtaacttcgcctacctgtacctaagcgtttccttcatccaaatgcttaaggccaccaacgctgttgctactctgcttgctacttgggctttcggcatggccgctcccaacctgaacaagttgttgaatgtttcggctattgtgattggtgttgccatcgcatcgtttggcgaactcaaatttgatggattcggcttcatcatccaagtcactggtattgtcgccgaggctctgcgtctagtcatggtgcagcgcctgttgagttctgatgacttcaagatggaccctctcgtttctgtctactactatgctcctgcatgtgctgttatcaacggattcttcaccttattgattgaacttccgcgcatgaccatgctcgacattctgcaagttggtctcatcaccttgcttgccaacgcttttgttgccttcttactcaacgtgtcggttgtgctattgattggcaagaccaatgccgttgtcctgactatgtctggcgtcttgaaggacattttgctagtcgttgcctccatgaccattttcggtgacccggtcactcttcaacagtactttggctactcgattgcattgggtggattggtttactacaagcttggcgctgagaagctgcaatcaatgatgacagatgctaaattgaccgttggcgaagttcgccgcagcaaccccgctggtttcaaattaggagccatctgcgctggcctctttttcgctgctctccttttcatgagctactctcgtggcttgccaggctcgtctctgccgacacctgtcgtctaa

SEQ ID NO: 2880 - protein, 373 aa, Muscodor strobelii
  misc_feature: SGI Peptide ID NO. 560604
  misc_feature (173)..(313): Pfam Id: PF03151 Pfam Desc: Triose-phosphate Transporter family
  misc_feature (23)..(319): Pfam Id: PF08449 Pfam Desc: UAA transporter family
  misc_feature (3)..(369): NCBI GI: 255953421 Blast Desc: Pc21g04170 [Penicillium chrysogenum Wisconsin 54-1255] gi|211589174|emb|CAP95314.1| Pc21g04170 [Penicillium chrysogenum Wisconsin 54-1255]
  misc_feature (10)..(360): NCBI GI: 242784009 Blast Desc: DUF250 domain membrane protein [Talaromyces stipitatus ATCC 10500] gi|218720447|gb|EED19866.1| DUF250 domain membrane protein [Talaromyces stipitatus ATCC 10500]
  misc_feature (10)..(360): NCBI GI: 212527534 Blast Desc: DUF250 domain membrane protein [Penicillium marneffei ATCC 18224] gi|212527536|ref|XP_002143925.1| DUF250 domain membrane protein [Penicillium marneffei ATCC 18224] DUF250 domain
  misc_feature (10)..(351): NCBI GI: 189210878 Blast Desc: PTRG_11439 [Pyrenophora tritici-repentis Pt-1C-BFP] gi|187977863|gb|EDU44489.1| PTRG_11439 [Pyrenophora tritici-repentis Pt-1C-BFP]
  misc_feature (10)..(342): NCBI GI: 169613068 Blast Desc: SNOG_09663 [Phaeosphaeria nodorum SN15] gi|111061808|gb|EAT82928.1| SNOG_09663 [Phaeosphaeria nodorum SN15]
  misc_feature (14)..(349): NCBI GI: 67525311 Blast Desc: AN3113.2 [Aspergillus nidulans FGSC A4] gi|40744508|gb|EAA63684.1| AN3113.2 [Aspergillus nidulans FGSC A4] gi|259485937|tpe|CBF83383.1| TPA: DMT family organic anion
  misc_feature (3)..(341): NCBI GI: 145233255 Blast Desc: An02g08670 [Aspergillus niger] gi|134056928|emb|CAK44275.1| protein product [Aspergillus niger]
  misc_feature (3)..(353): NCBI GI: 238489763 Blast Desc: DUF250 domain membrane protein [Aspergillus flavus NRRL3357] gi|220698507|gb|EED54847.1| DUF250 domain membrane protein [Aspergillus flavus NRRL3357]
  misc_feature (16)..(336): NCBI GI: 145236421 Blast Desc: An06g00300 [Aspergillus niger] gi|134075312|emb|CAK44946.1| protein product [Aspergillus niger]
  misc_feature (17)..(334): NCBI GI: 212538709 Blast Desc: conserved [Penicillium marneffei ATCC 18224] gi|210069252|gb|EEA23343.1| conserved [Penicillium marneffei ATCC 18224]
MGAHDERKLEAATPAPPAQSIHPAFYIALWIALSSSVILFNKWVLFSAKFDYPLFLTTWHMAFATLMTQLMAKFTTTLDSRHKVPMNTQTYMKAIVPIGIMFSLSLICGNFAYLYLSVSFIQMLKATNAVATLLATWAFGMAAPNLNKLLNVSAIVIGVAIASFGELKFDGFGFIIQVTGIVAEALRLVMVQRLLSSDDFKMDPLVSVYYYAPACAVINGFFTLLIELPRMTMLDILQVGLITLLANAFVAFLLNVSVVLLIGKTNAVVLTMSGVLKDILLVVASMTIFGDPVTLQQYFGYSIALGGLVYYKLGAEKLQSMMTDAKLTVGEVRRSNPAGFKLGAICAGLFFAALLFMSYSRGLPGSSLPTPVV

SEQ ID NO: 2881 - DNA, 1933 bp, Muscodor strobelii
  misc_feature: SGI EST ID NO. CUFF.7138.0
  misc_feature: Variant of the nucleotide sequence at SEQ ID NO 2879
aaaagatcgactagcataccgcctatcgcgcgctcgagccggacttgtcgattgtcccggtacttattcgctacataccccttgccttctagccgggcatgtgggcttgccgtcttagtagcggaacatgtagcatcaagtatagatctgcactcattaacggctgtccgttccaaccttgaaatctcagatcctgtctattgtaaatgctggtctgcctcaacttttcttcaagaaatttctaacttctgtccgacatcaccattgccagcactacttcatttcctcacctacgagtagcacgctgcgcgcgaaacttatctcgagagcctgttctcactcatctaatcctccattctccttgttcaaccttgtttctcgatcacaatgggtgctcacgacgagcgtaagctggaggccgccacgcccgcgccgccggcccagagcattcaccctgcattctacattgctctttggattgctttaagttcaagcgtcattctcttcaacaaatgggtgcttttcagcgccaagttcgattatcccttgttcttgacaacatggcacatggcattcgctactttgatgacacaactcatggccaaattcactactacacttgactcgcgacacaaggtacccatgaacacccagacttacatgaaggctattgttcccattggaatcatgttcagcttgagtctgatctgtggtaacttcgcctacctgtacctaagcgtttccttcatccaaatgcttaaggccaccaacgctgttgctactctgcttgctacttgggctttcggcatggccgctcccaacctgaacaagttgttgaatgtttcggctattgtgattggtgttgccatcgcatcgtttggcgaactcaaatttgatggattcggcttcatcatccaagtcactggtattgtcgccgaggctctgcgtctagtcatggtgcagcgcctgttgagttctgatgacttcaagatggaccctctcgtttctgtctactactatgctcctgcatgtgctgttatcaacggattcttcaccttattgattgaacttccgcgcatgaccatgctcgacattctgcaagttggtctcatcaccttgcttgccaacgcttttgttgccttcttactcaacgtgtcggttgtgctattgattggcaagaccaatgccgttgtcctgactatgtctggcgtcttgaaggacattttgctagtcgttgcctccatgaccattttcggtgacccggtcactcttcaacagtactttggctactcgattgcattgggtggattggtttactacaagcttggcgctgagaagctgcaatcaatgatgacagatgctaaattgaccgttggcgaagttcgccgcagcaaccccgctggtttcaaattaggagccatctgcgctggcctctttttcgctgctctccttttcatgagctactctcgtggcttgccaggctcgtctctgccgacacctgtcgtctaaatccacctaataggcatgattgccgatatctcttcgtcggccgtcgttcgatcatccctgttgcttaggggcttctcaccttgtcattttccaccgaccttcttcgacctaaaaagacttagaatggatgattagacgatgcgaggacagagccgcgctatgacctcccgctccatcatccgtgtaacattttgactctcatttgacagttgcacaggctgttcactgcctcgcctcacggcttttgctatctctacattttcatgtatatcttgtattgtttctcacggttggacaaaatactttggctagggacttatacacaatagaaactaaatgttaatgaatacgataaagttacattcatatgtactatatgtgtacatggtacctaattcgccgtctataggttacgaaacatggc

SEQ ID NO: 2882 - DNA, 2373 bp, Muscodor strobelii
  misc_feature: SGI cDNA ID NO. 560605
  misc_feature: Reduced expression when VOC is produced
  misc_feature: Encodes the peptide sequence at SEQ ID NO 2883
atgccagtcttccagcaagatctcggcaacgggaggcggagggagccggatcagtccgccgaccatcgcttccacgacgcctggtcgaccatggcgtcaccgtcaccgcccgatcaccatcaccaactccggcaccaaccatccgaagagagtatcaggactgaattctgcgaaggaccaatccccgacgtaccgtccgaaaacttcgtcgttccggctcccgacgacaatgacaatgcctccagtccaaatgcttgcaccgaccgtgcagacctgatcgagagaatcaagaaaggcgaaagcccaacctggatcccccaccgccaccatttggagtcgttctggggtcagcagcagccagtctctccagctcgcagcccagcacactccgcaacctcgccgagtttacttgctgcccccacgataacgcccgagagacgcagtgatgcagctgaggacgacaagaggcgacaggatgggatcgagctggagcggccccggtccgccctgcatagcggcgacttcacactcgacgacccggctgagacgagcccgcttcgagatcgcagtcatgctgccatgaaacagagatttgaaagcaatgaccattcatggctagccacttcgcctccgagagactttacccaattccagttcgacaagacccatccctttgccacgaggtcggatatcgcgcggtctgcgctgtcatctctatcctcgtctatctctactagtttcgcttaccagccgcccaccagtcctctggtgcagtccgagagtaatgatgatttgaatctagcctcgccaatgaacggtattgatctcggcgccaatctgactcgccagcagcggcggcacaccgttttgtcaggatcctacgggttctctgcgagcccactgcagagacaaccaccctcgttgcgacaggaaaggtcatttcccgctcaagctcaccaacctcgtcgatctctcacgtctgtgcccattcttgcaggttctgcatcctcacctcagacacccgcatttttgcattcaagacgtctatcaattggttctgatctctcgccacttcacgcgtccatggtgggctcttatgaggagagtatattgcgtgggcggatgtccacgacaccatcgaagcctctcgatttcctggcacagattggagtccttggtctgggtaaatgcaaggcgagtcttcgttgcccggctcacgtgaccttgccatttcctgctgtgttctacagttatgccagttcatcgcatggacggtctaaagaagatgatggtccaagtccctacgttgggcagatcgatctcgagaatggcttgccaaatcaggaagatcttacgagattgagacggaagcaccaagcgagagtggcggatcgaaaagcgggagaggaagacacgatgaaaagcagtgctcaagccacgaggactgctacctcaagcgcacgaacggctcaaagaaaacggaggtccgggtcgcctaaggcgcctccaggtggaagctatcgtattccggaacggggtcaaatccagataattatcaaaaacccgaacaaaactgctgtcaagctgttcttggtgccgtatgatctcgccggcatggaacccggcacaaagacatttgtgcggcaacgaagctactcgaatgggcctatcattgataacgtttccgatttcaaccgcgatctttcgacagaccgacctatactaagatatctggttcatttacacatatgttgcccttcgcggggacgttactatctatataaaaccattcgagtggtatttgctaaccgtgtccctgatgggaaagaaaaactcagaaatgagacaacgttgcctgaaccgcggttcagcccttatcgtcaaatgcatccgctctcggtcaataatctcggccgtccaggaccaacgccagaaggtagagacttctcaattcctgaagccagtcacgcgaccggtgcgatgtttagaagacgaagctctgttgtctccactgatgacggctttgcacccccaagtctccctcgtcatctgtattcttttgtggagggttacagatccgcagaacaatttcccgttagtgccacaagtagagacaccgtcaccataagcaaggagactggtgctgcggaactcccatcattcaactcgcctaacagtaactatccaacgacacaaaactcgagcgacaattcgagttcgggaggttacgatccaaattttgatcgatatgataaactgactggatatggtaacgccgctggggctgaaagcctcctatcccaacgccttaaatctctgggtgtccagaaaaggaacgtgcaacaagacgagcagggaaactcgcagacgtaa

SEQ ID NO: 2883 - protein, 790 aa, Muscodor strobelii
  misc_feature: SGI Peptide ID NO. 560605
  misc_feature (48)..(666): NCBI GI: 116196046 Blast Desc: CHGG_04621 [Chaetomium globosum CBS 148.51] gi|88180534|gb|EAQ88002.1| CHGG_04621 [Chaetomium globosum CBS 148.51]
  misc_feature (1)..(777): NCBI GI: 46123635 Blast Desc: FG06195.1 [Gibberella zeae PH-1]
  misc_feature (105)..(776): NCBI GI: 261352296 Blast Desc: conserved [Verticillium albo-atrum VaMs.102]
  misc_feature (1)..(777): NCBI GI: 39944354 Blast Desc: MGG_04188 [Magnaporthe grisea 70-15] gi|145014925|gb|EDJ99493.1| MGG_04188 [Magnaporthe grisea 70-15]
  misc_feature (87)..(667): NCBI GI: 225679544 Blast Desc: conserved [Paracoccidioides brasiliensis Pb03]
  misc_feature (87)..(667): NCBI GI: 226291275 Blast Desc: conserved [Paracoccidioides brasiliensis Pb18]
  misc_feature (161)..(667): NCBI GI: 226281611 Blast Desc: conserved [Paracoccidioides brasiliensis Pb01]
  misc_feature (87)..(639): NCBI GI: 261201564 Blast Desc: conserved [Ajellomyces dermatitidis SLH14081] gi|239590093|gb|EEQ72674.1| conserved [Ajellomyces dermatitidis SLH14081]
  misc_feature (87)..(639): NCBI GI: 239611803 Blast Desc: conserved [Ajellomyces dermatitidis ER-3]
  misc_feature (87)..(627): NCBI GI: 225558234 Blast Desc: conserved [Ajellomyces capsulatus G186AR]
  misc_feature: Useful for introducing or modulating the production of volatile compounds
MPVFQQDLGNGRRREPDQSADHRFHDAWSTMASPSPPDHHHQLRHQPSEESIRTEFCEGPIPDVPSENFVVPAPDDNDNASSPNACTDRADLIERIKKGESPTWIPHRHHLESFWGQQQPVSPARSPAHSATSPSLLAAPTITPERRSDAAEDDKRRQDGIELERPRSALHSGDFTLDDPAETSPLRDRSHAAMKQRFESNDHSWLATSPPRDFTQFQFDKTHPFATRSDIARSALSSLSSSISTSFAYQPPTSPLVQSESNDDLNLASPMNGIDLGANLTRQQRRHTVLSGSYGFSASPLQRQPPSLRQERSFPAQAHQPRRSLTSVPILAGSASSPQTPAFLHSRRLSIGSDLSPLHASMVGSYEESILRGRMSTTPSKPLDFLAQIGVLGLGKCKASLRCPAHVTLPFPAVFYSYASSSHGRSKEDDGPSPYVGQIDLENGLPNQEDLTRLRRKHQARVADRKAGEEDTMKSSAQATRTATSSARTAQRKRRSGSPKAPPGGSYRIPERGQIQIIIKNPNKTAVKLFLVPYDLAGMEPGTKTFVRQRSYSNGPIIDNVSDFNRDLSTDRPILRYLVHLHICCPSRGRYYLYKTIRVVFANRVPDGKEKLRNETTLPEPRFSPYRQMHPLSVNNLGRPGPTPEGRDFSIPEASHATGAMFRRRSSVVSTDDGFAPPSLPRHLYSFVEGYRSAEQFPVSATSRDTVTISKETGAAELPSFNSPNSNYPTTQNSSDNSSSGGYDPNFDRYDKLTGYGNAAGAESLLSQRLKSLGVQKRNVQQDEQGNSQT

SEQ ID NO: 2884 - DNA, 2824 bp, Muscodor strobelii
  misc_feature: SGI EST ID NO. CUFF.7192.1
  misc_feature: Variant of the nucleotide sequence at SEQ ID NO 2882
aaagaaccttccatctgatcgcaaatgtagtctttccagtcttttccccattcctgacgcctgacctcgccgagcttgccgccgacctggcatttgcccaaatgccagtcttccagcaagatctcggcaacgggaggcggagggagccggatcagtccgccgaccatcgcttccacgacgcctggtcgaccatggcgtcaccgtcaccgcccgatcaccatcaccaactccggcaccaaccatccgaagagagtatcaggactgaattctgcgaaggaccaatccccgacgtaccgtccgaaaacttcgtcgttccggctcccgacgacaatgacaatgcctccagtccaaatgcttgcaccgaccgtgcagacctgatcgagagaatcaagaaaggcgaaagcccaacctggatcccccaccgccaccatttggagtcgttctggggtcagcagcagccagtctctccagctcgcagcccagcacactccgcaacctcgccgagtttacttgctgcccccacgataacgcccgagagacgcagtgatgcagctgaggacgacaagaggcgacaggatgggatcgagctggagcggccccggtccgccctgcatagcggcgacttcacactcgacgacccggctgagacgagcccgcttcgagatcgcagtcatgctgccatgaaacagagatttgaaagcaatgaccattcatggctagccacttcgcctccgagagactttacccaattccagttcgacaagacccatccctttgccacgaggtcggatatcgcgcggtctgcgctgtcatctctatcctcgtctatctctactagtttcgcttaccagccgcccaccagtcctctggtgcagtccgagagtaatgatgatttgaatctagcctcgccaatgaacggtattgatctcggcgccaatctgactcgccagcagcggcggcacaccgttttgtcaggatcctacgggttctctgcgagcccactgcagagacaaccaccctcgttgcgacaggaaaggtcatttcccgctcaagctcaccaacctcgtcgatctctcacgtctgtgcccattcttgcaggttctgcatcctcacctcagacacccgcatttttgcattcaagacgtctatcaattggttctgatctctcgccacttcacgcgtccatggtgggctcttatgaggagagtatattgcgtgggcggatgtccacgacaccatcgaagcctctcgatttcctggcacagattggagtccttggtctgggtaaatgcaaggcgagtcttcgttgcccggctcacgtgaccttgccatttcctgctgtgttctacagttatgccagttcatcgcatggacggtctaaagaagatgatggtccaagtccctacgttgggcagatcgatctcgagaatggcttgccaaatcaggaagatcttacgagattgagacggaagcaccaagcgagagtggcggatcgaaaagcgggagaggaagacacgatgaaaagcagtgctcaagccacgaggactgctacctcaagcgcacgaacggctcaaagaaaacggaggtccgggtcgcctaaggcgcctccaggtggaagctatcgtattccggaacggggtcaaatccagataattatcaaaaacccgaacaaaactgctgtcaagctgttcttggtgccgtatgatctcgccggcatggaacccggcacaaagacatttgtgcggcaacgaagctactcgaatgggcctatcattgataacgtttccgatttcaaccgcgatctttcgacagaccgacctatactaagatatctggttcatttacacatatgttgcccttcgcggggacgttactatctatataaaaccattcgagtggtatttgctaaccgtgtccctgatgggaaagaaaaactcagaaatgagacaacgttgcctgaaccgcggttcagcccttatcgtcaaatgcatccgctctcggtcaataatctcggccgtccaggaccaacgccagaaggtagagacttctcaattcctgaagccagtcacgcgaccggtgcgatgtttagaagacgaagctctgttgtctccactgatgacggctttgcacccccaagtctccctcgtcatctgtattcttttgtggagggttacagatccgcagaacaatttcccgttagtgccacaagtagagacaccgtcaccataagcaaggagactggtgctgcggaactcccatcattcaactcgcctaacagtaactatccaacgacacaaaactcgagcgacaattcgagttcgggaggttacgatccaaattttgatcgatatgataaactgactggatatggtaacgccgctggggctgaaagcctcctatcccaacgccttaaatctctgggtgtccagaaaaggaacgtgcaacaagacgagcagggaaactcgcagacgtaagttagtaatcattctagacattgcactgagcaccggaattctcttcatcaacggcgtctggacatcatgaaattactcaacatcgtctttgctctactcgaactcggctggtgtattaggtgcataggattgtttgggtttacatggagttgtcggggatcactgtgatttgaactccatatccctaggcggtgattttatctgtacatatcgaagattgagaagccacataagggaccacgaatactagctggaattataatgttacgtagttaagtcgttggtcaaaaacaatatgttacctctgcataacttaatagcttggaatcaagtgacttggaatgaagcgc

SEQ ID NO: 2885 - DNA, 2049 bp, Muscodor strobelii
  misc_feature: SGI cDNA ID NO. 560606
  misc_feature: Encodes the peptide sequence at SEQ ID NO 2886
atgcagttggagtcgttctggggtcagcagcagccagtctctccagctcgcagcccagcacactccgcaacctcgccgagtttacttgctgcccccacgataacgcccgagagacgcagtgatgcagctgaggacgacaagaggcgacaggatgggatcgagctggagcggccccggtccgccctgcatagcggcgacttcacactcgacgacccggctgagacgagcccgcttcgagatcgcagtcatgctgccatgaaacagagatttgaaagcaatgaccattcatggctagccacttcgcctccgagagactttacccaattccagttcgacaagacccatccctttgccacgaggtcggatatcgcgcggtctgcgctgtcatctctatcctcgtctatctctactagtttcgcttaccagccgcccaccagtcctctggtgcagtccgagagtaatgatgatttgaatctagcctcgccaatgaacggtattgatctcggcgccaatctgactcgccagcagcggcggcacaccgttttgtcaggatcctacgggttctctgcgagcccactgcagagacaaccaccctcgttgcgacaggaaaggtcatttcccgctcaagctcaccaacctcgtcgatctctcacgtctgtgcccattcttgcaggttctgcatcctcacctcagacacccgcatttttgcattcaagacgtctatcaattggttctgatctctcgccacttcacgcgtccatggtgggctcttatgaggagagtatattgcgtgggcggatgtccacgacaccatcgaagcctctcgatttcctggcacagattggagtccttggtctgggtaaatgcaaggcgagtcttcgttgcccggctcacgtgaccttgccatttcctgctgtgttctacagttatgccagttcatcgcatggacggtctaaagaagatgatggtccaagtccctacgttgggcagatcgatctcgagaatggcttgccaaatcaggaagatcttacgagattgagacggaagcaccaagcgagagtggcggatcgaaaagcgggagaggaagacacgatgaaaagcagtgctcaagccacgaggactgctacctcaagcgcacgaacggctcaaagaaaacggaggtccgggtcgcctaaggcgcctccaggtggaagctatcgtattccggaacggggtcaaatccagataattatcaaaaacccgaacaaaactgctgtcaagctgttcttggtgccgtatgatctcgccggcatggaacccggcacaaagacatttgtgcggcaacgaagctactcgaatgggcctatcattgataacgtttccgatttcaaccgcgatctttcgacagaccgacctatactaagatatctggttcatttacacatatgttgcccttcgcggggacgttactatctatataaaaccattcgagtggtatttgctaaccgtgtccctgatgggaaagaaaaactcagaaatgagacaacgttgcctgaaccgcggttcagcccttatcgtcaaatgcatccgctctcggtcaataatctcggccgtccaggaccaacgccagaaggtagagacttctcaattcctgaagccagtcacgcgaccggtgcgatgtttagaagacgaagctctgttgtctccactgatgacggctttgcacccccaagtctccctcgtcatctgtattcttttgtggagggttacagatccgcagaacaatttcccgttagtgccacaagtagagacaccgtcaccataagcaaggagactggtgctgcggaactcccatcattcaactcgcctaacagtaactatccaacgacacaaaactcgagcgacaattcgagttcgggaggttacgatccaaattttgatcgatatgataaactgactggatatggtaacgccgctggggctgaaagcctcctatcccaacgccttaaatctctgggtgtccagaaaaggaacgtgcaacaagacgagcagggaaactcgcagacgtaa

SEQ ID NO: 2886 - protein, 682 aa, Muscodor strobelii
  misc_feature: SGI Peptide ID NO. 560606
  misc_feature (3)..(668): NCBI GI: 261352296 Blast Desc: conserved [Verticillium albo-atrum VaMs.102]
  misc_feature (2)..(558): NCBI GI: 116196046 Blast Desc: CHGG_04621 [Chaetomium globosum CBS 148.51] gi|88180534|gb|EAQ88002.1| CHGG_04621 [Chaetomium globosum CBS 148.51]
  misc_feature (24)..(669): NCBI GI: 46123635 Blast Desc: FG06195.1 [Gibberella zeae PH-1]
  misc_feature (1)..(669): NCBI GI: 39944354 Blast Desc: MGG_04188 [Magnaporthe grisea 70-15] gi|145014925|gb|EDJ99493.1| MGG_04188 [Magnaporthe grisea 70-15]
  misc_feature (53)..(559): NCBI GI: 226281611 Blast Desc: conserved [Paracoccidioides brasiliensis Pb01]
  misc_feature (35)..(559): NCBI GI: 225679544 Blast Desc: conserved [Paracoccidioides brasiliensis Pb03]
  misc_feature (35)..(559): NCBI GI: 226291275 Blast Desc: conserved [Paracoccidioides brasiliensis Pb18]
  misc_feature (54)..(531): NCBI GI: 261201564 Blast Desc: conserved [Ajellomyces dermatitidis SLH14081] gi|239590093|gb|EEQ72674.1| conserved [Ajellomyces dermatitidis SLH14081]
  misc_feature (54)..(531): NCBI GI: 239611803 Blast Desc: conserved [Ajellomyces dermatitidis ER-3]
  misc_feature (53)..(519): NCBI GI: 240109743 Blast Desc: CPC735_032480 [Coccidioides posadasii C735 delta SOWgp]
MQLESFWGQQQPVSPARSPAHSATSPSLLAAPTITPERRSDAAEDDKRRQDGIELERPRSALHSGDFTLDDPAETSPLRDRSHAAMKQRFESNDHSWLATSPPRDFTQFQFDKTHPFATRSDIARSALSSLSSSISTSFAYQPPTSPLVQSESNDDLNLASPMNGIDLGANLTRQQRRHTVLSGSYGFSASPLQRQPPSLRQERSFPAQAHQPRRSLTSVPILAGSASSPQTPAFLHSRRLSIGSDLSPLHASMVGSYEESILRGRMSTTPSKPLDFLAQIGVLGLGKCKASLRCPAHVTLPFPAVFYSYASSSHGRSKEDDGPSPYVGQIDLENGLPNQEDLTRLRRKHQARVADRKAGEEDTMKSSAQATRTATSSARTAQRKRRSGSPKAPPGGSYRIPERGQIQIIIKNPNKTAVKLFLVPYDLAGMEPGTKTFVRQRSYSNGPIIDNVSDFNRDLSTDRPILRYLVHLHICCPSRGRYYLYKTIRVVFANRVPDGKEKLRNETTLPEPRFSPYRQMHPLSVNNLGRPGPTPEGRDFSIPEASHATGAMFRRRSSVVSTDDGFAPPSLPRHLYSFVEGYRSAEQFPVSATSRDTVTISKETGAAELPSFNSPNSNYPTTQNSSDNSSSGGYDPNFDRYDKLTGYGNAAGAESLLSQRLKSLGVQKRNVQQDEQGNSQT

SEQ ID NO: 2887 - DNA, 2898 bp, Muscodor strobelii
  misc_feature: SGI EST ID NO. CUFF.7191.0
  misc_feature: Variant of the nucleotide sequence at SEQ ID NO 2885
aaagaaccttccatctgatcgcaaatgtagtctttccagtcttttccccattcctgacgcctgacctcgccgagcttgccgccgacctggcatttgcccaaatgccagtcttccagcaagatctcggcaacgggaggcggagggagccggatcagtccgccgaccatcgcttccacgacgcctggtcgaccatggcgtcaccgtcaccgcccgatcaccatcaccaactccggcaccaaccatccgaagagagtatcaggactgaattctgcgaaggaccaatccccgacgtaccgtccgaaaacttcgtcgttccggctcccgacgacaatgacaatgcctccagtccaaatgcttgcaccgaccgtgcagacctgatcgagagaatcaagaaaggcgaaagcccaacctggatcccccaccgccaccatgttcgtcctgccctttcaccatatctttccggcccggtctatgctcggagatctgacttgttgtatctatgcagttggagtcgttctggggtcagcagcagccagtctctccagctcgcagcccagcacactccgcaacctcgccgagtttacttgctgcccccacgataacgcccgagagacgcagtgatgcagctgaggacgacaagaggcgacaggatgggatcgagctggagcggccccggtccgccctgcatagcggcgacttcacactcgacgacccggctgagacgagcccgcttcgagatcgcagtcatgctgccatgaaacagagatttgaaagcaatgaccattcatggctagccacttcgcctccgagagactttacccaattccagttcgacaagacccatccctttgccacgaggtcggatatcgcgcggtctgcgctgtcatctctatcctcgtctatctctactagtttcgcttaccagccgcccaccagtcctctggtgcagtccgagagtaatgatgatttgaatctagcctcgccaatgaacggtattgatctcggcgccaatctgactcgccagcagcggcggcacaccgttttgtcaggatcctacgggttctctgcgagcccactgcagagacaaccaccctcgttgcgacaggaaaggtcatttcccgctcaagctcaccaacctcgtcgatctctcacgtctgtgcccattcttgcaggttctgcatcctcacctcagacacccgcatttttgcattcaagacgtctatcaattggttctgatctctcgccacttcacgcgtccatggtgggctcttatgaggagagtatattgcgtgggcggatgtccacgacaccatcgaagcctctcgatttcctggcacagattggagtccttggtctgggtaaatgcaaggcgagtcttcgttgcccggctcacgtgaccttgccatttcctgctgtgttctacagttatgccagttcatcgcatggacggtctaaagaagatgatggtccaagtccctacgttgggcagatcgatctcgagaatggcttgccaaatcaggaagatcttacgagattgagacggaagcaccaagcgagagtggcggatcgaaaagcgggagaggaagacacgatgaaaagcagtgctcaagccacgaggactgctacctcaagcgcacgaacggctcaaagaaaacggaggtccgggtcgcctaaggcgcctccaggtggaagctatcgtattccggaacggggtcaaatccagataattatcaaaaacccgaacaaaactgctgtcaagctgttcttggtgccgtatgatctcgccggcatggaacccggcacaaagacatttgtgcggcaacgaagctactcgaatgggcctatcattgataacgtttccgatttcaaccgcgatctttcgacagaccgacctatactaagatatctggttcatttacacatatgttgcccttcgcggggacgttactatctatataaaaccattcgagtggtatttgctaaccgtgtccctgatgggaaagaaaaactcagaaatgagacaacgttgcctgaaccgcggttcagcccttatcgtcaaatgcatccgctctcggtcaataatctcggccgtccaggaccaacgccagaaggtagagacttctcaattcctgaagccagtcacgcgaccggtgcgatgtttagaagacgaagctctgttgtctccactgatgacggctttgcacccccaagtctccctcgtcatctgtattcttttgtggagggttacagatccgcagaacaatttcccgttagtgccacaagtagagacaccgtcaccataagcaaggagactggtgctgcggaactcccatcattcaactcgcctaacagtaactatccaacgacacaaaactcgagcgacaattcgagttcgggaggttacgatccaaattttgatcgatatgataaactgactggatatggtaacgccgctggggctgaaagcctcctatcccaacgccttaaatctctgggtgtccagaaaaggaacgtgcaacaagacgagcagggaaactcgcagacgtaagttagtaatcattctagacattgcactgagcaccggaattctcttcatcaacggcgtctggacatcatgaaattactcaacatcgtctttgctctactcgaactcggctggtgtattaggtgcataggattgtttgggtttacatggagttgtcggggatcactgtgatttgaactccatatccctaggcggtgattttatctgtacatatcgaagattgagaagccacataagggaccacgaatactagctggaattataatgttacgtagttaagtcgttggtcaaaaacaatatgttacctctgcataacttaatagcttggaatcaagtgacttggaatgaagcgc

SEQ ID NO: 2888 - DNA, 1806 bp, Muscodor strobelii
  misc_feature: SGI cDNA ID NO. 560607
  misc_feature: Encodes the peptide sequence at SEQ ID NO 2889
atgcctcacaaacctgttattggcttgctgggcggtggacagttgggccgcatgctatgccaaagtgctgccgacttgggtgtgactgtcgctgtcttagacactgaagattgcccggccaagcagatcaaccacaacaatcttcatgtcacgggatctttcaaagatcctgaaaagatcaagttgctcgcctcacgatgtgacgtcttgactgtagagattgaacatgttgagtgcgacgttcttgaggagatcgctacaactggtattgagattccctcgccagacggaaatggcactaccaagaagattataccggtccatccctcatacaaaaccatccgtctcatacaggacaagttccagcaaaaggaatactttgcaaagcagggcctgccggtagctccccagatgtctatcgaatccggtcctaatcggatatcctcaatggagcatgcgggtcaaaatttcggcttccccttcatgatcaagggagcaaagggatcatacgatggtcgtggaaacttcttggtccgcaatctggaggatttgaaggaggctgccacacagatgggagatcagcctctgtacgctgaaaaattcgtgcctttccaaatggaacttgctgtaatggtaatgcgaaccgaagacgaccaaggcaatctgagggctgtttatccatatccggtcgtagaaactatacaccaagaaagtatatgcaccaaggtttttttcccgcctcgcaatgtagcagacaacatcaagcagcgtgctcaacaggttgctagcgatgttgtggccagcctctggggtcgtggtgtctttgcagtcgagatgttcctcgtgggtgatgagatccttgtaaacgaggtcgctcctcggccgcacaattctggccatttgagcattgagatggcccagatatctcaattccaagcgcagctatatgctatattagacaaagtacctgctagtaatttctcgatcgtaccgaaagtcccgtcagcaatcatgctaaatatcatcggtggcgcaaaacctcattcgcacgacgaattcgtcgacattaccgagaatttctttcatcccgaggctgatgtcgctcttcacctatacggaaaagagtcaaagccagcacgcaagattggccatatcactgcttgtggtctatcgtctgtgcaacaattagaacagcgaatcagcccgctcatacaagctatggactcgatgcgagccgaaagacttggctcgtctacatccagtgcttccactgattatacatcaagaccgagcccacttgtggcagttactatgggctctgattccgacttaacaacactaagcgctgggcttaagattcttgatgatttcgaggtgccttacatagtccgtatcacatcggcgcatcgcacaccacaccacatgatgcaatttgccgctgaaaccgccaagtccggctgtaaggtgattattgctgccgctggaggcgctgcgcatcttcctggtatgttggcgagcgaggttcatttgcccgttatcggcgtgcctgtaagagccagtgtattagatggaatggatagtttgctctccatcgtacaaatgcctcgtggtatcccttgtgcaacagtaggaattggaaattcgacgaacgctgcgcttcttgccatcagaatattaggcacaacatttccggagtacgcacacaaaatgcagtcgtaccagaagaatatggaggcagaagtgttgaagaaagatgatatcatcttctccaacggctggagagaatatctcgaaaagaaaggctag

SEQ ID NO: 2889 - protein, 601 aa, Muscodor strobelii
  misc_feature: SGI Peptide ID NO. 560607
  misc_feature (432)..(588): Pfam Id: PF00731 Pfam Desc: AIR carboxylase
  misc_feature (119)..(306): Pfam Id: PF02222 Pfam Desc: ATP-grasp domain
  misc_feature (1)..(600): NCBI GI: 261356355 Blast Desc: phosphoribosylaminoimidazole carboxylase [Verticillium albo-atrum VaMs.102]
  misc_feature (5)..(598): NCBI GI: 85117651 Blast Desc: NCU03194 [Neurospora crassa OR74A] gi|28927101|gb|EAA36058.1| NCU03194 [Neurospora crassa OR74A]
  misc_feature (17)..(601): NCBI GI: 145613926 Blast Desc: MGG_01256 [Magnaporthe grisea 70-15] gi|145020936|gb|EDK05065.1| MGG_01256 [Magnaporthe grisea 70-15]
  misc_feature (18)..(600): NCBI GI: 256735552 Blast Desc: NECHADRAFT_57703 [Nectria haematococca mpVI 77-13-4]
  misc_feature (17)..(597): NCBI GI: 171687273 Blast Desc: protein product [Podospora anserina] gi|170943598|emb|CAP69250.1| protein product [Podospora anserina]
  misc_feature (5)..(601): NCBI GI: 116181476 Blast Desc: CHGG_01366 [Chaetomium globosum CBS 148.51] gi|88185663|gb|EAQ93131.1| CHGG_01366 [Chaetomium globosum CBS 148.51]
  misc_feature (20)..(601): NCBI GI: 46138309 Blast Desc: FG10669.1 [Gibberella zeae PH-1]
  misc_feature (18)..(596): NCBI GI: 154290314 Blast Desc: BC1G_15666 [Botryotinia fuckeliana B05.10] gi|150847802|gb|EDN22995.1| BC1G_15666 [Botryotinia fuckeliana B05.10]
  misc_feature (18)..(596): NCBI GI: 156045427 Blast Desc: SS1G_09902 [Sclerotinia sclerotiorum 1980] gi|154694297|gb|EDN94035.1| SS1G_09902 [Sclerotinia sclerotiorum 1980]
  misc_feature (17)..(601): NCBI GI: 169613064 Blast Desc: SNOG_09661 [Phaeosphaeria nodorum SN15] gi|111061806|gb|EAT82926.1| SNOG_09661 [Phaeosphaeria nodorum SN15]
  misc_feature (17)..(600): SWISSPROT Homolog: EC 4.1.1.21 Phosphoribosylaminoimidazole carboxylase
MPHKPVIGLLGGGQLGRMLCQSAADLGVTVAVLDTEDCPAKQINHNNLHVTGSFKDPEKIKLLASRCDVLTVEIEHVECDVLEEIATTGIEIPSPDGNGTTKKIIPVHPSYKTIRLIQDKFQQKEYFAKQGLPVAPQMSIESGPNRISSMEHAGQNFGFPFMIKGAKGSYDGRGNFLVRNLEDLKEAATQMGDQPLYAEKFVPFQMELAVMVMRTEDDQGNLRAVYPYPVVETIHQESICTKVFFPPRNVADNIKQRAQQVASDVVASLWGRGVFAVEMFLVGDEILVNEVAPRPHNSGHLSIEMAQISQFQAQLYAILDKVPASNFSIVPKVPSAIMLNIIGGAKPHSHDEFVDITENFFHPEADVALHLYGKESKPARKIGHITACGLSSVQQLEQRISPLIQAMDSMRAERLGSSTSSASTDYTSRPSPLVAVTMGSDSDLTTLSAGLKILDDFEVPYIVRITSAHRTPHHMMQFAAETAKSGCKVIIAAAGGAAHLPGMLASEVHLPVIGVPVRASVLDGMDSLLSIVQMPRGIPCATVGIGNSTNAALLAIRILGTTFPEYAHKMQSYQKNMEAEVLKKDDIIFSNGWREYLEKKG

SEQ ID NO: 2890 - DNA, 2290 bp, Muscodor strobelii
  misc_feature: SGI EST ID NO. CUFF.7149.0
  misc_feature: Variant of the nucleotide sequence at SEQ ID NO 2888
aaactaccgcttcaccccacattcaccgcctgcttcattaagcagaacgttttattcctttcccactccctgccaggtacgcttctacaggtatgagtgcttgaaggatcgtgaatagtcgaatacctcaaattcctccgtaattcggctgtgcgccaacttcgccatcgatttaatccaatattgctcaattgagaggtatcagatctcctccagcatcatgcctcacaaacctgttattggcttgctgggcggtggacagttgggccgcatgctatgccaaagtgctgccgacttgggtgtgactgtcgctgtcttagacactgaagattgcccggccaagcagatcaaccacaacaatcttcatgtcacgggatctttcaaagatcctgaaaagatcaagttgctcgcctcacgatgtgacgtcttgactgtagagattgaacatgttgagtgcgacgttcttgaggagatcgctacaactggtattgagattccctcgccagacggaaatggcactaccaagaagattataccggtccatccctcatacaaaaccatccgtctcatacaggacaagttccagcaaaaggaatactttgcaaagcagggcctgccggtagctccccagatgtctatcgaatccggtcctaatcggatatcctcaatggagcatgcgggtcaaaatttcggcttccccttcatgatcaagggagcaaagggatcatacgatggtcgtggaaacttcttggtccgcaatctggaggatttgaaggaggctgccacacagatgggagatcagcctctgtacgctgaaaaattcgtgcctttccaaatggaacttgctgtaatggtaatgcgaaccgaagacgaccaaggcaatctgagggctgtttatccatatccggtcgtagaaactatacaccaagaaagtatatgcaccaaggtttttttcccgcctcgcaatgtagcagacaacatcaagcagcgtgctcaacaggttgctagcgatgttgtggccagcctctggggtcgtggtgtctttgcagtcgagatgttcctcgtgggtgatgagatccttgtaaacgaggtcgctcctcggccgcacaattctggccatttgagcattgagatggcccagatatctcaattccaagcgcagctatatgctatattagacaaagtacctgctagtaatttctcgatcgtaccgaaagtcccgtcagcaatcatgctaaatatcatcggtggcgcaaaacctcattcgcacgacgaattcgtcgacattaccgagaatttctttcatcccgaggctgatgtcgctcttcacctatacggaaaagagtcaaagccagcacgcaagattggccatatcactgcttgtggtctatcgtctgtgcaacaattagaacagcgaatcagcccgctcatacaagctatggactcgatgcgagccgaaagacttggctcgtctacatccagtgcttccactgattatacatcaagaccgagcccacttgtggcagttactatgggctctgattccgacttaacaacactaagcgctgggcttaagattcttgatgatttcgaggtgccttacatagtccgtatcacatcggcgcatcgcacaccacaccacatgatgcaatttgccgctgaaaccgccaagtccggctgtaaggtgattattgctgccgctggaggcgctgcgcatcttcctggtatgttggcgagcgaggttcatttgcccgttatcggcgtgcctgtaagagccagtgtattagatggaatggatagtttgctctccatcgtacaaatgcctcgtggtatcccttgtgcaacagtaggaattggaaattcgacgaacgctgcgcttcttgccatcagaatattaggcacaacatttccggagtacgcacacaaaatgcagtcgtaccagaagaatatggaggcagaagtgttgaagaaagatgatatcatcttctccaacggctggagagaatatctcgaaaagaaaggctaggacgatataacagtctatgcgtattgttgataacactctagtcacgtctagtcattgctttgccgaggctatgtcgtcgttgcatcgcagtcaacgcagaaagtttgcttagaagcgattgctttatcactatgaaagacccgccgctgtcactcctgatagccaaacctgcttcaccgtgattaccagtgccatcgctgtctgcgacggaagcaatgtctccacagcccaattaatcttcaggtagaaacaagctgctagatg

SEQ ID NO: 2891 - DNA, 666 bp, Muscodor strobelii
  misc_feature: SGI cDNA ID NO. 560608
  misc_feature: Encodes the peptide sequence at SEQ ID NO 2892
atgttggtaattctaattcctgtggctcacactaccaccatagccatttccaaccttctgttcgacctttgtaactaccctgagtgggcaccagaactcggggacgaaatgcagcctgtcgtcgacgaacttagtccgttagacgagggaatgcctgtgaaggattgggtggccagactagagctactcgacagcttctttaacgagagtcgaagattgagccggccagtcacaatcgctccgaattgttatggtatggaagatgttactttcaaagatggtctgttggtccctgagggttcgcacattggttttgttggcattcacaatcagattgatccccaaatctcacccgagccggagcgattcgaccctctacgaagtttgagaaagagacagtctgctctagaagaaagagaaaagaagctggctggccttcctagcagagaaaaccttgcctttggatacggaagtcaggtctgcccaggaaggcctatcgcggttaacgtggtcacgatggttacatcaaagttggccacagagtatgaattcaagtctcctcccggtagagcaggaacgacaaacaagatccatttgcttgagttcatcttcctggatcctgctgcaaccgtgttgatgcgaaagagagtggtagcacgaagctga

SEQ ID NO: 2892 - protein, 221 aa, Muscodor strobelii
  misc_feature: SGI Peptide ID NO. 560608
  misc_feature (86)..(167): Pfam Id: PF00067 Pfam Desc: Cytochrome P450
  misc_feature (1)..(216): NCBI GI: 242800614 Blast Desc: cytochrome P450, [Talaromyces stipitatus ATCC 10500] gi|218716969|gb|EED16390.1| cytochrome P450, [Talaromyces stipitatus ATCC 10500]
  misc_feature (3)..(217): NCBI GI: 85090597 Blast Desc: NCU09274 [Neurospora crassa OR74A] gi|28919860|gb|EAA29257.1| [Neurospora crassa OR74A]
  misc_feature (11)..(218): NCBI GI: 169598079 Blast Desc: SNOG_01838 [Phaeosphaeria nodorum SN15] gi|160707654|gb|EAT91487.2| SNOG_01838 [Phaeosphaeria nodorum SN15]
  misc_feature (2)..(219): NCBI GI: 119494789 Blast Desc: cytochrome P450 monooxygenase, [Neosartorya fischeri NRRL 181] gi|119412362|gb|EAW22303.1| cytochrome P450 monooxygenase, [Neosartorya fischeri NRRL 181]
  misc_feature (2)..(219): NCBI GI: 259486929 Blast Desc: TPA: cytochrome P450, (Eurofung) [Aspergillus nidulans FGSC A4]
  misc_feature (2)..(219): NCBI GI: 67522282 Blast Desc: AN1598.2 [Aspergillus nidulans FGSC A4] gi|40745149|gb|EAA64305.1| AN1598.2 [Aspergillus nidulans FGSC A4]
  misc_feature (1)..(216): NCBI GI: 242771211 Blast Desc: cytochrome P450, [Talaromyces stipitatus ATCC 10500] gi|242821273|ref|XP_002487646.1| cytochrome P450, [Talaromyces stipitatus ATCC 10500] gi|218712567|gb|EED11992.1| cytochrome
  misc_feature (1)..(219): NCBI GI: 240108704 Blast Desc: Cytochrome P450 family protein [Coccidioides posadasii C735 delta SOWgp]
  misc_feature (1)..(219): NCBI GI: 119186083 Blast Desc: CIMG_03089 [Coccidioides immitis RS]
  misc_feature (1)..(218): NCBI GI: 67902394 Blast Desc: AN8184.2 [Aspergillus nidulans FGSC A4] gi|40740016|gb|EAA59206.1| AN8184.2 [Aspergillus nidulans FGSC A4] gi|259480957|tpe|CBF74058.1| TPA: cytochrome P450, (Eurofung)
  misc_feature (1)..(216): SWISSPROT Homolog: EC 1.14.13.78 Ent-kaurene oxidase
MLVILIPVAHTTTIAISNLLFDLCNYPEWAPELGDEMQPVVDELSPLDEGMPVKDWVARLELLDSFFNESRRLSRPVTIAPNCYGMEDVTFKDGLLVPEGSHIGFVGIHNQIDPQISPEPERFDPLRSLRKRQSALEEREKKLAGLPSRENLAFGYGSQVCPGRPIAVNVVTMVTSKLATEYEFKSPPGRAGTTNKIHLLEFIFLDPAATVLMRKRVVARS

SEQ ID NO: 2893 - DNA, 729 bp, Muscodor strobelii
  misc_feature: SGI cDNA ID NO. 560609
  misc_feature: Encodes the peptide sequence at SEQ ID NO 2894
atggctaccaccaaaaagagaccactcgacgccgacaatgtctctgcgcctgcagcgaagaagcatcgcaagggctttagcgtagggcctagcaatcttccagatggtccctggaagcgcaaggtcgaccggataaagaaggatctgattcataaagccaaggtcaagaaggcatacaagaagatcaagaccgccgagatcaagaccgcctcctcgagaaacacaaagcctgatcccgatgtcaacaccactatagtagccccagagaacgcggacgacgggcacgacggcgatggcaaccgggagacgagtgctagtatagaaagaacagagagtgacgcggaagaagagccaaaaatccacccacagcgtcaggccttagttgatgaccacaacgatactataatcgctgacgatgaaaatacacgatcatccagctcaaagttcgacgcaaaaggacccagacctcgttatcctaagaagaaaccaggctatttcgacaaggcagtgtcagtagcagagcgcaagagagctgaggctgccgaaagggctgccgagcatgaacgtagagcggccgaacgccagcgaaagatccaagaccgcgagcgcttccgccgcgcactcgcaaaggctcggaaaccgggacgagatggccaacgccgtcttgggcgcgagagtggtctgctactcgagaaagcgaagagattgatgggagagagtgggacctga

SEQ ID NO: 2894 - protein, 242 aa, Muscodor strobelii
  misc_feature: SGI Peptide ID NO. 560609
  misc_feature (20)..(240): NCBI GI: 116196044 Blast Desc: CHGG_04620 [Chaetomium globosum CBS 148.51] gi|88180533|gb|EAQ88001.1| CHGG_04620 [Chaetomium globosum CBS 148.51]
  misc_feature (6)..(240): NCBI GI: 261201566 Blast Desc: conserved [Ajellomyces dermatitidis SLH14081] gi|239590094|gb|EEQ72675.1| conserved [Ajellomyces dermatitidis SLH14081] gi|239611804|gb|EEQ88791.1| conserved [Ajellomyces
  misc_feature (6)..(240): NCBI GI: 226291276 Blast Desc: conserved [Paracoccidioides brasiliensis Pb18]
  misc_feature (21)..(240): NCBI GI: 225679545 Blast Desc: conserved [Paracoccidioides brasiliensis Pb03]
  misc_feature (15)..(239): NCBI GI: 256726871 Blast Desc: NECHADRAFT_76285 [Nectria haematococca mpVI 77-13-4]
  misc_feature (6)..(240): NCBI GI: 226281610 Blast Desc: conserved [Paracoccidioides brasiliensis Pb01]
  misc_feature (21)..(240): NCBI GI: 225558233 Blast Desc: conserved [Ajellomyces capsulatus G186AR]
  misc_feature (21)..(240): NCBI GI: 240277188 Blast Desc: conserved [Ajellomyces capsulatus H143]
  misc_feature (6)..(239): NCBI GI: 85107189 Blast Desc: NCU07687 [Neurospora crassa OR74A] gi|28923932|gb|EAA33093.1| NCU07687 [Neurospora crassa OR74A]
  misc_feature (21)..(240): NCBI GI: 154285856 Blast Desc: conserved [Ajellomyces capsulatus NAm1] gi|150407364|gb|EDN02905.1| conserved [Ajellomyces capsulatus NAm1]
MATTKKRPLDADNVSAPAAKKHRKGFSVGPSNLPDGPWKRKVDRIKKDLIHKAKVKKAYKKIKTAEIKTASSRNTKPDPDVNTTIVAPENADDGHDGDGNRETSASIERTESDAEEEPKIHPQRQALVDDHNDTIIADDENTRSSSSKFDAKGPRPRYPKKKPGYFDKAVSVAERKRAEAAERAAEHERRAAERQRKIQDRERFRRALAKARKPGRDGQRRLGRESGLLLEKAKRLMGESGT

SEQ ID NO: 2895 - DNA, 2949 bp, Muscodor strobelii
  misc_feature: SGI EST ID NO. CUFF.7222.0
  misc_feature: Variant of the nucleotide sequence at SEQ ID NO 2893
gctttctcaacacctccctctgcgcctacctttcgtcgctacctatttagaggtaccgcgatagccacatcccacatactactggtcccttctgtccagctagtcgcacctctcgatggctaccaccaaaaagagaccactcgacgccgacaatgtctctgcgcctgcagcgaagaagcatcgcaagggctttagcgtagggcctagcaatcttccagatggtccctggaagcgcaaggtcgaccggataaagaaggatctgattcataaagccaaggtcaagaaggcatacaagaagatcaagaccgccgagatcaagaccgcctcctcgagaaacacaaagcctgatcccgatgtcaacaccactatagtagccccagagaacgcggacgacgggcacgacggcgatggcaaccgggagacgagtgctagtatagaaagaacagagagtgacgcggaagaagagccaaaaatccacccacagcgtcaggccttagttgatgaccacaacgatactataatcgctgacgatgaaaatacacgatcatccagctcaaagttcgacgcaaaaggacccagacctcgttatcctaagaagaaaccaggctatttcgacaaggcagtgtcagtagcagagcgcaagagagctgaggctgccgaaagggctgccgagcatgaacgtagagcggccgaacgccagcgaaagatccaagaccgcgagcgcttccgccgcgcactcgcaaaggctcggaaaccgggacgagatggccaacgccgtcttgggcgcgagagtggtctgctactcgagaaagcgaagagattgatgggagagagtgggacctgagcaagaagattagtatgagtgttctacgatgcccgaggtagtcgttgaaataatgtcacgcgaagaggataacacctactcgaatacgagtcgagggattgctgtccaaagctgagtactgaaatatcgccgaatccgtacaaaaacgagagcgtcaattgggaccatgaaatcgggttgagatatgatagccagagctcctttccaaggaattatgagcgttacaggtcaaacggctctgtaccacatcagccctggcatcaaaacacagagaatttcggtcaacttgatgagcttcgcgcgacacaaggagatctttaggctgctgttactgaacgagcatcataactattaagttgctcgatcctagccaatgaaatactcgagggatggtcctaggtcgcaatctcgaccgtgcactagtgagagtataattctgaggccctttaccccctttcctgttcgcagccgaactactcaaagtaattgcagactgtggcacgatcaatttgcacgttactctcgtctgttttcttgacgttgctttactcaagatgattcttaataattctaccaagatcgtgactattgatgcaggcccctaattagtagatatatacatgaaatatgccttagtgagcccttcattaagcgcaaagatcacgtataccagtatctttccagattaatgaccagcgtcctcaccaactaagctgttcaatcccacatcgctctcattatatcacaacaacatagtgaaatgataattagatttctattagactgcgcttcttggtccagtctgaactccagggtatcgttgtgaagaatacctatatcaaacgttgcaattggttccttgctcggcggacatgtggtcgacgagaagatcaacctaatgcaaatgattaaacgaggttgtcaaagaaatgtcgtgaatctattgagaatatttcctatccgggagttccgttctcgggtcatcgaatggcgccggcaactcggccctcgaaattcgcctcgctactggaatcttgtcggcataaggaatcttaacgccataactgtatacgtccgagcctgctaattccccggtgtatattatgccatcttgatgtcccgagagttctcccggccaggcactatggacttcggcagccgggggcggagaatatgttacgcttgaatgaggcgagtatactatcggcacaccatctttcggccactacaacagaattagtcagtaattactctcgatagcgggttgatcaaggtctctgaagtcgtgaaacacgtttttagagcacttgctccagagcaaacagactggctcctagcagatttctgagcaggggcaacatagctccaggaattgcttacaggctcaggcttgtactcggcgattccatctacatctgagtcaccggccgagtcatgacgcgacgatccgatcttcgtgttgcgcgcgcgctgccgtttgagatagatgaaagccgtagccatgatgacggcgacgcctgccacacccccaatcgatccgccaacgatggttccggtagacgctgtgctcttctcattgcccatggtggaatttgtcaaattcgttcccataaaaaagccttgcaactcttcgtcgtcccaatgcacgtttttcaagtttcccgctgcataccattccttaactacctgtgggctatcgtaggccgtaatattaggatcgtatgagtccgtcctagtatgtcacataagtcaataacttactcgatagtcagggggttgtcgtagggctcttttatgaaagacatccagtctcttggaagagaaaacagggtttggggaccgcaccattgcatgttcgtcatgtcgaatattcccaaaccataagtccacgcatctgctgttgttggggccgtgaaagtcctattctgaccatctacaccacccatgctcagcatctgtcgctttccctttccgacaatcgcacagccatggtcagaccttggaacagtcgttgggcctttgaaaaagttgaaactgggtagggaaagaacagtgatatcgcccgacgttgcacggatttggtccgaaactccaccgtagatgaa

SEQ ID NO: 2896 - DNA, 1845 bp, Muscodor strobelii
  misc_feature: SGI cDNA ID NO. 560610
  misc_feature: Encodes the peptide sequence at SEQ ID NO 2897
atgaagggccgatgctcgctcttggtgtttctctcgttatgggggacctttggaattgcgagagagtttacgagtcgacgggacaataacatcagcaacagtagcgatattcccaccgcggaaaacttctttcgccgggcatgtcatacagtcgcggtactaggcgattatctctacgtcgatggcggacaggttacggagcgaacggatggaagctctaacatcagttccgcttacgctgttaatacaacctggtcgatcgatttgaccagaaaatggactaatgagactgttccgatccgttcgattcctaaagcatcacctcgcatgggcaagcagatccactggaccgatacctcatctaatagcctctacacctggggcggattcgtggcagatgcttcaccaccaccagaacacgaagtgtggaggttccaagcagacgggtcgggtggtggtgcgtggtcactggtctcgcagcaggattatcggacatttaccggactaaaaaatccattcggcgcttcctttgctcaaaatggcgacataggctatgcatttggcggtggtgttgaagcaagatcggactcgtcggttcaaaaggacttaccaggctacgccttgccggggttgatatcatacaattttcaaacgggggaatggaccaatacctctacctcgagttacggtgggtacggcacgaatataaatggcagggccgagatggttcctttcggtccaaatggactccttctctttctcggcggtgcagagacacccgtcgacgctactaacgaaacgatcgtggaagtcagctggaatagcatcaccctgatcgacccaatcactcaaaaatggtataaacagtcaacgactggtgacaagccgccgaccatagagtcgcattgctccgttggtgtaccgggacccaacggaacttacgagatcttcatctacggtggagtttcggaccaaatccgtgcaacgtcgggcgatatcactgttctttccctacccagtttcaactttttcaaaggcccaacgactgttccaaggtctgaccatggctgtgcgattgtcggaaagggaaagcgacagatgctgagcatgggtggtgtagatggtcagaataggactttcacggccccaacaacagcagatgcgtggacttatggtttgggaatattcgacatgacgaacatgcaatggacggactcatacgatcctaatattacggcctacgatagcccacaggtagttaaggaatggtatgcagcgggaaacttgaaaaacgtgcattgggacgacgaagagttgcaaggcttttttatgggaacgaatttgacaaattccaccatgggcaatgagaagagcacagcgtctaccggaaccatcgttggcggatcgattgggggtgtggcaggcgtcgccgtcatcatggctacggctttcatctatctcaaacggcagcgcgcgcgcaacacgaagatcggatcgtcgcgtcatgactcggccggtgactcagatgtagatggaatcgccgagtacaagcctgagccttggccgaaagatggtgtgccgatagtatactcgcctcattcaagcgtaacatattctccgcccccggctgccgaagtccatagtgcctggccgggagaactctcgggacatcaagatggcataatatacaccggggaattagcaggctcggacgtatacagttatggcgttaagattccttatgccgacaagattccagtagcgaggcgaatttcgagggccgagttgccggcgccattcgatgacccgagaacggaactcccggataggaaatattctcaatag

SEQ ID NO: 2897 - protein, 614 aa, Muscodor strobelii
  misc_feature: SGI Peptide ID NO. 560610
  misc_feature (1)..(434): NCBI GI: 261360409 Blast Desc: kelch repeat protein [Verticillium albo-atrum VaMs.102]
  misc_feature (31)..(496): NCBI GI: 170940116 Blast Desc: protein product [Podospora anserina]
  misc_feature (5)..(444): NCBI GI: 116196704 Blast Desc: CHGG_04950 [Chaetomium globosum CBS 148.51] gi|88180863|gb|EAQ88331.1| CHGG_04950 [Chaetomium globosum CBS 148.51]
  misc_feature (81)..(443): NCBI GI: 261354570 Blast Desc: conserved [Verticillium albo-atrum VaMs.102]
  misc_feature (6)..(541): NCBI GI: 116197913 Blast Desc: CHGG_07112 [Chaetomium globosum CBS 148.51] gi|88178391|gb|EAQ85859.1| CHGG_07112 [Chaetomium globosum CBS 148.51]
  misc_feature (89)..(490): NCBI GI: 85067719 Blast Desc: NCU04751 [Neurospora crassa OR74A] gi|28921770|gb|EAA31048.1| [Neurospora crassa OR74A] gi|40882304|emb|CAF06127.1| conserved [Neurospora crassa]
  misc_feature (33)..(450): NCBI GI: 85091060 Blast Desc: NCU09651 [Neurospora crassa OR74A] gi|28920099|gb|EAA29481.1| [Neurospora crassa OR74A]
  misc_feature (104)..(518): NCBI GI: 145616444 Blast Desc: MGG_14330 [Magnaporthe grisea 70-15] gi|145010144|gb|EDJ94800.1| MGG_14330 [Magnaporthe grisea 70-15]
  misc_feature (116)..(465): NCBI GI: 145612827 Blast Desc: MGG_12441 [Magnaporthe grisea 70-15] gi|145019938|gb|EDK04166.1| MGG_12441 [Magnaporthe grisea 70-15]
  misc_feature (38)..(558): NCBI GI: 145603733 Blast Desc: MGG_13292 [Magnaporthe grisea 70-15] gi|145011899|gb|EDJ96555.1| MGG_13292 [Magnaporthe grisea 70-15]
MKGRCSLLVFLSLWGTFGIAREFTSRRDNNISNSSDIPTAENFFRRACHTVAVLGDYLYVDGGQVTERTDGSSNISSAYAVNTTWSIDLTRKWTNETVPIRSIPKASPRMGKQIHWTDTSSNSLYTWGGFVADASPPPEHEVWRFQADGSGGGAWSLVSQQDYRTFTGLKNPFGASFAQNGDIGYAFGGGVEARSDSSVQKDLPGYALPGLISYNFQTGEWTNTSTSSYGGYGTNINGRAEMVPFGPNGLLLFLGGAETPVDATNETIVEVSWNSITLIDPITQKWYKQSTTGDKPPTIESHCSVGVPGPNGTYEIFIYGGVSDQIRATSGDITVLSLPSFNFFKGPTTVPRSDHGCAIVGKGKRQMLSMGGVDGQNRTFTAPTTADAWTYGLGIFDMTNMQWTDSYDPNITAYDSPQVVKEWYAAGNLKNVHWDDEELQGFFMGTNLTNSTMGNEKSTASTGTIVGGSIGGVAGVAVIMATAFIYLKRQRARNTKIGSSRHDSAGDSDVDGIAEYKPEPWPKDGVPIVYSPHSSVTYSPPPAAEVHSAWPGELSGHQDGIIYTGELAGSDVYSYGVKIPYADKIPVARRISRAELPAPFDDPRTELPDRKYSQ

SEQ ID NO: 2898 - DNA, 4971 bp, Muscodor strobelii
  misc_feature: SGI EST ID NO. CUFF.7223.2
  misc_feature: Variant of the nucleotide sequence at SEQ ID NO 2896
cgccagcctgccttcgttgttggcgggaacgtggtagctcgcagcaaccactccatcatgtattaagcactcacttctctgatatgcgagtagacaatagtgactgtctcaatatagacagtacaacatcattgacctaattgtacagtagcgatctctggcatgtcttacgggtttgaagatgttctggcaaaatctcgtgtgtgcctggggttgaacgaggaaagaagctccgtccaaatagcaaacggatggcaggactccacggtgctgatgacagaaactcaaatcgcgctgtgacagtcgaagcgcagacaacgatccttgcttgcgaccttggaaaatgaacaggggttgcattaagcctttccctccaagccagcaggttacattccagcgtttttgaaggagcaggaatggattccttggagcaggaagggagattcttgcctctcattgtcttcatggcgatgcactgagacgcattgacgggttatttcactcattcacaagctcctgcctgatcgatctttacgtgttgaacattcctccgccatttacaagtacagtaacgagactcgcaagagacagggaccgccgcccgcgtactcttcactacattagactaacaagcgtttctatctcaatgagtcggatcagcatatttgcacaaacaagacgcgtagtggcacactaatggcaaaacactcgaagagtatccgtttgcgtttcctatgcaatcatgttggtcaagtgggtagtgcgttttctgtgcgttttctgtgcgttttctgtgcgttttctgtgcgtgtagagtcgtaggctctggagggaggctccgaaagaagagtgctcgtatgcaagtacttacatcgctcgcgaactcgagggacgctgtgttacggaatacttgtaataggaacacacagtactgttgaatgccactcatcggtccactgaccgtttgcctacccctttgaagatgctgtgccaccgccggtgtacgtgccattacacatattgtcatagctagctcgccagtctaggctaatggacgcacattggcactctcggaaccaacagccaaagggcaagggacccttgctagccagccctgtgaatctcgaccgacaagtcctgcactgatgaagacggaagagaagagttcctggtcacgtaccttttatcacttgtcttcgcactgaattgattagatcctacttgtattccaatctgtcactcttttgctcgtccctccaaacctcacatgcgttcctagcgtacggttgcgccctcgacaagttactcgtattccgctccttcaacttgtgtgcttaccgtcttgtcgtgtcggacgtagatcgaccttttcgagtgtatcgctggattggatggttctttctcgattcttcgcataatgttgagtctccagctgtaaaactgtgcgatccttgcctagtgcacactcaatgaagggccgatgctcgctcttggtgtttctctcgttatgggggacctttggaattgcgagagagtttacgagtcgacgggacaataacatcagcaacagtagcgatattcccaccgcggaaaacttctttcgccgggcatgtcatacagtcgcggtactaggcgattatctctacgtcgatggcggacaggttacggagcgaacggatggaagctctaacatcagttccgcttacgctgttaatacaacctggtcgatcgatttgaccagaaaatggactaatgagactgttccgatccgttcgattcctaaagcatcacctcgcatgggcaagcagatccactggaccgatacctcatctaatagcctctacacctggggcggattcgtggcagatgcttcaccaccaccagaacacgaagtgtggaggttccaagcagacgggtcgggtggtggtgcgtggtcactggtctcgcagcaggattatcggacatttaccggactaaaaaatccattcggcgcttcctttgctcaaaatggcgacataggctatgcatttggcggtggtgttgaagcaagatcggactcgtcggttcaaaaggacttaccaggctacgccttgccggggttgatatcatacaattttcaaacgggggaatggaccaatacctctacctcgagttacggtgggtacggcacgaatataaatggcagggccgagatggttcctttcggtccaaatggactccttctctttctcggcggtgcagagacacccgtcgacgctactaacgaaacgatcgtggaagtcagctggaatagcatcaccctgatcgacccaatcactcaaaaatggtataaacagtcaacgactggtgacaagccgccgaccatagagtcgcattgctccgttggtgtaccgggacccaacggaacttacgagatcttcatctacggtggagtttcggaccaaatccgtgcaacgtcgggcgatatcactgttctttccctacccagtttcaactttttcaaaggcccaacgactgttccaaggtctgaccatggctgtgcgattgtcggaaagggaaagcgacagatgctgagcatgggtggtgtagatggtcagaataggactttcacggccccaacaacagcagatgcgtggacttatggtttgggaatattcgacatgacgaacatgcaatggacggactcatacgatcctaatattacggcctacgatagcccacaggtagttaaggaatggtatgcagcgggaaacttgaaaaacgtgcattgggacgacgaagagttgcaaggcttttttatgggaacgaatttgacaaattccaccatgggcaatgagaagagcacagcgtctaccggaaccatcgttggcggatcgattgggggtgtggcaggcgtcgccgtcatcatggctacggctttcatctatctcaaacggcagcgcgcgcgcaacacgaagatcggatcgtcgcgtcatgactcggccggtgactcagatgtagatggaatcgccgagtacaagcctgagccttggccgaaagatggtgtgccgatagtatactcgcctcattcaagcgtaacatattctccgcccccggctgccgaagtccatagtgcctggccgggagaactctcgggacatcaagatggcataatatacaccggggaattagcaggctcggacgtatacagttatggcgttaagattccttatgccgacaagattccagtagcgaggcgaatttcgagggccgagttgccggcgccattcgatgacccgagaacggaactcccggataggaaatattctcaatagattcacgacatttctttgacaacctcgtttaatcatttgcattaggttgatcttctcgtcgaccacatgtccgccgagcaaggaaccaattgcaacgtttgatataggtattcttcacaacgataccctggagttcagactggaccaagaagcgcagtctaatagaaatctaattatcatttcactatgttgttgtgatataatgagagcgatgtgggattgaacagcttagttggtgaggacgctggtcattaatctggaaagatactggtatacgtgatctttgcgcttaatgaagggctcactaaggcatatttcatgtatatatctactaattaggggcctgcatcaatagtcacgatcttggtagaattattaagaatcatcttgagtaaagcaacgtcaagaaaacagacgagagtaacgtgcaaattgatcgtgccacagtctgcaattactttgagtagttcggctgcgaacaggaaagggggtaaagggcctcagaattatactctcactagtgcacggtcgagattgcgacctaggaccatccctcgagtatttcattggctaggatcgagcaacttaatagttatgatgctcgtctctcgcagcttcagcttcaagttacacgttgaatgatgatgagcatacatactcagtaacagcagcctaaagatctccttgtgtcgcgcgaagctcatcaagttgaccgaaattctctgtgttttgatgccagggctgatgtggtacagagccgtttgacctgtaacgctcataattccttggaaaggagctctggctatcatatctcaacccgatttcatggtcccaattgacgctctcgtttttgtacggattcggcgatatttcagtactcagctttggacagcaatccctcgactcgtattcgagtaggtgttatcctcttcgcgtgacattatttcaacgactacctcgggcatcgtagaacactcatactaatcttcttgctcaggtcccactctctcccatcaatctcttcgctttctcgagtagcagaccactctcgcgcccaagacggcgttggccatctcgtcccggtttccgagcctttgcgagtgcgcggcggaagcgctcgcggtcttggatctttcgctggcgttcggccgctctacgttcatgctcggcagccctttcggcagcctcagctctcttgcgctctgctactgacactgccttgtcgaaatagcctggtttcttcttaggataacgaggtctgggtccttttgcgtcgaactttgagctggatgatcgtgtattttcatcgtcagcgattatagtatcgttgtggtcatcaactaaggcctgacgctgtgggtggatttttggctcttcttccgcgtcactctctgttctttctatactagcactcgtctcccggttgccatcgccgtcgtgcccgtcgtccgcgttctctggggctactatagtggtgttgacatcgggatcaggctttgtgtttctcgaggaggcggtcttgatctcggcggtcttgatcttcttgtatgccttcttgaccttggctttatgaatcagatccttctttatccggtcgactgtagccgtgatcagccatatgagagcagttgcagagctaggaatagcgaacccttgc

SEQ ID NO: 2899 - DNA, 3378 bp, Muscodor strobelii
  misc_feature: SGI cDNA ID NO. 560611
  misc_feature: Encodes the peptide sequence at SEQ ID NO 2900
atgaacaatccggagatggatgagtatatggagggcgtcatggagggggaagatgtgtttccatgtaaaggatgtggcgagatcctggaagaagggaaggccttcgagttggctggaaaccgatggcatctgaattgcttccgctgcaacacatgtggcaccctactcgactcagatgccaaccttctcctgcttggcgacggctccttgatttgcaacaactgcacttacagctgcagtgcctgcggcgacaagatcgaagacctcgctatcctcactggcgaccaggccttctgcgccacctgcttccggtgtaggaactgcaagaggaagatagagaacctgcgctacgctaggacgtcccagggcatcttctgcatgagctgccacgagtctctcatggcaaggcggcgcaagaaatccaaggccgccgcccaggccaaggcgcgagagaaagaaggttcgcccatggtccacgagaagtccctgcccgcccttcccccgaatgccataccgccgaacgccttctccaacgatcgagtcgacccggacggggatgcccctatcgagctgcccaccactgagctttctccacggcctagacccacgcttcctcgtaacgattcatcttcgaggagtagttcacgacccgcccgttctcccgaacgcccatccaatcatggtgggcgggatggcagcctctcactgccttcacataactatcgtgcgaacagaaactcgtccatcttttcgggaagtgatgttcccaccagtaacgcagcagacgaccagagtttctttattcccgtcgctctagatccaagccccattccttcttcgacacccagatcgacgaccgagaccttgacagatacgaaacgtagcaaggaaaaggattattttggcatgaccaagccagcggagaagaagcctgattcccaagcttccactccgcacatcgctttccaggagaaaggccgacagccgtcatctgagtatgatggtctaccctcgaagagtctgggtagaaagttgtccaagtcttcaaggccggacaagactggcttttcaaaatcatcacccgtcgtcatggaggaaacgaatcagaacggacagacggacgagttcaagctacaagacgcaccgaagagcaagaagacaactgcgaggagcaactcccagcagtccaactcgcttcaagagtcacttgtctcccgagacagtggctccggtcgagtcgacaaagaagtcacctccagcgtgataaacactccaaggagttcgcaagactcgcggcctaaagaggaggaagagacgcaccatggagatcctcttgcttcgattgctggtaatgcttccaagcctatcgctaggaaagaagttcccgcctcgaggactgtcaatggtccagcacgatcctatgctgcagaggaacggccgaccgacacgtatatgactccaagagcaccaccggcacctcctggacaagctggggcatcggaatctggcgaacacaaagtatcccctaaactacctagatggagtgcgggtggtgactttagtatggacgaagatatggctcgtattcttggaaccgacgaaggctcttcgtctatcctccggcgcgtctccaacgctgtgcgtcacggacgcactaacagcactgaatcaagtcacatttcgcgcgcgcatcacactcgcagcatcagtgagaccactcgcacaaccacctcacctcgctggccgaagaccccaatggctgaggaatcgatgaacggcggagtcaacgacgtgaccagccctctaaccgccctcccgggcgatgacccagtagtgcttaagaggcgtctacggaattctgagcagcgtgtcgcagacctggaaaggcagttcaacaatgaaaaggatctcaagaatatcagccacaagctagaggaaaagcgcaagactgtttcggtactcgacacacagactgaaatcatgatacgtgaattggaagtattagccggcttcgtcgagcgggccaaggagaccaagaagccgattgatccccgcgagctggaagattctgctatcaaagagtttgtacagaagcttgacaagctaaagcagtctatgacagcaagtctcgagcagcttcattctgaacgggatgagctgatagaggagaaaaatcgagcaattgctgacagagatcgtgctcgggtcgagtttgaacagctggtttctaagaatgctcagctggctgacttgaacaatgatctgactcaccagattcaagagagatttaaaaaccattcggacactcgagtgcctgcgaacggcctgggtatctacaaccatagcaaagtggcctcaaacaactccgtctcactcgatgctgcgagcatccagacaggcaccaccctcattcccgaccacgaagagccaatcattgaagcccgcccgaccgttgttgaggttggaaaggggaagaggttcaactggaagaagggctctaaagctgtagcccagaatatcgccaaaggtgtgaaccgaacggtggttgctttccagcaacccgaacgtcacccgtcagatatggccggtgccagcatcgggcttccatacaatatgactgttacgccagtggaatctccggtctctcagggtccaatcacaggcccgaaccgtcaacctgtagatgcgagaaaccaaggcttctttggcggcttcaagaaggcgcagaccatgccgccgtcgaaggcaatggctgctctgaatgcgtcgaccccgactgtggctgaggcacccaacgtcctcttcggctctgagcttgctgaacgtgctgacttcgaaaggagacaaattccttgtgttgtaacacggtgtatcgaagaagtcgagcttcgcggcatggagatggagggtatctaccgcaaaacaggcggtaattctcagaccaaaatcatccaggaaggctttgacaagaacgaaaactacgacatatcagaccctgatatagatatcaccgcagtcactagcgtcttgaaacagtacttcaggaagctccccacccccctgctaacatacgatatctacgatcgcatcctagagaccaattctattgcaaacgatgcggacaaatgcacccacttgcagaacacattcaaccaactgcctcgtcagcataaggattgtcttgaattcctgatcttccacttgtctcgtgtcgcgtcaagagagagcgagaatctgatgacaccaaagaacttggcagtcgttttcgcgccaacgattatgagagacactagcatcgaacgagagatgacagacatgcacgccaagaacttggccgtccagttcatcattgagaatagccaggagatattctcttag

SEQ ID NO: 2900 - protein, 1125 aa, Muscodor strobelii
  misc_feature: SGI Peptide ID NO. 560611
  misc_feature (22)..(78): Pfam Id: PF00412 Pfam Desc: LIM domain
  misc_feature (79)..(134): Pfam Id: PF00412 Pfam Desc: LIM domain
  misc_feature (951)..(1104): Pfam Id: PF00620 Pfam Desc: RhoGAP domain
  misc_feature (22)..(59): Pfam Id: PF00412 Pfam Desc: LIM domain
  misc_feature (6)..(1125): NCBI GI: 261352297 Blast Desc: rho-type GTPase-activating protein [Verticillium albo-atrum VaMs.102]
  misc_feature (6)..(1124): NCBI GI: 256726872 Blast Desc: [Nectria haematococca mpVI 77-13-4]
  misc_feature (38)..(1124): NCBI GI: 171690624 Blast Desc: protein product [Podospora anserina] gi|170945260|emb|CAP71371.1| protein product [Podospora anserina]
  misc_feature (6)..(1124): NCBI GI: 116196042 Blast Desc: CHGG_04619 [Chaetomium globosum CBS 148.51] gi|88180532|gb|EAQ88000.1| CHGG_04619 [Chaetomium globosum CBS 148.51]
  misc_feature (6)..(1124): NCBI GI: 39944350 Blast Desc: MGG_04186 [Magnaporthe grisea 70-15] gi|145014923|gb|EDJ99491.1| MGG_04186 [Magnaporthe grisea 70-15]
  misc_feature (6)..(1124): NCBI GI: 46123631 Blast Desc: FG06193.1 [Gibberella zeae PH-1]
  misc_feature (1)..(1125): NCBI GI: 154302149 Blast Desc: BC1G_09755 [Botryotinia fuckeliana B05.10] gi|150855529|gb|EDN30721.1| BC1G_09755 [Botryotinia fuckeliana B05.10]
  misc_feature (6)..(1124): NCBI GI: 164423827 Blast Desc: NCU07688 [Neurospora crassa OR74A] gi|157070248|gb|EAA33094.2| conserved [Neurospora crassa OR74A]
  misc_feature (73)..(1125): NCBI GI: 156062414 Blast Desc: SS1G_01323 [Sclerotinia sclerotiorum 1980] gi|154696659|gb|EDN96397.1| SS1G_01323 [Sclerotinia sclerotiorum 1980]
  misc_feature (11)..(1124): NCBI GI: 67517686 Blast Desc: AN1025.2 [Aspergillus nidulans FGSC A4] gi|40746437|gb|EAA65593.1| AN1025.2 [Aspergillus nidulans FGSC A4] gi|259488678|tpe|CBF88312.1| TPA: conserved similar to Rho
MNNPEMDEYMEGVMEGEDVFPCKGCGEILEEGKAFELAGNRWHLNCFRCNTCGTLLDSDANLLLLGDGSLICNNCTYSCSACGDKIEDLAILTGDQAFCATCFRCRNCKRKIENLRYARTSQGIFCMSCHESLMARRRKKSKAAAQAKAREKEGSPMVHEKSLPALPPNAIPPNAFSNDRVDPDGDAPIELPTTELSPRPRPTLPRNDSSSRSSSRPARSPERPSNHGGRDGSLSLPSHNYRANRNSSIFSGSDVPTSNAADDQSFFIPVALDPSPIPSSTPRSTTETLTDTKRSKEKDYFGMTKPAEKKPDSQASTPHIAFQEKGRQPSSEYDGLPSKSLGRKLSKSSRPDKTGFSKSSPVVMEETNQNGQTDEFKLQDAPKSKKTTARSNSQQSNSLQESLVSRDSGSGRVDKEVTSSVINTPRSSQDSRPKEEEETHHGDPLASIAGNASKPIARKEVPASRTVNGPARSYAAEERPTDTYMTPRAPPAPPGQAGASESGEHKVSPKLPRWSAGGDFSMDEDMARILGTDEGSSSILRRVSNAVRHGRTNSTESSHISRAHHTRSISETTRTTTSPRWPKTPMAEESMNGGVNDVTSPLTALPGDDPVVLKRRLRNSEQRVADLERQFNNEKDLKNISHKLEEKRKTVSVLDTQTEIMIRELEVLAGFVERAKETKKPIDPRELEDSAIKEFVQKLDKLKQSMTASLEQLHSERDELIEEKNRAIADRDRARVEFEQLVSKNAQLADLNNDLTHQIQERFKNHSDTRVPANGLGIYNHSKVASNNSVSLDAASIQTGTTLIPDHEEPIIEARPTVVEVGKGKRFNWKKGSKAVAQNIAKGVNRTVVAFQQPERHPSDMAGASIGLPYNMTVTPVESPVSQGPITGPNRQPVDARNQGFFGGFKKAQTMPPSKAMAALNASTPTVAEAPNVLFGSELAERADFERRQIPCVVTRCIEEVELRGMEMEGIYRKTGGNSQTKIIQEGFDKNENYDISDPDIDITAVTSVLKQYFRKLPTPLLTYDIYDRILETNSIANDADKCTHLQNTFNQLPRQHKDCLEFLIFHLSRVASRESENLMTPKNLAVVFAPTIMRDTSIEREMTDMHAKNLAVQFIIENSQEIFS

SEQ ID NO: 2901 - DNA, 4610 bp, Muscodor strobelii
  misc_feature: SGI EST ID NO. CUFF.7203.2
  misc_feature: Variant of the nucleotide sequence at SEQ ID NO 2899
gacgaatagagccaagcaatccgtcaaaaacagcgtagccacttcaccatgccagggacattcactgcggacagcgggaccatttgccaggtacaggacagtagaggggacgagaccagcaggcaaatgcaaccttaagacatctcgaacgaacacccccctttccgcggtgattccaacagacagcaccggcagcatcgaacgtctgctctgggttcctgcctgtcatatcctatcatatctcctgctgttgttgcgaatacaagcctcgtcctttccatagtccacgcccacggtcgatcacaaattgctgagatcggacgtctccctttatccatctccgccttcctgcgttacctcccgcccgcgcaacacgcaggcacgacagagcacatccaattttagaggtaggtggcataacagagcagcagtagtgcacgcagaatctctgcaacggcagtcacgctgactcgcacctccgcctcgcacttccgcccgtctcgcttccctacttcaggttccgtcccgactctttgggtctggccttaggtccttagctgcccctaccactgtagcataaagcgtaaatcgtgaagcgtcacgccgtccacctcgcctcaggtgcctctgagacatctcgtcgctcactgctgtcgcacctctcacgccggcctccagcgtggtatccctctccctccttgcccgccggagtcccatcgtgcagcccggcgcccagcactctgccaaatgctgccatagcaccttcggttcatctatcctctgagcctctgccctgtagacaacctcactccgcaactccgcaactctcgactggcccagcgatcaggtcaaggctccccctggcggcgttcgacacgcgcactcgcttgtgcttagacaatgaacaatccggagatggatgagtatatggagggcgtcatggagggggaagatgtgtttccatgtaaaggatgtggcgagatcctggaagaagggaaggccttcgagttggctggaaaccgatggcatctgaattgcttccgctgcaacacatgtggcaccctactcgactcagatgccaaccttctcctgcttggcgacggctccttgatttgcaacaactgcacttacagctgcagtgcctgcggcgacaagatcgaagacctcgctatcctcactggcgaccaggccttctgcgccacctgcttccggtgtaggaactgcaagaggaagatagagaacctgcgctacgctaggacgtcccagggcatcttctgcatgagctgccacgagtctctcatggcaaggcggcgcaagaaatccaaggccgccgcccaggccaaggcgcgagagaaagaaggttcgcccatggtccacgagaagtccctgcccgcccttcccccgaatgccataccgccgaacgccttctccaacgatcgagtcgacccggacggggatgcccctatcgagctgcccaccactgagctttctccacggcctagacccacgcttcctcgtaacgattcatcttcgaggagtagttcacgacccgcccgttctcccgaacgcccatccaatcatggtgggcgggatggcagcctctcactgccttcacataactatcgtgcgaacagaaactcgtccatcttttcgggaagtgatgttcccaccagtaacgcagcagacgaccagagtttctttattcccgtcgctctagatccaagccccattccttcttcgacacccagatcgacgaccgagaccttgacagatacgaaacgtagcaaggaaaaggattattttggcatgaccaagccagcggagaagaagcctgattcccaagcttccactccgcacatcgctttccaggagaaaggccgacagccgtcatctgagtatgatggtctaccctcgaagagtctgggtagaaagttgtccaagtcttcaaggccggacaagactggcttttcaaaatcatcacccgtcgtcatggaggaaacgaatcagaacggacagacggacgagttcaagctacaagacgcaccgaagagcaagaagacaactgcgaggagcaactcccagcagtccaactcgcttcaagagtcacttgtctcccgagacagtggctccggtcgagtcgacaaagaagtcacctccagcgtgataaacactccaaggagttcgcaagactcgcggcctaaagaggaggaagagacgcaccatggagatcctcttgcttcgattgctggtaatgcttccaagcctatcgctaggaaagaagttcccgcctcgaggactgtcaatggtccagcacgatcctatgctgcagaggaacggccgaccgacacgtatatgactccaagagcaccaccggcacctcctggacaagctggggcatcggaatctggcgaacacaaagtatcccctaaactacctagatggagtgcgggtggtgactttagtatggacgaagatatggctcgtattcttggaaccgacgaaggctcttcgtctatcctccggcgcgtctccaacgctgtgcgtcacggacgcactaacagcactgaatcaagtcacatttcgcgcgcgcatcacactcgcagcatcagtgagaccactcgcacaaccacctcacctcgctggccgaagaccccaatggctgaggaatcgatgaacggcggagtcaacgacgtgaccagccctctaaccgccctcccgggcgatgacccagtagtgcttaagaggcgtctacggaattctgagcagcgtgtcgcagacctggaaaggcagttcaacaatgaaaaggatctcaagaatatcagccacaagctagaggaaaagcgcaagactgtttcggtactcgacacacagactgaaatcatgatacgtgaattggaagtattagccggcttcgtcgagcgggccaaggagaccaagaagccgattgatccccgcgagctggaagattctgctatcaaagagtttgtacagaagcttgacaagctaaagcagtctatgacagcaagtctcgagcagcttcattctgaacgggatgagctgatagaggagaaaaatcgagcaattgctgacagagatcgtgctcgggtcgagtttgaacagctggtttctaagaatgctcagctggctgacttgaacaatgatctgactcaccagattcaagagagatttaaaaaccattcggacactcgagtgcctgcgaacggcctgggtatctacaaccatagcaaagtggcctcaaacaactccgtctcactcgatgctgcgagcatccagacaggcaccaccctcattcccgaccacgaagagccaatcattgaagcccgcccgaccgttgttgaggttggaaaggggaagaggttcaactggaagaagggctctaaagctgtagcccagaatatcgccaaaggtgtgaaccgaacggtggttgctttccagcaacccgaacgtcacccgtcagatatggccggtgccagcatcgggcttccatacaatatgactgttacgccagtggaatctccggtctctcagggtccaatcacaggcccgaaccgtcaacctgtagatgcgagaaaccaaggcttctttggcggcttcaagaaggcgcagaccatgccgccgtcgaaggcaatggctgctctgaatgcgtcgaccccgactgtggctgaggcacccaacgtcctcttcggctctgagcttgctgaacgtgctgacttcgaaaggagacaaattccttgtgttgtaacacggtgtatcgaagaagtcgagcttcgcggcatggagatggagggtatctaccgcaaaacaggcggtaattctcagaccaaaatcatccaggaaggctttgacaagaacgaaaactacgacatatcagaccctgatatagatatcaccgcagtcactagcgtcttgaaacagtacttcaggaagctccccacccccctgctaacatacgatatctacgatcgcatcctagagaccaattctattgcaaacgatgcggacaaatgcacccacttgcagaacacattcaaccaactgcctcgtcagcataaggattgtcttgaattcctgatcttccacttgtctcgtgtcgcgtcaagagagagcgagaatctgatgacaccaaagaacttggcagtcgttttcgcgccaacgattatgagagacactagcatcgaacgagagatgacagacatgcacgccaagaacttggccgtccagttcatcattgagaatagccaggagatattctcttagtatcacctcctgccgacagatacaaatccatgtctgctgtacatatatcacaatacgaaaacacatccggggccctgaccctgcgatgtctgtcatcaccccattcagacattggggaatagcatagcatggtggttcacattcggagatatcgacttcacaggttatcgtctcccaactttacgagggcatgatcatgatctttccaggttctgtcattggatctaggttccattcgtcggaggtgtctaaggtcgagggttcctttgcctgtgttaacgttaggaaacttttaatatgatatccctcttgcttaattcagcctacctata

SEQ ID NO: 2902 - DNA, 3384 bp, Muscodor strobelii
  misc_feature: SGI cDNA ID NO. 560612
  misc_feature: Encodes the peptide sequence at SEQ ID NO 2903
atgaacaatccggagatggatgagtatatggagggcgtcatggagggggaagatgtgtttccatgtaaaggatgtggcgagatcctggaagaagggaaggccttcgagttggatatagctggaaaccgatggcatctgaattgcttccgctgcaacacatgtggcaccctactcgactcagatgccaaccttctcctgcttggcgacggctccttgatttgcaacaactgcacttacagctgcagtgcctgcggcgacaagatcgaagacctcgctatcctcactggcgaccaggccttctgcgccacctgcttccggtgtaggaactgcaagaggaagatagagaacctgcgctacgctaggacgtcccagggcatcttctgcatgagctgccacgagtctctcatggcaaggcggcgcaagaaatccaaggccgccgcccaggccaaggcgcgagagaaagaaggttcgcccatggtccacgagaagtccctgcccgcccttcccccgaatgccataccgccgaacgccttctccaacgatcgagtcgacccggacggggatgcccctatcgagctgcccaccactgagctttctccacggcctagacccacgcttcctcgtaacgattcatcttcgaggagtagttcacgacccgcccgttctcccgaacgcccatccaatcatggtgggcgggatggcagcctctcactgccttcacataactatcgtgcgaacagaaactcgtccatcttttcgggaagtgatgttcccaccagtaacgcagcagacgaccagagtttctttattcccgtcgctctagatccaagccccattccttcttcgacacccagatcgacgaccgagaccttgacagatacgaaacgtagcaaggaaaaggattattttggcatgaccaagccagcggagaagaagcctgattcccaagcttccactccgcacatcgctttccaggagaaaggccgacagccgtcatctgagtatgatggtctaccctcgaagagtctgggtagaaagttgtccaagtcttcaaggccggacaagactggcttttcaaaatcatcacccgtcgtcatggaggaaacgaatcagaacggacagacggacgagttcaagctacaagacgcaccgaagagcaagaagacaactgcgaggagcaactcccagcagtccaactcgcttcaagagtcacttgtctcccgagacagtggctccggtcgagtcgacaaagaagtcacctccagcgtgataaacactccaaggagttcgcaagactcgcggcctaaagaggaggaagagacgcaccatggagatcctcttgcttcgattgctggtaatgcttccaagcctatcgctaggaaagaagttcccgcctcgaggactgtcaatggtccagcacgatcctatgctgcagaggaacggccgaccgacacgtatatgactccaagagcaccaccggcacctcctggacaagctggggcatcggaatctggcgaacacaaagtatcccctaaactacctagatggagtgcgggtggtgactttagtatggacgaagatatggctcgtattcttggaaccgacgaaggctcttcgtctatcctccggcgcgtctccaacgctgtgcgtcacggacgcactaacagcactgaatcaagtcacatttcgcgcgcgcatcacactcgcagcatcagtgagaccactcgcacaaccacctcacctcgctggccgaagaccccaatggctgaggaatcgatgaacggcggagtcaacgacgtgaccagccctctaaccgccctcccgggcgatgacccagtagtgcttaagaggcgtctacggaattctgagcagcgtgtcgcagacctggaaaggcagttcaacaatgaaaaggatctcaagaatatcagccacaagctagaggaaaagcgcaagactgtttcggtactcgacacacagactgaaatcatgatacgtgaattggaagtattagccggcttcgtcgagcgggccaaggagaccaagaagccgattgatccccgcgagctggaagattctgctatcaaagagtttgtacagaagcttgacaagctaaagcagtctatgacagcaagtctcgagcagcttcattctgaacgggatgagctgatagaggagaaaaatcgagcaattgctgacagagatcgtgctcgggtcgagtttgaacagctggtttctaagaatgctcagctggctgacttgaacaatgatctgactcaccagattcaagagagatttaaaaaccattcggacactcgagtgcctgcgaacggcctgggtatctacaaccatagcaaagtggcctcaaacaactccgtctcactcgatgctgcgagcatccagacaggcaccaccctcattcccgaccacgaagagccaatcattgaagcccgcccgaccgttgttgaggttggaaaggggaagaggttcaactggaagaagggctctaaagctgtagcccagaatatcgccaaaggtgtgaaccgaacggtggttgctttccagcaacccgaacgtcacccgtcagatatggccggtgccagcatcgggcttccatacaatatgactgttacgccagtggaatctccggtctctcagggtccaatcacaggcccgaaccgtcaacctgtagatgcgagaaaccaaggcttctttggcggcttcaagaaggcgcagaccatgccgccgtcgaaggcaatggctgctctgaatgcgtcgaccccgactgtggctgaggcacccaacgtcctcttcggctctgagcttgctgaacgtgctgacttcgaaaggagacaaattccttgtgttgtaacacggtgtatcgaagaagtcgagcttcgcggcatggagatggagggtatctaccgcaaaacaggcggtaattctcagaccaaaatcatccaggaaggctttgacaagaacgaaaactacgacatatcagaccctgatatagatatcaccgcagtcactagcgtcttgaaacagtacttcaggaagctccccacccccctgctaacatacgatatctacgatcgcatcctagagaccaattctattgcaaacgatgcggacaaatgcacccacttgcagaacacattcaaccaactgcctcgtcagcataaggattgtcttgaattcctgatcttccacttgtctcgtgtcgcgtcaagagagagcgagaatctgatgacaccaaagaacttggcagtcgttttcgcgccaacgattatgagagacactagcatcgaacgagagatgacagacatgcacgccaagaacttggccgtccagttcatcattgagaatagccaggagatattctcttag

SEQ ID NO: 2903 - protein, 1127 aa, Muscodor strobelii
  misc_feature: SGI Peptide ID NO. 560612
  misc_feature (22)..(80): Pfam Id: PF00412 Pfam Desc: LIM domain
  misc_feature (81)..(136): Pfam Id: PF00412 Pfam Desc: LIM domain
  misc_feature (953)..(1106): Pfam Id: PF00620 Pfam Desc: RhoGAP domain
  misc_feature (22)..(61): Pfam Id: PF00412 Pfam Desc: LIM domain
  misc_feature (6)..(1127): NCBI GI: 261352297 Blast Desc: rho-type GTPase-activating protein [Verticillium albo-atrum VaMs.102]
  misc_feature (6)..(1126): NCBI GI: 256726872 Blast Desc: [Nectria haematococca mpVI 77-13-4]
  misc_feature (40)..(1126): NCBI GI: 171690624 Blast Desc: protein product [Podospora anserina] gi|170945260|emb|CAP71371.1| protein product [Podospora anserina]
  misc_feature (6)..(1126): NCBI GI: 116196042 Blast Desc: CHGG_04619 [Chaetomium globosum CBS 148.51] gi|88180532|gb|EAQ88000.1| CHGG_04619 [Chaetomium globosum CBS 148.51]
  misc_feature (6)..(1126): NCBI GI: 39944350 Blast Desc: MGG_04186 [Magnaporthe grisea 70-15] gi|145014923|gb|EDJ99491.1| MGG_04186 [Magnaporthe grisea 70-15]
  misc_feature (6)..(1126): NCBI GI: 46123631 Blast Desc: FG06193.1 [Gibberella zeae PH-1]
  misc_feature (1)..(1127): NCBI GI: 154302149 Blast Desc: BC1G_09755 [Botryotinia fuckeliana B05.10] gi|150855529|gb|EDN30721.1| BC1G_09755 [Botryotinia fuckeliana B05.10]
  misc_feature (6)..(1126): NCBI GI: 164423827 Blast Desc: NCU07688 [Neurospora crassa OR74A] gi|157070248|gb|EAA33094.2| conserved [Neurospora crassa OR74A]
  misc_feature (75)..(1127): NCBI GI: 156062414 Blast Desc: SS1G_01323 [Sclerotinia sclerotiorum 1980] gi|154696659|gb|EDN96397.1| SS1G_01323 [Sclerotinia sclerotiorum 1980]
  misc_feature (11)..(1126): NCBI GI: 67517686 Blast Desc: AN1025.2 [Aspergillus nidulans FGSC A4] gi|40746437|gb|EAA65593.1| AN1025.2 [Aspergillus nidulans FGSC A4] gi|259488678|tpe|CBF88312.1| TPA: conserved similar to Rho
MNNPEMDEYMEGVMEGEDVFPCKGCGEILEEGKAFELDIAGNRWHLNCFRCNTCGTLLDSDANLLLLGDGSLICNNCTYSCSACGDKIEDLAILTGDQAFCATCFRCRNCKRKIENLRYARTSQGIFCMSCHESLMARRRKKSKAAAQAKAREKEGSPMVHEKSLPALPPNAIPPNAFSNDRVDPDGDAPIELPTTELSPRPRPTLPRNDSSSRSSSRPARSPERPSNHGGRDGSLSLPSHNYRANRNSSIFSGSDVPTSNAADDQSFFIPVALDPSPIPSSTPRSTTETLTDTKRSKEKDYFGMTKPAEKKPDSQASTPHIAFQEKGRQPSSEYDGLPSKSLGRKLSKSSRPDKTGFSKSSPVVMEETNQNGQTDEFKLQDAPKSKKTTARSNSQQSNSLQESLVSRDSGSGRVDKEVTSSVINTPRSSQDSRPKEEEETHHGDPLASIAGNASKPIARKEVPASRTVNGPARSYAAEERPTDTYMTPRAPPAPPGQAGASESGEHKVSPKLPRWSAGGDFSMDEDMARILGTDEGSSSILRRVSNAVRHGRTNSTESSHISRAHHTRSISETTRTTTSPRWPKTPMAEESMNGGVNDVTSPLTALPGDDPVVLKRRLRNSEQRVADLERQFNNEKDLKNISHKLEEKRKTVSVLDTQTEIMIRELEVLAGFVERAKETKKPIDPRELEDSAIKEFVQKLDKLKQSMTASLEQLHSERDELIEEKNRAIADRDRARVEFEQLVSKNAQLADLNNDLTHQIQERFKNHSDTRVPANGLGIYNHSKVASNNSVSLDAASIQTGTTLIPDHEEPIIEARPTVVEVGKGKRFNWKKGSKAVAQNIAKGVNRTVVAFQQPERHPSDMAGASIGLPYNMTVTPVESPVSQGPITGPNRQPVDARNQGFFGGFKKAQTMPPSKAMAALNASTPTVAEAPNVLFGSELAERADFERRQIPCVVTRCIEEVELRGMEMEGIYRKTGGNSQTKIIQEGFDKNENYDISDPDIDITAVTSVLKQYFRKLPTPLLTYDIYDRILETNSIANDADKCTHLQNTFNQLPRQHKDCLEFLIFHLSRVASRESENLMTPKNLAVVFAPTIMRDTSIEREMTDMHAKNLAVQFIIENSQEIFS

SEQ ID NO: 2904 - DNA, 4610 bp, Muscodor strobelii; identical to SEQ ID NO: 2901
  misc_feature: SGI EST ID NO. CUFF.7203.2
  misc_feature: Variant of the nucleotide sequence at SEQ ID NO 2902

SEQ ID NO: 2905 - DNA, 558 bp, Muscodor strobelii
  misc_feature: SGI cDNA ID NO. 560613
  misc_feature: Reduced expression when VOC is produced
  misc_feature: Encodes the peptide sequence at SEQ ID NO 2906
atgtcagccttcaaagacacagagtacacatactggtgggcaccactccctacgatgcggcagtggaacgaagagcgcatacgtcgtcgcttcgcggacccgaatacgcagcagttcaaggtcaccgacgatcagactagacgagtcgtcgcgtgggctaaatgggacttgccacggggcaggatgatagcgatgagagaggggtttgaggtctatgccgaaaatgatgagcagatgaaggggaatgagagtgggcaggcgagtgataagtcctatgctcagggcccgtcagatgggtgtgatgttgagctcttcaatgtgtgtaaacgagctaacactttgtattacaacccggcagtcttcaacggtctcgtgaagctagaaaagacatgggcagcaagtgagaagctagtccttacacatctatgtacccacgccgatttccacggccaaggcataggctcagcattattgcagggcgtcttagaactcgcagatgccgacggcctaccaacatatctcgagtcgttgcgcttggccacgccattatgtgagtaa

SEQ ID NO: 2906 - protein, 185 aa, Muscodor strobelii
  misc_feature: SGI Peptide ID NO. 560613
  misc_feature (19)..(185): NCBI GI: 145240703 Blast Desc: An08g08870 [Aspergillus niger] gi|134077522|emb|CAK96666.1| protein product [Aspergillus niger]
  misc_feature (32)..(185): NCBI GI: 240104665 Blast Desc: GNAT family acetyltransferase, [Coccidioides posadasii C735 delta SOWgp]
  misc_feature (26)..(176): NCBI GI: 169606998 Blast Desc: SNOG_06551 [Phaeosphaeria nodorum SN15] gi|160707131|gb|EAT86382.2| SNOG_06551 [Phaeosphaeria nodorum SN15]
  misc_feature (10)..(185): NCBI GI: 75859070 Blast Desc: AN9493.2 [Aspergillus nidulans FGSC A4] gi|40747612|gb|EAA66768.1| AN9493.2 [Aspergillus nidulans FGSC A4] gi|259485406|tpe|CBF82401.1| TPA: conserved [Aspergillus FGSC
  misc_feature (1)..(185): NCBI GI: 121719954 Blast Desc: acetyltransferase, GNAT family family [Aspergillus clavatus NRRL 1] gi|119404887|gb|EAW15249.1| acetyltransferase, GNAT family family [Aspergillus clavatus NRRL 1]
  misc_feature (33)..(185): NCBI GI: 258577391 Blast Desc: [Uncinocarpus reesii 1704] gi|237903143|gb|EEP77544.1| [Uncinocarpus reesii 1704]
  misc_feature (21)..(183): NCBI GI: 67522759 Blast Desc: AN1836.2 [Aspergillus nidulans FGSC A4] gi|40745845|gb|EAA65001.1| AN1836.2 [Aspergillus nidulans FGSC A4]
  misc_feature (101)..(176): NCBI GI: 284042748 Blast Desc: GCN5-related N-acetyltransferase [Conexibacter woesei DSM 14684] gi|283946969|gb|ADB49713.1| GCN5-related N-acetyltransferase [Conexibacter woesei DSM 14684]
  misc_feature (35)..(185): NCBI GI: 115402665 Blast Desc: conserved [Aspergillus terreus NIH2624] gi|114189255|gb|EAU30955.1| conserved [Aspergillus terreus NIH2624]
  misc_feature (21)..(183): NCBI GI: 259487184 Blast Desc: TPA: conserved [Aspergillus nidulans FGSC A4]
  misc_feature: Useful for introducing or modulating the production of volatile compounds
MSAFKDTEYTYWWAPLPTMRQWNEERIRRRFADPNTQQFKVTDDQTRRVVAWAKWDLPRGRMIAMREGFEVYAENDEQMKGNESGQASDKSYAQGPSDGCDVELFNVCKRANTLYYNPAVFNGLVKLEKTWAASEKLVLTHLCTHADFHGQGIGSALLQGVLELADADGLPTYLESLRLATPLCE

SEQ ID NO: 2907 - DNA, 951 bp, Muscodor strobelii
  misc_feature: SGI EST ID NO. CUFF.7196.0
  misc_feature: Variant of the nucleotide sequence at SEQ ID NO 2905
tgagaagagccgagtaatgaatcggcggcttcctgggacggcgtctcgtattatctgcggaaactttgggagtagagctacgatggcgatgtcgtttgagagaccggagggtctgaagctgggcttctcgatgagtcgatgttgtcctgaggatacgccgggtatgacggtgagtatagtatataccgagagatcattttcagagaaggttcatcacgtttttgtctcaaaattcgtggtaatgggtgggagagccgagaatataactgacacgaaagatctctggttactaggatgtctgtgagtttgaaccccttgagtatctcgaaaccgtgtgtctgcagcaggaaaatttcgtcaaacctgcactcctctttttcgccttgcaaacgtataactcgagcactgtgaatattaatcacaaccgggtctacacagacatgtcagccttcaaagacacagagtacacatactggtgggcaccactccctacgatgcggcagtggaacgaagagcgcatacgtcgtcgcttcgcggacccgaatacgcagcagttcaaggtcaccgacgatcagactagacgagtcgtcgcgtgggctaaatgggacttgccacggggcaggatgatagcgatgagagaggggtttgaggtctatgccgaaaatgatgagcagatgaaggggaatgagagtgggcaggcgagtgataagtcctatgctcagggcccgtcagatgggtgtgatgttgagctcttcaatgttcttcaacggtctcgtgaagctagaaaagacatgggcagcaagtgagaagctagtccttacacatctatgtacccacgccgatttccacggccaaggcataggctcagcattattgcagggcgtcttagaactcgcagatgccgacggcctaccaacatatctcgagtcgttgcgcttggccacgccatta

SEQ ID NO: 2908 - DNA, 3069 bp, Muscodor strobelii
  misc_feature: SGI cDNA ID NO. 560614
  misc_feature: Reduced expression when VOC is produced
  misc_feature: Encodes the peptide sequence at SEQ ID NO 2909
atgcgccgcccgctcgtgcccgcctcgcccgacctcgatcgcctcctgggcacccgtgcgcggccctcccaggtcatgccacgtctctacaactcgacgaccactcagagctcctcccagcctgaagaacagcgcccagaggtccctgtagagccactcctggcccatgagggggatgatgcttccgcttcgaccgaagtcctggccgaccaccgccatctcaaggccgtgcagtccatcgtgaacaccggagacaccagccaagccgacttgctgtggcgtcactacaaagctatgagcgagggcgccccgacaacccgtctgcggcgcagtgtgctggccttcctctccaagacggacagggttgccgacgcttggaagatctccgagctcttctcccacatagaccctctgaagtgggacaacgccacctttattgcgggcatccgcgccgagctcaacctccagaaccacgcccgtgccctggccatcttcgagaaggggctgcacagcaccactctctacaccagcaacctggtctccgccctcgacatcgtcttggctgccgccctgtcctcgtccaaccccaagatcctcgagattctctggggcttctatccgcaaatggcgcccaagctggacctggatgtcgctaccgccaagctgcatcgcgttgctgccgtccctaaccttgcggatagggctttctctttccacgactaccgcacaaacctgtcgcccgccgattcagagaaagcgggccaagaagccttgttcgctttgcagaagattctggtcaggagggcgctctcttcgtgtgatgactccagggtcgtagacctcctccttctcacagaagacgtgcacgcgttcgaagactatctggcgctcgcgcagaagcgaaaaaagcacgatctagtcgtccgtgtatacgatatatatcgagttgtgaccggcgccacgccctctcgagctgtgctacattgggtcttcaatgcttataccaaaatagaagcaccttattccaaaaagatcgccggtgtcgatcttgtatgggacgatactcatcgatttcatggcaagccatcccagcgagcatatcagaaacatatggctttccatgcggcccgtgggaataaggatcgcgtgtattcgttgtggtccgactacgtccaacgtttccgcgacgatcccaacctaccagcgctgcagggcgacgacacattcggccacttactgcaagtccatgccgtcaagggcgaagccaaagaggctcagcgcgtcttcgacgacgtgaccgacgtcttcaagctcacaccatcgatatatgactggaatatcctcttgaacgcgtacgtcaaggccaatgactacgatggagcaatagagacattcgaaaagttgtgcatacgactgaagccggacagatacagctatgccactctgatgcatatggctggctcgagaggcgaccttggatttactgtggagctttatcgccgagcccgaagtgcgggcatcatggtcgacagcgccatattgtccagtctcgtcgatgcttattgccaaaacgatcatttccaagatgccgaagacgtgtgcgttcgggctacgaacaaaggtgtggcaaccacagggatgtggaacaggcttctctattaccatgcattgcgacgcgatcttggggccctgaacgatgtcttgaatagaatggctgccaagaacatggcgtacgatcaattcacctacgaatatcttctgctggggcttgggttgtgtcgccagtcgcagcatgccctgcaactccttatcagtgccttgaaagagaaccttttcaccgtaaccccggcgcactttcaactcgtcatgggcgccttgatcagaaccggcgaaccccaaaacctcatgcgactccatgcgctaatgagagaacttggttatccatctagcgaggagacttggttcagtctcacccaggctaccgtgcaactccgaaaattctccaaagatcgaacgcgagacaaccagcgggaatggcttggcaaggcgcttcgtattttttaccagatctacggtatgcgccccgaaggggtcaggaaatctcaaggcttttcaacgacgcctggcagcaacttgaggagctcaatcggcccagcaagagaggcacaccatttcagtacaatgatgaacttgtatgctgatctcaatgacggtgtacgtgttgaagaacttgttggcctctaccgctatgttttccagggcacgacaaaggatgagggctcattacctttatctatgctcgatgccatgttgctctcgagttttagggccaaacagtatgatcgtatgcaggagatttgggacctcatgttccaaacggccaagacagaagccttctcgatggattttcgaaataattcaccacattcgccgaaaatatcgccgaaatatcgccatgctctctgcagcgctcttcggctcatgctcaagatgtattttgaacaggggaactatgctggcctggaaactttggtgaagagtgttataaatgctggattccaattggatggccagaattggaatacctatgtgcaactacttgcgcggacgaagcagtacagagctgcatttggcatatgtgaaaaggtgctcatgccacattggctcggatggaatcagaggcgcaacgaagatgatatcgaggataaagcttccagaaggagccgtattaatttagacgatcagaggaaacagtcatctccacgtcatatctcacctctcagttcgactttcatttggcttggccgcggctaccttgagctcagcggtttaagccagtggtcgagcgacgcggcgaacaccttggacgagatcaatcgcgattgtgtccaggtggttagagctatcaacaccatggagagcaagaatacgacactcgagaactatattttcagcatgcctgatcccgatcacgccgacacactcaatctgcaagagttaacgatagacgactctcgatcgagcgttagcaaagatattcatgcggaaaacgcgacttctcacaattag

SEQ ID NO: 2909 - protein, 1022 aa, Muscodor strobelii
  misc_feature: SGI Peptide ID NO. 560614
  misc_feature (443)..(468): Pfam Id: PF01535 Pfam Desc: PPR repeat
  misc_feature (92)..(985): NCBI GI: 85104608 Blast Desc: NCU08692 [Neurospora crassa OR74A] gi|2183240|gb|AAB60884.1| coxI translation protein CYA5 [Neurospora crassa] gi|28923342|gb|EAA32535.1| [Neurospora crassa
  misc_feature (265)..(985): NCBI GI: 116196018 Blast Desc: CHGG_04607 [Chaetomium globosum CBS 148.51] gi|88180520|gb|EAQ87988.1| CHGG_04607 [Chaetomium globosum CBS 148.51]
  misc_feature (3)..(984): NCBI GI: 261352294 Blast Desc: coxI translation protein CYA5 [Verticillium albo-atrum VaMs.102]
  misc_feature (94)..(985): NCBI GI: 171690634 Blast Desc: protein product [Podospora anserina] gi|170945265|emb|CAP71376.1| protein product [Podospora anserina]
  misc_feature (5)..(978): NCBI GI: 256726870 Blast Desc: NECHADRAFT_33925 [Nectria haematococca mpVI 77-13-4]
  misc_feature (37)..(978): NCBI GI: 46123637 Blast Desc: FG06196.1 [Gibberella zeae PH-1]
  misc_feature (324)..(980): NCBI GI: 156063530 Blast Desc: SS1G_01883 [Sclerotinia sclerotiorum 1980] gi|154697217|gb|EDN96955.1| SS1G_01883 [Sclerotinia sclerotiorum 1980]
  misc_feature (28)..(627): NCBI GI: 154302187 Blast Desc: BC1G_09774 [Botryotinia fuckeliana B05.10] gi|150855548|gb|EDN30740.1| BC1G_09774 [Botryotinia fuckeliana B05.10]
  misc_feature (90)..(852): NCBI GI: 145607351 Blast Desc: MGG_04189 [Magnaporthe grisea 70-15] gi|145014926|gb|EDJ99494.1| MGG_04189 [Magnaporthe grisea 70-15]
  misc_feature (84)..(896): NCBI GI: 259481369 Blast Desc: TPA: translation regulator (Cya5), (AFU_orthologue; AFUA_1G03930) [Aspergillus nidulans FGSC A4]
  misc_feature: Useful for introducing or modulating the production of volatile compounds
MRRPLVPASPDLDRLLGTRARPSQVMPRLYNSTTTQSSSQPEEQRPEVPVEPLLAHEGDDASASTEVLADHRHLKAVQSIVNTGDTSQADLLWRHYKAMSEGAPTTRLRRSVLAFLSKTDRVADAWKISELFSHIDPLKWDNATFIAGIRAELNLQNHARALAIFEKGLHSTTLYTSNLVSALDIVLAAALSSSNPKILEILWGFYPQMAPKLDLDVATAKLHRVAAVPNLADRAFSFHDYRTNLSPADSEKAGQEALFALQKILVRRALSSCDDSRVVDLLLLTEDVHAFEDYLALAQKRKKHDLVVRVYDIYRVVTGATPSRAVLHWVFNAYTKIEAPYSKKIAGVDLVWDDTHRFHGKPSQRAYQKHMAFHAARGNKDRVYSLWSDYVQRFRDDPNLPALQGDDTFGHLLQVHAVKGEAKEAQRVFDDVTDVFKLTPSIYDWNILLNAYVKANDYDGAIETFEKLCIRLKPDRYSYATLMHMAGSRGDLGFTVELYRRARSAGIMVDSAILSSLVDAYCQNDHFQDAEDVCVRATNKGVATTGMWNRLLYYHALRRDLGALNDVLNRMAAKNMAYDQFTYEYLLLGLGLCRQSQHALQLLISALKENLFTVTPAHFQLVMGALIRTGEPQNLMRLHALMRELGYPSSEETWFSLTQATVQLRKFSKDRTRDNQREWLGKALRIFYQIYGMRPEGVRKSQGFSTTPGSNLRSSIGPAREAHHFSTMMNLYADLNDGVRVEELVGLYRYVFQGTTKDEGSLPLSMLDAMLLSSFRAKQYDRMQEIWDLMFQTAKTEAFSMDFRNNSPHSPKISPKYRHALCSALRLMLKMYFEQGNYAGLETLVKSVINAGFQLDGQNWNTYVQLLARTKQYRAAFGICEKVLMPHWLGWNQRRNEDDIEDKASRRSRINLDDQRKQSSPRHISPLSSTFIWLGRGYLELSGLSQWSSDAANTLDEINRDCVQVVRAINTMESKNTTLENYIFSMPDPDHADTLNLQELTIDDSRSSVSKDIHAENATSHN

SEQ ID NO: 2910 - DNA, 3941 bp, Muscodor strobelii
  misc_feature: SGI EST ID NO. CUFF.7200.0
  misc_feature: Variant of the nucleotide sequence at SEQ ID NO 2908
atgtttttttgtttccctcttctcccacctgctcttctctcctctcgtgtcttgtcgtggcctctgtgcttgttgtcctttctattgttcctctactgtctagttgtctaatccgccgtcatcctcgatcgtcgttttgatccgatccgcgtcatcgtcgtcgttgcagatccattcacgatcttgccatccaacttccgacttggacattgccgactgctcgcatccccatcgcgtagtgccgcctcgccgctatgccttgagcctctggcgctctctttctcagctcctctcatcgagttcatggccgactttgtccccttcggcctgccatacgcccgccactcgcccgcacgatcccgaggctgcgtcgtcgccagactgctcccccaatgcttgagcggactgcggccagcctcgatccctgcggcttccgcctcgtcccgccctcgcacaacgccctgcggtcgacgaggcgcctgcacacggccttctggcagcatggcgccgccgacgtcgagctcaccgccgcgtggcagtccctgatgcacggcaccttccgatctctccgcgccccccggccccgggcccctccccgtcccccgtccgctccctgagtgcgtctgccttcctcctcgactttctctacccccctgccgccgtcgctctgatgcgccgcccgctcgtgcccgcctcgcccgacctcgatcgcctcctgggcacccgtgcgcggccctcccaggtcatgccacgtctctacaactcgacgaccactcagagctcctcccagcctgaagaacagcgcccagaggtccctgtagagccactcctggcccatgagggggatgatgcttccgcttcgaccgaagtcctggccgaccaccgccatctcaaggccgtgcagtccatcgtgaacaccggagacaccagccaagccgacttgctgtggcgtcactacaaagctatgagcgagggcgccccgacaacccgtctgcggcgcagtgtgctggccttcctctccaagacggacagggttgccgacgcttggaagatctccgagctcttctcccacatagaccctctgaagtgggacaacgccacctttattgcgggcatccgcgccgagctcaacctccagaaccacgcccgtgccctggccatcttcgagaaggggctgcacagcaccactctctacaccagcaacctggtctccgccctcgacatcgtcttggctgccgccctgtcctcgtccaaccccaagatcctcgagattctctggggcttctatccgcaaatggcgcccaagctggacctggatgtcgctaccgccaagctgcatcgcgttgctgccgtccctaaccttgcggatagggctttctctttccacgactaccgcacaaacctgtcgcccgccgattcagagaaagcgggccaagaagccttgttcgctttgcagaagattctggtcaggagggcgctctcttcgtgtgatgactccagggtcgtagacctcctccttctcacagaagacgtgcacgcgttcgaagactatctggcgctcgcgcagaagcgaaaaaagcacgatctagtcgtccgtgtatacgatatatatcgagttgtgaccggcgccacgccctctcgagctgtgctacattgggtcttcaatgcttataccaaaatagaagcaccttattccaaaaagatcgccggtgtcgatcttgtatgggacgatactcatcgatttcatggcaagccatcccagcgagcatatcagaaacatatggctttccatgcggcccgtgggaataaggatcgcgtgtattcgttgtggtccgactacgtccaacgtttccgcgacgatcccaacctaccagcgctgcagggcgacgacacattcggccacttactgcaagtccatgccgtcaagggcgaagccaaagaggctcagcgcgtcttcgacgacgtgaccgacgtcttcaagctcacaccatcgatatatgactggaatatcctcttgaacgcgtacgtcaaggccaatgactacgatggagcaatagagacattcgaaaagttgtgcatacgactgaagccggacagatacagctatgccactctgatgcatatggctggctcgagaggcgaccttggatttactgtggagctttatcgccgagcccgaagtgcgggcatcatggtcgacagcgccatattgtccagtctcgtcgatgcttattgccaaaacgatcatttccaagatgccgaagacgtgtgcgttcgggctacgaacaaaggtgtggcaaccacagggatgtggaacaggcttctctattaccatgcattgcgacgcgatcttggggccctgaacgatgtcttgaatagaatggctgccaagaacatggcgtacgatcaattcacctacgaatatcttctgctggggcttgggttgtgtcgccagtcgcagcatgccctgcaactccttatcagtgccttgaaagagaaccttttcaccgtaaccccggcgcactttcaactcgtcatgggcgccttgatcagaaccggcgaaccccaaaacctcatgcgactccatgcgctaatgagagaacttggttatccatctagcgaggagacttggttcagtctcacccaggctaccgtgcaactccgaaaattctccaaagatcgaacgcgagacaaccagcgggaatggcttggcaaggcgcttcgtattttttaccagatctacggtatgcgccccgaaggggtcaggaaatctcaaggcttttcaacgacgcctggcagcaacttgaggagctcaatcggcccagcaagagaggcacaccatttcagtacaatgatgaacttgtatgctgatctcaatgacggtgtacgtgttgaagaacttgttggcctctaccgctatgttttccagggcacgacaaaggatgagggctcattacctttatctatgctcgatgccatgttgctctcgagttttagggccaaacagtatgatcgtatgcaggagatttgggacctcatgttccaaacggccaagacagaagccttctcgatggattttcgaaataattcaccacattcgccgaaaatatcgccgaaatatcgccatgctctctgcagcgctcttcggctcatgctcaagatgtattttgaacaggggaactatgctggcctggaaactttggtgaagagtgttataaatgctggattccaattggatggccagaattggaatacctatgtgcaactacttgcgcggacgaagcagtacagagctgcatttggcatatgtgaaaaggtgctcatgccacattggctcggatggaatcagaggcgcaacgaagatgatatcgaggataaagcttccagaaggagccgtattaatttagacgatcagaggaaacagtcatctccacgtcatatctcacctctcagttcgactttcatttggcttggccgcggctaccttgagctcagcggtttaagccagtggtcgagcgacgcggcgaacaccttggacgagatcaatcgcgattgtgtccaggtggttagagctatcaacaccatggagagcaagaatacgacactcgagaactatattttcagcatgcctgatcccgatcacgccgacacactcaatctgcaagagttaacgatagacgactctcgatcgagcgttagcaaagatattcatgcggaaaacgcgacttctcacaattagatccggttggtctgtacattacatgttatatcatccatatttcttgtatcatgagaaagccatcatatttacgatgctgaaggtagctccaaaggtcagttgtgagaaagcagcttatttaaatgatcatgtaaatgatcatgtatacgtacctacctatatatacaaacacacatatatcattgaagacatcgatcgcact

SEQ ID NO: 2911 - DNA, 3192 bp, Muscodor strobelii
  misc_feature: SGI cDNA ID NO. 560615
  misc_feature: Reduced expression when VOC is produced
  misc_feature: Encodes the peptide sequence at SEQ ID NO 2912
atgccacttgactccagaaacaggcaaggcttccccttagaaacaattaaatccttccccgccagccaatcttcctcgtctagcagccccgtccttccctcgagctccaccgcagcggcagcggcagcggcaggtcgtcacacccccacgtctccatcctgcccgtccgccgcatacccgtccctcggcgtcatcgccccttcgtccgcctcagccaatccgccttcagccctgtcgagccagcccagctcgcatccttccggccctgtcgaggcagtctccctcccccgtcctcctcctcatccgagccatgcttcacctaccgcctctcacccccaagatacggccggtcccgtagctccccatgacgaccccggcacctctgccatgtccaaatccaaagctccgctcctcctccgctcctcgccaggctttggtaccgggtcttatggcgctgctcccatccatcctgagctcggcgaccaagacgacggcggcgatgacgaacagcaccatacggcgtccgcgctgctgtcccggcagagcaccgaatcggctcgttcgcggcgccgcccgtcctcgagcacgagccgctcgctcgtatttcgcactagtacttcttctttgactagaaggcggcgaagcatgtctgacgagattggtggatcctctatcgttggcggtgcagagggacgcttcggtgtcactgacgttcccctgctaaacgatatatcgtccgacgatgcatctacatcttcagctgcagaggaagacaacgattcggagcgagagcatgacggcgcaggtggcagcccggacgacgatcctccggacaactcgccctacgctcaagtgcgtgcctccgtcgcacctactgacaacgttaccttgtcgatcaatacgccgcgcatgtggattttgtcggcgctattctcgattcttggatctgcaaccaacctcttcttttccttgaggtatcctagcgtcgccattacgcccgtcatcgccctacttttagttcaccctctcgggttgctttgggactatgtactgaaaagaccggacgatcccccggaagaattcttcgatggctcacgtgtatcctccgggcactctagcgcagcagcatcatctacgcttggagagaagagcaatcgcgcccgtcgacttcggctctggcttgctcaaggccgttggaatgaaaaagaacacagctgtgtttatgtgagcagcaacgtctcctttggatttgcgtttgcgacagatgtaattgtggagcaaacacagttctacaagcaagacgcaaccattatttaccagctactgctcaccctatcgacacagatcttgggatatgccttcgccggacttactagacgttttctagtacggccctctggcatgatttggccgggcactctcatgtccgccgccatgtttaccacgttacacaaagagcagaacgagccagcaaacggatggcggatcagcagatggaagttcttctatattgtctggaccggcgcctttgtgttctatttcctgccgggattgctgatgcctgctctcagctttttcaatgtgatcacttggtttgcacctcggaacgtggtggtggccaatctcttcggcgtcacttccggcttgggcctcttcccagtcacattcgattgggcacagattgcgtacattggctcgcctctgctgacccctttttgggcttctatgaatgtcatcggtggtctcgtgctggttatgtggattgttgcacccattgcatattactgcaatgtgttctactcatcatatatgcccattctctcagcctcggtgtttgataacaccggtaagatatacgacgtaggcaagatccttacatcagaattcgttttcgacagaaaagcctattcggcatatagtcgagtgtatttgcccatcacctatgtgcttagttacggactgcaatttgccgcgttggcgtcactattgacacacactatttgctggcacggcaaagacatattaacgcaatggaggagatctctgaaagagacagggcccgaagcccaaacggtatatcaaccactagagacggagagcgagaggaggaactcgcaacgaagaaacagcgacggcactgcgccttccggtgcaaatatggacgacttgctcaaccgtgaagacgtccataatcggcttatgcgaaggtatagagatgcgcccatatactggtatctgatcacgggtgccaccatgcttgccatcggtatttttgtggtcgaatactaccctgttcatctaccttggtatggattgctccttgccctgggcatatgtgctgtcctgttcatccctatcggcatcgttatggccgtgacgaatcagcacagcagtatataccttatatgtcagctcgtctgcggcgtagtattcccaggaaagccggtggcgaacatggtattcgtgacgtacgggtacatctcatcggcgcagggtatcaaatttgctgcagatctgaagctgggtcattacatgaaaatcccgccgcggatccttttctcggtacagatggtagctaccatgatctcctctttcacgcagatcgctgtcctcaactggatgttccgcaacgtaccggggatctgcacgccgtcggccatcaacgggttcacatgtccgattgcgcgagtacacttcaacggatccattctctggggggtggtgggacccagcgagttctttgggcagaacgcgacataccggtctctggtatggtgcttcctgctcggagcggtggcgccggtgccgctgtatctctacgggcgggggcggaagggcagcatagtgcggaagatcaacctgccggtactgttcgggtctctgagctggatccctccggcgacgggactcaacttctcggtgtgggcggtggtgtgctacgtgttcaactacctgattaagaatcgggccagcgcgtggtgggccaagtacacaatgacactcagcgcggcgctagactcggggctcgcgttcgggatagtggtggtgttcttcgggttcatctacccagggtggatggaatcgtttaagtggtggggaaccgaggtgtataagcaagggtgcgactggcaggcgtgctcataccggacggtagccaacggcagccacttcgggccggactctggatggtag

SEQ ID NO: 2912 - protein, 1063 aa, Muscodor strobelii
  misc_feature: SGI Peptide ID NO. 560615
  misc_feature (299)..(1020): Pfam Id: PF03169 Pfam Desc: OPT oligopeptide transporter protein
  misc_feature (133)..(1061): NCBI GI: 156046206 Blast Desc: SS1G_09370 [Sclerotinia sclerotiorum 1980] gi|154693765|gb|EDN93503.1| SS1G_09370 [Sclerotinia sclerotiorum 1980]
  misc_feature (139)..(1060): NCBI GI: 171683355 Blast Desc: protein product [Podospora anserina] gi|170941637|emb|CAP67291.1| protein product [Podospora anserina]
  misc_feature (44)..(1060): NCBI GI: 116194588 Blast Desc: CHGG_03892 [Chaetomium globosum CBS 148.51] gi|88179805|gb|EAQ87273.1| CHGG_03892 [Chaetomium globosum CBS 148.51]
  misc_feature (113)..(1060): NCBI GI: 85107500 Blast Desc: NCU06352 [Neurospora crassa OR74A] gi|28923991|gb|EAA33150.1| conserved [Neurospora crassa OR74A]
  misc_feature (130)..(1059): NCBI GI: 256726962 Blast Desc: [Nectria haematococca mpVI 77-13-4]
  misc_feature (99)..(1061): NCBI GI: 46136533 Blast Desc: FG09782.1 [Gibberella zeae PH-1]
  misc_feature (382)..(1061): NCBI GI: 145613664 Blast Desc: MGG_01452 [Magnaporthe grisea 70-15] gi|145020712|gb|EDK04841.1| MGG_01452 [Magnaporthe grisea 70-15]
  misc_feature (340)..(1061): NCBI GI: 261352419 Blast Desc: sexual differentiation process protein isp4 [Verticillium albo-atrum VaMs.102]
  misc_feature (249)..(1058): NCBI GI: 255938602 Blast Desc: Pc14g00770 [Penicillium chrysogenum Wisconsin 54-1255] gi|211584692|emb|CAP74218.1| Pc14g00770 [Penicillium chrysogenum Wisconsin 54-1255]
  misc_feature (438)..(1059): NCBI GI: 169610449 Blast Desc: SNOG_08323 [Phaeosphaeria nodorum SN15] gi|160702067|gb|EAT84599.2| SNOG_08323 [Phaeosphaeria nodorum SN15]
  misc_feature: Useful for introducing or modulating the production of volatile compounds
MPLDSRNRQGFPLETIKSFPASQSSSSSSPVLPSSSTAAAAAAAGRHTPTSPSCPSAAYPSLGVIAPSSASANPPSALSSQPSSHPSGPVEAVSLPRPPPHPSHASPTASHPQDTAGPVAPHDDPGTSAMSKSKAPLLLRSSPGFGTGSYGAAPIHPELGDQDDGGDDEQHHTASALLSRQSTESARSRRRPSSSTSRSLVFRTSTSSLTRRRRSMSDEIGGSSIVGGAEGRFGVTDVPLLNDISSDDASTSSAAEEDNDSEREHDGAGGSPDDDPPDNSPYAQVRASVAPTDNVTLSINTPRMWILSALFSILGSATNLFFSLRYPSVAITPVIALLLVHPLGLLWDYVLKRPDDPPEEFFDGSRVSSGHSSAAASSTLGEKSNRARRLRLWLAQGRWNEKEHSCVYVSSNVSFGFAFATDVIVEQTQFYKQDATIIYQLLLTLSTQILGYAFAGLTRRFLVRPSGMIWPGTLMSAAMFTTLHKEQNEPANGWRISRWKFFYIVWTGAFVFYFLPGLLMPALSFFNVITWFAPRNVVVANLFGVTSGLGLFPVTFDWAQIAYIGSPLLTPFWASMNVIGGLVLVMWIVAPIAYYCNVFYSSYMPILSASVFDNTGKIYDVGKILTSEFVFDRKAYSAYSRVYLPITYVLSYGLQFAALASLLTHTICWHGKDILTQWRRSLKETGPEAQTVYQPLETESERRNSQRRNSDGTAPSGANMDDLLNREDVHNRLMRRYRDAPIYWYLITGATMLAIGIFVVEYYPVHLPWYGLLLALGICAVLFIPIGIVMAVTNQHSSIYLICQLVCGVVFPGKPVANMVFVTYGYISSAQGIKFAADLKLGHYMKIPPRILFSVQMVATMISSFTQIAVLNWMFRNVPGICTPSAINGFTCPIARVHFNGSILWGVVGPSEFFGQNATYRSLVWCFLLGAVAPVPLYLYGRGRKGSIVRKINLPVLFGSLSWIPPATGLNFSVWAVVCYVFNYLIKNRASAWWAKYTMTLSAALDSGLAFGIVVVFFGFIYPGWMESFKWWGTEVYKQGCDWQACSYRTVANGSHFGPDSGW

SEQ ID NO: 2913 - DNA, 3702 bp, Muscodor strobelii
  misc_feature: SGI EST ID NO. CUFF.7311.1
  misc_feature: Variant of the nucleotide sequence at SEQ ID NO 2911
acgaattaggcaatgaattctcgtacgcaggcgactgcccggcgagacggtgtgcgtgacgcttcttcttcccccgtcgcgtcgtcccatctagtgccactcatgccacttgactccagaaacaggcaaggcttccccttagaaacaattaaatccttccccgccagccaatcttcctcgtctagcagccccgtccttccctcgagctccaccgcagcggcagcggcagcggcaggtcgtcacacccccacgtctccatcctgcccgtccgccgcatacccgtccctcggcgtcatcgccccttcgtccgcctcagccaatccgccttcagccctgtcgagccagcccagctcgcatccttccggccctgtcgaggcagtctccctcccccgtcctcctcctcatccgagccatgcttcacctaccgcctctcacccccaagatacggccggtcccgtagctccccatgacgaccccggcacctctgccatgtccaaatccaaagctccgctcctcctccgctcctcgccaggctttggtaccgggtcttatggcgctgctcccatccatcctgagctcggcgaccaagacgacggcggcgatgacgaacagcaccatacggcgtccgcgctgctgtcccggcagagcaccgaatcggctcgttcgcggcgccgcccgtcctcgagcacgagccgctcgctcgtatttcgcactagtacttcttctttgactagaaggcggcgaagcatgtctgacgagattggtggatcctctatcgttggcggtgcagagggacgcttcggtgtcactgacgttcccctgctaaacgatatatcgtccgacgatgcatctacatcttcagctgcagaggaagacaacgattcggagcgagagcatgacggcgcaggtggcagcccggacgacgatcctccggacaactcgccctacgctcaagtgcgtgcctccgtcgcacctactgacaacgttaccttgtcgatcaatacgccgcgcatgtggattttgtcggcgctattctcgattcttggatctgcaaccaacctcttcttttccttgaggtatcctagcgtcgccattacgcccgtcatcgccctacttttagttcaccctctcgggttgctttgggactatgtactgaaaagaccggacgatcccccggaagaattcttcgatggctcacgtgtatcctccgggcactctagcgcagcagcatcatctacgcttggagagaagagcaatcgcgcccgtcgacttcggctctggcttgctcaaggccgttggaatgaaaaagaacacagctgtgtttatgtgagcagcaacgtctcctttggatttgcgtttgcgacagatgtaattgtggagcaaacacagttctacaagcaagacgcaaccattatttaccagctactgctcaccctatcgacacagatcttgggatatgccttcgccggacttactagacgttttctagtacggccctctggcatgatttggccgggcactctcatgtccgccgccatgtttaccacgttacacaaagagcagaacgagccagcaaacggatggcggatcagcagatggaagttcttctatattgtctggaccggcgcctttgtgttctatttcctgccgggattgctgatgcctgctctcagctttttcaatgtgatcacttggtttgcacctcggaacgtggtggtggccaatctcttcggcgtcacttccggcttgggcctcttcccagtcacattcgattgggcacagattgcgtacattggctcgcctctgctgacccctttttgggcttctatgaatgtcatcggtggtctcgtgctggttatgtggattgttgcacccattgcatattactgcaatgtgttctactcatcatatatgcccattctctcagcctcggtgtttgataacaccggtaagatatacgacgtaggcaagatccttacatcagaattcgttttcgacagaaaagcctattcggcatatagtcgagtgtatttgcccatcacctatgtgcttagttacggactgcaatttgccgcgttggcgtcactattgacacacactatttgctggcacggcaaagacatattaacgcaatggaggagatctctgaaagagacagggcccgaagcccaaacggtatatcaaccactagagacggagagcgagaggaggaactcgcaacgaagaaacagcgacggcactgcgccttccggtgcaaatatggacgacttgctcaaccgtgaagacgtccataatcggcttatgcgaaggtatagagatgcgcccatatactggtatctgatcacgggtgccaccatgcttgccatcggtatttttgtggtcgaatactaccctgttcatctaccttggtatggattgctccttgccctgggcatatgtgctgtcctgttcatccctatcggcatcgttatggccgtgacgaatcagcacagcagtatataccttatatgtcagctcgtctgcggcgtagtattcccaggaaagccggtggcgaacatggtattcgtgacgtacgggtacatctcatcggcgcagggtatcaaatttgctgcagatctgaagctgggtcattacatgaaaatcccgccgcggatccttttctcggtacagatggtagctaccatgatctcctctttcacgcagatcgctgtcctcaactggatgttccgcaacgtaccggggatctgcacgccgtcggccatcaacgggttcacatgtccgattgcgcgagtacacttcaacggatccattctctggggggtggtgggacccagcgagttctttgggcagaacgcgacataccggtctctggtatggtgcttcctgctcggagcggtggcgccggtgccgctgtatctctacgggcgggggcggaagggcagcatagtgcggaagatcaacctgccggtactgttcgggtctctgagctggatccctccggcgacgggactcaacttctcggtgtgggcggtggtgtgctacgtgttcaactacctgattaagaatcgggccagcgcgtggtgggccaagtacacaatgacactcagcgcggcgctagactcggggctcgcgttcgggatagtggtggtgttcttcgggttcatctacccagggtggatggaatcgtttaagtggtggggaaccgaggtgtataagcaagggtgcgactggcaggcgtgctcataccggacggtagccaacggcagccacttcgggccggactctggatggtagtgggtacaccaggcgccgggcaccggactgtgatgaccaatttagatgagatatgaataacggctatcgagttggaaaacgttgggtacaggggacattgcagcttgggcgatttcttgcagcattttgagggatagaagatgagccgagctgagcaggctaccggctctttctgcttttcgtatagagaagcagtaaagtcgaagttgaaatgtatgtcgcagacgacgtgcgtttctcatcttgatgatacaccgcgcaactcggatttggctcgagcccctgaaaacggagctgtgcatatgtgcatatagaatttacataggtcatcatggccttctttctactgttggagaggagtgattagctccatatatacctacctttacatagtatatctatcccagg

SEQ ID NO: 2914 - DNA, 960 bp, Muscodor strobelii
  misc_feature: SGI cDNA ID NO. 560616
  misc_feature: Elevated expression when VOC is produced
  misc_feature: Encodes the peptide sequence at SEQ ID NO 2915
atgatcataccccggttcgcgtttgcagcatcgttgctctctgggcaaacgctcgcaggcctgtgcgtcgataaccacacctgcgcgttgagcaagcctgtgttgtcatgctccgacaaggctcaacctggtctcgtggatacgtgttgcgttgagacgtacggaggtctcatccttcaaacgcaattttggaatacggataccggattggaatctgagggccaattgctccccaaagattcatggacaatccacggtctttggcctgatttttgcaatggatcgtacacacagtattgtgacttaagccgtcaatacgatcctcttccgtctcccaacacaacaacaggccttccagatggcacacccgttgttccatggaccggagaacccatctccgacttcattgaggaattcggaagatacgacttacttgcttatatgaaaaaattctggactgggctcaatcagccaagctggtacctctgggctcatgagtatagcaagcatgcaacttgctatagtacttttgacgtcgaatgctatggccccaaatacgtggaacatgaagaaattgttgacttcttcgagaccgttatatcctattaccagaacctaccaacatggaaatggttatcagctaaaggaattaaaccttcaaacacgacttcttactcactatccgatattcagggtgcattgaccgatggctttggcaagctgccctttgttgggtgcacggggccgaagtacaatgagaccgccgccggcaggaacagctccgatgctggatacactatctacgacgaaacttggtattattaccacgttcatgggcaagtacagcgcgtgcagcccgttccgatcgatgtcaacctcagtagtacttatataacgagctgtgcaaaagcgccaaaagccatctggtattacgagcgtactcctggctctgttgcttag

SEQ ID NO: 2915 - protein, 319 aa, Muscodor strobelii
  misc_feature: SGI Peptide ID NO. 560616
  misc_feature (46)..(266): Pfam Id: PF00445 Pfam Desc: Ribonuclease T2 family
  misc_feature (143)..(248): Pfam Id: PF00445 Pfam Desc: Ribonuclease T2 family
  misc_feature (78)..(108): Pfam Id: PF00445 Pfam Desc: Ribonuclease T2 family
  misc_feature (25)..(317): NCBI GI: 189204237 Blast Desc: ribonuclease T2 precursor [Pyrenophora tritici-repentis Pt-1C-BFP] gi|187985553|gb|EDU51041.1| ribonuclease T2 precursor [Pyrenophora tritici-repentis
  misc_feature (17)..(318): NCBI GI: 156059566 Blast Desc: SS1G_03795 [Sclerotinia sclerotiorum 1980] gi|154701582|gb|EDO01321.1| SS1G_03795 [Sclerotinia sclerotiorum 1980]
  misc_feature (1)..(318): NCBI GI: 164655654 Blast Desc: MGL_3950 [Malassezia globosa CBS 7966] gi|159102844|gb|EDP41742.1| MGL_3950 [Malassezia globosa CBS 7966]
  misc_feature (6)..(318): NCBI GI: 145615756 Blast Desc: MGG_10510 [Magnaporthe grisea 70-15] gi|145022807|gb|EDK06580.1| MGG_10510 [Magnaporthe grisea 70-15]
  misc_feature (2)..(254): NCBI GI: 169626487 Blast Desc: SNOG_16533 [Phaeosphaeria nodorum SN15] gi|111054953|gb|EAT76073.1| SNOG_16533 [Phaeosphaeria nodorum SN15]
  misc_feature (28)..(317): NCBI GI: 189095132 Blast Desc: ribonuclease T2 [Lenzites betulinus] gi|189095134|dbj|BAG38684.1| ribonuclease T2 [Lenzites betulinus]
  misc_feature (28)..(314): NCBI GI: 24475579 Blast Desc: ribonuclease T2 [Pholiota nameko] gi|47827204|dbj|BAD20773.1| ribonuclease T2 [Pholiota nameko]
  misc_feature (25)..(317): NCBI GI: 74267242 Blast Desc: ribonuclease T2 [Grifola frondosa] gi|89255274|dbj|BAE80702.1| ribonuclease T2 [Grifola frondosa]
  misc_feature (45)..(318): NCBI GI: 23978935 Blast Desc: ribonuclease T2 [Hericium erinaceum] gi|34915965|dbj|BAC87881.1| ribonuclease T2 [Hericium erinaceum]
  misc_feature (27)..(317): NCBI GI: 58737188 Blast Desc: ribonuclease T2 [Pleurotus ostreatus]
  misc_feature (27)..(291): SWISSPROT Homolog: EC 3.1.27.1 Ribonuclease T(2)
  misc_feature: Useful for introducing or modulating the production of volatile compounds
MIIPRFAFAASLLSGQTLAGLCVDNHTCALSKPVLSCSDKAQPGLVDTCCVETYGGLILQTQFWNTDTGLESEGQLLPKDSWTIHGLWPDFCNGSYTQYCDLSRQYDPLPSPNTTTGLPDGTPVVPWTGEPISDFIEEFGRYDLLAYMKKFWTGLNQPSWYLWAHEYSKHATCYSTFDVECYGPKYVEHEEIVDFFETVISYYQNLPTWKWLSAKGIKPSNTTSYSLSDIQGALTDGFGKLPFVGCTGPKYNETAAGRNSSDAGYTIYDETWYYYHVHGQVQRVQPVPIDVNLSSTYITSCAKAPKAIWYYERTPGSVA

SEQ ID NO: 2916 - DNA, 5900 bp, Muscodor strobelii
  misc_feature: SGI EST ID NO. CUFF.7445.0
  misc_feature: Variant of the nucleotide sequence at SEQ ID NO 2914
cccatttctaagcgtcgataaccacacctgcgcgttgagcaagcctgtgttgtcatgctccgacaaggctcaacctggtctcgtggatacgtgttgcgttgagacgtacggaggtctcatccttcaaacgcaattttggaatacggataccggattggaatctgagggccaattgctccccaaagattcatggacaatccacggtctttggcctgatttttgcaatggatcgtacacacagtattgtgacttaagccgtcaatacgatcctcttccgtctcccaacacaacaacaggccttccagatggcacacccgttgttccatggaccggagaacccatctccgacttcattgaggaattcggaagatacgacttacttgcttatatgaaaaaattctggactgggctcaatcagccaagctggtacctctgggctcatgagtatagcaagcatgcaacttgctatagtacttttgacgtcgaatgctatggccccaaatacgtggaacatgaagaaattgttgacttcttcgagaccgttatatcctattaccagaacctaccaacatggaaatggttatcagctaaaggaattaaaccttcaaacacgacttcttactcactatccgatattcagggtgcattgaccgatggctttggcaagctgccctttgttgggtgcacggggccgaagtacaatgagaccgccgccggcaggaacagctccgatgctggatacactatctacgacgaaacttggtattattaccacgttcatgggcaagtacagcgcgtgcagcccgttccgatcgatgtcaacctcagtagtacttatataacgagctgtgcaaaagcgccaaaagccatctggtattacgagcgtactcctggctctgttgcttagaggtgaaatagaagaggaggatgcgtgtccagagaggtcagccagatgtcaatcgatacacctcctcttcatctccagcatggtaaaaagagtataggtgcacatcgactctcattgatttagtcgtaataatatgaactgttccaatcattgacaaagtatgatttactatgatgagcagtaatttcatactttgttatgtgcattgtggtccggtgccattgttttcgcgctagacacaataccctgacctccaatcataccacgttctgacttcaatgagcagctgcacatatgcaccatagaccatcagtattttcatttctttaatttagcaagctcaataaagtcttattgctatggtaccatagaatgattccgtacgccccttgccgtgaagacgtcgagcagaaagtagtcctccttcctgcatcgggaaaccgtccatcgtagcacatacacaccagaaaaatctcgccatctactgtacaaggacgatcggcagctcaaatcttgcagacaacgacgcgaatgccagaggaggaaagacagatcttatagccatttcagcaagcttcttggactgcacgtggacatcgccgaggacactccatggttgtaaatgcatctccggtagagcccataattgatctactcaaggggcatcccatcgaacatatacttggccattaaccacgaaagggaactctcgcgccgacaatgggacttccgatctcgcccggggcaccgacgttgcgtagaaaagaaccaggcgccgagtcaccactcacatcaaagcgtatagccactttgccattgccagtgtgccgcacatcgaagctaccaccaccgttctgtgagttgccctccgtttcgcagatctccaggatctctttctcgggtatcgggtccagcacgacaggtttgatcgtatccacgtgggcttggatagaggacaactcgatgtatccagagtcatctgctgcgtagttctctaggtccttgcaagcagtcacgaggagctggcgtacaagaacgggtcgaggctgagacggtcttgtcatggcgggtgggccaccgaatgacatacttgacggccacccagtattacctgtcgcaggagcaaatcctggtggtggggggaatatgcctggagcgccccaatgcgttggcggggagccgaatgacggattcgtgagtgatgggttggggaatggtcgcatgccaggagcaacagtgccgcggcgaggcgtgtcaaaattgtcgataaagggctcatcactgtcatcaagaagagcactacttcccaagtgattgttgatatcatcgttgtccattgatgagtttgcattgcgttggttctggacgatgcttccagggcgtccgatgggggttggcttgccaataggctgggcacctgagccggtcgtatcaaatgaggccgatccttggcgcgaatgggacaaggtccggccgggagtatcgtcaggagatgggaagttatgatgcaggccggctaagtgagggtctaccgttggctgtgggaagcctggaggcggcatgtgaaatcctctgccacctatatgaccacccaagcccgggggagggacgggcataccaggagggcgaaattgcccgcccatttgcgggaacataggatcatgcatgcgcggaaagccgggacccataggcgacatgcccggaggcattggcatcggaggcatattcatgtcaaaatggccaggcggaagaccagaggggctcttcatagcggcatgatgaggtgacatggggggtagaagaggcgcaagtcctgttttactgggcggtccgatcaagccgggacttacatgaggtgggctgcccgcatgcggtgatgctgcctggctgggcacagagcccgagtaagatgcctgagacacggatcgcgtaacttcttgagagatagatcgtggtttgacgggcgtgtgggctaagggcaagaccggtgtcgccacggctacttgcggcgaggcattgacggctccgggttgctgaggaagagcggggacggagaccggatgtggtttctttgccggctgtatggggataggtaccgtatgtgagaccggcttggccaccagcttttcctcgtactttatcttttctttggcctcgcgttccgctttagcttgggctgctctcaggtccttttcccttttatccttctcatgcttctctcttctctcgcgagtctcgcgttccttaacttcgcgagcttcttgttctttgcgtcgttgctcctctttgagtcttttctctctgtctttcgcctcacgagcctttcgttcctgctcggcctgcttttctttctgctcatgagctcgacgctgcttttctgcttctctgcgtaagcgttcgtcttcctcggctttcttctgcgcctccttctttctgcgcttctcttctgccttcgcccgggcttcctcgactcgtctggtttcctccgccaaccgggcttcttcttcggccgccttttcggcatcgcgcttcgccttctcctcaagaacggcctgtttcttctggagagccttctctttgcgtttctgggcgtcttttgccttcttggcctttcgttggctctcttgcgtttcttcctgttctaattcctcgaggagcttctcctgacgttccttggcgactttctctctgtaggccgtcaagactctctgttcgaacatacgcgcagcaaaaatctggaacatccggcggccttcctccattcgcgaactctcatccatttggtcctgaaggtcaatcagtgaatggctccgaagctcccagtcgcaaggattacctcttcttcctcataatcttcctcctggctctcgtactcctcgtcttcctcctcctcgtcatcatattcatcctcttcagggggcgggtgattgtgtgcgttgcctaaaccgccgttcaccgtgtggccgtatccaccggcataatgggcatcctcttcccgcgccatccgtcgttcagccagctgctccatcatctcgatgaatttcttgccgtcgtttttaagaagatcgtctgcaaccgtgagaataccgcctaaatgtgttattcaaggtcgatgtgtgccacaagtcaggagactagtgaacgacgtacctttgacagtcagactggcaccaaaattgaagaagtctgtagaatagtcatcacgaggtatttcctcgggctcgtcttcctcctcttcgtcttccaggtcttcctcgtcgctatattcttcctcgccgccatcaaggtcgtcatcctcgttgtctacatgctccactatgcggccgcgcgatggaacgtgattgttgggatgccgtggagggatcgcattggggggatggagcccggccatggagccaaagcgtttgggtgcctctaggcgatcttgagcgaacatggggggagcactggggtggctgtgaggtcgattggcaaaagtctcgagttcttggtagtatgcgtcgtagaggccttccagctcctcttcgatggccgttcgcttgcgcccgcagacggaacaagagcaggtgtgcttctgttgctccttcatctttctgaggacggcgtccttctcgaccttgaccagcgactttctctcatcctcgcccaggccgagccagaattgcttgatccgttctctctcctccgggcccgaagtattccagatcttctctctcgatatgcccgaggggcgggcagtgtccggctcggagactgtgtctttcttcactttcttcttcttcttgcccttcttcgacttcggggcggagccgttggcgggcggatgcgaagaaccgtgggagaaaccatctctgtgctcatcgtcgctctccgtctcctctccccagtcttcgtcgttatatcggggattgtgggactgcaagggctcaacgcgaggcaggccctgggagccgttgcggtggctccagcttggcggggcggcggcgggcggcggtgcactggcggtagatgctggactgggaaggccattagcagcagccagctctttctcggcggcagcttttgcagcagccttggcagcgtccttggcccggcgcttctgcttcttcttgttgacgggggcggcgggggcagcttcggcgggagcagagggctgtgtgggagcgccgccgcgggatgaggaggtggtggacggcgatggctgggcgggaggtgtggaggtggagggcacgggcaccgagatatacttggttccgtccttgttggtgtacttggccgtagccgtggccttgggcgtggggggcgcggccgaaggggtcggcgcgtgccgattgctgttggagggcatggcgacaagtatatgctacacggattaggatgcgacgtgttgtcgggaggagagggccgtcagcatcggcgattatgattcaaggcacaggcacaggagaccaaatagacaagtagagaaaatcaaagtcagacggcgaggcaagtgtcgatctgtggatatgcggcggcgatatgggtgctttgtcttcggggcggacgaagagccctgatgttggttgtgggagggtttgttgtcggcaaaggcaggtacagtacctaggttggccgtaactaccttaatggctgagtgttgctaggttacgggttgcgggttgccaatggtcacgcgtatcctgccagccttattatctcggccgtcgctgttgccgctgttgttgtcgcctgcaacgtcgtcgttctcagagggaggggaggctaggggaggtgtagtgtggtgtggtgttgtgtcggacggggcacgcctctcggcgggattggactaggcggggagccccagtgcagacggcgccgtcaccgcaacggtaatgctattctgctaaggctgtctgggtaatgaagcgtgccggcgtggtcaagcgtagtccacgagtgcagggaagcggcgtgaaaggaatcacatggtagataaaccgactcgccggcg

SEQ ID NO: 2917 - DNA, 3549 bp, Muscodor strobelii
  misc_feature: SGI cDNA ID NO. 560617
  misc_feature: Encodes the peptide sequence at SEQ ID NO 2918
atgccctccaacagcaatcggcacgcgccgaccccttcggccgcgccccccacgcccaaggccacggctacggccaagtacaccaacaaggacggaaccaagtatatctcggtgcccgtgccctccacctccacacctcccgcccagccatcgccgtccaccacctcctcatcccgcggcggcgctcccacacagccctctgctcccgccgaagctgcccccgccgcccccgtcaacaagaagaagcagaagcgccgggccaaggacgctgccaaggctgctgcaaaagctgccgccgagaaagagctggctgctgctaatggccttcccagtccagcatctaccgccagtgcaccgccgcccgccgccgccccgccaagctggagccaccgcaacggctcccagggcctgcctcgcgttgagcccttgcagtcccacaatccccgatataacgacgaagactggggagaggagacggagagcgacgatgagcacagagatggtttctcccacggttcttcgcatccgcccgccaacggctccgccccgaagtcgaagaagggcaagaagaagaagaaagtgaagaaagacacagtctccgagccggacactgcccgcccctcgggcatatcgagagagaagatctggaatacttcgggcccggaggagagagaacggatcaagcaattctggctcggcctgggcgaggatgagagaaagtcgctggtcaaggtcgagaaggacgccgtcctcagaaagatgaaggagcaacagaagcacacctgctcttgttccgtctgcgggcgcaagcgaacggccatcgaagaggagctggaaggcctctacgacgcatactaccaagaactcgagacttttgccaatcgacctcacagccaccccagtgctccccccatgttcgctcaagatcgcctagaggcacccaaacgctttggctccatggccgggctccatccccccaatgcgatccctccacggcatcccaacaatcacgttccatcgcgcggccgcatagtggagcatgtagacaacgaggatgacgaccttgatggcggcgaggaagaatatagcgacgaggaagacctggaagacgaagaggaggaagacgagcccgaggaaatacctcgtgatgactattctacagacttcttcaattttggtgccagtctgactgtcaaaggcggtattctcacggttgcagacgatcttcttaaaaacgacggcaagaaattcatcgagatgatggagcagctggctgaacgacggatggcgcgggaagaggatgcccattatgccggtggatacggccacacggtgaacggcggtttaggcaacgcacacaatcacccgccccctgaagaggatgaatatgatgacgaggaggaggaagacgaggagtacgagagccaggaggaagattatgaggaagaagaggaccaaatggatgagagttcgcgaatggaggaaggccgccggatgttccagatttttgctgcgcgtatgttcgaacagagagtcttgacggcctacagagagaaagtcgccaaggaacgtcaggagaagctcctcgaggaattagaacaggaagaaacgcaagagagccaacgaaaggccaagaaggcaaaagacgcccagaaacgcaaagagaaggctctccagaagaaacaggccgttcttgaggagaaggcgaagcgcgatgccgaaaaggcggccgaagaagaagcccggttggcggaggaaaccagacgagtcgaggaagcccgggcgaaggcagaagagaagcgcagaaagaaggaggcgcagaagaaagccgaggaagacgaacgcttacgcagagaagcagaaaagcagcgtcgagctcatgagcagaaagaaaagcaggccgagcaggaacgaaaggctcgtgaggcgaaagacagagagaaaagactcaaagaggagcaacgacgcaaagaacaagaagctcgcgaagttaaggaacgcgagactcgcgagagaagagagaagcatgagaaggataaaagggaaaaggacctgagagcagcccaagctaaagcggaacgcgaggccaaagaaaagataaagtacgaggaaaagctggtggccaagccggtctcacatacggtacctatccccatacagccggcaaagaaaccacatccggtctccgtccccgctcttcctcagcaacccggagccgtcaatgcctcgccgcaagtagccgtggcgacaccggtcttgcccttagcccacacgcccgtcaaaccacgatctatctctcaagaagttacgcgatccgtgtctcaggcatcttactcgggctctgtgcccagccaggcagcatcaccgcatgcgggcagcccacctcatgtaagtcccggcttgatcggaccgcccagtaaaacaggacttgcgcctcttctaccccccatgtcacctcatcatgccgctatgaagagcccctctggtcttccgcctggccattttgacatgaatatgcctccgatgccaatgcctccgggcatgtcgcctatgggtcccggctttccgcgcatgcatgatcctatgttcccgcaaatgggcgggcaatttcgccctcctggtatgcccgtccctcccccgggcttgggtggtcatataggtggcagaggatttcacatgccgcctccaggcttcccacagccaacggtagaccctcacttagccggcctgcatcataacttcccatctcctgacgatactcccggccggaccttgtcccattcgcgccaaggatcggcctcatttgatacgaccggctcaggtgcccagcctattggcaagccaacccccatcggacgccctggaagcatcgtccagaaccaacgcaatgcaaactcatcaatggacaacgatgatatcaacaatcacttgggaagtagtgctcttcttgatgacagtgatgagccctttatcgacaattttgacacgcctcgccgcggcactgttgctcctggcatgcgaccattccccaacccatcactcacgaatccgtcattcggctccccgccaacgcattggggcgctccaggcatattccccccaccaccaggatttgctcctgcgacaggtaatactgggtggccgtcaagtatgtcattcggtggcccacccgccatgacaagaccgtctcagcctcgacccgttcttgtacgccagctcctcgtgactgcttgcaaggacctagagaactacgcagcagatgactctggatacatcgagttgtcctctatccaagcccacgtggatacgatcaaacctgtcgtgctggacccgatacccgagaaagagatcctggagatctgcgaaacggagggcaactcacagaacggtggtggtagcttcgatgtgcggcacactggcaatggcaaagtggctatacgctttgatgtgagtggtgactcggcgcctggttcttttctacgcaacgtcggtgccccgggcgagatcggaagtcccattgtcggcgcgagagttccctttcgtggttaa

SEQ ID NO: 2918 - protein, 1182 aa, Muscodor strobelii
  misc_feature: SGI Peptide ID NO. 560617
  misc_feature (200)..(1176): NCBI GI: 154315015 Blast Desc: BC1G_04849 [Botryotinia fuckeliana B05.10] gi|172052491|sp|A6RW62.1|NST1_BOTFB RecName: Full=Stress response protein nst1 gi|150848387|gb|EDN23580.1| BC1G_04849 [Botryotinia
  misc_feature (1)..(1182): NCBI GI: 256723108 Blast Desc: NECHADRAFT_81283 [Nectria haematococca mpVI 77-13-4]
  misc_feature (1)..(1175): NCBI GI: 46116454 Blast Desc: FG04069.1 [Gibberella zeae PH-1]
  misc_feature (24)..(1177): NCBI GI: 116196818 Blast Desc: CHGG_05007 [Chaetomium globosum CBS 148.51] gi|121937863|sp|Q2GZN9.1|NST1_CHAGB RecName: Full=Stress response protein NST1 gi|88180920|gb|EAQ88388.1| CHGG_05007 [Chaetomium
  misc_feature (200)..(1175): NCBI GI: 156052809 Blast Desc: SS1G_06572 [Sclerotinia sclerotiorum 1980] gi|171704395|sp|A7EMM3.1|NST1_SCLS1 RecName: Full=Stress response protein nst1 gi|154704350|gb|EDO04089.1| SS1G_06572 [Sclerotinia
  misc_feature (209)..(1176): NCBI GI: 171688302 Blast Desc: protein product [Podospora anserina] gi|170944113|emb|CAP70223.1| protein product [Podospora anserina]
  misc_feature (23)..(1176): NCBI GI: 85105746 Blast Desc: NCU08682 [Neurospora crassa OR74A] gi|74616733|sp|Q7S8V3.1|NST1_NEUCR RecName: Full=Stress response protein nst-1 gi|28923623|gb|EAA32795.1| [Neurospora crassa
  misc_feature (215)..(1182): NCBI GI: 145252448 Blast Desc: An16g04260 [Aspergillus niger] gi|171769783|sp|A2R7P5.1|NST1_ASPNC RecName: Full=Stress response protein nst1 gi|134083288|emb|CAK46843.1| protein product niger]
  misc_feature (13)..(994): NCBI GI: 145606216 Blast Desc: MGG_02456 [Magnaporthe grisea 70-15] gi|172044424|sp|A4R2R1.1|NST1_MAGGR RecName: Full=Stress response protein NST1 gi|145013935|gb|EDJ98576.1| MGG_02456 [Magnaporthe
  misc_feature (215)..(1182): NCBI GI: 115396216 Blast Desc: conserved [Aspergillus terreus NIH2624] gi|121738823|sp|Q0CP15.1|NST1_ASPTN RecName: Full=Stress response protein nst1 gi|114193316|gb|EAU35016.1| conserved [Aspergillus
MPSNSNRHAPTPSAAPPTPKATATAKYTNKDGTKYISVPVPSTSTPPAQPSPSTTSSSRGGAPTQPSAPAEAAPAAPVNKKKQKRRAKDAAKAAAKAAAEKELAAANGLPSPASTASAPPPAAAPPSWSHRNGSQGLPRVEPLQSHNPRYNDEDWGEETESDDEHRDGFSHGSSHPPANGSAPKSKKGKKKKKVKKDTVSEPDTARPSGISREKIWNTSGPEERERIKQFWLGLGEDERKSLVKVEKDAVLRKMKEQQKHTCSCSVCGRKRTAIEEELEGLYDAYYQELETFANRPHSHPSAPPMFAQDRLEAPKRFGSMAGLHPPNAIPPRHPNNHVPSRGRIVEHVDNEDDDLDGGEEEYSDEEDLEDEEEEDEPEEIPRDDYSTDFFNFGASLTVKGGILTVADDLLKNDGKKFIEMMEQLAERRMAREEDAHYAGGYGHTVNGGLGNAHNHPPPEEDEYDDEEEEDEEYESQEEDYEEEEDQMDESSRMEEGRRMFQIFAARMFEQRVLTAYREKVAKERQEKLLEELEQEETQESQRKAKKAKDAQKRKEKALQKKQAVLEEKAKRDAEKAAEEEARLAEETRRVEEARAKAEEKRRKKEAQKKAEEDERLRREAEKQRRAHEQKEKQAEQERKAREAKDREKRLKEEQRRKEQEAREVKERETRERREKHEKDKREKDLRAAQAKAEREAKEKIKYEEKLVAKPVSHTVPIPIQPAKKPHPVSVPALPQQPGAVNASPQVAVATPVLPLAHTPVKPRSISQEVTRSVSQASYSGSVPSQAASPHAGSPPHVSPGLIGPPSKTGLAPLLPPMSPHHAAMKSPSGLPPGHFDMNMPPMPMPPGMSPMGPGFPRMHDPMFPQMGGQFRPPGMPVPPPGLGGHIGGRGFHMPPPGFPQPTVDPHLAGLHHNFPSPDDTPGRTLSHSRQGSASFDTTGSGAQPIGKPTPIGRPGSIVQNQRNANSSMDNDDINNHLGSSALLDDSDEPFIDNFDTPRRGTVAPGMRPFPNPSLTNPSFGSPPTHWGAPGIFPPPPGFAPATGNTGWPSSMSFGGPPAMTRPSQPRPVLVRQLLVTACKDLENYAADDSGYIELSSIQAHVDTIKPVVLDPIPEKEILEICETEGNSQNGGGSFDVRHTGNGKVAIRFDVSGDSAPGSFLRNVGAPGEIGSPIVGARVPFRG

SEQ ID NO: 2919 - DNA, 5163 bp, Muscodor strobelii
  misc_feature: SGI EST ID NO. CUFF.7446.1
  misc_feature: Variant of the nucleotide sequence at SEQ ID NO 2917
cgccgcccacctccaacgtcacaaacagccctgaggacacacactgtctaccaccaccacgccggcgagtcggtttatctaccatgtgattcctttcacgccgcttccctgcactcgtggactacgcttgaccacgccggcacgcttcattacccagacagccttagcagaatagcattaccgttgcggtgacggcgccgtctgcactggggctccccgcctagtccaatcccgccgagaggcgtgccccgtccgacacaacaccacaccacactacacctcccctagcctcccctccctctgagaacgacgacgttgcaggcgacaacaacagcggcaacagcgacggccgagataataaggctggcaggatacgcgtgaccattggcaacccgcaacccgtaacctagcaacactcagccattaaggtagttacggccaacctaggtactgtacctgcctttgccgacaacaaaccctcccacaaccaacatcagggctcttcgtccgccccgaagacaaagcacccatatcgccgccgcatatccacagatcgacacttgcctcgccgtctgactttgattttctctacttgtctatttggtctcctgtgcctgtgccttgaatcataatcgccgatgctgacggccctctcctcccgacaacacgtcgcatcctaatccgtgtagcatatacttgtcgccatgccctccaacagcaatcggcacgcgccgaccccttcggccgcgccccccacgcccaaggccacggctacggccaagtacaccaacaaggacggaaccaagtatatctcggtgcccgtgccctccacctccacacctcccgcccagccatcgccgtccaccacctcctcatcccgcggcggcgctcccacacagccctctgctcccgccgaagctgcccccgccgcccccgtcaacaagaagaagcagaagcgccgggccaaggacgctgccaaggctgctgcaaaagctgccgccgagaaagagctggctgctgctaatggccttcccagtccagcatctaccgccagtgcaccgccgcccgccgccgccccgccaagctggagccaccgcaacggctcccagggcctgcctcgcgttgagcccttgcagtcccacaatccccgatataacgacgaagactggggagaggagacggagagcgacgatgagcacagagatggtttctcccacggttcttcgcatccgcccgccaacggctccgccccgaagtcgaagaagggcaagaagaagaagaaagtgaagaaagacacagtctccgagccggacactgcccgcccctcgggcatatcgagagagaagatctggaatacttcgggcccggaggagagagaacggatcaagcaattctggctcggcctgggcgaggatgagagaaagtcgctggtcaaggtcgagaaggacgccgtcctcagaaagatgaaggagcaacagaagcacacctgctcttgttccgtctgcgggcgcaagcgaacggccatcgaagaggagctggaaggcctctacgacgcatactaccaagaactcgagacttttgccaatcgacctcacagccaccccagtgctccccccatgttcgctcaagatcgcctagaggcacccaaacgctttggctccatggccgggctccatccccccaatgcgatccctccacggcatcccaacaatcacgttccatcgcgcggccgcatagtggagcatgtagacaacgaggatgacgaccttgatggcggcgaggaagaatatagcgacgaggaagacctggaagacgaagaggaggaagacgagcccgaggaaatacctcgtgatgactattctacagacttcttcaattttggtgccagtctgactgtcaaaggcggtattctcacggttgcagacgatcttcttaaaaacgacggcaagaaattcatcgagatgatggagcagctggctgaacgacggatggcgcgggaagaggatgcccattatgccggtggatacggccacacggtgaacggcggtttaggcaacgcacacaatcacccgccccctgaagaggatgaatatgatgacgaggaggaggaagacgaggagtacgagagccaggaggaagattatgaggaagaagaggaccaaatggatgagagttcgcgaatggaggaaggccgccggatgttccagatttttgctgcgcgtatgttcgaacagagagtcttgacggcctacagagagaaagtcgccaaggaacgtcaggagaagctcctcgaggaattagaacaggaagaaacgcaagagagccaacgaaaggccaagaaggcaaaagacgcccagaaacgcaaagagaaggctctccagaagaaacaggccgttcttgaggagaaggcgaagcgcgatgccgaaaaggcggccgaagaagaagcccggttggcggaggaaaccagacgagtcgaggaagcccgggcgaaggcagaagagaagcgcagaaagaaggaggcgcagaagaaagccgaggaagacgaacgcttacgcagagaagcagaaaagcagcgtcgagctcatgagcagaaagaaaagcaggccgagcaggaacgaaaggctcgtgaggcgaaagacagagagaaaagactcaaagaggagcaacgacgcaaagaacaagaagctcgcgaagttaaggaacgcgagactcgcgagagaagagagaagcatgagaaggataaaagggaaaaggacctgagagcagcccaagctaaagcggaacgcgaggccaaagaaaagataaagtacgaggaaaagctggtggccaagccggtctcacatacggtacctatccccatacagccggcaaagaaaccacatccggtctccgtccccgctcttcctcagcaacccggagccgtcaatgcctcgccgcaagtagccgtggcgacaccggtcttgcccttagcccacacgcccgtcaaaccacgatctatctctcaagaagttacgcgatccgtgtctcaggcatcttactcgggctctgtgcccagccaggcagcatcaccgcatgcgggcagcccacctcatgtaagtcccggcttgatcggaccgcccagtaaaacaggacttgcgcctcttctaccccccatgtcacctcatcatgccgctatgaagagcccctctggtcttccgcctggccattttgacatgaatatgcctccgatgccaatgcctccgggcatgtcgcctatgggtcccggctttccgcgcatgcatgatcctatgttcccgcaaatgggcgggcaatttcgccctcctggtatgcccgtccctcccccgggcttgggtggtcatataggtggcagaggatttcacatgccgcctccaggcttcccacagccaacggtagaccctcacttagccggcctgcatcataacttcccatctcctgacgatactcccggccggaccttgtcccattcgcgccaaggatcggcctcatttgatacgaccggctcaggtgcccagcctattggcaagccaacccccatcggacgccctggaagcatcgtccagaaccaacgcaatgcaaactcatcaatggacaacgatgatatcaacaatcacttgggaagtagtgctcttcttgatgacagtgatgagccctttatcgacaattttgacacgcctcgccgcggcactgttgctcctggcatgcgaccattccccaacccatcactcacgaatccgtcattcggctccccgccaacgcattggggcgctccaggcatattccccccaccaccaggatttgctcctgcgacaggtaatactgggtggccgtcaagtatgtcattcggtggcccacccgccatgacaagaccgtctcagcctcgacccgttcttgtacgccagctcctcgtgactgcttgcaaggacctagagaactacgcagcagatgactctggatacatcgagttgtcctctatccaagcccacgtggatacgatcaaacctgtcgtgctggacccgatacccgagaaagagatcctggagatctgcgaaacggagggcaactcacagaacggtggtggtagcttcgatgtgcggcacactggcaatggcaaagtggctatacgctttgatgtgagtggtgactcggcgcctggttcttttctacgcaacgtcggtgccccgggcgagatcggaagtcccattgtcggcgcgagagttccctttcgtggttaatggccaagtatatgttcgatgggatgccccttgagtagatcaattatgggctctaccggagatgcatttacaaccatggagtgtcctcggcgatgtccacgtgcagtccaagaagcttgctgaaatggctataagatctgtctttcctcctctggcattcgcgtcgttgtctgcaagatttgagctgccgatcgtccttgtacagtagatggcgagatttttctggtgtgtatgtgctacgatggacggtttcccgatgcaggaaggaggactactttctgctcgacgtcttcacggcaaggggcgtacggaatcattctatggtaccatagcaataagactttattgagcttgctaaattaaagaaatgaaaatactgatggtctatggtgcatatgtgcagctgctcattgaagtcagaacgtggtatgattggaggtcagggtattgtgtctagcgcgaaaacaatggcaccggaccacaatgcacataacaaagtatgaaattactgctcatcatagtaaatcatactttgtcaatgattggaacagttcatattattacgactaaatcaatgagagtcgatgtgcacctatactctttttaccatgctggagatgaagaggaggtgtatcgattgacatctggctgacctctctggacacgcatcctcctcttctatttcacctctaagcaacagagccaggagtacgctcgtaataccagatggcttttggcgcttttgcacagctcgttatataagtactactgaggttgacatcgatcggaacgggctgcacgcgctgtacttgcccatgaacgtggtaataataccaagtttcgtcgtagatagtgtatccagcatcggagctgttcctgccggcggcggtctcattgtacttcggccccc

SEQ ID NO: 2920 - DNA, 606 bp, Muscodor strobelii
  misc_feature: SGI cDNA ID NO. 560618
  misc_feature: Encodes the peptide sequence at SEQ ID NO 2921
atggcgagcccaaatccacagaatgtcatccggaggaaactagttatcataggcgatggggcctgtggcaagacgtctttgctgagtgttttcactctcgggtacttccccactcactacatcccgactgtattcgagaactacgtaaccgactgtagagtggacggtaaatctgttcagctcgcgctatgggatacggcagggcaggaagactacgagcggttgcggcctctagcatacgccaaagcccacattttactcattggattttccatcgacacgccggactcgcttgataatgtgaagcacaagtggataaatgaggccactgaacgatgtcccaatgttcccatcatcttggtcggtctgaagaaggatctccgagacgacccggtggccatcgaggaaatgagaaagaagagtctgaaattcgtcacggagcgacagggcgaggctgctgctcaggagattggagcacgcaaatacctggagtgctccagtctcagtggcgagggcgtagacgacgtttttgaggcggcaacccgtgccgccctgctgactttcgagaaaggcgagcgaggaggcgggtgctgcgtcatcttatga

SEQ ID NO: 2921 - protein, 201 aa, Muscodor strobelii
  misc_feature: SGI Peptide ID NO. 560618
  misc_feature (13)..(126): Pfam Id: PF08477 Pfam Desc: Miro-like protein
  misc_feature (13)..(186): Pfam Id: PF00071 Pfam Desc: Ras family
  misc_feature (1)..(201): NCBI GI: 145606212 Blast Desc: Rho2 GTPase [Magnaporthe grisea 70-15] gi|145013933|gb|EDJ98574.1| Rho2 GTPase [Magnaporthe grisea 70-15]
  misc_feature (1)..(201): NCBI GI: 261352836 Blast Desc: GTP-binding protein RHO1 [Verticillium albo-atrum VaMs.102]
  misc_feature (1)..(201): NCBI GI: 187234354 Blast Desc: small Rho-type GTPase [Neurospora crassa]
  misc_feature (1)..(201): NCBI GI: 148475344 Blast Desc: Rho2 [Cordyceps militaris]
  misc_feature (1)..(201): NCBI GI: 164426374 Blast Desc: NCU08683 [Neurospora crassa OR74A] gi|157071311|gb|EAA32796.2| conserved [Neurospora crassa OR74A]
  misc_feature (1)..(201): NCBI GI: 119187079 Blast Desc: CIMG_03587 [Coccidioides immitis RS] gi|240108329|gb|EER26503.1| Rho2 protein, [Coccidioides posadasii C735 delta SOWgp]
  misc_feature (3)..(201): NCBI GI: 46116452 Blast Desc: FG04068.1 [Gibberella zeae PH-1]
  misc_feature (1)..(201): NCBI GI: 242782377 Blast Desc: Rho GTPase Rho 2, [Talaromyces stipitatus ATCC 10500] gi|242782382|ref|XP_002479987.1| Rho GTPase Rho 2, [Talaromyces stipitatus ATCC 10500] gi|218720133|gb|EED19552.1| Rho GTPase Rho
  misc_feature (1)..(201): NCBI GI: 258563696 Blast Desc: protein rho2 [Uncinocarpus reesii 1704] gi|237908100|gb|EEP82501.1| protein rho2 [Uncinocarpus reesii 1704]
  misc_feature (3)..(201): NCBI GI: 256723186 Blast Desc: [Nectria haematococca mpVI 77-13-4]
MASPNPQNVIRRKLVIIGDGACGKTSLLSVFTLGYFPTHYIPTVFENYVTDCRVDGKSVQLALWDTAGQEDYERLRPLAYAKAHILLIGFSIDTPDSLDNVKHKWINEATERCPNVPIILVGLKKDLRDDPVAIEEMRKKSLKFVTERQGEAAAQEIGARKYLECSSLSGEGVDDVFEAATRAALLTFEKGERGGGCCVIL

SEQ ID NO: 2922 - DNA, 3348 bp, Muscodor strobelii
  misc_feature: SGI EST ID NO. CUFF.7588.0
  misc_feature: Variant of the nucleotide sequence at SEQ ID NO 2920
gcggatttgagtcccggcaacatacggagtacagtgcagctgtaggcagcttctcagaccctgtgaaatggatgcatccatccccaaaaagttacatggtaattgtactaagacgattgagaaagataaaagccgggtcgccagctctattaggtttctaatttctcggggccatacgtcgactctgggcagcaccagcagcaagtagcgtttagtctgcgcaccttatttgcatctcattgtctctctggcgccagcagctgtgtcacagcgccgcggaggcctcgtcacatcgcgacgcacaaacgtacaagcctgacctcaggctcctcaggctcctcagccactgactgtccccggtgccaacgcccgcgccaacgctttgcatctccaccccaaccgatcctgaggccgctggcttcgagctccctgcccagcgatccacgttttggtcgcctgcgtcggtcttgcgacgagctcgtgctcttctacttacattgttgctgcatcacgactccggttgtctctctcattctcggcagctatcgtgcttctcttccttgcatttcgcccgggcttcaccccgtccttgtcccgtcgcccttttactgccggctccccacctcgcctgttgcggctcgaccgagaccagttcgtgtgaagtgaaacctgcccgtttcttcacgatccatctgctcgtcaccggccacccgcaatggcgagcccaaatccacagaatgtcatccggaggaaactagttatcataggcgatggggcctgtggcaagacgtctttgctgagtgttttcactctcgggtacttccccactcactacgtaagctccctcggcccgccatcttgtgcgacatctcgatactacaacagcgatctataccgaattacgaccattctccgtcttccgtcatcaccagtggcatgaactgaccgtatcaaccctagatcccgactgtattcgagaactacgtaaccgactgtagagtggacggtaaatctgttcagctcgcgctatgggatacggcagggcaggaagactacgagcggttgcggcctctagcatacgccaaagcccacattttactcattggattttccatcgacacgccggactcgcttgataatgtgaagcacaagtggataaatgaggccactgaacgatgtcccaatgttcccatcatcttggtcggtctgaagaaggatctccgagacgacccggtggccatcgaggaaatgagaaagaagagtctgaaattcgtcacggagcgacagggcgaggctgctgctcaggagattggagcacgcaaatacctggagtgctccagtctcagtggcgagggcgtagacgacgtttttgaggcggcaacccgtgccgccctgctgactttcgagaaaggcgagcgaggaggcgggtgctgcgtcatcttatgaggaagctacgatacaccgcgctcgggactagtggtaagtcatctcgggcggatccacgatcggtagtaggtcaaaagttgttggaatgcacacaagcaacccagatcgaacatctcttggaaatctcacacgagctttcggcgagggaaagcagcctcgggtctacgaatctcccgagtctcaccaaacacatccaggcggcccaaaagttttacattaattgcgactacgattttgctcagcgttttgaatcaaacaaaccatagacagcggccccaaggatatcgggtttttatcaatcaactgggatagaggggcgaaggcaaagggcgaggtacatcaaaaggaggctcaggaggctggaacgacgcgcataattgaattgccgtcgagctacgcgatggcgtcttgcttgtacaccacttgcagtttgtaaccccgttgtggttcggccaactattggctggctcatttgacagaatgaatgatatatcaacatatacgccaaaaacaactgaatcatcgaagcctagatgttcttaacgcggtccgcatattcgatctagaaacttcacgtaggtgattagtttagcagctttgcctcaaaaatcacggatgtctgggttagcacgacggtagcaatcagcagcgactgacgattataatttcattgtcaaaaagtctattctcgtatagtacagattcacttaatgtcagtgctagcggccttcccaatggccacaccagacatgaaggagtgtggaacaagaccatgacgactccgctccggaaacacatcaacccggctactcgccgggttacaggtagtattacacacgactatggacaagaaacgagaggtagcgtacaggaatctaccgcgtccactcgtgattccaggcggtccgcgcaggcgtctcggtctgggcgcgggcgtactcaatggggatgccgttgtggccgtacacgccgtgcttctcgagggccactcggtacagatatccctcctcgcggagcccgggcccgctggtgttgcgcagctcttcgcaggcgttgtgcatggattggtacatgctgaatcgattgtcagtttccaaatatcccgtcaagggcgaggagaaagggacagatatgataggaacataccgctcgagctcagtcgcgcgccgcgtccgctccttgttctgatagagcagccaggcgcggtgaatggtccagtggcggagagcgcgattgcgggcgaatcgcaggggcgcggggacggcgcgcggcatggaggacttcaggttcacgatacgggggtccgggccctcgtcgttcctgctcttcctcctggtcgttttctggggctttccacccctggctgcaccgccggatttagcggtgcgagggctggtcatgtggatggagcgtaactggcatggggcggcgggtgctgaggcaatcgccttgggcgacagtcgtggtaacggggaggagagagattgcctcagacagagccgcccgaagaggctgttgagggatgtggcggccatgattctagttcaagtcaaggacccgggggtgtcgaggtttaacgagacagttggtgtcaggggcggcggaatcttctcgattgccgtcgacgggcgaggcacagttcgatatcgcaggtgtcgatggtggtgtcggcgtcgttggtgtcgcgggtgttgtagatgtgggcgatgcactagatgtcgcgggtgttggctgttgggccgtcgggcgggacgaggcttcctgagcctgacactgcaatgcgttgagccacctcgccgagttgtcgacgtacttctttgctagttcgcagagggcatcgaggtggtgttgcggtatcggatggtagttgtagtagaggtgttggccgtccggatggtaaca

SEQ ID NO: 2923 - DNA, 1773 bp, Muscodor strobelii
  misc_feature: SGI cDNA ID NO. 560619
  misc_feature: Reduced expression when VOC is produced
  misc_feature: Encodes the peptide sequence at SEQ ID NO 2924
atggatgcccagagtatcgcccaaataggccccggcggctctatggagaatgcgtggcaccaacacattcaggaaacgaaactttcacattgcttcgagcctcttagaggtaccgagcgcgagcgatatgaggcaatcatcaacgaggctcatcaacttgagtgtcgagcccgctccaacgaagaggctactgaacacaatttgcgccaagcattgcccgtgattatgcgtatggaaatatacttcgcgaacctgcccgaccatcgtcgtagccgtggtcgtccaaagaaagatgcgccaccaacacggaaagaagtcgaacaggacaaagtgattatcgttagcggaatcggaaggctcaagcaacaaacagagcgacgggaacattgtccgccaaggcattcaggacggcgttttgaatgcatcaggccgacatatgacacaaaattcggcatccttgaagctatgaattattcctacgtcgaggaggagtcgtggtacatgggccatcggccgggcgatccgatcatccgcgttcggtccaagagtcgtcgtcaagactccgaggacgatacaggcgcacgagcgaagcatagggtcgtgtttgaagggattgttccttttaacggagatgagttgaaacagcgattcaccagatatgccttccactcgttcaccggcatggctgctgcattcatcagcttcaagttgaagacttcgggctcgacgccctgtatgccctcggagttggagcgcttggggcatctggagcgtctggccatgaccgactttgaagatatacaagagaacgaaagactggattttatgagtagtcttgatgagctcaccccagacacattgcccgatctgctacaaagagtggttactgattcgagctgttacagtggcgggctaattatggccatgattctcggcgttatccagggactcgaggcagtgaggctagcgcaggctcatatggagctcactctggacgcggaagccttagagaaggtggaaaacgaggacactgaccatttctttatctattgccagtctaacaaacagaggcatgagggaaagcttcaagactgttaccatccggacggccaacacctctactacaactaccatccgataccgcaacaccacctcgatgccctctgcgaactagcaaagaaaatcatggccgccacatccctcaacagcctcttcgggcggctctgtctgaggcaatctctctcctccccgttaccacgactgtcgcccaaggcgattgcctcagcacccgccgccccatgccagttacgctccatccacatgaccagccctcgcaccgctaaatccggcggtgcagccaggggtggaaagccccagaaaacgaccaggaggaagagcaggaacgacgagggcccggacccccgtatcgtgaacctgaagtcctccatgccgcgcgccgtccccgcgcccctgcgattcgcccgcaatcgcgctctccgccactggaccattcaccgcgcctggctgctctatcagaacaaggagcggacgcggcgcgcgactgagctcgagcgcatgtaccaatccatgcacaacgcctgcgaagagctgcgcaacaccagcgggcccgggctccgcgaggagggatatctgtaccgagtggccctcgagaagcacggcgtgtacggccacaacggcatccccattgagtacgcccgcgcccagaccgagacgcctgcgcggaccgcctggaatcacgagtggacgcggtag

SEQ ID NO: 2924 - protein, 590 aa, Muscodor strobelii
  misc_feature: SGI Peptide ID NO. 560619
  misc_feature (400)..(590): NCBI GI: 171688306 Blast Desc: protein product [Podospora anserina] gi|170944115|emb|CAP70225.1| protein product [Podospora anserina]
  misc_feature (395)..(590): NCBI GI: 85105754 Blast Desc: NCU08684 [Neurospora crassa OR74A] gi|28923625|gb|EAA32797.1| [Neurospora crassa OR74A]
  misc_feature (451)..(590): NCBI GI: 116196824 Blast Desc: CHGG_05010 [Chaetomium globosum CBS 148.51] gi|88180923|gb|EAQ88391.1| CHGG_05010 [Chaetomium globosum CBS 148.51]
  misc_feature (473)..(590): NCBI GI: 39968731 Blast Desc: MGG_02458 [Magnaporthe grisea 70-15] gi|145013932|gb|EDJ98573.1| MGG_02458 [Magnaporthe grisea 70-15]
  misc_feature (436)..(589): NCBI GI: 154315019 Blast Desc: BC1G_04851 [Botryotinia fuckeliana B05.10] gi|150848389|gb|EDN23582.1| BC1G_04851 [Botryotinia fuckeliana B05.10]
  misc_feature (458)..(590): NCBI GI: 261352837 Blast Desc: conserved [Verticillium albo-atrum VaMs.102]
  misc_feature (487)..(590): NCBI GI: 240108330 Blast Desc: CPC735_006760 [Coccidioides posadasii C735 delta SOWgp]
  misc_feature (487)..(590): NCBI GI: 119187077 Blast Desc: CIMG_03586 [Coccidioides immitis RS]
  misc_feature (400)..(590): NCBI GI: 119491859 Blast Desc: NFIA_066940 [Neosartorya fischeri NRRL 181] gi|119411584|gb|EAW21527.1| conserved [Neosartorya fischeri NRRL 181]
  misc_feature (400)..(590): NCBI GI: 70999738 Blast Desc: conserved [Aspergillus fumigatus Af293] gi|66852223|gb|EAL92548.1| conserved [Aspergillus fumigatus Af293]
  misc_feature: Useful for introducing or modulating the production of volatile compounds
MDAQSIAQIGPGGSMENAWHQHIQETKLSHCFEPLRGTERERYEAIINEAHQLECRARSNEEATEHNLRQALPVIMRMEIYFANLPDHRRSRGRPKKDAPPTRKEVEQDKVIIVSGIGRLKQQTERREHCPPRHSGRRFECIRPTYDTKFGILEAMNYSYVEEESWYMGHRPGDPIIRVRSKSRRQDSEDDTGARAKHRVVFEGIVPFNGDELKQRFTRYAFHSFTGMAAAFISFKLKTSGSTPCMPSELERLGHLERLAMTDFEDIQENERLDFMSSLDELTPDTLPDLLQRVVTDSSCYSGGLIMAMILGVIQGLEAVRLAQAHMELTLDAEALEKVENEDTDHFFIYCQSNKQRHEGKLQDCYHPDGQHLYYNYHPIPQHHLDALCELAKKIMAATSLNSLFGRLCLRQSLSSPLPRLSPKAIASAPAAPCQLRSIHMTSPRTAKSGGAARGGKPQKTTRRKSRNDEGPDPRIVNLKSSMPRAVPAPLRFARNRALRHWTIHRAWLLYQNKERTRRATELERMYQSMHNACEELRNTSGPGLREEGYLYRVALEKHGVYGHNGIPIEYARAQTETPARTAWNHEWTR

SEQ ID NO: 2925 - DNA, 3534 bp, Muscodor strobelii
  misc_feature: SGI EST ID NO. CUFF.7589.1
  misc_feature: Variant of the nucleotide sequence at SEQ ID NO 2923
tgttaccatccggacggccaacacctctactacaactaccatccgataccgcaacaccacctcgatgccctctgcgaactagcaaagaagtacgtcgacaactcggcgaggtggctcaacgcattgcagtgtcaggctcaggaagcctcgtcccgcccgacggcccaacagccaacacccgcgacatctagtgcatcgcccacatctacaacacccgcgacaccaacgacgccgacaccaccatcgacacctgcgatatcgaactgtgcctcgcccgtcgacggcaatcgagaagattccgccgcccctgacaccaactgtctcgttaaacctcgacacccccgggtccttgacttgaactagaatcatggccgccacatccctcaacagcctcttcgggcggctctgtctgaggcaatctctctcctccccgttaccacgactgtcgcccaaggcgattgcctcagcacccgccgccccatgccagttacgctccatccacatgaccagccctcgcaccgctaaatccggcggtgcagccaggggtggaaagccccagaaaacgaccaggaggaagagcaggaacgacgagggcccggacccccgtatcgtgaacctgaagtcctccatgccgcgcgccgtccccgcgcccctgcgattcgcccgcaatcgcgctctccgccactggaccattcaccgcgcctggctgctctatcagaacaaggagcggacgcggcgcgcgactgagctcgagcgcatgtaccaatccatgcacaacgcctgcgaagagctgcgcaacaccagcgggcccgggctccgcgaggagggatatctgtaccgagtggccctcgagaagcacggcgtgtacggccacaacggcatccccattgagtacgcccgcgcccagaccgagacgcctgcgcggaccgcctggaatcacgagtggacgcggtagattcctgtacgctacctctcgtttcttgtccatagtcgtgtgtaatactacctgtaacccggcgagtagccgggttgatgtgtttccggagcggagtcgtcatggtcttgttccacactccttcatgtctggtgtggccattgggaaggccgctagcactgacattaagtgaatctgtactatacgagaatagactttttgacaatgaaattataatcgtcagtcgctgctgattgctaccgtcgtgctaacccagacatccgtgatttttgaggcaaagctgctaaactaatcacctacgtgaagtttctagatcgaatatgcggaccgcgttaagaacatctaggcttcgatgattcagttgtttttggcgtatatgttgatatatcattcattctgtcaaatgagccagccaatagttggccgaaccacaacggggttacaaactgcaagtggtgtacaagcaagacgccatcgcgtagctcgacggcaattcaattatgcgcgtcgttccagcctcctgagcctccttttgatgtacctcgccctttgccttcgcccctctatcccagttgattgataaaaacccgatatccttggggccgctgtctatggtttgtttgattcaaaacgctgagcaaaatcgtagtcgcaattaatgtaaaacttttgggccgcctggatgtgtttggtgagactcgggagattcgtagacccgaggctgctttccctcgccgaaagctcgtgtgagatttccaagagatgttcgatctgggttgcttgtgtgcattccaacaacttttgacctactaccgatcgtggatccgcccgagatgacttaccactagtcccgagcgcggtgtatcgtagcttcctcataagatgacgcagcacccgcctcctcgctcgcctttctcgaaagtcagcagggcggcacgggttgccgcctcaaaaacgtcgtctacgccctcgccactgagactggagcactccaggtatttgcgtgctccaatctcctgagcagcagcctcgccctgtcgctccgtgacgaatttcagactcttctttctcatttcctcgatggccaccgggtcgtctcggagatccttcttcagaccgaccaagatgatgggaacattgggacatcgttcagtggcctcatttatccactgccgctcagattagctacttgcccctgctggtccgccatgatcatgtctgctgcaagggggtgtgcgctcaccttgtgcttcacattatcaagcgagtccggcgtgtcgatggaaaatccaatgagtaaaatgtgggctttggcgtatgctagaggccgcaaccgctcgtagtcttcctgccctgccgtatcccatagcgcgagctgaacagatttaccgtccactctacagtcggttacgtagttctcgaatacagtcgggatctagggttgatacggtcagttcatgccactggtgatgacggaagacggagaatggtcgtaattcggtatagatcgctgttgtagtatcgagatgtcgcacaagatggcgggccgagggagcttacgtagtgctgcgagcggtcagcatgtgagccggtgcaatcagagacataaagtgccaatggcaaggcagagggcgagacagagaactactcacagtggggaagtacccgagagtgaaaacactcagcaaagacgtcttgccacaggccccatcgcctatgataactagtttcctatcgacatgcgattagtacactcccaaatgcatcacacggcatcaacatggcgggtaggagagagcccaagacgtagggcagagggggagaggtacctccggatgacattctgtggatttgggctcgccattgcgggtggccggtgacgagcagatggatcgtgaagaaacgggcaggtttcacttcacacgaactggtctcggtcgagccgcaacaggcgaggtggggagccggcagtaaaagggcgacgggacaaggacggggtgaagcccgggcgaaatgcaaggaagagaagcacgatagctgccgagaatgagagagacaaccggagtcgtgatgcagcaacaatgtaagtagaagagcacgagctcgtcgcaagaccgacgcaggcgaccaaaacgtggatcgctgggcagggagctcgaagccagcggcctcaggatcggttggggtggagatgcaaagcgttggcgcgggcgttggcaccggggacagtcagtggctgaggagcctgaggagcctgaggtcaggcttgtacgtttgtgcgtcgcgatgtgacgaggcctccgcggcgctgtgacacagctgctggcgccagagagacaatgagatgcaaataaggtgcgcagactaaacgctacttgctgctggtgctgcccagagtcgacgtatggccccgagaaattagaaacctaatagagctggcgacccggcttttatctttctcaatcgtcttagtacaattaccatgtaactttttggggatggatgcatccatttcacagggtctgagaagctgcctacagctgcactgtactccgtatgttgccgggactcaaatccgc

SEQ ID NO: 2926 - DNA, 945 bp, Muscodor strobelii
  misc_feature: SGI cDNA ID NO. 560620
  misc_feature: Encodes the peptide sequence at SEQ ID NO 2927
atggaagacgtacataccgtccgcgcacgaggtgaggaggaagagcaggtgaagacatccgccctgttataccaacaacttcgcgatagaaggagagccaacacacgatcggatgaccgccttgttatgaaagcaatcgagattctagataatctagaccgaacatttgctcacattgagaaggctatcaatgtcgacattccggagcttacaaatgtggtatcaaacaaccccccagatgacaaactcgttagcttactcaaacacgaagaaacgcataatgaccccagctctctacatgaaactggaaattttcatgctccttccgctgcgggagtagatcgttatcatcgtgtgctacatgattacatccacgaagcattgcctttaattgctccggcattgtcgacgttactcggaccgatccttgctgcgcgtctaatgaaacaggcgggctcgttcgaaaatctggtcaagctcccagcttctactgtacaaattctgggcgcagagaaagcctttcgacatgctcgtagaaagcatagtaacacaccaaaatatggcatgttatttaagagtacttgggtacagaaggtttctccaaagcacaggggaaagatggccaagaagctagctggcaagtgtgtagttgccgcacgaaacgacttctttgatccagaagcatccacggaattaagtcaacaacttgtgcagcagttagaacagcaactgaggctatgggagcagtccgcttccgataccatgggcatcgcgcccattctacccggagttacgtccaaccttgaaagcgcagacgccgagtccgatgctttgactcctgcaagtgaaaccgacggcgtgttgatcgatttgcctgcgcaggtaggatcccctgacggtgactctagctccaagtcagcaagtgagggatgtgtcacgatataa

SEQ ID NO: 2927 - protein, 314 aa, Muscodor strobelii
  misc_feature: SGI Peptide ID NO. 560620
  misc_feature (101)..(250): Pfam Id: PF01798 Pfam Desc: snoRNA binding domain
  misc_feature (114)..(250): Pfam Id: PF01798 Pfam Desc: snoRNA binding domain
  misc_feature (28)..(277): NCBI GI: 145252216 Blast Desc: An16g03090 [Aspergillus niger] gi|134083166|emb|CAK48618.1| protein product [Aspergillus niger]
  misc_feature (28)..(254): NCBI GI: 169767516 Blast Desc: [Aspergillus oryzae RIB40] gi|238484407|ref|XP_002373442.1| pre-rRNA processing nucleolar protein Sik1, [Aspergillus flavus NRRL3357] protein product Sik1,
  misc_feature (28)..(252): NCBI GI: 262111259 Blast Desc: nucleolar protein Nop56 [Phytophthora infestans T30-4]
  misc_feature (28)..(276): NCBI GI: 121705386 Blast Desc: pre-rRNA processing nucleolar protein Sik1, [Aspergillus clavatus NRRL 1] gi|119399102|gb|EAW09530.1| pre-rRNA processing nucleolar protein Sik1, [Aspergillus clavatus
  misc_feature (28)..(276): NCBI GI: 119492009 Blast Desc: pre-rRNA processing nucleolar protein Sik1, [Neosartorya fischeri NRRL 181] gi|119411659|gb|EAW21602.1| pre-rRNA processing nucleolar protein Sik1, [Neosartorya fischeri
  misc_feature (28)..(286): NCBI GI: 115384708 Blast Desc: protein SIK1 [Aspergillus terreus NIH2624] gi|114196593|gb|EAU38293.1| protein SIK1 [Aspergillus terreus NIH2624]
  misc_feature (28)..(251): NCBI GI: 70999884 Blast Desc: pre-rRNA processing nucleolar protein Sik1 [Aspergillus fumigatus Af293] gi|66852296|gb|EAL92621.1| pre-rRNA processing nucleolar protein Sik1, [Aspergillus fumigatus Af293]
  misc_feature (28)..(276): NCBI GI: 259485983 Blast Desc: TPA: pre-rRNA processing nucleolar protein Sik1, (AFU_orthologue; AFUA_3G09600) [Aspergillus nidulans FGSC A4]
  misc_feature (28)..(299): NCBI GI: 71024301 Blast Desc: UM06233.1 [Ustilago maydis 521] gi|46101880|gb|EAK87113.1| UM06233.1 [Ustilago maydis 521]
  misc_feature (28)..(276): NCBI GI: 225678762 Blast Desc: nucleolar protein 5A [Paracoccidioides brasiliensis Pb03]
MEDVHTVRARGEEEEQVKTSALLYQQLRDRRRANTRSDDRLVMKAIEILDNLDRTFAHIEKAINVDIPELTNVVSNNPPDDKLVSLLKHEETHNDPSSLHETGNFHAPSAAGVDRYHRVLHDYIHEALPLIAPALSTLLGPILAARLMKQAGSFENLVKLPASTVQILGAEKAFRHARRKHSNTPKYGMLFKSTWVQKVSPKHRGKMAKKLAGKCVVAARNDFFDPEASTELSQQLVQQLEQQLRLWEQSASDTMGIAPILPGVTSNLESADAESDALTPASETDGVLIDLPAQVGSPDGDSSSKSASEGCVTI

SEQ ID NO: 2928 - DNA, 639 bp, Muscodor strobelii
  misc_feature: SGI cDNA ID NO. 560621
  misc_feature: Encodes the peptide sequence at SEQ ID NO 2929
atgagctttcagtactacccttacaacttgccacagctgcaggtcgggcagtcagccttcgtcatccccaccgaccaacctacgcaaaatgtgatcacctcagcgagccagggagaacaaatgcacacgatatttccacaggagctattctatgagctctggatggctcagggcaacgctccggctgaggcaacagcaagcacgcccgccgcccctgccgccgctcctgatgctgatgctgcgacacccaatcaagcaccgaattctgagtcagcagtcgagcaacgaggcgaacaacctcgcccagtccagtggcatgtccacttccgctggcgtcagatcagtgcaactggggaagagacggttcataacgcccctgcagagaccttgcttggcagctacaacagcattcgcgaggcaaacaatcggcttctgagggaagtctattcgcgctttcatgctccagcatactatggctcgacccaggcaaacaccaattggatccggaagtctagctcagacgacggacgctcgcctaacacctggaagctcaaagatgatggatgtctctccataatggttgtagattccagtcttactcacaccgtgagtggggagttcttcatcgacaaggaatag

SEQ ID NO: 2929 - protein, 212 aa, Muscodor strobelii
  misc_feature: SGI Peptide ID NO. 560621
MSFQYYPYNLPQLQVGQSAFVIPTDQPTQNVITSASQGEQMHTIFPQELFYELWMAQGNAPAEATASTPAAPAAAPDADAATPNQAPNSESAVEQRGEQPRPVQWHVHFRWRQISATGEETVHNAPAETLLGSYNSIREANNRLLREVYSRFHAPAYYGSTQANTNWIRKSSSDDGRSPNTWKLKDDGCLSIMVVDSSLTHTVSGEFFIDKE

SEQ ID NO: 2930 - DNA, 1119 bp, Muscodor strobelii
  misc_feature: SGI cDNA ID NO. 560622
  misc_feature: Encodes the peptide sequence at SEQ ID NO 2931
atggcgttcgacacacagcctcacgtcctcggtcgtcaacaaagggccccctggacgatgcaggccaaccaccagatctcacaattaaatatcccgtccccatttcgcaatacggaacgccagcccgagcccgatacaccaatcaggacgctcttagcaactggtcattttcgcgccgccgcgatcgccgcagcacaggagttgactggttcatcgcctggaaattccgtaaatcctactgattatatccgcatcttcaacctattctatattcggctgtcctgtctctgtctcattgatgccgtgccactggcggcacaagaagcaaaagcgctggaggacctcaactcggcaatctacacagatccggagacaggtatgcatcttgccccgtgggaactgagggtactcgctgtacgactccaaactattgggttcggagacccacgacgagctgttatgatctactacgaactagctcgtgaggcacgcaacgaagtaatgcgtgctggcaaagctcatgatcactctgcggctgaaaaatggaagattaggctgggaattagggttgctgatgtcctcatcgagatggacgatcttgaaggtgcagcggcacatctgcaatcactggccgacgatagtgcgaagcaagactcgcacttaaacatgtgcagggcactactttggctgcatctcggggatatagaggctgcgaaacgcggcttgagatcccatagtgaagaatcgggcgagaacgagctgaatgaacgcgttattcatgctcttgctgatatggcggatggggactatgaagctgctcttgcgaaatggagatatctacagggagagattgacatggacgagatggtctcagttaatctcgctgtgtgtctcctatacacgggcaagatgttccagggccgagaaatcttggaaggtctagtcgacaagggacatgcttcacacactttactcttcaacctgacaacaatgtatgaactctgtacagatcgatcgaagaacctcaaactagggctggcagacagggttgcagggaggcagcccggcagcactgatggtgatggatgggagaagacaaatgcagatttcaaactgtag

SEQ ID NO: 2931 - protein, 372 aa, Muscodor strobelii
  misc_feature: SGI Peptide ID NO. 560622
  misc_feature (24)..(372): NCBI GI: 46116408 Blast Desc: FG04046.1 [Gibberella zeae PH-1]
  misc_feature (24)..(372): NCBI GI: 85083176 Blast Desc: NCU04498 [Neurospora crassa OR74A] gi|28918151|gb|EAA27831.1| conserved [Neurospora crassa OR74A]
  misc_feature (24)..(372): NCBI GI: 145611782 Blast Desc: MGG_00123 [Magnaporthe grisea 70-15] gi|145019031|gb|EDK03310.1| MGG_00123 [Magnaporthe grisea 70-15]
  misc_feature (24)..(372): NCBI GI: 171691354 Blast Desc: protein product [Podospora anserina] gi|170945625|emb|CAP71738.1| protein product [Podospora anserina]
  misc_feature (45)..(372): NCBI GI: 116195366 Blast Desc: CHGG_04281 [Chaetomium globosum CBS 148.51] gi|88180194|gb|EAQ87662.1| CHGG_04281 [Chaetomium globosum CBS 148.51]
  misc_feature (21)..(372): NCBI GI: 189205280 Blast Desc: conserved [Pyrenophora tritici-repentis Pt-1C-BFP] gi|187986074|gb|EDU51562.1| conserved [Pyrenophora tritici-repentis Pt-1C-BFP]
  misc_feature (42)..(372): NCBI GI: 169610119 Blast Desc: SNOG_08153 [Phaeosphaeria nodorum SN15] gi|111063309|gb|EAT84429.1| SNOG_08153 [Phaeosphaeria nodorum SN15]
  misc_feature (36)..(372): NCBI GI: 156052765 Blast Desc: SS1G_06549 [Sclerotinia sclerotiorum 1980] gi|154704328|gb|EDO04067.1| SS1G_06549 [Sclerotinia sclerotiorum 1980]
  misc_feature (75)..(372): NCBI GI: 154314973 Blast Desc: BC1G_04828 [Botryotinia fuckeliana B05.10] gi|150848366|gb|EDN23559.1| BC1G_04828 [Botryotinia fuckeliana B05.10]
  misc_feature (24)..(372): NCBI GI: 225681604 Blast Desc: conserved [Paracoccidioides brasiliensis Pb03]
MAFDTQPHVLGRQQRAPWTMQANHQISQLNIPSPFRNTERQPEPDTPIRTLLATGHFRAAAIAAAQELTGSSPGNSVNPTDYIRIFNLFYIRLSCLCLIDAVPLAAQEAKALEDLNSAIYTDPETGMHLAPWELRVLAVRLQTIGFGDPRRAVMIYYELAREARNEVMRAGKAHDHSAAEKWKIRLGIRVADVLIEMDDLEGAAAHLQSLADDSAKQDSHLNMCRALLWLHLGDIEAAKRGLRSHSEESGENELNERVIHALADMADGDYEAALAKWRYLQGEIDMDEMVSVNLAVCLLYTGKMFQGREILEGLVDKGHASHTLLFNLTTMYELCTDRSKNLKLGLADRVAGRQPGSTDGDGWEKTNADFKL

SEQ ID NO: 2932 - DNA, 341 bp, Muscodor strobelii
  misc_feature: SGI EST ID NO. CUFF.7251.0
  misc_feature: Variant of the nucleotide sequence at SEQ ID NO 2930
aatcgccctatacagtcggatcgtgagacttgtaaacttttaaggcactagtcacgatattcataacttggtatgaatcaagctagcacagagctccctgtaaagggccattcaaggaataaatcgggggcaagaccctcacgtcctcggtcgtcaacaaagggccccctggacgatgcaggccacacttctacctcatctcccttgtcgccgcagatagataggtctggaggctccgtaagacaacatgcaagcccacgagcgagtctctctcaagccaggtctcctgtcagggcatctacgcccgtaatagcaacatctgtgacggcgagggatttttc

SEQ ID NO: 2933 - DNA, 951 bp, Muscodor strobelii
  misc_feature: SGI cDNA ID NO. 560623
  misc_feature: Encodes the peptide sequence at SEQ ID NO 2934
atggtcatggaagcaaaggcgcctacgcctaccttgctgttggatcaacagcgcccatcgcagcccggtgcgcacagagacgagcaaggccgtctcacaagtgctccctctgtctctcctttccggcgtgctgttcccaattcgagaaactatcagaatgggacggcccaacttccggctcctaacgtccccaacatacctgccttcaggccatcccaatcttacactcaaatcaacggtgggcttcaccatcaacagcccagcgcaccacggcccggctccgaccatatcactggcacccctgctcttgcacgctgtgaaatttatgcttcaaggccctaccagattcaagctcctctttccactcattatgctccagtttcggctcgatttccggcttatagcgatagccaatatcatgaagcgcagtccgatttgtctctttctagcaccaccaatggctccatcacttctagccgaccttgtgaattcatatctgtccaggagcaggtcggcgcacgcaatgaccaagttgcaagaaatgcccaggaccgaccacagatcccccaaagagtccagaatgcacctagcaagaagcctatcccacgcctcgtcgagcttgatgatatctatccgctgcggctcgtcagagaagtggataaagcaatgaggacaaggctcgtgattaaagggggcagtgttgttttcaatgtggtccatatcaacagcttgatggtgcctagcccactcgttgagattattggagctttcactaatccacatgccgccaatgtccgagctatggacttctgggagaagaagtatggcactaagatgttcacggagagaccggtgggcctaacgtcagaagcttcccaaatcagacccagaagccgtcacgatcacgacagcaagcagaaggctcgcaaccaccgctccgccgttggctag

SEQ ID NO: 2934 - protein, 316 aa, Muscodor strobelii
  misc_feature: SGI Peptide ID NO. 560623
MVMEAKAPTPTLLLDQQRPSQPGAHRDEQGRLTSAPSVSPFRRAVPNSRNYQNGTAQLPAPNVPNIPAFRPSQSYTQINGGLHHQQPSAPRPGSDHITGTPALARCEIYASRPYQIQAPLSTHYAPVSARFPAYSDSQYHEAQSDLSLSSTTNGSITSSRPCEFISVQEQVGARNDQVARNAQDRPQIPQRVQNAPSKKPIPRLVELDDIYPLRLVREVDKAMRTRLVIKGGSVVFNVVHINSLMVPSPLVEIIGAFTNPHAANVRAMDFWEKKYGTKMFTERPVGLTSEASQIRPRSRHDHDSKQKARNHRSAVG

SEQ ID NO: 2935 - DNA, 2736 bp, Muscodor strobelii
  misc_feature: SGI cDNA ID NO. 560624
  misc_feature: Reduced expression when VOC is produced
  misc_feature: Encodes the peptide sequence at SEQ ID NO 2936
atgcctgcgacgttgaaacaaccgcttctctatctcaaccggctcattggccactcgtctgcgaaaaaccatatgagcaaggctaaactcgggaattccgacagtctagactcagacattgagaacaagcagctcaaatctgtctatgacaagcgcgccaagagacagtcggctcagaacgagaggaagtcccttcaggccaagcgtcgcgaggatgaaaaacaagctcgcgcctccgatgcgcccgagatcagcggcagttacggcactgtcgacgaacaatgtgtgccgatatctcacagtctggctgaactgtcggccgcctctgctggcacaaagattggtttcaccgctcgaatacaccacattcgcaacatcagcgccaaattagccttcatcttattacgacaacagaccaccacgatacaggctgtgcttcaagtccgagaggatgtagtgtctgagaatttcgtgcggtgggccgagcatctgtacccggaatgtattgtccacgtcagaggagaactgcgtgcacctccggagacgatcaaaggatgcagcattcacgatctcgaagtcctcatagataagatgcatgtcctgacgcccgtcgagagtcctcttcatgtggacgttttccggatggaccaggtcgaagagaacgaagagacgcacgagaaacagttagcagtctcgaaccgcgtccgcacagctaaccgagtcctcttccttcgaacacctgtcatgcagagcgtcttccgcatacgctctggtatttgcaatattttccgctccactctcgatgaccagggatttatcgaaatccaaacacccaaattgcagcctgccgcgactgaatccggggcatcagtgtttcaagttaaatatttcggccgaacagcttttctagcccagagtccacagctggccaaacagatgtccatttctgctgattttggtcgtgtatacgaaattgggcccgtgttcagagccgaggacagcaacacgcaccgccatctgaccgagtacacgggtttggatcttgaaatggcgattcaaaacgactaccatgagactatggatatcatcgacactatgcttaaggcaattttcaaaggtatatacgctaagtatagaaaggagattgagattgttaaggaacgctttccgcacgaggatttggtctggttggagaacacaccacgccttccattcaaagaaggcgtcaaactattgaatgagtccggatgggtgggcgaggatggtaagcctgcttcagagaacgaagatctggcgacccgcgcagaaatccgtcttggtgaacttatgaaggagaagtacaaaaccgattactttattctcgataaatttccagcatcggcccggccattctatactcatcttgataaggacgatgataacgtcacaaactccttcgatatcttcttgcgaggccaagaaataaccaccggtggtcagagaatcaacaacgcgcagctattggcggagcgcatgacaaaagctggtgtggaccccgatacaatggaggagtacatgcaggcttttgaatggggagcaccgcctcacgctgggtgcggcattggcttagagagagtcctctttctccttctgaatctaggtgacgtgaggaacgcatcattgttcccccgcgacccaaagtctctgccagagagaaaggaaatcccagatgataaggtcccattccccaatgctgataccataaagtatgctttcgaaggagatcacacccacgtacatttgccggatttggaagagctcatctccaactacggcgatgccaccaatacctcatggctcgatgatcgttataaggtttggcgagacacagcgactggcgctgctgtgggctatgccgaagagaacggctatgcattgatcatgggcaatcctctttgtgatccacgtcaatacccaggcgttatcagttcattccttcgatatcttcggaaatctgaagatttgcgtccattgtggctcctcgtttctgttgaggtcgaagaaatccttggctctaaacttggctggagaactctgacttcagttgccgaggagcgcgtgaacactgagaatgcctcccaacttgtcaagaaagagcgccaggccaaaaacgcggagataaagatccattcaacagtgcttggcgagccagtgccagacgatgttcgcgccaagatcgacaagcgcattgaagattggaaagacaatcgcaagggtcgcaagcaggtgcatctaacggaagtgctcccttggatcgctatggcacatcgtcggtatctctgggcagaagacaagaatggcgaaattacgggtctggtcattttgcaccgcttgtcacctaaacacggctaccagatcaaatttgctcttgacttccccaacgcaccgtctggcagcatcgaagcactgattgctcagtccctccgtacactgcagtcgtcgggtattcgcaacgtcacattcggtgtaggagcgacggacgagcttgtaatcggtcacaacctcaacggtgtgaaggctaaaattttgagccacacgtacaagacggtggctcagcagttaaagcttgttgccaaaagcgagtttcgagagaagttcggcgccaaaaatgaccctgtatacatttgttacccattcatgggacttggggtttcgggtgcacgtacactgatcaagtttttcgaggatgagatgtag

SEQ ID NO: 2936 - protein, 911 aa, Muscodor strobelii
  misc_feature: SGI Peptide ID NO. 560624
  misc_feature (114)..(201): Pfam Id: PF01336 Pfam Desc: OB-fold nucleic acid binding domain
  misc_feature (232)..(560): Pfam Id: PF00152 Pfam Desc: tRNA synthetases class II (D, K and N)
  misc_feature (2)..(911): NCBI GI: 85096905 Blast Desc: NCU07082 [Neurospora crassa OR74A] gi|28921835|gb|EAA31111.1| NCU07082 [Neurospora crassa OR74A]
  misc_feature (2)..(911): NCBI GI: 171682808 Blast Desc: protein product [Podospora anserina] gi|170941363|emb|CAP67013.1| protein product [Podospora anserina]
  misc_feature (2)..(911): NCBI GI: 116203221 Blast Desc: CHGG_09495 [Chaetomium globosum CBS 148.51] gi|88178013|gb|EAQ85481.1| CHGG_09495 [Chaetomium globosum CBS 148.51]
  misc_feature (51)..(909): NCBI GI: 238843289 Blast Desc: aspartyl-tRNA synthetase [Microsporum canis CBS 113480]
  misc_feature (52)..(909): NCBI GI: 67516065 Blast Desc: AN0314.2 [Aspergillus nidulans FGSC A4] gi|40746564|gb|EAA65720.1| AN0314.2 [Aspergillus nidulans FGSC A4] gi|259489456|tpe|CBF89742.1| TPA: aspartatyl tRNA synthetase,
  misc_feature (41)..(909): NCBI GI: 145229355 Blast Desc: An01g05630 [Aspergillus niger] gi|134055090|emb|CAK43730.1| protein product [Aspergillus niger]
  misc_feature (104)..(909): NCBI GI: 255950584 Blast Desc: Pc22g21630 [Penicillium chrysogenum Wisconsin 54-1255] gi|211593076|emb|CAP99451.1| Pc22g21630 [Penicillium chrysogenum Wisconsin 54-1255]
  misc_feature (39)..(909): NCBI GI: 258566145 Blast Desc: UREG_06784 [Uncinocarpus reesii 1704] gi|237907518|gb|EEP81919.1| UREG_06784 [Uncinocarpus reesii 1704]
  misc_feature (104)..(909): NCBI GI: 169766764 Blast Desc: [Aspergillus oryzae RIB40] gi|238483535|ref|XP_002373006.1| aspartyl-tRNA synthetase, cytoplasmic [Aspergillus flavus NRRL3357] protein product oryzae]
  misc_feature (42)..(909): NCBI GI: 70990316 Blast Desc: aspartyl-tRNA synthetase, cytoplasmic [Aspergillus fumigatus Af293] gi|66847639|gb|EAL87969.1| aspartyl-tRNA synthetase, cytoplasmic [Aspergillus fumigatus Af293] synthetase,
  misc_feature (111)..(562): SWISSPROT Homolog: EC 6.1.1.12 Aspartate--tRNA ligase
  misc_feature: Useful for introducing or modulating the production of volatile compounds
MPATLKQPLLYLNRLIGHSSAKNHMSKAKLGNSDSLDSDIENKQLKSVYDKRAKRQSAQNERKSLQAKRREDEKQARASDAPEISGSYGTVDEQCVPISHSLAELSAASAGTKIGFTARIHHIRNISAKLAFILLRQQTTTIQAVLQVREDVVSENFVRWAEHLYPECIVHVRGELRAPPETIKGCSIHDLEVLIDKMHVLTPVESPLHVDVFRMDQVEENEETHEKQLAVSNRVRTANRVLFLRTPVMQSVFRIRSGICNIFRSTLDDQGFIEIQTPKLQPAATESGASVFQVKYFGRTAFLAQSPQLAKQMSISADFGRVYEIGPVFRAEDSNTHRHLTEYTGLDLEMAIQNDYHETMDIIDTMLKAIFKGIYAKYRKEIEIVKERFPHEDLVWLENTPRLPFKEGVKLLNESGWVGEDGKPASENEDLATRAEIRLGELMKEKYKTDYFILDKFPASARPFYTHLDKDDDNVTNSFDIFLRGQEITTGGQRINNAQLLAERMTKAGVDPDTMEEYMQAFEWGAPPHAGCGIGLERVLFLLLNLGDVRNASLFPRDPKSLPERKEIPDDKVPFPNADTIKYAFEGDHTHVHLPDLEELISNYGDATNTSWLDDRYKVWRDTATGAAVGYAEENGYALIMGNPLCDPRQYPGVISSFLRYLRKSEDLRPLWLLVSVEVEEILGSKLGWRTLTSVAEERVNTENASQLVKKERQAKNAEIKIHSTVLGEPVPDDVRAKIDKRIEDWKDNRKGRKQVHLTEVLPWIAMAHRRYLWAEDKNGEITGLVILHRLSPKHGYQIKFALDFPNAPSGSIEALIAQSLRTLQSSGIRNVTFGVGATDELVIGHNLNGVKAKILSHTYKTVAQQLKLVAKSEFREKFGAKNDPVYICYPFMGLGVSGARTLIKFFEDEM

SEQ ID NO: 2937 - DNA, 3260 bp, Muscodor strobelii
  misc_feature: SGI EST ID NO. CUFF.7302.0
  misc_feature: Variant of the nucleotide sequence at SEQ ID NO 2935
gcttcgctcacgtccgggttggaaatcaatcaattattttcacgaccatttgttttccgttttgcttagggtctctcactctgtatcgttcatctgtgtttgcaagtcgcttcctccctctactcttagccccttgtggctaaaaaccccatcagaacgacgcatcgccctcagcaaagcgctgccaatatcttcgccatgcctgcgacgttgaaacaaccgcttctctatctcaaccggctcattggccactcgtctgcgaaaaaccatatgagcaaggctaaactcgggaattccgacagtctagactcagacattgagaacaagcagctcaaatctgtctatgacaagcgcgccaagagacagtcggctcagaacgagaggaagtcccttcaggccaagcgtcgcgaggatgaaaaacaagctcgcgcctccgatgcgcccgagatcagcggcagttacggcactgtcgacgaacaatgtgtgccgatatctcacagtctggctgaactgtcggccgcctctgctggcacaaagattggtttcaccgctcgaatacaccacattcgcaacatcagcgccaaattagccttcatcttattacgacaacagaccaccacgatacaggctgtgcttcaagtccgagaggatgtagtgtctgagaatttcgtgcggtgggccgagcatctgtacccggaatgtattgtccacgtcagaggagaactgcgtgcacctccggagacgatcaaaggatgcagcattcacgatctcgaagtcctcatagataagatgcatgtcctgacgcccgtcgagagtcctcttcatgtggacgttttccggatggaccaggtcgaagagaacgaagagacgcacgagaaacagttagcagtctcgaaccgcgtccgcacagctaaccgagtcctcttccttcgaacacctgtcatgcagagcgtcttccgcatacgctctggtatttgcaatattttccgctccactctcgatgaccagggatttatcgaaatccaaacacccaaattgcagcctgccgcgactgaatccggggcatcagtgtttcaagttaaatatttcggccgaacagcttttctagcccagagtccacagctggccaaacagatgtccatttctgctgattttggtcgtgtatacgaaattgggcccgtgttcagagccgaggacagcaacacgcaccgccatctgaccgagtacacgggtttggatcttgaaatggcgattcaaaacgactaccatgagactatggatatcatcgacactatgcttaaggcaattttcaaaggtatatacgctaagtatagaaaggagattgagattgttaaggaacgctttccgcacgaggatttggtctggttggagaacacaccacgccttccattcaaagaaggcgtcaaactattgaatgagtccggatgggtgggcgaggatggtaagcctgcttcagagaacgaagatctggcgacccgcgcagaaatccgtcttggtgaacttatgaaggagaagtacaaaaccgattactttattctcgataaatttccagcatcggcccggccattctatactcatcttgataaggacgatgataacgtcacaaactccttcgatatcttcttgcgaggccaagaaataaccaccggtggtcagagaatcaacaacgcgcagctattggcggagcgcatgacaaaagctggtgtggaccccgatacaatggaggagtacatgcaggcttttgaatggggagcaccgcctcacgctgggtgcggcattggcttagagagagtcctctttctccttctgaatctaggtgacgtgaggaacgcatcattgttcccccgcgacccaaagtctctgccagagagaaaggaaatcccagatgataaggtcccattccccaatgctgataccataaagtatgctttcgaaggagatcacacccacgtacatttgccggatttggaagagctcatctccaactacggcgatgccaccaatacctcatggctcgatgatcgttataaggtttggcgagacacagcgactggcgctgctgtgggctatgccgaagagaacggctatgcattgatcatgggcaatcctctttgtgatccacgtcaatacccaggcgttatcagttcattccttcgatatcttcggaaatctgaagatttgcgtccattgtggctcctcgtttctgttgaggtcgaagaaatccttggctctaaacttggctggagaactctgacttcagttgccgaggagcgcgtgaacactgagaatgcctcccaacttgtcaagaaagagcgccaggccaaaaacgcggagataaagatccattcaacagtgcttggcgagccagtgccagacgatgttcgcgccaagatcgacaagcgcattgaagattggaaagacaatcgcaagggtcgcaagcaggtgcatctaacggaagtgctcccttggatcgctatggcacatcgtcggtatctctgggcagaagacaagaatggcgaaattacgggtctggtcattttgcaccgcttgtcacctaaacacggctaccagatcaaatttgctcttgacttccccaacgcaccgtctggcagcatcgaagcactgattgctcagtccctccgtacactgcagtcgtcgggtattcgcaacgtcacattcggtgtaggagcgacggacgagcttgtaatcggtcacaacctcaacggtgtgaaggctaaaattttgagccacacgtacaagacggtggctcagcagttaaagcttgttgccaaaagcgagtttcgagagaagttcggcgccaaaaatgaccctgtatacatttgttacccattcatgggacttggggtttcgggtgcacgtacactgatcaagtttttcgaggatgagatgtaggatgcctcgacggttgaatcattgggactggcagctggcgtctgcatcacagtcctgttagacgaactattacgcatttttgtgagaacactgcttcagtgcctctcaattagaatcggtgtttaatttatacacctgcataatgctttgatactactggcgagtttggatctggttcgggaatacccatgtcaaagatagcgttttcatgaatagttagcattcctttttggtacgtgtagatgagtattattttcgtaatcaaagcagtcaatgctacgcatgtatcagactctctagtataattcgagctatgtttgatgaca

SEQ ID NO: 2938 - DNA, 1290 bp, Muscodor strobelii
  misc_feature: SGI cDNA ID NO. 560625
  misc_feature: Reduced expression when VOC is produced
  misc_feature: Encodes the peptide sequence at SEQ ID NO 2939
atgtcaaccgacaatgataacgagaatgttgtacgctcatctccagcgaaggattctgacgatacattgtctgcctcggagaaacctgttaaagcaaaggacaagactaatgattcacgctcacggcgtgagctacgcgtgtccgcatcttggtggagacatttgcaatgtttggggatgaatctacattttctcgcacctcccagacccccaaatccagacttcacaaggcagataccctcaacactatcggacagtcgaggggatatcgatatacacttctatcttccaggatcttacaccagaaacactgagagcaaagactggccaatagttgtcaatttccacgggggtggcttcaccttaggccatgctacagatgactccagatgggctcggttcgtgttggagaaaggccatgctgttatggcctcggttgagtaccgcttggcaccagagtatccctttcccactgcagtcgatgatggaacagacgccttattatgtgacgcagatataatacatcatgctgccgagctgcgaatcgatcctaaccgaattgcaacctccggcttctcagcaggtggaaatatcgcattgacggcacctatggtatttatcagtcccattttcattctcaaatcaccacttgtcggagaacctgtactgaattatgccatagagactccatttgtatttgtcccctccatcttcacattgattccgactatgatcgaaagcgtatcaagaatgacgttaccagagcatcgcgttgtggcagtggcaacgtggtatcccattacagattatactctcagcagagacgaacgacgtgcgaattctgtgaaaccagaagctaccatgcctccttctttaactagtctattcgacgcctcatatcttttcccgcctgatctggatttatcagacccttgtctgtcgccaaacaaagcttctgatgagctccttgaaaaagggatcccggaaaatgtgtttttctttacttgcgaatgggatatgctgctgcgagagggcgagttcctcgcatggaggctacagaagtctcccgtatcgaagcgcatattctacacaatgatcaatgaggttccgcacggttgggataaatcaccaaatcctgtgaagccgccagccaaatcagaacatctttacaaagaatgctgtatgcgattacacaaagtatttaacggtgacgatccgcagtctatattcgagcggccgcggcgggtaccacctccaccatcatccgagcaaggagaaggaactttgtag

SEQ ID NO: 2939 - protein, 429 aa, Muscodor strobelii
  misc_feature: SGI Peptide ID NO. 560625
  misc_feature (112)..(375): Pfam Id: PF07859 Pfam Desc: alpha/beta hydrolase fold
  misc_feature (112)..(200): Pfam Id: PF07859 Pfam Desc: alpha/beta hydrolase fold
  misc_feature (7)..(404): NCBI GI: 171682810 Blast Desc: protein product [Podospora anserina] gi|170941364|emb|CAP67014.1| protein product [Podospora anserina]
  misc_feature (28)..(405): NCBI GI: 85096902 Blast Desc: NCU07081 [Neurospora crassa OR74A] gi|28921834|gb|EAA31110.1| [Neurospora crassa OR74A]
  misc_feature (32)..(402): NCBI GI: 116203219 Blast Desc: CHGG_09494 [Chaetomium globosum CBS 148.51] gi|88178012|gb|EAQ85480.1| CHGG_09494 [Chaetomium globosum CBS 148.51]
  misc_feature (41)..(402): NCBI GI: 212539666 Blast Desc: lipase, [Penicillium marneffei ATCC 18224] gi|210067287|gb|EEA21379.1| lipase, [Penicillium marneffei ATCC 18224]
  misc_feature (41)..(403): NCBI GI: 115396748 Blast Desc: conserved [Aspergillus terreus NIH2624] gi|114193582|gb|EAU35282.1| conserved [Aspergillus terreus NIH2624]
  misc_feature (2)..(391): NCBI GI: 242803982 Blast Desc: lipase, [Talaromyces stipitatus ATCC 10500] gi|218717628|gb|EED17049.1| lipase, [Talaromyces stipitatus ATCC 10500]
  misc_feature (41)..(402): NCBI GI: 121703219 Blast Desc: lipase, [Aspergillus clavatus NRRL 1] gi|119398017|gb|EAW08448.1| lipase, [Aspergillus clavatus NRRL 1]
  misc_feature (35)..(405): NCBI GI: 189204570 Blast Desc: PTRG_08288 [Pyrenophora tritici-repentis Pt-1C-BFP] gi|187985719|gb|EDU51207.1| PTRG_08288 [Pyrenophora tritici-repentis Pt-1C-BFP]
  misc_feature (73)..(411): NCBI GI: 238602098 Blast Desc: MPER_04335 [Moniliophthora perniciosa FA553] gi|215466581|gb|EEB96519.1| MPER_04335 [Moniliophthora perniciosa FA553]
  misc_feature (41)..(403): NCBI GI: 169766762 Blast Desc: [Aspergillus oryzae RIB40] gi|238483533|ref|XP_002373005.1| lipase, [Aspergillus flavus NRRL3357] gi|83765707|dbj|BAE55850.1| protein product oryzae]
  misc_feature (88)..(373): SWISSPROT Homolog: EC 3.1.1.3 Triacylglycerol lipase
  misc_feature: Useful for introducing or modulating the production of volatile compounds
MSTDNDNENVVRSSPAKDSDDTLSASEKPVKAKDKTNDSRSRRELRVSASWWRHLQCLGMNLHFLAPPRPPNPDFTRQIPSTLSDSRGDIDIHFYLPGSYTRNTESKDWPIVVNFHGGGFTLGHATDDSRWARFVLEKGHAVMASVEYRLAPEYPFPTAVDDGTDALLCDADIIHHAAELRIDPNRIATSGFSAGGNIALTAPMVFISPIFILKSPLVGEPVLNYAIETPFVFVPSIFTLIPTMIESVSRMTLPEHRVVAVATWYPITDYTLSRDERRANSVKPEATMPPSLTSLFDASYLFPPDLDLSDPCLSPNKASDELLEKGIPENVFFFTCEWDMLLREGEFLAWRLQKSPVSKRIFYTMINEVPHGWDKSPNPVKPPAKSEHLYKECCMRLHKVFNGDDPQSIFERPRRVPPPPSSEQGEGTL

SEQ ID NO: 2940 - DNA, 1004 bp, Muscodor strobelii
  misc_feature: SGI EST ID NO. CUFF.7295.0
  misc_feature: Variant of the nucleotide sequence at SEQ ID NO 2938
cgctgacagcctgcagcctctggaaccaatgagcatcgggttttcatatgcaagatcgatgatcaaacgactcaatcgtgtatatgagatccatacagtcggagtcgcatctactcaccatacccaattagatgatcgttatctttaatttggttgctgctttgtccatatactttttgaccagtctctgggaaattctacctattcagaactagaatcattgcacaccatgattatcacgaaccgtatgtaattcaaaactttagcaacgcaattatacgcagcaacaaattcatggtcatcttctatgcaacacattgagaccgatagacaaattagacaaagtagtcggctagcatgtcaaccgacaatgataacgagaatgttgtacgctcatctccagcgaaggattctgacgatacattgtctgcctcggagaaacctgttaaagcaaaggacaagactaatgattcacgctcacggcgtgagctacgcgtgtccgcatcttggtggagacatttgcaatgtttggggatgaatctacattttctcgcacctcccagacccccaaatccagacttcacaaggcagataccctcaacactatcggacagtcgaggggatatcgatatacacttctatcttccaggatcttacaccagaaacactgagagcaaagactggccaatagttgtcaatttccacgggggtggcttcaccttaggccatgctacagatgactccagatgggctcggttcgtgttggagaaaggccatgctgttatggcctcggttgagtaccgcttggcaccagagtatccctttcccactgcagtcgatgatggaacagacgccttattatgatataatacatcatgctgccgagctgcgaatcgatcctaaccgaattgcaacctccggcttctcagcaggtggaaatatcgcattgacggcacctatggtatttatcagtcccattttcattctcaaatcaccacttgtcg

SEQ ID NO: 2941 - DNA, 981 bp, Muscodor strobelii
  misc_feature: SGI cDNA ID NO. 560626
  misc_feature: Reduced expression when VOC is produced
  misc_feature: Encodes the peptide sequence at SEQ ID NO 2942
atggccgaatccagtgattcagaacatgcaatggagtctcctggcgcccctgaatacggcagggctgtgactttcggcatgcgtgcatcgaccggcaaagacccgttcggcaatacaccagatctgcccagtttggattacaatattctccaccacaaaatgaagctctttgtggtctctgggctcttaatattcgagggcagtttacttccaattattctattttatcccctatggtatcttaccgacctcagacacggcatactctttgccatcataacatcatttttcggaatcgtttctggtcttgaatttgcccatcgctcgtggcggctgattcataagaacgataaataccgcccgctggatggtacgcgctggcgattcgatttcacccataatacattatgtatatcgtatacagttttgacgggtatccttatcggggcatccattcctcatgaaccactggtccgcccgcttgctattccattgccaattttcttcattggtctgggtgtgttgtgcgtagtcacgggcgtcatgtctgcgtttggtatgcggacggcgtgtaaagtcagctcggtaccaaaaggcgcccctcaaccaccctacgtgcttacggccgttgaggatgtcgtaggtgtggatggcggcggcgcccgcccttaccgtgcccgattattagagagatacaaggcgagcaagcgcttccgtcgtctgattgcagagctcaattggttctggggcgtcgggttgcttgttgatggtgctggttctcttgccgctgtctgggttattccatcacaggagatcgcttatggtgttggatggggagagccttttgtgttcttgctggtctggacgcctatcacaattttgtggatccgcaggtcgttgcggagagaaaaggaggaatgggttgcagattctcgtgaaaaagccgttgtgtcagatgggagtgctggtacatctatatga

SEQ ID NO: 2942 - protein, 326 aa, Muscodor strobelii
  misc_feature: SGI Peptide ID NO. 560626
  misc_feature (38)..(322): NCBI GI: 85096495 Blast Desc: NCU07108 [Neurospora crassa OR74A] gi|28921754|gb|EAA31033.1| [Neurospora crassa OR74A]
  misc_feature (36)..(315): NCBI GI: 171682806 Blast Desc: protein product [Podospora anserina] gi|170941362|emb|CAP67012.1| protein product [Podospora anserina]
  misc_feature (29)..(276): NCBI GI: 116203243 Blast Desc: CHGG_09506 [Chaetomium globosum CBS 148.51] gi|88178024|gb|EAQ85492.1| CHGG_09506 [Chaetomium globosum CBS 148.51]
  misc_feature (43)..(312): NCBI GI: 46126493 Blast Desc: FG07624.1 [Gibberella zeae PH-1]
  misc_feature (43)..(307): NCBI GI: 119482159 Blast Desc: NFIA_091700 [Neosartorya fischeri NRRL 181] gi|119409262|gb|EAW19211.1| conserved [Neosartorya fischeri NRRL 181]
  misc_feature (43)..(324): NCBI GI: 121716832 Blast Desc: conserved [Aspergillus clavatus NRRL 1] gi|119404080|gb|EAW14497.1| conserved [Aspergillus clavatus NRRL 1]
  misc_feature (40)..(310): NCBI GI: 145251401 Blast Desc: An15g06860 [Aspergillus niger] gi|134082746|emb|CAK42638.1| protein product [Aspergillus niger]
  misc_feature (32)..(325): NCBI GI: 255952927 Blast Desc: Pc21g01460 [Penicillium chrysogenum Wisconsin 54-1255] gi|211588927|emb|CAP95043.1| Pc21g01460 [Penicillium chrysogenum Wisconsin 54-1255]
  misc_feature (40)..(307): NCBI GI: 258566770 Blast Desc: conserved [Uncinocarpus reesii 1704] gi|237905575|gb|EEP79976.1| conserved [Uncinocarpus reesii 1704]
  misc_feature (5)..(321): NCBI GI: 256727183 Blast Desc: [Nectria haematococca mpVI 77-13-4]
  misc_feature: Useful for introducing or modulating the production of volatile compounds
MAESSDSEHAMESPGAPEYGRAVTFGMRASTGKDPFGNTPDLPSLDYNILHHKMKLFVVSGLLIFEGSLLPIILFYPLWYLTDLRHGILFAIITSFFGIVSGLEFAHRSWRLIHKNDKYRPLDGTRWRFDFTHNTLCISYTVLTGILIGASIPHEPLVRPLAIPLPIFFIGLGVLCVVTGVMSAFGMRTACKVSSVPKGAPQPPYVLTAVEDVVGVDGGGARPYRARLLERYKASKRFRRLIAELNWFWGVGLLVDGAGSLAAVWVIPSQEIAYGVGWGEPFVFLLVWTPITILWIRRSLRREKEEWVADSREKAVVSDGSAGTSI

SEQ ID NO: 2943 - DNA, 3123 bp, Muscodor strobelii
  misc_feature: SGI EST ID NO. CUFF.7640.0
  misc_feature: Variant of the nucleotide sequence at SEQ ID NO 2941
acctcgaatgcagtatttgtcccctccatcttcacattgattccgactatgatcgaaagcgtatcaagaagtacgtaataggagctaacatgttgtttatcggtcatcagacatagccgcacagtgacgttaccagagcatcgcgttgtggcagtggcaacgtggtatcccattacagattatactctcagcagagacgaacgacgtgcgaattctgtgaaaccagaagctaccatgcctccttctttaactagtctattcgacgcctcatatcttttcccgcctgatctggatttatcagacccttgtctgtcgccaaacaaagcttctgatgagctccttgaaaaagggatcccggaaaatgtgtttttctttacttgcgaatgggatatgctgctgcgagagggcgagttcctcgcatggaggctacagaagtctcccgtatcgaagcgcatattctacacaatgatcaatgaggttccgcacggttgggataaatcaccaaatcctgtgaagccgccagccaaatcagaacatctttacaaagaatgctgtatgcgattacacaaagtatttaacggtgacgatccgcagtctatattcgagcggccgcggcgggtaccacctccaccatcatccgagcaaggagaaggaactttgtaggcgatagagttcaacacttttctgtaagacagggtggggggtatcggccctagagaatctaaaattcaaaagcgacttcctgcaccgacagaaagggatttggtgtttcgtcaaactcgcgacacgatagtagatactgctaggaacggcctatactgatgcctattatcttaagacgtcattcttcttttatcctcgtctagagaaggacacatattgataacctcgccaactacgatttgggtcttaaaggactggaagtcggcatgcgagaggtttagcgagacgcgaagtgttggcggagctgataattgccctggtcatgcatagcccaagaatgtcgcaatattctcaatgaacactattttcgcgtcgtccggcacaggatcacataggtgcatttgcagaattcttggcgagtgagttggacttgtatgtgcagtatataggtgaattcatcgagcaactcttgtcttgtcaattctaggatgtcctggcttgtctcgggagaaaccagaataaggcttggcagcgtttcgggtggagaagaaccctgctgtggcctgcacggtgccgctgaaggacttgcctgtttcaggcttaagctagcgggagatgcgctagcatacgtcattgtccccaaatcttcagcccgccaagattgaacacgacttggctgatggatgggaaagccaaccatgaccaggcatagttatcaatgcgtgccctgccacatccgtagttaaaggtccggaagccttggctccaatgttatgacgattcgccgcttggctgatgcgcgtgtatcgagcataagcagcactcagatagctgctgcagtgtaagctgaagatctggcgttaacgtcattgttattcatctgtgtcgctgagcagttttacaactgagagcggcatcagttcattcggtttcttatcaagtttattcatgtattctactttggttactgttcatcataattccattatctgcagcataacatcgacgatcgatgtttttgttcaaagaccctgttttcatcttttactacttcgtccccaccatctcaccaaaacctaagccccggcttgttggtatccccatcttccttgactagtgtgcaatctatcgtcgacgtcttccatcacctttccgtactcaacatctgcaaccaaagaatccgtgttagcaccaattacgcccattgatatcgtccaattcgttcaaggcacctcgacacatcgagccccaaggctgtctattcccgtcttgttcgaagagcagagactagccatccgcaggctgacgcctttcaaaatcgatcgtaggccgcgatggccgaatccagtgattcagaacatgcaatggagtctcctggcgcccctgaatacggcagggctgtgactttcggcatgcgtgcatcgaccggcaaagacccgttcggcaatacaccagatctgcccagtttggattacaatattctccaccacaaaatgaagctctttgtggtctctgggctcttaatattcgagggcagtttacttccaattattctattttatcccctatggtatcttaccgacctcagacacggcatactctttgccatcataacatcatttttcggaatcgtttctggtcttgaatttgcccatcgctcgtggcggctgattcataagaacgataaataccgcccgctggatggtacgcgctggcgattcgatttcacccataatacattatgtatatcgtatacagttttgacgggtatccttatcggggcatccattcctcatgaaccactggtccgcccgcttgctattccattgccaattttcttcattggtctgggtgtgttgtgcgtagtcacgggcgtcatgtctgcgtttggtatgcggacggcgtgtaaagtcagctcggtaccaaaaggcgcccctcaaccaccctacgtgcttacggccgttgaggatgtcgtaggtgtggatggcggcggcgcccgcccttaccgtgcccgattattagagagatacaaggcgagcaagcgcttccgtcgtctgattgcagagctcaattggttctggggcgtcgggttgcttgttgatggtgctggttctcttgccgctgtctgggttattccatcacaggagatcgcttatggtgttggatggggagagccttttgtgttcttgctggtctggacgcctatcacaattttgtggatccgcaggtcgttgcggagagaaaaggaggaatgggttgcagattctcgtgaaaaagccgttgtgtcagatgggagtgctggtacatctatatgacggatcagaggaaatgggtagcgtactgtatatgaaacgcctcttgaagacacatgcataaattacaacaattttagagatgaactttcgactgcccgtctttctttattttgacctggaccatcatgaatctcgtctgcgtcgg

SEQ ID NO: 2944 - DNA, 714 bp, Muscodor strobelii
  misc_feature: SGI cDNA ID NO. 560627
  misc_feature: Reduced expression when VOC is produced
  misc_feature: Encodes the peptide sequence at SEQ ID NO 2945
atgcaacatttcgtgatcctcgccgacgatcttcccgctttcacacgagcgtggttctactgggatctgtcgcatcctggacttaatcagtggctatcactcaagctgcacatgcgggatccgtatgcagcagaatgggacgagccacatgtacgccgtgacgttcaacgccgtctcttgttaccgtgggggatggtcaaaggtctgcgcgacttcacgctcacgggcgagccgaggccacaacctaagatcgagtcggagatgcgagcgctacaagccgtcgcaccaccatcacctgaacagtctttgaccgaggggatacggcttaaaaatgaaggtaacatattgctacagaaaggcgatgcgagaggcgctcttcgtatctattcgaaagcatgggaggcaatccatattgtgattcgaggacgccagcggcacgtgcatgccgaggcctactacgccaaagaactctcagagccctttccgggcagaaacggacagatggaacggctcaacctgcgtgtccagctcgttgccaacacgtgtctcgcgtacttgaaacttggcgagtgggaagagctcaagttctggggtatgcgaacgatacagctcatctctcacgcgcacgacgaccgcccaatcgagccggaagatgaagctatccttgatttcccttttgccgcacaaattggcaagatttactggtgtgtttaa

SEQ ID NO: 2945 - protein, 237 aa, Muscodor strobelii
  misc_feature: SGI Peptide ID NO. 560627
  misc_feature (5)..(222): NCBI GI: 189209269 Blast Desc: conserved [Pyrenophora tritici-repentis Pt-1C-BFP] gi|187977060|gb|EDU43686.1| conserved [Pyrenophora tritici-repentis Pt-1C-BFP]
  misc_feature (5)..(234): NCBI GI: 169595410 Blast Desc: SNOG_00442 [Phaeosphaeria nodorum SN15] gi|111070817|gb|EAT91937.1| SNOG_00442 [Phaeosphaeria nodorum SN15]
  misc_feature: Useful for introducing or modulating the production of volatile compounds
MQHFVILADDLPAFTRAWFYWDLSHPGLNQWLSLKLHMRDPYAAEWDEPHVRRDVQRRLLLPWGMVKGLRDFTLTGEPRPQPKIESEMRALQAVAPPSPEQSLTEGIRLKNEGNILLQKGDARGALRIYSKAWEAIHIVIRGRQRHVHAEAYYAKELSEPFPGRNGQMERLNLRVQLVANTCLAYLKLGEWEELKFWGMRTIQLISHAHDDRPIEPEDEAILDFPFAAQIGKIYWCV

SEQ ID NO: 2946 - DNA, 6361 bp, Muscodor strobelii
  misc_feature: SGI EST ID NO. CUFF.7961.0
  misc_feature: Variant of the nucleotide sequence at SEQ ID NO 2944
gttcgggcggacctcggacgttcgcccgtttgttctcgaatctaccacggccacacgtgaccatttccgctacaaccgcatcatgtatgaccttctaccatgcttttgatggacatggaccaaaacaaacgccttatagcatcatctcggatatcggaataaagcaaggaaagcagattgagtaccaaatcgacgtgatctccccaattggactgacccgctctgcggagaacccatgaatccacgatggacagtcaacgaccgattccggatctgttaaacttaccccctgagattcgagatcaaatatatcatatcattctacatcccaataataatcgcacgcatcaggcagatgaatacaccgattactcttatcgcgatgctgtcgtgctcttccgactcaatcgactcatatatcatgaagcacgagacgtcttccgcaccctaaatatattcatccgggttgagacaccatggaccgaagccgagcagcaggtgaacctagttggctcggtgcccatattggttcgtacaacatcatgcctttccatgtttcttctctcaactcatgtactataaaaattcacgctaatatgtcacgcagtgagtggtctttcatttcatggataaaacttgggggcaacagggacaatttacagcgatccaagaagtagactgacgtactttccatcacgtaggatgagcggcactcgagcgtctcgtttcaatggacacagtctgagtgttgtgattgaaacaccgtcagccggcccacccccggacggcatgcaacatttcgtgatcctcgccgacgatcttcccgctttcacacgagcgtggttctactgggatctgtcgcatcctggacttaatcagtggctatcactcaagctgcacatgcgggatccgtatgcagcagaatgggacgagccacatgtacgccgtgacgttcaacgccgtctcttgttaccgtgggggatggtcaaaggtctgcgcgacttcacgctcacgggcgagccgaggccacaacctaagatcgagtcggagatgcgagcgctacaagccgtcgcaccaccatcacctgaacagtctttgaccgaggggatacggcttaaaaatgaaggtaacatattgctacagaaaggcgatgcgagaggcgctcttcgtatctattcgaaagcatgggaggcaatccatattgtgattcgaggacgccagcggcacgtgcatgccgaggcctactacgccaaagaactctcagagccctttccgggcagaaacggacagatggaacggctcaacctgcgtgtccagctcgttgccaacacgtgtctcgcgtacttgaaacttggcgagtgggaagagctcaagttctggggtatgcgaacgatacagctcatctctcacgcgcacgacgaccgcccaatcgagccggaagatgaagctatccttgatttcccttttgccgcacaaattggcaagatttactggtgtgtttaaaacaactccgttcctgtttttgattcggtatattctagaaggatctgtgctaatttgtgtggcagtgagtactacttgttcgatttaaggatccggcgacggccggggaattctaaaacagatctattctatcccatatcataccgtataagagacaggactaacatgttttgctatgttagatcgcacggcgagtgcctgcaaggcgctgggagaccgatctcaggcccaccgtctgttgaaggttgctgcggtgtacttaccacatgatgagacgattagaaaggacctggctgctacgtcacttcagctggggtgagcgcttttaggtgcgaatgattttctggtgtttcaaggagctggtgaaagggtcgggagggtcatggagcgtgtaaagatggtctgcttaaagtggcgcattggttggttctaaagtgtcaacaaaaggtgaaatgattcttcagtcaattattgacctaactacgaagaaaatcctgaaaagggttcgatatgtatctatcgctagacaagttatggtcgggatgattctcaggccatttgtaatctaattcgttcatctttacttgtatgaaaagcacatcaacttctggctggtgcgagatttatgtaacacctaccacattgccagtatacatggcacagcttcaaccaaggccctgttaacattgtcttaagttttcagtttgacgcttttgatcatcacgacaagtccacatagcactttagtgatcaagatttatcctcgtctgaaagatgagtcggaagtcttctatcaaggtctccagatggtaacgaattgaccatttcgccttttccttatctgatacggtatcgaaatccaagtacaaacagttgctccgacccaatccgcccttttgcattgttaccgctcttatatcatgcggtaggcatagaacctggtatcaaacgcccaaaactcccccgcaacaaattctgtagaaaaggctgctctgagatggaaaacaacaccgtgtggcgcccgactggctccagtatccggcatctgcggcgacggtgacgtcgtcgtcgtcgtcgtcgtcgtcaagactgtagcattctaaacgaaactcgtgagacattcgggcaatgcgataccactttggagagatcatggaccgcgaagagatagtagcccgccttccaaccatttgtagctgacatgaaatttcttcgtccttctccttcctgtagttatcaaatagagaacatatttaaaagcgatcgtatcgagagaaatatcgagggtaatctcgcgtatgaggctcgcgatgctgcatactagacattttccttgaacacagacctccggcccgataatgacgtagggcttccctgcgtcgccgcggcgggacctgatccggaggctccctgggtatcaatgggtctcggactgacgcctcgcaagctcatgttgctcggttcggcagcctcgtcatcgaaaggattcggtcctctgctagcgggcacgtccaggccagcgccacgaggcatgggactgcgtccgcgactgtcattgccgtcgccagcaaggttcatctggtagccagacccggaatactggccattgtgcccccgatcttgaagctcctggtcttcggggtaatgtgcgccgacgccgtaaggctcgtacgctacgtttgtatcccaagcctcgtcaggatcgagttgtccgaaaccgcggcggcctgatgcgcccggctgctcgtaggcgccagctgcggatcgcgtgttgttgcccgagcggaaagtggacaagcggtcattcagccagccgcgaatgccgccgggcgcaggctggggagctccgtaggacgagcgattcgaggagttgaagaaggggatgatgggtggggacggaagctatgatcactgcgtgtcagcatggcggacggaatcagcgaggggagcacaggtgatggcgtcgacgtacacctaagcggcgggcgcgcagctgcgtaaaggcaatccagccaatggcggcaaggacgaggagcacggcgagcacgatgaagaaggtcccgacggggctgaccatcttggccgtgggtgatggggaccggacgagattgtcgcccgtgtcgccttcgacctagcgattctggttggcggtctgcgttgctgtgtaggaccagcgacggcggtggatggtccgcgatggacgcgcaatgttatgtgggctgtgggttgttttctgtcctacatgtgaaggcgaggctggtgcggttggccgtttggtctgcgacttgatgacatgtccagatgtgtaggtaggttgggtgtaatgggtctgtccggagcttgccgcgcgattgcacgggcagaacttgcttaggtgcactgatatgcacaccgaacctaaaatacctacctacaagtgctacttagctgatcttacctcgcctttatcaccgacctgtacacgaaattgctagtactgtattcgaggacagtaaggtaaagcctaaaatggccaggttcttcagtaaggtatgttacccaaggttccatgtggcatgggagcatacctaatgtactaactaaatgacatgcatcggaacaagaattagagatatttttagcagcagaccgacccaacacctagctcgccctagtccgtgacgcatttgttaccggacagaaacgaggtcacagtcacacccctcgtgtctccaaatttcgaaaagggacatgccataatacagcctcaattcctgccttcaatgtctcactctgtaagcctatcagcgccactatcgtccatatgtctcaccagcaaggagaaatcgggcagttatcggccacttctaccacattagatctgcctcgtgacctcatgctccacaactatcgctgttgtgttgcgcaataatagtccttttccatcattgcatcgtcctagctcatccgctgtttccgcaggaagtggtgtgcttgtcaaacacgcagagtggtatagcagcgtcgtgccatgcagagaaaataatccgagattgagggctcccacgggttcactgatgtctttcctaagctcaacacagcgcgttacggaaggggcaagtataagcacgggtatcatgcattctgatgtaatgcctcagtcttcttactagtacctagagaagcaacctttgctcattttcaaagcacaagtcccaatgtccccctgcgcgggcaaagctcaagctctgtacatatttgtccaatgtacagcggcctagctcatcggcgtcgcaattctgcagtggtatcactcgatcgttgactagtacgcggactagctcctcttcgccgtcgccgccacacaacattttctcgacgtacatcctccccgcgaaggggaccgtccagctagccgagtagcccatggtgttcttggggcttgccttggtcgtgttagatagcggtggagtcgtgttgtacagcccgagcccaccaaacaccccagacatgtcgttgtcgtggctgaagtcggcatacaagatgccatcgagtgggaatgtcgaccgagagccatcgagtgtggtgttcgtacttgtgctgtcaaccaccggttgaccggtcagcctagcaatcaactcattgatgaatccaaccccttgtgtcggtcctaggctgctgttcgtgtggccgtaccatttgcccagggattggtagtaatcataatcgtgccattcgtcttcgctgaaaagaccacagaagggagataagcggccttcgtcattggccaccgtttcataaggacataaatccatgaaatttatgatgtcgctattcgacaggttcacccctggaagattccggttgactctttctgtaatgggcggagtaaatgtgtcggcccaaatctgctgtggaattttcccatcatctggcccttcgctaaaggcaggacaggtgctcggactcagcgtattgttgaagtcgtctatctctggaagtatcacaggttggtaaggatatgcatcaggagactgagccatgtcatcggcgagccgtgcttcgtgaaagccttgggtccaattgatagccgaatcgacgactctttgctgaccagcgcttctgacaaaaggcgagatagtcttggccagcttctcgtaacgtttgtaaaagtgcatgcccgaattgaccagctgctgctggccgaaaacagtgagctgatcggcgcctagtgtataattgtatctcttgataaagtcatactcttttccgtatccagttgcgttgccatgaatccgatcaatgagagccgcataggtcaaagatttgctctcagtaggatcgcgagctccatgacgtgacagcacttgggcgaaggtcagttcgcatccctcggggatggaattcggtatcttagaaggcacagaatagaagggagagtattggccccatgagtgtgacaaatttggtacacattggaaaccagaatccacggtgtcgcaagactccctcggctggacagccgtccgtcgcctgcatttcagtgtcagtcttttggactgaacatctgaagaaggcactaacatcaaggaaatggcaccaaggctagcaatcgctagaatcaagctgacagaaacaacgcgaataagggttctattactgccggccccaacattggatcgtctccgtaactgctctgggctaccattttcggggagtgcggtatatcgttgctttcttcttatcagcgcagacacgcgatcacgtatctccgttagagccatggtatcaattcgattgcttcaattgctgaaggacgatgaacgccatttttattttccgtctagagtgaatctcaaatgaaggaaacgcgtatgcg

SEQ ID NO: 2947 - DNA, 687 bp, Muscodor strobelii
  misc_feature: SGI cDNA ID NO. 560628
  misc_feature: Encodes the peptide sequence at SEQ ID NO 2948
atggtcagccccgtcgggaccttcttcatcgtgctcgccgtgctcctcgtccttgccgccattggctggattgcctttacgcagctgcgcgcccgccgcttaggtcttccgtccccacccatcatccccttcttcaactcctcgaatcgctcgtcctacggagctccccagcctgcgcccggcggcattcgcggctggctgaatgaccgcttgtccactttccgctcgggcaacaacacgcgatccgcagctggcgcctacgagcagccgggcgcatcaggccgccgcggtttcggacaactcgatcctgacgaggcttgggatacaaacgtagcgtacgagccttacggcgtcggcgcacattaccccgaagaccaggagcttcaagatcgggggcacaatggccagtattccgggtctggctaccagatgaaccttgctggcgacggcaatgacagtcgcggacgcagtcccatgcctcgtggcgctggcctggacgtgcccgctagcagaggaccgaatcctttcgatgacgaggctgccgaaccgagcaacatgagcttgcgaggcgtcagtccgagacccattgatacccagggagcctccggatcaggtcccgccgcggcgacgcagggaagccctacgtcattatcgggccggaggtctgtgttcaaggaaaatgtctag

SEQ ID NO: 2948 - protein, 228 aa, Muscodor strobelii
  misc_feature: SGI Peptide ID NO. 560628
  misc_feature (1)..(228): NCBI GI: 46110168 Blast Desc: FG01966.1 [Gibberella zeae PH-1]
  misc_feature (1)..(228): NCBI GI: 256720949 Blast Desc: NECHADRAFT_50185 [Nectria haematococca mpVI 77-13-4]
  misc_feature (2)..(228): NCBI GI: 85107489 Blast Desc: NCU06349 [Neurospora crassa OR74A] gi|28923988|gb|EAA33147.1| [Neurospora crassa OR74A]
  misc_feature (21)..(228): NCBI GI: 171683291 Blast Desc: protein product [Podospora anserina] gi|170941605|emb|CAP67259.1| protein product [Podospora anserina]
  misc_feature (2)..(228): NCBI GI: 156046208 Blast Desc: SS1G_09371 [Sclerotinia sclerotiorum 1980] gi|154693766|gb|EDN93504.1| SS1G_09371 [Sclerotinia sclerotiorum 1980]
  misc_feature (3)..(228): NCBI GI: 154319746 Blast Desc: BC1G_02354 [Botryotinia fuckeliana B05.10] gi|150856012|gb|EDN31204.1| BC1G_02354 [Botryotinia fuckeliana B05.10]
  misc_feature (21)..(228): NCBI GI: 169609859 Blast Desc: SNOG_08021 [Phaeosphaeria nodorum SN15] gi|111063177|gb|EAT84297.1| SNOG_08021 [Phaeosphaeria nodorum SN15]
  misc_feature (6)..(157): NCBI GI: 258577737 Blast Desc: [Uncinocarpus reesii 1704] gi|237903316|gb|EEP77717.1| [Uncinocarpus reesii 1704]
  misc_feature (17)..(195): NCBI GI: 240110127 Blast Desc: CPC735_061590 [Coccidioides posadasii C735 delta SOWgp]
  misc_feature (5)..(228): NCBI GI: 145603256 Blast Desc: MGG_06166 [Magnaporthe grisea 70-15] gi|145011523|gb|EDJ96179.1| MGG_06166 [Magnaporthe grisea 70-15]
MVSPVGTFFIVLAVLLVLAAIGWIAFTQLRARRLGLPSPPIIPFFNSSNRSSYGAPQPAPGGIRGWLNDRLSTFRSGNNTRSAAGAYEQPGASGRRGFGQLDPDEAWDTNVAYEPYGVGAHYPEDQELQDRGHNGQYSGSGYQMNLAGDGNDSRGRSPMPRGAGLDVPASRGPNPFDDEAAEPSNMSLRGVSPRPIDTQGASGSGPAAATQGSPTSLSGRRSVFKENV

SEQ ID NO: 2949 - DNA, 6488 bp, Muscodor strobelii
  misc_feature: SGI EST ID NO. CUFF.7962.1
  misc_feature: Variant of the nucleotide sequence at SEQ ID NO 2947
cgcatacgcgtttccttcatttgagattcactctagacggaaaataaaaatggcgttcatcgtccttcagcaattgaagcaatcgaattgataccatggctctaacggagatacgtgatcgcgtgtctgcgctgataagaagaaagcaacgatataccgcactccccgaaaatggtagcccagagcagttacggagacgatccaatgttggggccggcagtaatagaacccttattcgcgttgtttctgtcagcttgattctagcgattgctagccttggtgccatttccttgatgcgacggacggctgtccagccgagggagtcttgcgacaccgtggattctggtttccaatgtgtaccaaatttgtcacactcatggggccaatactctcccttctattctgtgccttctaagataccgaattccatccccgagggatgcgaactgaccttcgcccaagtgctgtcacgtcatggagctcgcgatcctactgagagcaaatctttgacctatgcggctctcattgatcggattcatggcaacgcaactggatacggaaaagagtatgactttatcaagagatacaattatacactaggcgccgatcagctcactgttttcggccagcagcagctggtcaattcgggcatgcacttttacaaacgttacgagaagctggccaagactatctcgccttttgtcagaagcgctggtcagcaaagagtcgtcgattcggctatcaattggacccaaggctttcacgaagcacggctcgccgatgacatggctcagtctcctgatgcatatccttaccaacctgtgatacttccagagatagacgacttcaacaatacgctgagtccgagcacctgtcctgcctttagcgaagggccagatgatgggaaaattccacagcagatttgggccgacacatttactccgcccattacagaaagagtcaaccggaatcttccaggggtgaacctgtcgaatagcgacatcataaatttcatggatttatgtccttatgaaacggtggccaatgacgaaggccgcttatctcccttctgtggtcttttcagcgaagacgaatggcacgattatgattactaccaatccctgggcaaatggtacggccacacgaacagcagcctaggaccgacacaaggggttggattcatcaatgagttgattgctaggctgaccggtcaaccggtggttgacagcacaagtacgaacaccacactcgatggctctcggtcgacattcccactcgatggcatcttgtatgccgacttcagccacgacaacgacatgtctggggtgtttggtgggctcgggctgtacaacacgactccaccgctatctaacacgaccaaggcaagccccaagaacaccatgggctactcggctagctggacggtccccttcgcggggaggatgtacgtcgagaaaatgttgtgtggcggcgacggcgaagaggagctagtccgcgtactagtcaacgatcgagtgataccactgcagaattgcgacgccgatgagctaggccgctgtacattggacaaatatgtacagagcttgagctttgcccgcgcagggggacattgggacttgtgctttgaaaatgagcaaaggttgcttctctaggtactagtaagaagactgaggcattacatcagaatgcatgatacccgtgcttatacttgccccttccgtaacgcgctgtgttgagcttaggaaagacatcagtgaacccgtgggagccctcaatctcggattattttctctgcatggcacgacgctgctataccactctgcgtgtttgacaagcacaccacttcctgcggaaacagcggatgagctaggacgatgcaatgatggaaaaggactattattgcgcaacacaacagcgatagttgtggagcatgaggtcacgaggcagatctaatgtggtagaagtggccgataactgcccgatttctccttgctggtgagacatatggacgatagtggcgctgataggcttacagagtgagacattgaaggcaggaattgaggctgtattatggcatgtcccttttcgaaatttggagacacgaggggtgtgactgtgacctcgtttctgtccggtaacaaatgcgtcacggactagggcgagctaggtgttgggtcggtctgctgctaaaaatatctctaattcttgttccgatgcatgtcatttagttagtacattaggtatgctcccatgccacatggaaccttgggtaacataccttactgaagaacctggccattttaggctttaccttactgtcctcgaatacagtactagcaatttcgtgtacaggtcggtgataaaggcgaggtaagatcagctaagtagcacttgtaggtaggtattttaggttcggtgtgcatatcagtgcacctaagcaagttctgcccgtgcaatcgcgcggcaagctccggacagacccattacacccaacctacctacacatctggacatgtcatcaagtcgcagaccaaacggccaaccgcaccagcctcgccttcacatgtaggacagaaaacaacccacagcccacataacattgcgcgtccatcgcggaccatccaccgccgtcgctggtcctacacagcaacgcagaccgccaaccagaatcgctaggtcgaaggcgacacgggcgacaatctcgtccggtccccatcacccacggccaagatggtcagccccgtcgggaccttcttcatcgtgctcgccgtgctcctcgtccttgccgccattggctggattgcctttacgcagctgcgcgcccgccgcttaggtcttccgtccccacccatcatccccttcttcaactcctcgaatcgctcgtcctacggagctccccagcctgcgcccggcggcattcgcggctggctgaatgaccgcttgtccactttccgctcgggcaacaacacgcgatccgcagctggcgcctacgagcagccgggcgcatcaggccgccgcggtttcggacaactcgatcctgacgaggcttgggatacaaacgtagcgtacgagccttacggcgtcggcgcacattaccccgaagaccaggagcttcaagatcgggggcacaatggccagtattccgggtctggctaccagatgaaccttgctggcgacggcaatgacagtcgcggacgcagtcccatgcctcgtggcgctggcctggacgtgcccgctagcagaggaccgaatcctttcgatgacgaggctgccgaaccgagcaacatgagcttgcgaggcgtcagtccgagacccattgatacccagggagcctccggatcaggtcccgccgcggcgacgcagggaagccctacgtcattatcgggccggaggtctgtgttcaaggaaaatgtctagtatgcagcatcgcgagcctcatacgcgagattaccctcgatatttctctcgatacgatcgcttttaaatatgttctctatttgataactacaggaaggagaaggacgaagaaatttcatgtcagctacaaatggttggaaggcgggctactatctcttcgcggtccatgatctctccaaagtggtatcgcattgcccgaatgtctcacgagtttcgtttagaatgctacagtcttgacgacgacgacgacgacgacgacgtcaccgtcgccgcagatgccggatactggagccagtcgggcgccacacggtgttgttttccatctcagagcagccttttctacagaatttgttgcgggggagttttgggcgtttgataccaggttctatgcctaccgcatgatataagagcggtaacaatgcaaaagggcggattgggtcggagcaactgtttgtacttggatttcgataccgtatcagataaggaaaaggcgaaatggtcaattcgttaccatctggagaccttgatagaagacttccgactcatctttcagacgaggataaatcttgatcactaaagtgctatgtggacttgtcgtgatgatcaaaagcgtcaaactgaaaacttaagacaatgttaacagggccttggttgaagctgtgccatgtatactggcaatgtggtaggtgttacataaatctcgcaccagccagaagttgatgtgcttttcatacaagtaaagatgaacgaattagattacaaatggcctgagaatcatcccgaccataacttgtctagcgatagatacatatcgaacccttttcaggattttcttcgtagttaggtcaataattgactgaagaatcatttcaccttttgttgacactttagaaccaaccaatgcgccactttaagcagaccatctttacacgctccatgaccctcccgaccctttcaccagctccttgaaacaccagaaaatcattcgcacctaaaagcgctcaccccagctgaagtgacgtagcagccaggtcctttctaatcgtctcatcatgtggtaagtacaccgcagcaaccttcaacagacggtgggcctgagatcggtctcccagcgccttgcaggcactcgccgtgcgatctaacatagcaaaacatgttagtcctgtctcttatacggtatgatatgggatagaatagatctgttttagaattccccggccgtcgccggatccttaaatcgaacaagtagtactcactgccacacaaattagcacagatccttctagaatataccgaatcaaaaacaggaacggagttgttttaaacacaccagtaaatcttgccaatttgtgcggcaaaagggaaatcaaggatagcttcatcttccggctcgattgggcggtcgtcgtgcgcgtgagagatgagctgtatcgttcgcataccccagaacttgagctcttcccactcgccaagtttcaagtacgcgagacacgtgttggcaacgagctggacacgcaggttgagccgttccatctgtccgtttctgcccggaaagggctctgagagttctttggcgtagtaggcctcggcactgttcattattaattgtcagattccattgtctatagcgatcatgtctattcgccagcgaatttgagaaagcatagctttgagagatcaggcaaggtatggagacttactgcacgtgccgctggcgtcctctgtgttcataaaacatgttagttactctcttaaagtattcaatcccggatttgcagcgtattgccgtctccccataattgatcgtactctacagaatactcggttgtacagacgggaacagtgtgtgggtatacataccgaatcacaatatggattgcctcccatgctttcgaatagatacgaagagcgcctctcgcatcgcctttctgtagcaatatgttaccttcatttttaagccgtatcccctcggtcaaagactgttcaggtgatggtggtgcgacggcttgtagcgctcgcatctccgactcgatcttaggttgtggcctcggctcgcccgtgagcgtgaagtcgcgcagacctttgaccatcccccacggtaacaagagacggcgttgaacgtcacggcgtacatgtggctcgtcccattctgctgcatacggatcccgcatgtgcagcttgagtgatagccactgattaagtccaggatgcgacagatcccagtagaaccacgctcgtgtgaaagcgggaagatcgtcggcgaggatcacgaaatgttgcatgccgtccgggggtgggccggctgacggtgtttcaatcacaacactcagactgtgtccattgaaacgagacgctcgagtgccgctcatcctacgtgatggaaagtacgtcagtctacttcttggatcgctgtaaattgtccctgttgcccccaagttttatccatgaaatgaaagaccactcactgcgtgacatattagcgtgaatttttatagtacatgagttgagagaagaaacatggaaaggcatgatgttgtacgaaccaatatgggcaccgagccaactaggttcacctgctgctcggcttcggtccatggtgtctcaacccggatgaatatatttagggtgcggaagacgtctcgtgcttcatgatatatgagtcgattgagtcggaagagcacgacagcatcgcgataagagtaatcggtgtattcatctgcctgatgcgtgcgattattattgggatgtagaatgatatgatatatttgatctcgaatctcagggggtaagtttaacagatccggaatcggtcgttgactgtccatcgtggattcatgggttctccgcagagcgggtcagtccaattggggagatcacgtcgatttggtactcaatctgctttccttgctttattccgatatccgagatgatgctataaggcgtttgttttggtccatgtccatcaaaagcatggtagaaggtcatacatgatgcggttgtagcggaaatggtcacgtgtggccgtggtagattcgagaacaaacgggcgaacgtccgaggtccgcccgaac

SEQ ID NO: 2950 - DNA, 1557 bp, Muscodor strobelii
  misc_feature: SGI cDNA ID NO. 560629
  misc_feature: Encodes the peptide sequence at SEQ ID NO 2951
atggctctaacggagatacgtgatcgcgtgtctgcgctgataagaagaaagcaacgatataccgcactccccgaaaatggtagcccagagcagttacggagacgatccaatgttggggccggcagtaatagaacccttattcgcgttgtttctgtcagcttgattctagcgattgctagccttggtgccatttccttgatgcgacggacggctgtccagccgagggagtcttgcgacaccgtggattctggtttccaatgtgtaccaaatttgtcacactcatggggccaatactctcccttctattctgtgccttctaagataccgaattccatccccgagggatgcgaactgaccttcgcccaagtgctgtcacgtcatggagctcgcgatcctactgagagcaaatctttgacctatgcggctctcattgatcggattcatggcaacgcaactggatacggaaaagagtatgactttatcaagagatacaattatacactaggcgccgatcagctcactgttttcggccagcagcagctggtcaattcgggcatgcacttttacaaacgttacgagaagctggccaagactatctcgccttttgtcagaagcgctggtcagcaaagagtcgtcgattcggctatcaattggacccaaggctttcacgaagcacggctcgccgatgacatggctcagtctcctgatgcatatccttaccaacctgtgatacttccagagatagacgacttcaacaatacgctgagtccgagcacctgtcctgcctttagcgaagggccagatgatgggaaaattccacagcagatttgggccgacacatttactccgcccattacagaaagagtcaaccggaatcttccaggggtgaacctgtcgaatagcgacatcataaatttcatggatttatgtccttatgaaacggtggccaatgacgaaggccgcttatctcccttctgtggtcttttcagcgaagacgaatggcacgattatgattactaccaatccctgggcaaatggtacggccacacgaacagcagcctaggaccgacacaaggggttggattcatcaatgagttgattgctaggctgaccggtcaaccggtggttgacagcacaagtacgaacaccacactcgatggctctcggtcgacattcccactcgatggcatcttgtatgccgacttcagccacgacaacgacatgtctggggtgtttggtgggctcgggctgtacaacacgactccaccgctatctaacacgaccaaggcaagccccaagaacaccatgggctactcggctagctggacggtccccttcgcggggaggatgtacgtcgagaaaatgttgtgtggcggcgacggcgaagaggagctagtccgcgtactagtcaacgatcgagtgataccactgcagaattgcgacgccgatgagctaggccgctgtacattggacaaatatgtacagagcttgagctttgcccgcgcagggggacattgggacttgtgctttgaaaatgagcaaaggttgcttctctag

SEQ ID NO: 2951 - protein, 518 aa, Muscodor strobelii
  misc_feature: SGI Peptide ID NO. 560629
  misc_feature (117)..(471): Pfam Id: PF00328 Pfam Desc: Histidine acid phosphatase
  misc_feature (50)..(510): NCBI GI: 154309627 Blast Desc: BC1G_07284 [Botryotinia fuckeliana B05.10] gi|150852307|gb|EDN27499.1| BC1G_07284 [Botryotinia fuckeliana B05.10]
  misc_feature (50)..(510): NCBI GI: 156045537 Blast Desc: SS1G_09959 [Sclerotinia sclerotiorum 1980] gi|154694352|gb|EDN94090.1| SS1G_09959 [Sclerotinia sclerotiorum 1980]
  misc_feature (17)..(510): NCBI GI: 171683293 Blast Desc: protein product [Podospora anserina] gi|170941606|emb|CAP67260.1| protein product [Podospora anserina]
  misc_feature (47)..(510): NCBI GI: 41017448 Blast Desc: PHYA_THIHE RecName: Full=3-phytase A; AltName: Full=3 phytase A; AltName: Full=Myo-inositol-hexaphosphate 3-phosphohydrolase A; AltName: Full=Myo-inositol hexakisphosphate
  misc_feature (26)..(511): NCBI GI: 116194564 Blast Desc: CHGG_03880 [Chaetomium globosum CBS 148.51] gi|88179793|gb|EAQ87261.1| CHGG_03880 [Chaetomium globosum CBS 148.51]
  misc_feature (48)..(510): NCBI GI: 238491472 Blast Desc: phytase [Aspergillus flavus NRRL3357] gi|220697386|gb|EED53727.1| phytase [Aspergillus flavus NRRL3357]
  misc_feature (52)..(510): NCBI GI: 169773483 Blast Desc: [Aspergillus oryzae RIB40] gi|74623798|sp|Q9C1T1.1|PHYA_ASPOR RecName: Full=3-phytase A; AltName: Full=3 phytase A; AltName: 3-phosphohydrolase A; A;
  misc_feature (16)..(484): NCBI GI: 169599052 Blast Desc: SNOG_02340 [Phaeosphaeria nodorum SN15] gi|160704524|gb|EAT90552.2| SNOG_02340 [Phaeosphaeria nodorum SN15]
  misc_feature (52)..(510): NCBI GI: 92429461 Blast Desc: phytase [Aspergillus oryzae]
  misc_feature (52)..(510): NCBI GI: 124247974 Blast Desc: phytase [Aspergillus oryzae]
  misc_feature (47)..(510): SWISSPROT Homolog: EC 3.1.3.8 3-phytase
MALTEIRDRVSALIRRKQRYTALPENGSPEQLRRRSNVGAGSNRTLIRVVSVSLILAIASLGAISLMRRTAVQPRESCDTVDSGFQCVPNLSHSWGQYSPFYSVPSKIPNSIPEGCELTFAQVLSRHGARDPTESKSLTYAALIDRIHGNATGYGKEYDFIKRYNYTLGADQLTVFGQQQLVNSGMHFYKRYEKLAKTISPFVRSAGQQRVVDSAINWTQGFHEARLADDMAQSPDAYPYQPVILPEIDDFNNTLSPSTCPAFSEGPDDGKIPQQIWADTFTPPITERVNRNLPGVNLSNSDIINFMDLCPYETVANDEGRLSPFCGLFSEDEWHDYDYYQSLGKWYGHTNSSLGPTQGVGFINELIARLTGQPVVDSTSTNTTLDGSRSTFPLDGILYADFSHDNDMSGVFGGLGLYNTTPPLSNTTKASPKNTMGYSASWTVPFAGRMYVEKMLCGGDGEEELVRVLVNDRVIPLQNCDADELGRCTLDKYVQSLSFARAGGHWDLCFENEQRLLL

SEQ ID NO: 2952 - DNA, 6488 bp, Muscodor strobelii; identical to SEQ ID NO: 2949
  misc_feature: SGI EST ID NO. CUFF.7962.1
  misc_feature: Variant of the nucleotide sequence at SEQ ID NO 2950

SEQ ID NO: 2953 - DNA, 642 bp, Muscodor strobelii
  misc_feature: SGI cDNA ID NO. 560630
  misc_feature: Encodes the peptide sequence at SEQ ID NO 2954
atggaagatctcgtagagagggttgccaatgcaatgttggagagagatcgattgcaggagcaaatcgaagatgtcatcgagaggcagagcatatacgtcagcagccgtccctcgaccgctcatggacagcaagatatgagtcccatgccagctctgcctgccttgcctcccgatgccccctcgtttagcgagcggctgagttcagatcgccctcagaccgcaccagtgaaaccacctacgcagagcctttaccaggccaactcatcacggaaaatggaaggtcgggcacctccgccaccactaccactccggcttcgcccgcccctacgcaagaagaaatcgttctctcaagtgtcgacttggctgttcacggctggcagtgagcagcattcaaggaccatcagtctcacgaatacaccgaagccacttactaattctgatggcttttatcaagtagcaactaggcgctcaagcaccgacagcgacagcacaatctcggattggactgtggaggaacaaaccttgccgacgccactttctccccgcagcgccacgacgctgagagggacgatatccccagcttccggcacaagagagcatattcagatcccgcaacgaactagtgtcggtgtcgcgttttaa

SEQ ID NO: 2954 - protein, 213 aa, Muscodor strobelii
  misc_feature: SGI Peptide ID NO. 560630
  misc_feature (1)..(213): NCBI GI: 256720950 Blast Desc: NECHADRAFT_50080 [Nectria haematococca mpVI 77-13-4]
  misc_feature (1)..(213): NCBI GI: 46110166 Blast Desc: FG01965.1 [Gibberella zeae PH-1]
  misc_feature (1)..(213): NCBI GI: 261352425 Blast Desc: conserved [Verticillium albo-atrum VaMs.102]
  misc_feature (1)..(188): NCBI GI: 145603252 Blast Desc: MGG_06168 [Magnaporthe grisea 70-15] gi|145011521|gb|EDJ96177.1| MGG_06168 [Magnaporthe grisea 70-15]
  misc_feature (2)..(168): NCBI GI: 116194566 Blast Desc: CHGG_03881 [Chaetomium globosum CBS 148.51] gi|88179794|gb|EAQ87262.1| CHGG_03881 [Chaetomium globosum CBS 148.51]
  misc_feature (6)..(152): NCBI GI: 154302119 Blast Desc: [Botryotinia fuckeliana B05.10] gi|150855514|gb|EDN30706.1| [Botryotinia fuckeliana B05.10]
  misc_feature (2)..(75): NCBI GI: 164425157 Blast Desc: NCU06334 [Neurospora crassa OR74A] gi|157070813|gb|EAA33360.2| [Neurospora crassa OR74A]
  misc_feature (6)..(152): NCBI GI: 156062440 Blast Desc: [Sclerotinia sclerotiorum 1980] gi|154696672|gb|EDN96410.1| [Sclerotinia sclerotiorum 1980]
MEDLVERVANAMLERDRLQEQIEDVIERQSIYVSSRPSTAHGQQDMSPMPALPALPPDAPSFSERLSSDRPQTAPVKPPTQSLYQANSSRKMEGRAPPPPLPLRLRPPLRKKKSFSQVSTWLFTAGSEQHSRTISLTNTPKPLTNSDGFYQVATRRSSTDSDSTISDWTVEEQTLPTPLSPRSATTLRGTISPASGTREHIQIPQRTSVGVAF

SEQ ID NO: 2955 - DNA, 2336 bp, Muscodor strobelii
  misc_feature: SGI EST ID NO. CUFF.8075.0
  misc_feature: Variant of the nucleotide sequence at SEQ ID NO 2953
ttttcggccccctcaggtacagaagacacttccaagatcgactatcaaccacgcgtgctatccattcaacatcatcttgtcggggatgacgagagacatgctgctgcacgatccattccggaaggtcgtagctgctacagataccgaccatacccaaggcccacgagacacaccttccggcaagatttgtggcaagatgaccgcaaacctttcttcctgagccctcctagagggaaaccaagccaggaagtttaagacatcggactggtgaagattggctgttcatctaacagtggtggggtcctgcaatctggtgtggtgccgcagcccatcgttcttcaagaacaccccagcgtgtaagcgccgactggtccgtcgcctgagcaccacagcctatcaaattccggactggtgcatccaaaccatcgacgcttcccatcctcggccctcccattgtgaggcccaaagccatatccgctcagctgctgcgagcctaatgaacagaggtacgtttgcaatgtactctagatttccagctctcgtaataaaactgttttggtgccccgaaaatgagatggtcttccctacttgcttgttcgcccgtgatcatctgtccaaccgctggccgtcgtcccgtctcgctggctcgacatgcagtcaccatcatgaaagcactcaatgggattttgacttcgtggtcccattacatctcgcagtgctgccattccttctcacccgcctttggtgagaagcctctagatgagaatgctcacaattcattcactgtgatatacgatgagccatctctgatgccaccgctcagtgcgtcgccgtcaagatgtactcccattcctttcaaacaggagcaggctccgaagaaaagaagaggctctggctggagtagcttctcagcgagaaagcggctgttgccctccagcactgccttaccgcgcaggccgcagatttcagcaccttcgaactttcgccacgtctattccgaatctttccagtttcccgagcaagatgattcacaagccagcttacaacagctgaatttccgtcctcttcaacttaatatacatatgtcagataatcaactttcacctattttaccacatcttgactccgcaagcccccctgtgacgccgccgccacgagccttcactatctcaagtgctagtaacgacagcctgagaatttcacatcagcgaagctcttcatctatgtctttccatattcctcgacgaccattgaacggaggttcagtgttcgagtcacccatttcggagaatagcacgccaaggcgtccccagcctacaaggatacggggatatacttcgtcaacagtggcgccaagtcctattatggaagatctcgtagagagggttgccaatgcaatgttggagagagatcgattgcaggagcaaatcgaagatgtcatcgagaggcagagcatatacgtcagcagccgtccctcgaccgctcatggacagcaagatatgagtcccatgccagctctgcctgccttgcctcccgatgccccctcgtttagcgagcggctgagttcagatcgccctcagaccgcaccagtgaaaccacctacgcagagcctttaccaggccaactcatcacggaaaatggaaggtcgggcacctccgccaccactaccactccggcttcgcccgcccctacgcaagaagaaatcgttctctcaagtgtcgacttggctgttcacggctggcagtgagcagcattcaaggaccatcagtctcacgaatacaccgaagccacttactaattctgatggcttttatcaagtagcaactaggcgctcaagcaccgacagcgacagcacaatctcggattggactgtggaggaacaaaccttgccgacgccactttctccccgcagcgccacgacgctgagagggacgatatccccagcttccggcacaagagagcatattcagatcccgcaacgaactagtgtcggtgtcgcgttttaattcaattttgtagtatagcatttcttgataccaagtttttgtggataccccggatattatcttgcccttgggatcgggcaatgagaggaatagaggaaagaattttgggtgcataggcggacttctaattatgaatagagaaagcgcataccttgatatctcctgattgttcgagatgcctagtaattctgggcatacccgacacagtacgctggacacttcaaagctctgtgtgtgatgatacgcggctgttggcggtggaatgtgaatctatcatgacgtaaaaacgatttgtcgtcttcgcgaacctcgaatagaactctatatata

SEQ ID NO: 2956 - DNA, 1185 bp, Muscodor strobelii
  misc_feature: SGI cDNA ID NO. 560631
  misc_feature: Encodes the peptide sequence at SEQ ID NO 2957
atgcagaaccagaacgcaggtcccgccggccctgcaggcccgggcatccccatggtcatgggccccaacgggccaatgccgatgccgatgccaccaggcggaccgccgcccggcatgcccatgccctcgccccagcagatccagcagatgcaacagcagctggcggccgaagcccagagacagggtctgaccgtcccccaccaggtcagccaggccaaccaggtccgcaaggccagcaaggccagcctcaaaggtcctcaaggaggccccccgcgccccggcatgcctcagcaagcgcagcctcagcccatccgcccgggcccgccgaaccccgtcgccattgccctcgccaacttcctgcgcggccagcagctcaagccccgcacctgcatcatgaacggcgagcgcaaggacatgtttcgcgtcaagcgagccctccgcgccctcgagtcccccgcctacgccaaagcccgtgccaagaaccctgccctccccgagatcaaagaccgcgcctcgctcgaaaattgcttcaagctcctccccatgtctatgctcgccctgcgcgtcagcaaggtcgaccctcacgaaggccatgaccacggcggcaagaaaccaaagcgcacaaagggtctgtggaacgtcaaggtcgaaccccagcaggaggctgccgacgacatgtactacgtctggctgtacgagggaagccaagtcatgcgcaaggtctacgccgctcttgcactggtcgtcatcttcctcgtcgtcctctaccccctgtggcccctcgttctgcgacagggtgtctactatctcagctgggtcttcctaggagctcttggtctcttctttgccatggccatattccgcgtcattctcttcggtgtaacctggttcgtcgcagctcctggtctgtggctgttcccaaacttgtgggaagatgtttctgttgtagagagtttcaagcctgtctgggcttggcacgagtctgcgaagaataaaaagaagaagaagaagactggcgcaaccactatgaacgcagagtctgcggcccatttcgctggtgcaacgggtaacactggtccggcttccgcaaccacgactggaacggagacgcagatccagactgcgccccaacagagggctgcctacattgcgccgcaagtcgaggaactcggcgatgatgaatag

SEQ ID NO: 2957 - protein, 394 aa, Muscodor strobelii
  misc_feature: SGI Peptide ID NO. 560631
  misc_feature (134)..(340): Pfam Id: PF03839 Pfam Desc: Translocation protein Sec62
  misc_feature (41)..(394): NCBI GI: 261352426 Blast Desc: translocation protein SEC62 [Verticillium albo-atrum VaMs.102]
  misc_feature (34)..(394): NCBI GI: 171683297 Blast Desc: protein product [Podospora anserina] gi|170941608|emb|CAP67262.1| protein product [Podospora anserina]
  misc_feature (33)..(394): NCBI GI: 39975803 Blast Desc: MGG_06172 [Magnaporthe grisea 70-15] gi|145011518|gb|EDJ96174.1| MGG_06172 [Magnaporthe grisea 70-15]
  misc_feature (43)..(394): NCBI GI: 85108529 Blast Desc: NCU06333 [Neurospora crassa OR74A] gi|28924204|gb|EAA33359.1| conserved [Neurospora crassa OR74A]
  misc_feature (43)..(394): NCBI GI: 116194568 Blast Desc: CHGG_03882 [Chaetomium globosum CBS 148.51] gi|88179795|gb|EAQ87263.1| CHGG_03882 [Chaetomium globosum CBS 148.51]
  misc_feature (39)..(394): NCBI GI: 256726877 Blast Desc: [Nectria haematococca mpVI 77-13-4]
  misc_feature (35)..(393): NCBI GI: 46123599 Blast Desc: FG06177.1 [Gibberella zeae PH-1]
  misc_feature (42)..(394): NCBI GI: 154302133 Blast Desc: BC1G_09747 [Botryotinia fuckeliana B05.10] gi|150855521|gb|EDN30713.1| BC1G_09747 [Botryotinia fuckeliana B05.10]
  misc_feature (42)..(394): NCBI GI: 156062430 Blast Desc: SS1G_01331 [Sclerotinia sclerotiorum 1980] gi|154696667|gb|EDN96405.1| SS1G_01331 [Sclerotinia sclerotiorum 1980]
  misc_feature (26)..(331): NCBI GI: 189197923 Blast Desc: translocation protein SEC62 [Pyrenophora tritici-repentis Pt-1C-BFP] gi|187981247|gb|EDU47873.1| translocation protein SEC62 [Pyrenophora tritici-repentis
MQNQNAGPAGPAGPGIPMVMGPNGPMPMPMPPGGPPPGMPMPSPQQIQQMQQQLAAEAQRQGLTVPHQVSQANQVRKASKASLKGPQGGPPRPGMPQQAQPQPIRPGPPNPVAIALANFLRGQQLKPRTCIMNGERKDMFRVKRALRALESPAYAKARAKNPALPEIKDRASLENCFKLLPMSMLALRVSKVDPHEGHDHGGKKPKRTKGLWNVKVEPQQEAADDMYYVWLYEGSQVMRKVYAALALVVIFLVVLYPLWPLVLRQGVYYLSWVFLGALGLFFAMAIFRVILFGVTWFVAAPGLWLFPNLWEDVSVVESFKPVWAWHESAKNKKKKKKTGATTMNAESAAHFAGATGNTGPASATTTGTETQIQTAPQQRAAYIAPQVEELGDDE

SEQ ID NO: 2958 - DNA, 5188 bp, Muscodor strobelii
  misc_feature: SGI EST ID NO. CUFF.8210.0
  misc_feature: Variant of the nucleotide sequence at SEQ ID NO 2956
gttgtgcctggcttactcgcgggttaaaaggcttggcgtcgagaatgacagcctgttcaactctattttctgacgaatgtaaaggtgtgttctctcgacacacactgacatggtagagggccaccactttgaacgtcaagctcgcctgaatcgcctggcttgcctcttgccttgatcatcactgcgcactacgccagcaatattttcacaactcctgcgccgctcgtgctgtagcccgtcgcctttgcccaccactgctgccgtccccattttcgaggtacttcgacgtctatttagttctacgtctacgcctacgtccgtgtccgttctcgcctgcgcttctctccggctcagctgcctgcctctctgcatcggcgccagcaatgcagaaccagaacgcaggtcccgccggccctgcaggcccgggcatccccatggtcatgggccccaacgggccaatgccgatgccgatgccaccaggcggaccgccgcccggcatgcccatgccctcgccccagcagatccagcagatgcaacagcagctggcggccgaagcccagagacagggtctgaccgtcccccagtttgtcgagaaactcaaaggcccagcgcatggcccagatccagcagatgcagcagcagcagagacagcagggtggtcagccaggtcagccaggccaaccaggtccgcaaggccagcaaggccagcctcaaaggtcctcaaggaggccccccgcgccccggcatgcctcagcaagcgcagcctcagcccatccgcccgggcccgccgaaccccgtcgccattgccctcgccaacttcctgcgcggccagcagctcaagccccgcacctgcatcatgaacggcgagcgcaaggacatgtttcgcgtcaagcgagccctccgcgccctcgagtcccccgcctacgccaaagcccgtgccaagaaccctgccctccccgagatcaaagaccgcgcctcgctcgaaaattgcttcaagctcctccccatgtctatgctcgccctgcgcgtcagcaaggtcgaccctcacgaaggccatgaccacggcggcaagaaaccaaagcgcacaaagggtctgtggaacgtcaaggtcgaaccccagcaggaggctgccgacgacatgtactacgtctggctgtacgagggaagccaagtcatgcgcaaggtctacgccgctcttgcactggtcgtcatcttcctcgtcgtcctctaccccctgtggcccctcgttctgcgacagggtgtctactatctcagctgggtcttcctaggagctcttggtctcttctttgccatggccatattccgcgtcattctcttcggtgtaacctggttcgtcgcagctcctggtctgtggctgttcccaaacttgtgggaagatgtttctgttgtagagagtttcaagcctgtctgggcttggcacgagtctgcgaagaataaaaagaagaagaagaagactggcgcaaccactatgaacgcagagtctgcggcccatttcgctggtgcaacgggtaacactggtccggcttccgcaaccacgactggaacggagacgcagatccagactgcgccccaacagagggctgcctacattgcgccgcaagtcgaggaactcggcgatgatgaatagagatactgtccatagtagttaaaaaagaacacaagccgggctcattacgtgttagattggtattaatgtaacacatacatacttatcaaaatggaatgtacatgtgatataaatagcgccctgattcttgccaagaaggtatcaagtatacgtcctgtcatggaggtatttctcgatgggaccaggatatgtatcactacttgtacttaagaatgtaatactgcagagaagggtccctaggtcgtcagcaacaagacatgatctattcatccatattacgaaccctagataatacacaagataccgatatcatatttcacatgcacatccaaagtagagaacgcctatacgaaagccatcattgcaacattgcgctcgaatccaagtcatcattcattgagtacgtgacggtttgtccaagtacccccaaatcatcagtattatggtacacggtacaattctaataatcacgacagcaatccctccaccagcactccaaggcaattccgtcggttctattttatcgcatattttcaatcatgctattccgatttcttggtatatcaataattacatcttcgttgtccgaggaggaccaattatattctcgctgatgttcactaggaagatcggagtcggaggggacagaattaggcattccaaaatgtgagatcttgtttgaataatcatgcggcaagtcctggcttgtcgagaggctcgctgaaggttgaaatacagctgcgtcaaaaacatttgcaaggccgggtagctgggtaaggccgtagcctgactcggagaacaagagatccttttcatatgaggacctaggggcggacgacgtagggcttgaagactcctcagacaagacaaaatcatctagacccatgtctcttaacggcggatcgagatgagttggagttgaggttgaagatttcatggacgagaaggcactgcttggttgagctatagtaaaacgagaggaatccaccatccgaatgtccggcacgggtgggatcaaatcgtcatatttcccgaatgaaagcatcgatgtgttggcggtatgattcgactgtgggcgaaagggatttgaacttaaggttgacattgccgacgtgagagaccagtgcctgagactactggttcgttctggtatcgagttttccacgtcgcgaagagaaatgcttttatccgaaacagtaagaacgcttcgctgtcgcgtatggtttgaaatcatttctatacgagagagaaaaagttagcacaaagcccaaaacggttcaaaggcaaatcgcaacagtggaaagcactgacgtgattggcggtcaggtgactgtgctggcgaattataagaagagtcctggaggtcggtggtacttcccagttggggtttcgataatgatcttaaggattgtccctctcgaaagaattccgaaccatggagcgaagttctcctctcgaaagtatcctcgtagatttcaccgcgatttgcttttcggatggtctggagactttgtctttttgctggtgatcttgaatgtttggtcggaggtagtgtagaatgagctctatgcctcgggcgaaattccgtagacccagatcgatctggcaatgtctgctcagagtcattgcgggaatggcggggccattgatccacgtgagagtaggccaaggactgcctcttatgggaagaatttggctttgcgtgttcacgatcatgcgaagcgactatttgagcacgtgttcggagagagtccgggaaggactcggtatccttttctttgccctttttggccgtcgaagaactccttgatgtatcaccagcagtggtcataatataactgggcaacgatttgcgtcgacgcgccctctcagacctggccgaggcggtccggctcataggtttttcgttctcatccctatacgtggattgctctggcggaaagcgagatgatattcttttagggtaagaatccgaaggtgaggctatagcgtacttggatctgagaccagatccaacggaaagacgaccccttgggcgtcgcgatgacgtcgcttctgaatcatcgtcgatgtccttcgagatagcaggcactgatctcactgagccgtattcgggcttagtgtcctgtctgggctgcggatggccattgttttcttccatatttctatcagctacatcctcgccatagttcctagcgccagttgcttggacgcggctgtgaaaatccagaggcttaaacatagactgcgcatccagtaagtcgacgtgagctctagttttgttagattcaccactgcgaacagaaccagtatagcccgacacgagtccgggcgaagggagaggtttcgattgtacagatgcagcatgaatatcagttgctacctttggcggaagccggtatggtccatactttttcttcgaagcatcggacacgatgcttggggttgctcttgatgcatctggtcgggttgatggagcggtactcgggcgctcaacaacattatacggcgagcttgagggtataggaggaggcgtatgatatcgaggagcccctaaatgtggatgtagtctctgaaattgctgtagaacatggcttccatttccagctacagggaatgttccgcgaattggtgggttcgacggcaccgttgcatcgtatgctgatactatgagcgtgtcgggtccaatccggtccgtctgaggttttttagagaggaaatcgaataaccccatgtcgctatcatgtggttggcccccccggcgaagttcgactgttcagcaaagtacaagctacctatgtatctctagactgaggtttcttctgagttggctcttccaattaaatcgtcaatggccacaacttccgtgcggcatgattttgaacaattagacggttgatgttgagtatgattgcaagaatgcccaagtactgcactcgaaagataaggttttgcgtttgtcaccagtggtctgtatggaagaaaacggagcgaatcttgagaacctgaaaaaggtgtagggaggcaataaggcggaaaaagtaataaactgagggctgagcaacctgcgtgtgcaagatatctaggtattgacgacgcggtttctcatatgtgatgacacaacgaacagaggagcaggagaccgaggcttaagagatgaagaattctaaccaaaaaagggagctggcgatgagagtgagaagagagtcgatgatatcggtattagcggagatcactcagaagccagacaatcagatcatatcagatcagacctgagcaggctggatcgttggaggatcatgggattatgaggatggcgtcgaaaatgatgctgaaaaggaacagcatcatcattcttgggggacgcagaaacccggctctctggtgagcgtgtcaatggaatccacacgtccccaatctactgtaaagtctccacgctgcctcccgcaaagacagactttcgcacgggcagaatcggtcatgggccgagatggaagaggatcctgtaggaggaacccagaggcgcgtaccctacctagg

SEQ ID NO: 2959 - DNA, 900 bp, Muscodor strobelii
  misc_feature: SGI cDNA ID NO. 560632
  misc_feature: Encodes the peptide sequence at SEQ ID NO 2960
atgtacagcacgtttgatggtaatagcttatctcgggaacagcttcgagccaaagctgaagctgcagcatatgttgaccagctcgatggctccggaggccgatcccccaagccagattccgccccttgcgcctgggcgggagatacacatgaaggagaaaacgatgacctgtcccatccgccgaaggagcagaaaactcctcgccctcaaaagtcatggacaagtttttggcaagtgaacaaacgtaatgatccccaagatggtatcggtggggctggcagtgaagcacaagcagtccaagcccaaggaggaattcatcttccgaagaaatcagttccagggctcccggacattgtaattccagttcccgagatcccaccaattgatgcccctgaccttccagttggcgatgatggcgatgggcagaagaagcaccacgatcacagtgatcgccacgagaagcatcatgagaagcaccagcaccatgagaagcatcaccctgatcacaatcatgaagagcctgctcctgtgcctttggcacctgtcgaagcccagcctccttcgccatggcaagacaccttcgatcatgtcaacaaaagtgtcaagcagggattaggtgccgttgctacgattctcacgccttctcctcgcaatcgatctccagcaccggaggatgttgtcgtaccagttccgctggacgaacgggcagccaaacgacaaaagtgcaaagagaggctcgaggccagacgactgagacacgaggaaagacacgaggctaggcgacagaaaaaacaagtgaagagcgcagaaagagagcgcagacgccaagagaagaccgaagcacgtgagcaaaagcgaaaggatcgtctcgagaagaagcaacaagccgagcagtcctaa

SEQ ID NO: 2960 - protein, 299 aa, Muscodor strobelii
  misc_feature: SGI Peptide ID NO. 560632
MYSTFDGNSLSREQLRAKAEAAAYVDQLDGSGGRSPKPDSAPCAWAGDTHEGENDDLSHPPKEQKTPRPQKSWTSFWQVNKRNDPQDGIGGAGSEAQAVQAQGGIHLPKKSVPGLPDIVIPVPEIPPIDAPDLPVGDDGDGQKKHHDHSDRHEKHHEKHQHHEKHHPDHNHEEPAPVPLAPVEAQPPSPWQDTFDHVNKSVKQGLGAVATILTPSPRNRSPAPEDVVVPVPLDERAAKRQKCKERLEARRLRHEERHEARRQKKQVKSAERERRRQEKTEAREQKRKDRLEKKQQAEQS

SEQ ID NO: 2961 - DNA, 747 bp, Muscodor strobelii
  misc_feature: SGI cDNA ID NO. 560633
  misc_feature: Encodes the peptide sequence at SEQ ID NO 2962
atgtccagcaccagccccgacccgggcgttggctcggcggccttcatcccgcttgaagccaacccggagatcatgacctcgctcctgcaccggctgggcctgagctccgccctgtccatccacgacgtctactccatcaccgagcccgacctcctcgccttcatcccgcgccctgccctggccctgctgctcgtctttcccgtgagcgcgacctacgagtccgcccgcctggccgaggatgccgccgtccccgagtacaccggcaagggcgacggcgagcccgtcctctggtggaagcagaccatccgcaacgcctgcggtctcatgggcctgctgcacgccgttgccaacgggcccgccaagagcttcatagaacccaacaccaccctgcaggccctgattgagaaatccatacctttaccgccaaacgagcgctctgccctcctagagaagacgcctgatctcgccactgcccaccacgacgccgcaagcaagggccagacggtcgcgccggacgctcaggacgacgtggacctacactacgtgtgcttcgtcaagacagaagaggacggtaccctgtgggagctcgatggccgtcgcaagggtcccatagcccgcggcaagctcgacgccaacgaggacgtcctgagcgaaaaggctcttctttggggccccttgaagttcctcgagcgtggcggaaacgatatgcgcttctcatgtgtcgccctagccggatccctcgagtga

SEQ ID NO: 2962 - protein, 248 aa, Muscodor strobelii
  misc_feature: SGI Peptide ID NO. 560633
  misc_feature (14)..(232): Pfam Id: PF01088 Pfam Desc: Ubiquitin carboxyl-terminal hydrolase, family 1
  misc_feature (1)..(248): NCBI GI: 261359774 Blast Desc: ubiquitin carboxyl-terminal hydrolase [Verticillium albo-atrum VaMs.102]
  misc_feature (3)..(245): NCBI GI: 46132996 Blast Desc: FG09027.1 [Gibberella zeae PH-1]
  misc_feature (2)..(245): NCBI GI: 256727890 Blast Desc: NECHADRAFT_70875 [Nectria haematococca mpVI 77-13-4]
  misc_feature (1)..(248): NCBI GI: 85107582 Blast Desc: NCU06372 [Neurospora crassa OR74A] gi|28924011|gb|EAA33170.1| NCU06372 [Neurospora crassa OR74A]
  misc_feature (5)..(248): NCBI GI: 39952081 Blast Desc: MGG_01683 [Magnaporthe grisea 70-15] gi|145020476|gb|EDK04605.1| MGG_01683 [Magnaporthe grisea 70-15]
  misc_feature (5)..(248): NCBI GI: 116196276 Blast Desc: CHGG_04736 [Chaetomium globosum CBS 148.51] gi|88180649|gb|EAQ88117.1| CHGG_04736 [Chaetomium globosum CBS 148.51]
  misc_feature (5)..(248): NCBI GI: 154301584 Blast Desc: BC1G_10119 [Botryotinia fuckeliana B05.10] gi|150855781|gb|EDN30973.1| BC1G_10119 [Botryotinia fuckeliana B05.10]
  misc_feature (4)..(244): NCBI GI: 171690330 Blast Desc: protein product [Podospora anserina] gi|170945113|emb|CAP71224.1| protein product [Podospora anserina]
  misc_feature (12)..(248): NCBI GI: 115400671 Blast Desc: conserved [Aspergillus terreus NIH2624] gi|114191590|gb|EAU33290.1| conserved [Aspergillus terreus NIH2624]
  misc_feature (17)..(248): NCBI GI: 156032716 Blast Desc: SS1G_13763 [Sclerotinia sclerotiorum 1980] gi|154699166|gb|EDN98904.1| SS1G_13763 [Sclerotinia sclerotiorum 1980]
  misc_feature (15)..(246): SWISSPROT Homolog: EC 3.4.19.12 Ubiquitinyl hydrolase 1
MSSTSPDPGVGSAAFIPLEANPEIMTSLLHRLGLSSALSIHDVYSITEPDLLAFIPRPALALLLVFPVSATYESARLAEDAAVPEYTGKGDGEPVLWWKQTIRNACGLMGLLHAVANGPAKSFIEPNTTLQALIEKSIPLPPNERSALLEKTPDLATAHHDAASKGQTVAPDAQDDVDLHYVCFVKTEEDGTLWELDGRRKGPIARGKLDANEDVLSEKALLWGPLKFLERGGNDMRFSCVALAGSLE

SEQ ID NO: 2963 - DNA, 1657 bp, Muscodor strobelii
  misc_feature: SGI EST ID NO. CUFF.7351.0
  misc_feature: Variant of the nucleotide sequence at SEQ ID NO 2961
gacaatggcaaggcttagagttggctaccaggacgcaaactccgtagcggggactagtggtacgtcattgcgcgtggaggggcaacaccttaataggcaccttacagtaggtaccttaaacatgcacctggaaacgggtggatagcttcacgtatcgtcgcagcctagcaatgcctctctcccccttcagccgatccatccagcatcagctcacactacgggaccacaagccgctctgagaacgtctctgcaatacctcgacacctcccccgatcacgaccaagtcggacagaccaaacaacgaatatgtccagcaccagccccgacccgggcgttggctcggcggccttcatcccgcttgaagccaacccggagatcatgacctcgctcctgcaccggctgggcctgagctccgccctgtccatccacgacgtctactccatcaccgagcccgacctcctcgccttcatcccgcgccctgccctggccctgctgctcgtctttcccgtgagcgcgacctacgagtccgcccgcctggccgaggatgccgccgtccccgagtacaccggcaagggcgacggcgagcccgtcctctggtggaagcagaccatccgcaacgcctgcggtctcatgggcctgctgcacgccgttgccaacgggcccgccaagagcttcatagaacccaacaccaccctgcaggccctgattgagaaatccatacctttaccgccaaacgagcgctctgccctcctagagaagacgcctgatctcgccactgcccaccacgacgccgcaagcaagggccagacggtcgcgccggacgctcaggacgacgtggacctacactacgtgtgcttcgtcaagacagaagaggacggtaccctgtgggagctcgatggccgtcgcaagggtcccatagcccgcggcaagctcgacgccaacgaggacgtcctgagcgaaaaggctcttctttggggccccttgaagttcctcgagcgtggcggaaacgatatgcgcttctcatgtgtcgccctagccggatccctcgagtgagatagagagtacgggctagctagcgcctagtaaaacagcgcgagtatcgcctttccaacgaagatatcaaaccccactggtgtggctcggtgtcattcgcatttatggcgataatcaatcaaagattgatggcggagttagatgcgccgacttacctagagccactcattcgatcccaaatttatgatggtgcggccgtgcgcatgtacctccatgttagccctggcatctctgatctcttaggccacggacaaaatacctacctaagataacacagcatgtgagcattgcgtccatgtgtactaatctcccgcttacgtagtagaggtctgccatgtatagtctcaaggctagatttcacacgtgctctgctggtgatccgagaatcatgtaagatattaattcgaactacagtcagagagttctgtgcttggttagaggttacgttgcgaatctcatagtagagaggtatcgacgatatctagacttcgggttgcgcgaggagaatcccaatgaagctcatatctccactttgtattgtgataagttttaattcaatgtctactaatagtggcttgcaatttccaataagtgtctcctcttg

SEQ ID NO: 2964 - DNA, 960 bp, Muscodor strobelii
  misc_feature: SGI cDNA ID NO. 560634
  misc_feature: Encodes the peptide sequence at SEQ ID NO 2965
atggcgctagactttagcaaaccactggagcttccatacttcgctgccactccattaacccttcctacacatgaagctatcatctccacgactaagaatcttacatcatggaaagggtacagagtcgtatgcatcaatgataagttcattgctaagttcggtgacattacacccctagaaggcgagaacatgctctttgtacagcaaaataccactattcctgttcccaaagtgtacgcgatctacacctatgatatggacaagactatgatcattatggagaaaattgtaggcatacctctttcagacatattatgggatgagaaaccgaatgcaatgttggagtcaatctcgtgtcagttgagacaacagcttaatcagctacggtcgattccttccccagggtactacggtgctatcggtggccggcctttcccggaagcaaaaggcgaagaaggcaacgaagtccgtttcgttcaaggaccttatacagacgtggtcgacctcatcagacattgctttgacgatgaatttccaccaccttcccaaacacgccaaattattaaggtgaaaaatagatatgtgaagaaactcatgaaagcatcatctgccttcgaacgacctgttttttcacacatggacctccatgccggtaacatcctaatcaggacggacggaacgccagtcctgatcgattacgaattcgcaggtttttatcctccttactgggagtacctgcaatcatactatatagacgacaaggtccccttcctcgataaattccttgagatcatggacattgacgatgcagtatggtatgaagttcagaaggctcaggattggcaaaatccagaagctttgaagtcttcctatgatgaaaacattcgcaacagaaagcggcacgcaacacaccgacctttgaaatggttggcaataatgaagcgaaggtgctttaagtag

SEQ ID NO: 2965 - protein, 319 aa, Muscodor strobelii
  misc_feature: SGI Peptide ID NO. 560634
  misc_feature (195)..(244): Pfam Id: PF01633 Pfam Desc: Choline/ethanolamine kinase
  misc_feature (9)..(253): NCBI GI: 261354367 Blast Desc: phosphotransferase enzyme family protein [Verticillium albo-atrum VaMs.102]
  misc_feature (9)..(282): NCBI GI: 261201950 Blast Desc: phosphotransferase enzyme family protein [Ajellomyces dermatitidis SLH14081] gi|239590286|gb|EEQ72867.1| phosphotransferase enzyme family protein [Ajellomyces SLH14081]
  misc_feature (9)..(282): NCBI GI: 154287554 Blast Desc: conserved [Ajellomyces capsulatus NAm1] gi|150408213|gb|EDN03754.1| conserved [Ajellomyces capsulatus NAm1]
  misc_feature (8)..(268): NCBI GI: 238844848 Blast Desc: phosphotransferase family protein [Microsporum canis CBS 113480]
  misc_feature (5)..(245): NCBI GI: 119195733 Blast Desc: CIMG_02241 [Coccidioides immitis RS]
  misc_feature (9)..(282): NCBI GI: 239611998 Blast Desc: phosphotransferase enzyme family protein [Ajellomyces dermatitidis ER-3]
  misc_feature (41)..(282): NCBI GI: 46114728 Blast Desc: FG03206.1 [Gibberella zeae PH-1]
  misc_feature (11)..(248): NCBI GI: 116198711 Blast Desc: CHGG_07511 [Chaetomium globosum CBS 148.51] gi|88178790|gb|EAQ86258.1| CHGG_07511 [Chaetomium globosum CBS 148.51]
  misc_feature (9)..(281): NCBI GI: 225561814 Blast Desc: phosphotransferase enzyme family protein [Ajellomyces capsulatus G186AR]
  misc_feature (8)..(249): NCBI GI: 240279364 Blast Desc: phosphotransferase enzyme family protein [Ajellomyces capsulatus H143]
MALDFSKPLELPYFAATPLTLPTHEAIISTTKNLTSWKGYRVVCINDKFIAKFGDITPLEGENMLFVQQNTTIPVPKVYAIYTYDMDKTMIIMEKIVGIPLSDILWDEKPNAMLESISCQLRQQLNQLRSIPSPGYYGAIGGRPFPEAKGEEGNEVRFVQGPYTDVVDLIRHCFDDEFPPPSQTRQIIKVKNRYVKKLMKASSAFERPVFSHMDLHAGNILIRTDGTPVLIDYEFAGFYPPYWEYLQSYYIDDKVPFLDKFLEIMDIDDAVWYEVQKAQDWQNPEALKSSYDENIRNRKRHATHRPLKWLAIMKRRCFK

SEQ ID NO: 2966 - DNA, 411 bp, Muscodor strobelii
  misc_feature: SGI EST ID NO. CUFF.7314.0
  misc_feature: Variant of the nucleotide sequence at SEQ ID NO 2964
tggagcttccatacttcgctgccactccattaacccttcctacacatgaagctatcatctccacgactaagaatcttacatcatggaaagggtacagagtcgtatgcatcaatgataagttcattgctaagttcggtgacattacacccctagaaggcgagaacatgctctttgtacagcaaaataccactattcctgttcccaaagtgtacgcgatctacacctatgatatggacaagactatgatcattatggagaaaattgtaggcatacctctttcagacatattatgggatgagaaaccgaatgcaatgttggagtcaatctcgtgtcagttgagacaacagcttaatcagctacggtcgattccttccccagggtactacggtgctatcggtggccggcctttcc

SEQ ID NO: 2967 - DNA, 1782 bp, Muscodor strobelii
  misc_feature: SGI cDNA ID NO. 560635
  misc_feature: Encodes the peptide sequence at SEQ ID NO 2968
atggagtttcgatatgttgagaatggtatcgcagacgatatccccaccaatatctgcttaggcatacgccacaagctcggcttctctgcacaggaaattgttttaacgcgtgcgcttgacggtgagaagtgttccaaggcccgcgggcgcgattcgggctgccccaggtgctgcgctggcgtgcgcaagccagcgtctagcccaaacgcgggcgatgcaactcaatgtgatgaattccctttcaaatctactattgaaggtggtgctggtgcctggatccgttgcgtcacaaattggcagaacacgctccagggcacgtacatcaactcatggtttgtagataatggcgtcggtgaagacgaccagtttatagttcgtgtggtcaaccttgactgcaccaccgtgaaatcgacagaccttcagagttgcaacggcgccatactgcgtatgcgcgatgataatcaagaggaacttgggtctggcgtagagacgaggattcacaaaacacttgacaatcgcacgaacgtcgtggtggcacctctaggagaccttgaggttggcgggtttcaggcaacggcccatgtggtcagtgggaatcttaagaacctcgccctcattgatagcgatggggaggaaattttaccactagacaatattgagactctgtacagtacagatggactaattatgaactgggttctggacgactatttgggtggcattgggttgataggagagacagagacgacgagtgtcaacttcacttggaaactcgccaattccacgagctcgccgagtgacgatggcgtgaaaggaacgttttcaatccctttgggtctctcattcgccattttggtaatattgccagtaaacattatgggccgcatattcatcagtggctcaaccgatggcctgggtctacgtgcagcccaacagctcgccgcaagaggccacacagtctacctacacgcacggaatgcccagcgagccaaagacgccaccgacgcttgccctgccgctgcggacgtcctaatagctgatcttacctcgctagaggagacgaaggctttggcatcttctctatccaaactcggaccgctagactgcatcatacataacgctggtctttaccttggaccctatcgcaggcaagcagagggttatccttccgtctttgcagtcaacgtttttgcgccttacatcctgacatgtcttgccccgttgcccaagcgcacagtctacatcagttccagcatgcaccggagcgggacggcaagtcttgatgacttcggatggcgggagcgcgaaaaagccggccgcttcagccagacaagcgcgtattcagatacgaagctgcatagcgctatatttggctacgcattcgctagactctttggtcgccgaggggttgtatctcacacagtagatcctggatgggtaccaacgaagatgggcggtcgtggtgcacccgatgatatcgaggagagccaacgactgtacttgatgctcgccgaaggcagcggcgaagctgaggagaagaacgggtgttactgggagaatggaaagagagctccagtggaaccgaaaagtgaggcacgtgatgaaaaggcacaggatgcgttgttgaggagcttgaggatatcactggcgtatcgcttccttcgtagagctctggagtattttttgtatcaattaacctcaagtcaaagctcgctcccttttccatctactgtcatcttcacatccgggaccaatcttagagatactcatacttcattctaa

SEQ ID NO: 2968 - protein, 593 aa, Muscodor strobelii
  misc_feature: SGI Peptide ID NO. 560635
  misc_feature (294)..(439): Pfam Id: PF00106 Pfam Desc: short chain dehydrogenase
  misc_feature (294)..(375): Pfam Id: PF00106 Pfam Desc: short chain dehydrogenase
  misc_feature (293)..(544): NCBI GI: 169609072 Blast Desc: SNOG_07621 [Phaeosphaeria nodorum SN15] gi|111063967|gb|EAT85087.1| SNOG_07621 [Phaeosphaeria nodorum SN15]
  misc_feature (293)..(544): NCBI GI: 70981766 Blast Desc: short chain dehydrogenase [Aspergillus fumigatus Af293] gi|66844034|gb|EAL84374.1| short chain dehydrogenase, [Aspergillus fumigatus Af293]
  misc_feature (293)..(544): NCBI GI: 119497775 Blast Desc: short chain dehydrogenase/reductase family oxidoreductase, [Neosartorya fischeri NRRL 181] gi|119413809|gb|EAW23748.1| short chain dehydrogenase/reductase
  misc_feature (293)..(544): NCBI GI: 145259369 Blast Desc: An04g09920 [Aspergillus niger] gi|134074971|emb|CAK39051.1| protein product [Aspergillus niger]
  misc_feature (293)..(544): NCBI GI: 159121980 Blast Desc: short chain dehydrogenase, [Aspergillus fumigatus A1163]
  misc_feature (293)..(544): NCBI GI: 256725545 Blast Desc: NECHADRAFT_55695 [Nectria haematococca mpVI 77-13-4]
  misc_feature (293)..(544): NCBI GI: 121712275 Blast Desc: short chain dehydrogenase, [Aspergillus clavatus NRRL 1] gi|119401901|gb|EAW12323.1| short chain dehydrogenase, [Aspergillus clavatus NRRL 1]
  misc_feature (293)..(544): NCBI GI: 119501683 Blast Desc: short chain dehydrogenase, [Neosartorya fischeri NRRL 181] gi|119415764|gb|EAW25701.1| short chain dehydrogenase, [Neosartorya fischeri NRRL 181]
  misc_feature (293)..(521): NCBI GI: 189200200 Blast Desc: daunorubicin C-13 ketoreductase [Pyrenophora tritici-repentis Pt-1C-BFP] gi|187983536|gb|EDU49024.1| daunorubicin C-13 ketoreductase [Pyrenophora tritici-repentis
  misc_feature (293)..(544): NCBI GI: 255955069 Blast Desc: Pc21g12600 [Penicillium chrysogenum Wisconsin 54-1255] gi|211589998|emb|CAP96157.1| Pc21g12600 [Penicillium chrysogenum Wisconsin 54-1255]
MEFRYVENGIADDIPTNICLGIRHKLGFSAQEIVLTRALDGEKCSKARGRDSGCPRCCAGVRKPASSPNAGDATQCDEFPFKSTIEGGAGAWIRCVTNWQNTLQGTYINSWFVDNGVGEDDQFIVRVVNLDCTTVKSTDLQSCNGAILRMRDDNQEELGSGVETRIHKTLDNRTNVVVAPLGDLEVGGFQATAHVVSGNLKNLALIDSDGEEILPLDNIETLYSTDGLIMNWVLDDYLGGIGLIGETETTSVNFTWKLANSTSSPSDDGVKGTFSIPLGLSFAILVILPVNIMGRIFISGSTDGLGLRAAQQLAARGHTVYLHARNAQRAKDATDACPAAADVLIADLTSLEETKALASSLSKLGPLDCIIHNAGLYLGPYRRQAEGYPSVFAVNVFAPYILTCLAPLPKRTVYISSSMHRSGTASLDDFGWREREKAGRFSQTSAYSDTKLHSAIFGYAFARLFGRRGVVSHTVDPGWVPTKMGGRGAPDDIEESQRLYLMLAEGSGEAEEKNGCYWENGKRAPVEPKSEARDEKAQDALLRSLRISLAYRFLRRALEYFLYQLTSSQSSLPFPSTVIFTSGTNLRDTHTSF

SEQ ID NO: 2969 - DNA, 1395 bp, Muscodor strobelii
  misc_feature: SGI EST ID NO. CUFF.7326.0
  misc_feature: Variant of the nucleotide sequence at SEQ ID NO 2967
actgctgtccaaagacagcacagacgtgcggcggtagcttctgctacgaagctggcgcggtatgctgcaacggaggtgctactgcgtgtaaagccggagactcatgttgtggaacaaattgttgcaggcccggcagaacgtgctgtaataacggcgagagctgctgcaccgatgaggaaacttgctgtccggggggctgctgtccagctggatatacgtgtagtaccgagcccgggaagtgcgagcgtatacgaactacggaacagactaagacacaaaccacaacaaagacacaaagtagcaagtcgacgacaacgaagtcgctgacaacgaccaagccacccaaaccaactacgactaaactatcgacaaccaagactgaaagcaaaaccaccacgggatgtaagactgcgacgggaatatctctgcctacctcaacatcactccccgttatggagtttcgatatgttgagaatggtatcgcagacgatatccccaccaatatctgcttaggcatacgccacaagctcggcttctctgcacaggaaattgttttaacgcgtgcgcttgacggtgagaagtgttccaaggcccgcgggcgcgattcgggctgccccaggtgctgcgctggcgtgcgcaagccagcgtctagcccaaacgcgggcgatgcaactcaatgtgatgaattccctttcaaatctactattgaaggtggtgctggtgcctggatccgttgcgtcacaaattggcagaacacgctccagggcacgtacatcaactcatggtttgtagataatggcgtcggtgaagacgaccagtttatagttcgtgtggtcaaccttgactgcaccaccgtgaaatcgacagaccttcagagttgcaacggcgccatactgcgtatgcgcgatgataatcaagaggaacttgggtctggcgtagagacgaggattcacaaaacacttgacaatcgcacgaacgtcgtggtggcacctctaggagaccttgaggttggcgggtttcaggcaacggcccatgtggtcagtgggaatcttaagaacctcgccctcattgatagcgatggggaggaaattttaccactagacaatattgagactctgtacagtacagatggactaattatgaactgggttctggacgactatttgggtggcattgggttgataggagagacagagacgacgagtgtcaacttcacttggaaactcgccaattccacgagctcgccgagtgacgatggcgtgaaaggaacgttttcaatccctttgggtctctcattcgccattttggtaatatgtatgaaccttttatagtttctatagggatatagagagcgaggaagtctgcagtcaatcctaacctgtatcaggactcgtc
